United States Patent Application Publication US 2016/0230186 A1 - sequence listing, part 6

SEQ ID NO: 7451 - DNA, 1486 bp, Diabrotica virgifera
  SmartBlast Evalue=1E-170; Info=Mannose-1-phosphate guanyltransferase n=3 Tax=Culicidae RepID=B0WTT1_CULQU
aaggctacgtgtcgataaagataaaatgtaaataaggttttacttattcactacaattgtacaatttaaatttgagagtgttccaagaaaatgctaaaagccgtaattttaattggagggccacaaaaaggaacaaggtttaggcctctttcgctagatataccaaaacctctttttccagtagctggtttgccattaattcaacatcacattgaagcatgcagtgccatagaaggggtaaaagaaattcttataattggattttaccccatatcccaaatccaaccatttgcaacagaaatgcaacatttgtacaacataacagtcaagtacctccaagagtatgtggcattgggtacagctggtggcttgtaccattttagagatccaattagatttggaaatccagaggcattttttgtaatgaatggtgatgtatgttctgattttcccttagctgagctttaccaatttcacaaagaaacatgggagaaatctggcaaaaaagcattagttacaataatgggaacagaagcaactagacatcagtccctaaactatggatgcatagttacaaataaagagactttggaagtgactcactatgttgaaaaacccagttcatatgtgtcaacattgataaattgtggagtatatgtattttctcctgaaatattccacacaataggcgcagttagtatgaaactccaagagcagtacagcaaaaacggaaacggaaatggtaacagagaagccgggtatatccaactagaacaagaaatactagctccacttgccggatctggacaaatatatgcgttaccagtcacaaattggtggtcccagttaaaaactgccggttcagcaatctacgccaatcgtcattacttgcagctttataaggcaaactttccagaaagattatgttcaccaggaggtaatgaagaacggtgtgtaatttaccccgatgtcctcatagataaaacagcatcgattcatccaacggctgtgttgggacccaatgtaagtataggagcaggtgtcactgtaggatccggagtacgaatacgagaaagtatcgttttgaatgacgcaacgatagaagatcgtagcttagtcctacacagtatcatcggacgaggttcaagagtgggtaaatgggcacgagttgaaggaacaccgtcggatccagatccaaacaaaccattcgctaaaatggaaaacccgccattatttaactccgatggaaagctaaatccttcaattactattttagggtgctcagtgagtgttccgtcagaaactattttattaaattcaatcgtacttcccaacaaggaactatcaagaagcattaaaaatgaaataattttataaatacagaaattaaaaccaagatgcacaaacaacttttataaaaattttcaatttggagtgaatgttatgtttttatctttgtacaaattattttttattttatttttaa

SEQ ID NO: 7452 - DNA, 1485 bp, Diabrotica virgifera
  SmartBlast Evalue=1E-77; Info=41 kDa zymogen n=1 Tax=Tenebrio molitor RepID=B1B5K0_TENMO
tgatataacataatcaaatatccttaataactaaaaatcagtctgctgctatgaccatacattgtcttctatccactttatgtaataagagactcttgtgtacactcctggttggttttttccaatgccacaagccacaccgaatgaagtaactcctattatgttatacatacacttgacctcatttgtttcttcgtggacaatctgaagaggacccccagaatcaccttgacaggtatcttttctatcctctgaagatcccgcgcaaatcatatagtcttcaataattccatcaggaagctccgtgttaactgaatttataactctcctgtaagtattattacattgggaagttgtaaaatactccaaaataactttctgcagatcttcgctgccttctccagcgaattcagtcagaccccagcctgtagctacagcatgttttacaggaaaatcttttttagtgtaaaggcatgctggacgtagaaacgtattgagctcaaaatttctgtcaactttcattagggctatatcatggtattttgcgaaggtgtacctggggtgttttattagcttaatgatatttctgacttgaaggtggtgtgtgtctgattgatttgcaagaccacctctggcaaacttagcgtctcctttgccaccgcgcaagcaatgagcagcagttaaaatgaaattctcactaattaatgtacctccacagtcccaacttgtatcaggagagccataaccaatttggatcatatgcgggaattcttttcgtcctgctttagttccacctacaatcagaggttgcgtagaaattggacagtccaatatttttgaaaatgttgttattactgacaatgtaggactctcaatcttctcatatgcatattgagaatatacttgacacattgcattggccttatcacctggctgattaccaactcggtttggtgtcggagttataacttgtggaggaggtcgggttataattggcggttctctaatgataggtgttggttgtctcggtggtacacaacacactataacttgtgttacgtcatatccacaaatatccgttggatatatgcccttcttaatgttatctttggcgctttggcagttcgtgagatatttgcatactcctagcgacccttgttctgtgaagcattcatcatccacttcctggtcttgtcctttcacattaaaacaaaagaatactacaaaaacaaataaaacactctgctccgccttacgcattcttggttattgacgtcaaactgtaaaaatgtccaccacgatcactattatttttatagtatgttcttcaaattgcggtacgcctggtactaccttctgacctcacgccgatcatgggaaattctaaattctcgttggatcaactaactttaagtgaattgttgataaaaatgtgaaaacaacactacggagtgtatcttcattgacatgcagccatatcagtgg

SEQ ID NO: 7453 - DNA, 1485 bp, Diabrotica virgifera
  SmartBlast Evalue=0; Info=Cullin-3 n=3 Tax=Aculeata RepID= E2A0N4_9HYME
gccctaattagatccctttctggtatatcagactcattaaggatctcttcatatgtcaacttatcgtgattattaaacaacatcaaaactaccatttgataagtggacacttgtatgatgtgcttcctaggccctgacctcatcgagactattgttgtcgaggaagaacaagcgccatccttgtcgctatcgtctttcttcgggccgtagaagatagcgttcaagtcggcacttccaagttgaggttgcaacgtaagttgccggccgctgtgtttggctaaataaaatctcctaaaacattcgaaggcagctagtggtacagctggtatatgacattttggggttgcgttttgtgtgggccaaaagccagttgtcagcactcgcattaataaatctattccacctaaatttgtctcagacttcgtaacatgttctttaaattcatccataatcgtattggaaacagtcatatctttaaacattccttctaacttagaagtaaattggcatccacactccgtctttaacttagagatcatattcttttcataatcatcactgacagatttattcaacaacaaccgtttggcaagatgctgcttgtaatacctttcgaaaacgtctttctcttggaggaacctaaataaaaccattgacttatccaatacttgttctatctcttgttcggtcatgccttttacacctttcttgagcttatcatcaataaacagcgacaaatactccggcgatttgggattcaaattgaggaaatgttcaaaatcagacgctatcatctgtttaaatattttatcattgttaaaggaattctggaggaaatggtcgaagccgtctttgagatcgagcaatgactgcacgaaggagatagcattggtggccggctggtgttcttcttcctggacgagggctttaccttgttctctaagatacaaactgacgcaatctgccattgttttcaaaccatctgttacgcgaccgaacagtttgtacatacagcatagatcttcggtcttttggtgcttcagcatgtgtaccacaccagagttttccatctctacgatagtcttcatgtgttttttgatcagttcttcttctactacttcaacaattcgagattctgttgatttatctaaatagtgtttcgcacgatcggattcctcattgattcgcgcttctactttgtttatatacactgatgcgctattttcagccagaaaccgttgactttccaccttataaaattctgcagactgttgcaaaaaaggccgttcaaagtcttcttcatagacaactcgggagttgattccaagtaccattaacatttgacacgcatttttaattgaaattctatcaactttttctcctctacgttctcgcattaccatatctaataaagtctctcgaagatgatctctaatacagccataacgtaccacctgatctctaaaaatgataagtcccaaatta

SEQ ID NO: 7454 - DNA, 1483 bp, Diabrotica virgifera
  SmartBlast Evalue=0; Info="CG1440, isoform A n=5 Tax=Sophophora RepID=Q9W3F6_DROME"
aggttaagtacactacgtaaaaatgatattaaacagtcttgttaattatttacaacttcaaaaatacataataaagaaaaatggtaactgagacaacaccgacctcaggttattatctaaagtaaaaaatataatataaatgagggcatccaaataatcaatacatcataatttgtaaaatattacagctatcagtgcgctagagtgcccatgggatcccaagcaggtaaaactataggttcttgtttgaacacgtccaacacctgttcaggcacgaattttttgtcaactactacttcaaaagtgaactctttgaaccagtcagaagtcatgattaagtatcccttctctcccctgtcctcaccccaagagttctcgactctgagtttagttacttccccggcttcatttgtactaacagcagtgaaaaccatagcatgggtcattgcactttcattatataacaatcgatcagcttttgacagatcgacttgaatgtcaactccaaaaactaacgggaaatcatgtgctttcaaatcctgaatgccctgcttggcaacgtatctcttggatacctcgcatccaaaccaaacagcttccccttctttgatacttttagcggtaagatccaacagcagctctactggttggttgttatagatgcactttctacctccagccatgttacctaagcaatctacagtatagacttttccgtattcgtttgttggcctaggatcagttacaaggcagaccttatcatcaacgttgaaatgcggtttaacatgcttctcgtagaattcttttggagtgattggacctatgctctggaaagccttgttcttgtcgtaatacgtccaggtgaatgtttcgctggggattcccaagcagattcctactaccctgtatatattgaccatttgggactggattagggtatgtatatctgcgtcacttccaccttttgaaatcaattctctaatagccctagcatactccctgagcttactcttcaggatttggttcatcttaacactttgttcacagctgaaagattcaggaaaattcttttttggcataaggccatgtttgttgataagatttaccaacatatcccattgaccaccatcagaagttgggtcatgtaataaaaatgacaccaatcttccgtcaactgcctcatttcttctagccgtttctacaatattgagaaggaaattattacatctttctattttgtcccaaaagaagagataagcttgagaaaattcaaaatcttctatgttgtggtgtttgatgaatggtaaacggatgacatttaatgcggcgaacaaccaacagcgtccagaacttcgttggtttgttactggtttaccttcggcttcaatcttatggttgaaaacgtggtgtgtttcttcaagggtttttctgcgaagggcagcttcaaagggatctattttagagcaaacattctgggctagga

SEQ ID NO: 7455 - DNA, 1485 bp, Diabrotica virgifera
  SmartBlast Evalue=1E-145; Info=Thickveins n=1 Tax=Tribolium castaneum RepID=D6WX32_TRICA
acatgaccaatgcaaatgcgtacatgtcgcccatcttatgtgcttcaaagttgtggacattcattgatttatccagaagttctggtgccatatacctcctggttccagatcttacgtttggagggacgtctatctccttagtttcggacaaatacttcacagcaagtccaaagtctgctatgcagcattccccattccgcttcactaaaatattcttgctcttgatgtctcggtgagctatagccggttttcctttggtgccatatatttcgatgtggaggtgcgaaagtccagatgctatactttgagccataagcaggagcctcaatggatccaaacagttgtcctgaagataatcataaagactaccacattcgtggtagtccgttatcagcaacatttgggtccaacttccggtaccttttatatcggcagctataaatcccagtatattctcatgcctcatcaaaacagtctggtatatctcagtttctctgaaccaactctgttcctctgtagtgaaaaatactttgactgccaccttggtgcctctccatttcgccaaccaaacttcaccatatcgtcctttacccaccgaatgaaccatttggatctgcttcgaaattgttctttgtactaggatcggaagaccagaaccagatccgctggattgttccattaagcttaccaaaggaccatggacttccatttgggggtatttctcgccggtatatcctttgccatacaatccgaacttcctctgcacatctttcctcctgttcttcatgaacactatggcgacgatcagaagaactagagtaaggcagaaggtgatagtggtaaggaggacggtgaacggcaggttgtcaggggtaccgaaaccgggagtttctggcgtcggtcgctctggataggtaggaagcagcgacaggttgcagaagtctttgtcgttgcaacactggatggacttgctctgttcgtggggtacgaggtggcctttgcactgcataagtccccgttcgtcatcggggagacatccataagtatatagaggaatatccttgtcctgactgtcatcgtagatggcttcgacagacgtaaagcatacgcccccagttcgaatttcgcaagtcccattgtactgattgtcaggacagtggccttggcagtaacatcgtttcacgtttgttttcttgacccgttttttgccgtttttcttggcaggcggcatcatattaacagcaacaaatatcacaatacagaaaaaagtaactgtcacttatttactagctatcacagatcgtcgaaagattcgtacacaacttcataataactcacagtttagatatttttcgctaggattctaaaaacatgtgcgagcactttccaaacaaaatactatcagccgaagccagcttcgcgaacggttcgctcaagtccgttgtcattcatttgttttacgagatcggtgcgaaatcgtcgcgc

SEQ ID NO: 7456 - DNA, 1483 bp, Diabrotica virgifera
gttttgccggttattagcgcgctcatcactgtatttgagtcggtgagaggagagggcgagcatgtccataaatgggtgtttttgacattttgacagaaatccaatgctttgttagtacgaggagatatccggtttctttacaaaacggtgcgtattcgtacttatacctaatggattgctgtcagaatgtcaaaaatgcctatttgtggacatgtccgctttctcttctcgccgattcatttaagctgaattataattttaaaggtagcgagtttaattatctttgtagattgcgtaaggtaatataggtgatttattctgcatttcgatttgtaaatttactcatcccaacgttcttcacgatttaatctaaattaatataacccaacctcttttatacaaccaaattaaaaacaactataccctgttttaaaccagcaggagtaaactcaaaacacacccaataatgtcactagaaaaatcactagattcttcttcttttttggttgatcatgtcgaccttcgacggtaatccataaatgttatattatactaacacgtcgccaaaaagttctaaaacaactgtttttataaaatgcatactaaaaatctaaaaattaaaggaataacacagaaaacacaaataatcgcagatataacttaatctatcaattttatatgccattagtgtcaaaatttcataagtgtgtggagtgaacttgcctgcttttggaccaattacaaacaagcattacggcgcggtaaatttgaagtactcctcctagtttaaaaactaggtatagagatttccatataaggcctcaaattgtatatcggttagtcaaataactacaagatgtagacagatagtagaaccaaaggctaaaattaaattaaattttcttaatctgttgtacattgtatatgttatggacaataatgtcaattggacattgacgttaaagaccgggcattgccgtgaatgtccatcttttttcctggttattatcgacaatgcccggcctttaatgaaaataacgttgtaaaataaattaaaattagagttttcatactttaacagtggccagaagcaaatggccaatgttgataaataaataaaattatccatgatgtattattttttatttaaaacaacttttgaaaactaataattttgattttggcaagatagtggtatgaatgaaggtagtacaatgaagtaaacaatgaacataacctagcttttagtcaaaattttaacaaccgattatcaaacaatgatagaaatgttatcaagaatttcatattatcatcaatgtgcaatttatatggacaataacgttaatatccagccattgtcgacaatgactaactgaacaggtcattttcgatattgaccggttaataacttattgaccggattgtcgttattgtctgtaacagtatttactaaaatgcataaagttcgctacctttaaataat

SEQ ID NO: 7457 - DNA, 1481 bp, Diabrotica virgifera
  SmartBlast Evalue=1E-13; Info=E3 ubiquitin-protein ligase SIAH1 (EC 6.3.2.-) (Seven in absentia homolog 1) (Siah-1) (Siah-1a). n=1 Tax=Canis lupus familiaris RepID=UPI0000EB3B3C
ctgcagtagtatccacatcagttatttttaaacgcaaaacagttccttaaacaaaagttcaaattcctcgagaaaacgtagcattgcaggtgatagtatttaccttgaacgtcaatgtcaatagcaatgacttgctccaaggctgtcggtgttgatctctcgaaaataaatagaaaatgacagttgtactgaaccagatataacataaaggtgttttaaagtgtcttgttttatgtttgattatataaagtatgaacattggcaaatttgtgataccgaattacactattgaaaggctaaaatgtgatctctgccatggatatctgtcggtaccaccaatttattcttacagggacaaatacgcatgcggacgatgcaatcctgattgggaaagaaacatcatatacgaacagctagctcaatacttagtgtttccatgtatgttttgtgataaggcctacccatgggggatgatgcaatcacacgaagataggtgcaaacaaaataaactggcttgtccttcagataaatcaaacgtgtatatgttaactaatttggttaaattaaaatgtgtagaatatcataaggaatgtgacgagaaatggttaagatgtccgataccgctttgtctaaatacgtttcaaatgaaggaagtcttgcaccactttaatgaatatcataaagactatgtttttactaacacggtagaagccaggaagatatttaaggaagaaaaggtatggaattttcactgtgaaacacaagtttgtctaataacttggaataccgtcccttttttacttttcgtccacaacagttgtgaattcgacgatacaacgggtaacattttattttacaattattattttagcgtctttaccttctgtcagaagaaatgcgatatgaagtactcagcaacgttacagatacagtctgataatgaaatcacaacgagatcaatgaagaatcaagaggtgaaaacatttaacgatgctattcacaaggtcactttcttacagtctgagtttcttaggttaaacagcttcgattttatgactacgaagttcttgaaaataccaagaactgaaaaacttaatttaacatactctataaaaatcgtagataacaattttctaatagaacccgagccgactaagggggactccgatatccaacgtgccgcaggtattggaaaacacttcgaatgtccaatatgtcaggaatatatgtctcctcctatatataattgtgccaccggccatacaatttgcaagaattgcaaggataagctcgtattttgtccgtattgtaaggctttggtcggaatctctaggaactatgtgatggaggatatgttagacacgcttttacttcattgccacaatgaatataaaggatgtacttttacgggtaaagtacaagagataaaattgcacgaggtaatgtgtcattacaattgaatgctatttttagtacttacg

SEQ ID NO: 7458 - DNA, 1480 bp, Diabrotica virgifera
aatcaatcaagtgttggaagattataaatagcgtatcatggtagtgatcaaaatcgtcaacaagtttaaaaaaaagcatcgaacagtcggcgatatgtcctagaggagagagaagagaatccagaatccagagatttatagtgggccgtaaaagtgtgtttgtttccatggaaatatgatcacctctgcttattggcgtgtttgttttttgtttgccgcgtgcggatgtcaaagcctcgtgttgaatgaaggagatttatccaacgactgtcctattgatgacctgccgcaccaaaccaaaacaattagagtgttaaatggaacccccttaacattaaaatgtcaccaagaaaaggcaagatggtgttttaagccctgtgattcaaatttccacggaatagtatgtaatgggaaccgcaactggaaaaaactcaccagtgaaactaaaggaagaataaacttcgaagctgccaacaaaactcataatggaatgtacctatgttcacataagaatatgccgacaataaaaatatttattgttgatgtgtttgatcctggctacaccggaccaccacctcgagtccaccccctgaaaatatcgaacataacaggcccaataaacacggagtttacaatccagtgcaaagtaaccagtgaagtatttcccaaaatcatctggttcaagacctgtttcggacagaagtgcgactacagattccaccaaacctgctattgccacattaacacatcgatttctgactaccacgcaggaaacacctacctcagtaaatacctcattttcaacgctagatgtgtagatagcggcacctatctttgtttagcactcacgcagttcggtaaagacgaccaaaaagtgactatcaatgtgccgtgtaaaaaatcggatagtgaattatattccttgttgtttttaataccgtttggactgttgttgatacctttagttgtatggctatgttattataggaagaaaaagaaatctactatcataatcgtcgaccaacagaaaaagcttctcaggactataactcaaccgaaggagatcatataatcaattgtctaagattaaatataatacacaaattcagtgttcaaaatttcctccgttgttaatttgacagtaacaatggtagaatgcgtctgatacatttcaccatgtttctctagaaattaatatggatccatcgataattatttgactttgctatgcaacacttgctggtttcgttttataaattctactttcccagtatcattaataaaaataatatttaggattccaatcgggtgaactaggtggccattcaatatttcctaatcccgaaccatcgtccggaaatttcctgagctaactatcgccaaacatttacaccaaaacgagctggagccctgtcttgctgaccccaggtgcgggagcacgccaaatagaattctattttagggacgtcacgttgcctag

SEQ ID NO: 7459 - DNA, 1476 bp, Diabrotica virgifera
atttatttgtaagtaacaaaaattaaatattatacttataacaataatagtaaacttaatacctcaatgctaatacatacatcaatttcggcacattttttaaattaaataaagtgactgtttttggctcttatatcttatatcactagtttttaaaacaatattgttaataccttattttgagcaaattcaactttttttttagtgttggtcatgttgtataggtgtgggcgcaagtcagctggcgttcttgggaacgaggcatgagcaaattccaccactctatccggcgttcagcgtgcatttcctaaagcgtcgtttaaacacaacgataagtcacagcaactagttgtgatgataagttgaaacgctgtttagacgctgcgattcaatgcgatatcaccttcaacccaactccaactttgataagttgtgcgatgcaccgtttacacacaatgataagttgcaacaactcgattgaccttgataagttgtttgatttatcgctgtgtttaaacgatccttaacaacacgtccagctgggcataagtcaatatgttagtcgaccttgaaacgaacgaataccggctttttgtgggtttagtcgttgtgtttggttataacaacttgcgtttttattaaaacagttttaatatcagggtcctgcatggatcggtagacgtggaaacgaatcgtggcctccaagatcgccagacattactcctatggatttttcaatttaggaacagtttttttgcgcgaagatggacaacgttgaagatctctttgattgaaaaacgttatttgaagtgtattgtgatgaatggtgaacatttggaacaattattttaaatacataattatttgcaaagacagctgacttctggtcacccttgtatatgaaagtccacattactctggactaattagcaaaatacaaggaaaagttatttaccagcaactccattactggaatcgaatcttatgttgttctgaagctatttccttgtggcatttttataattaagtattttctatgggaaataagccacaattttactaaaaatgaatttattaacgtttcgaagcccaaatcgggtttcgttgtcaaaatacaaaatactattaaaataaacaaaaatgttgttgctaagtaaaaaaattcttctaataatttatttaatctgactcattgtgtcttgaatcttatgattgtatatattaacaatataggtacgcaaagtccgcagatagtgccctactcccttataaacaaaatggagcccgaaaatcgtatttttttcaatcttttgcttcacaactccaaagattttaactttacaccaaaaacacccaaacaaaaattcaccgtaatcaaattctgcacagagacgtgttcctcccgattcacctcgacgaaactcctccccggaaaatgcgggtttttccaacaaaatctctaattttcaactaaaa

SEQ ID NO: 7460 - DNA, 1481 bp, Diabrotica virgifera
  SmartBlast Evalue=4E-55; Info="Fk506 binding protein, putative n=1 Tax=Pediculus humanus corporis RepID=E0VH54_PEDHC"
gtaatgcgtgtattaaaagaacaagaactattaaaaatgccaaatataacacaaatagtgatccaccaacatgtataaaaatcgtataaaacataaacggtataaacacaaacacttcttgaaacgctctctaagttcacaattaaaattttttcattaaatcttcagacggtaagcgaaaactcctgctgctcccacggccagagctgctcccaacgtagcccatacaataaactttccaccagatgactttttagaagatttattattagactctgtctttgcagttccattaaacatccgctttgctaattctttctcggaatttttctgtttctgtattagttttgtcattgcattaatttccttttgaatgtctggatcattaggtgcaaattctttggctttctgtagacatttcatagccgttggtaaatcattttgtcctttgtaggccatggctttcctgtaatgtgctttaacgttattaggttggcatctaagtacaacttgtaaggaattaagggcagcactgtacatctccattttgatttgtgcagctgccatattattacaaacactcactctatcttccaaaatactctgcaaatctgaatctgatacttcgcctttagattgatctccaccttccacttcgtctaaataatctagtgctcttctatagcattgaatggctatattgttttctcctctagtataccaccaattccctctttctctcttcttattgcctttaacttttctcagagtaataggcatcatatcaacatcatcttctggctcaacatttactagctctacatcatagataactaaactatctcctggaatttttgaaggcaatccttttctaccaaaggccagcctgggtgtaatttttaacctacatttttctccaatattcataagtcctagggagacatcaagtccttgtattacatcagattctcctaaatttagttcgaaattatcagtactgtccactaaagtctcatcttcgaggtagcaactgtaatttataatgcacttttcgcttctttgtggtctagtgtctggtttaccttcagcaatggtctttttcataatagccccactgccaagaagatcaacccattctggtttaggttcttcaggttcattgattttttctttctcttcttcgggtatattttcaacttcatcgtttttactgatattgtcttcacttgagctaatgggttctagatcgggtacgtcagattcttctagaatgtctttgccggaatcggaggaaattacactttgggaggatttttcgtgttcaatgaatgtttcggacattttcactattcgtattttctgtttcttgattgaatagaaaataatttatttttcatcattaaaaaattttttttaatagtactgaaatttttatttcgtttttttagtgtctgacaacttattttttatcgggtttaagg

SEQ ID NO: 7461 - DNA, 1480 bp, Diabrotica virgifera
  SmartBlast Evalue=1E-100; Info=Ancient conserved domain protein 2 (Cyclin m2) n=1 Tax=Aedes aegypti RepID=Q16HD8_AEDAE
ctactgttttcttgcgtaattccaaagcaccgctgattatgtttacctcgtctttgtccagatcgttttcgccagctgtttccgtaactaatttcttcaatctctctcttgtgtagacttgtccgatttcttcaccaagaagacaatccaaaaacttggcgacgggatatgacaatgggaaagtgagtaccattaaacctttggttaagatgatagttttagcaccgatttctaatgcatggcgagcacaaatagcctgaggtgcaatttcacccacaagtacaatcagcaaggtggagaagatgacagcaactagaccggatgtcaaatcatccaataatactgtaaatacggagttcacagctacgttacccagcaaaatggaacacagcagataattgccgtggtttctaaccggttgtatagcttttgcatatttcttttcgtctggggtaccagtgttacataaaatcttcaattcagtcttgtccagagacatcaaacctaaattaagtcccgaaaagcaagcggagaagcacaaacatacgaaaataagaagaagagtggcccacaacggaattctcttgtcgtgaattttgatttgattccatgtgtgggatccttggtgagtaaaaatcttggatgagtcatcggccccatctttagcacaaaggtagtatggttctccgctagatgatgcaggaagatttatagttactctcgcagaagttggtgaaagtgtggaattatcaatatgaaatatgtcaccaacaattatcacacaatcatttgctttggcagtaaatgagataagcgtcctgggagtcaaattctccccaaatattcggaagacttggtcatgatttgaaagcagttctggtacaccgtcctcatcaaactcaggttctttgtaggctttctctaatcggagccccaatacaatgggtttaatgtaactgcttgatcgatcacttgccttctttgaagggataatcttaaacttgaatcgtcggaagtaacattcacactaacattaggtccttgatgaacccacttataaaataactttgggtgaaaaagttggggtacttgtacactaggttttttaatttgtcgaggtaagcaaagataaatatcaccctgcaaagttcttggcactgtcaactcatattgtgccgttttaaattctgaaacgtgtatttcactaatattatatggtaccgtcaagtcctcacattcagaatctctttcagatttatttttagttgccttgataataatgtctttctggatattccttccacgcacttcaaaaataatttttttgtcgttttcatattcaaccgggggctttgatgttgctgaaataaattcaggaaggttcggatcttctaagaaagcaggtttgcttggattgactattacgaataacaacaatatagtcaatatcttctcaacagcacgaggcgaatatctcgcc

SEQ ID NO: 7462 - DNA, 1469 bp, Diabrotica virgifera
ataaatatttatctaattaaaaaaaatgcatatagacaaaaatcaggattaacagttacttctatattggaagatattgttaagtatatacaatattttattaaacgtttcctttagcagttaaaagccttccagaaagtaccatcgacagagcagataaaagacggcgactcgtagaaaaatatatatgtatatatatttcagattgctgatggtactttctcatcaaagcaaggcaataagttaataaaagcttcaatcatcttattcgacaaacagatgttcaattttgggctcaagccagtctgggcagactgcttggtgggcttgtaatgggtaataccactcaaaatttcgatgagacagaatggattattatttgaagatttacatttgtaacaactttattagatatatgtatgtgttagtacaacttattgtttatctaaaaaatatcaatagaaattttgcaccattttctttgcagttatcatttaataaaactactcatagacctataattattcatgatatttgctaactaaaaatccttaatttttcataaatggtatggtttgtctattataaattccgttgcatgtcatccgcgtcatagcaagtgacgtcacatgataccaacacaaaataattaagtcgtaggtttgttcctttttaaaatcgtttagtacactggaattacagccactcgacatattttattacataagcgtagaaataatattagaagatttctattaatgtaaacttaaagaaatataccataacttgtttcatttaatttgtatggattataaaatgaaacgtttttatgaagcacagttgtccggatcacactttaactgcgatcgaacgaaggtgactttttgcataaattggttacacttatttgacagttgcagtgttgacacttcagatttgtttttattatttactttaacgtaagattataacttaattcttgttttctatttctaatgtttttatttatttacagtgaatattaatttgtttcgttgtataatccacttctgcaatgattatgtcatgatatactacttgatttaaaatgaattcaggaattctcttgtaatttggcaacaatgtcaacagatctctgacgtagataatgacgtgcaacggtatttagactgttccaaccatacatggatatcagcattaaatatagcattattacattatcaatctatgcattacattattcgttacaaatgaatctcatactcgccaatttgaatatggaattttaaaatggtggtaaaaatcacaataatttttttctatcacacataatgattttttatataatgatacatatcaaatgaattgtttcaaacaaaaaccaatattctgtgtttatagattgcatagtttctctatcttcgatgtaatttaggtccaataaggaccaaaaacagaatcattgcatt

SEQ ID NO: 7463 - DNA, 1479 bp, Diabrotica virgifera
aataaatagaatgtatattttcaggtctccatcgctaaatctcccaccctcactagtttcacttcctcccatctcacaactcaatgtgttttccatcctttgcgctattttgccggccactagcgcgcccatcactgtatatgtaggttttctttaaagacgatcgtaataaaagtccgtttgatgtttaatagttttaattaataaaatagatgactaaattattgataccattaaattaacgaaatgtaaaagtgcttgtgtaatttgcgaccaaaattcttacgtgttcttattcttacaaaagggaaatgtatttatagataatttgcgtctaatcaatataatacccgtctaagtattatccctaacctaagaacaggtctgtcgcgtttaagatgttagaatcgactgaatgtattcgttctttttccctacgctaaaacaaaccgtcttaggctaatctcctttttcctgtgaaacaacccaattaaaattggttcaaagcatataccgacatcttccaataacccaataatacaaaaattaaaagtagtccgctaccgtcgccgtaatccccaattcgttccacccatctgtgccaacgtaggtccatatgtgtgagactctatcccgttctcgtactaataattaagaaaaatgatatacaggggaatttggaatttaaaatataaggtaaactatttacaatcctacatataaaaatgaatgtttgtctgtatgccccttatcgaatcgtaaactatacatttgatcatatgatgtcctcaagcaaagttgttgtacatgaacccgggaaggtttctgagttaatacgaccaatctaagtaatcattatttactcagacaccacaaaaaccacattgtttattagaaaaaaagtatacgcaatatttttgagtatttgatggctttctggtaatttttaggtatttaacttttaaacattattttttagttctaaggaggtacgaagtttgccgggtcagctagttaataataaaaaaatattcttgaactatgtagtttggcaaagattaagggccggttgttcgaacgccaatcaacaatgatcaccatcaaacattcaatcactgtcacaactgtcaatgtcaactttgtttgggccgctgaaaacacaattattgattacaattatgaaattagttaatcaattatgttagtaattgttatgtttattgattaactaatctcataattataagcaatcaattatgctttcagcaacccaaccacagctgacattgagagtgtgacagcaattaaacatttgacagtgatcactgctgatcagcgctcgaacaaccggccctataaagtataaaccattaatttatgaattttagattgtaagaaaaaagggtcagctgaatataaatgatcaaatgcaaagtttacgattctataaaagacacacagacctctttatattgtgtc

SEQ ID NO: 7464 - DNA, 1478 bp, Diabrotica virgifera
  SmartBlast Evalue=1E-127; Info=Nucleolysin TIAR n=2 Tax= Aculeata RepID=E2AI23_9HYME
gaaaaatagaagttggcaaattttgtgtcattatcaagtccttatcttgtttttggataagaatctgaatcttcgaattattgaattagtcttcgaaggttttatatgtgcaataaaacaagtcgcgaagtgtgctgatactttgttatcgaaataatagtgccggcgtcaccatgtcggacgagagtcatccaaaaacactttatgtaggtaatctggacgtgtcagtgtcagaggacctgttatgtaccttgttttcacaaataggcctagtgaaaggatgtaaaataattagggagcctggaaatgatccatatgcttttatcgaatttactaatcaccaatctgcatccactgctttagcagcaatgaataaacgactatttctagataaggaaatgaaggtaaattgggcaactagtccaggaaatcaaccaaaacaagatacatctaatcatcatcacatctttgttggtgacttatctcctgaaattgagactgaaacactcagagaggcctttgctccctttggagaaatttcaaactgcagaatagtaagagatcccccaaacacttaagtctaaagggtatgcctttgtgtcttttgttaaaaaagctgaagcagaaaatgccatacaagccatgaatggtcagtggcttggatcaagatcaattcgcactaattggtcaactagaaagccaccaccaccaagaacagaaaaacccgctcagaggcagaaacaacctcaatttgaagagatatacaatcaaacttctccaactaacacaacagtatattgtggaggttttgcgagtggtctcactgacgatttagttcacagaactttttcaccgtttggtacaatacaagatattagagtgttcaaagataaagggtatgcttttataaaatttctaacaaaagaaagtgcaactcatgctattgaaaatattcataattcagatattaacggtgcaactgttaagtgtttctggggcaaggagaatggaggttttggcccagatccatcaatgcagtcaggagctgtgccccaatcatcagcccctccatattcttatggatatggcagttattggtacccgcaaggctatactgctggaggtggttacatgcaaggataccagtcctaccagcaatatcaacaatatccaggtggtcagcaatactgtgttatgccacaacaggggcagtggtcaggtcagccaggacaacaaccaaatgtacccgttatgtatggtcaaaagtatccatctcagtgaaatattccatagacattaacttgggttacgttttgcagtaagtttgagcaaggacaattataaacaaaatacctataaataatattaggaatatgaacttaacctttataaacatttctttgcttccagtagcaaaacacagttgttttattaactttttacatttgatttattaggtttggttttcgtataaatga

SEQ ID NO: 7465 - DNA, 1477 bp, Diabrotica virgifera
  SmartBlast Evalue=2E-10; Info=Zinc finger MYM-type protein 1 n= 1 Tax=Culex quinquefasciatus RepID=B0W189_CULQU
ggagtctgttgctgctgctataaggggtaggtatttagtacaaatggctcgatttcaattttttgcttaatatttttactaatattttatttgacattttgagatttttccttttactgatattttatagtacctacgacattttacagacgaagtcaagtgacattgcattttgtataagacaatttgatgacttgtgatgattaaaaaaatgagctgtttaaaaatatttgggataaagctgaaaatatgggcttcgaacctaaaagaaaaataatgatgattgatattgtcggcgaaagagagacctatcgacgattatacatcgaaatttttgataatattctacaacaaatgaattatcactttgaaaattttaaagaaataaaatatgtagaattatgtaattttaatatgtctaattataattcattaaaatctcccacagaggtatgtacctatttaattcagtacgattaaattatgatttttttttgataatctagctttgcattctcagttaaatgtcatttataaaacacctgaaattagtgataaagaaatacttaggaatcggttgaattttttgaatactactggtttaaatcagtctctgtgtgaagtgggcaagttgtgtgaattaagtagtaggtactaactatcccagctacaagtgcatcagttgaacgaagtttttcagtattaaaacgcatcaaaagttttacaataaattttacaagtgaagacagactttccaagttagccctattatccattgaaaaagagtgcatttattaaacaattatcagaaaatccaaaattttacgacgatgttatcgacaaaaaatttgcattggttgataagagaataggactcaagtataagtaaataagtgtcatattgttgaaagttgtgtgttatggaaggtgattcgaaatcggaatataaaaacaattttgaatagaactcttctttttaagtttaaagaaaccaagcctggagcagggactcgaccctgagcaagcagtacagatcgatgataagtcactagatatacgatatactaagtcactagagtcactaacctgcattgatcggggtaggatttcgtttgtgagtccttgtatccaggactcccacataataagcactttgctgatagagagcccatatagcgcatcagagtgctatcggaggggaagtggatagtatgaagcattggggcgggatggagtgacgcccgcttataagagtaaatcctccttgcctcaatgaatttgtatcacccgaatctcattctcaaggcgtgtgcatgtctctcagactgggttaaacactatacctaatttttgtagttcttgtttttagtcgatataagttaacaggtaatacattaggtatacacctattaagtaggtatatgttttgatctcgaccctcgtaagaaaatatttgttaaacccttattgaatcgct

SEQ ID NO: 7466 - DNA, 1475 bp, Diabrotica virgifera
  SmartBlast Evalue=4E-63; Info=Nuclear pore complex protein Nup205 n=1 Tax=Harpegnathos saltator RepID=E2BU35_9HYME
catcattatgaacgtttttgatgaaagcaatcggttctttgaggcatatgctccttttccgggggaagaaactattaaaacctgcgttttatcttccctgaatattatccacagggtgctggtgttgcagaacaaatttttcaaccttctgacatcgtccgcagcctctatggtactgacaagtataaataagctgttgatgtctataaatcgtcgtacgggcaagccggaccattgcatcaatttggctaaattggtcgcctaccagatacacatgcccgaacattcttatctgaccataaaaatattaaaccatataactagctcgtgtgttatacacaaccaactgatgagtgtgctgcttacctcagaagacgacatcgactttattagaaatggttttgtcgagtgcttagataattgttgcgacgaaaacaaagaaatcatagaaaataccaaaagggaaataatcaaattgatgaaacaaacgttgtcgtacaatgcaccgaattttactcactttttactcggcttcgacatgaagaaagacgtttctaagactgaattccagttcccgggcgttttgggattcccccgaacatcattccattcgattttgtcgatgatggacacggcggttaataaaagcttcgaaaaaccgtcaccgacgcttctagaatctgtgtatcatttgctgtatctgctttcctgcaatacgaagacatcgggaccggtactgaggtttataaggcagaataggagtttttatcaagagcagctgggtgaagctgctaagaatataggagaaggactagctgaatacggccaacttacgtggttgatgaaagtactggcagtagaactgaagatactaagtcagttaaaacaagtaacttatctgaagcagttgaaagtgtttctgatcaacttacctaccgaagaaagcagacagaaagacacgttgatgggagtttccaagatggcgttaaatctttcagcgttgcatgccgaagtagggaaatccgataactttttaacaaggttaataccgtatttcgaactagatttgcctgtagtggagatgccgaattgggagtacttcgacaataacgttttgtcgcaaattctacaaagttgccaacaaaaatcctcaaaactgatagatttacgaaaattacacattatattatacgaagagctaaagacgttacaaggcactgcagtgatgggtcagatccaggcgataactcacgaaatacagaaagtcttgaaatacgcgttggaattgaacaaaagaaacgaggcttgtgctattatggtccaattcgcagacgcctggaggcaagtcaccgaagtcctagtgttatatacgccaatggagatattatcggtgcaagagcaacaaatcgtcagtctcgccttactcaaacctctattgaaggacatatctaagtccgaactacttccagaagtag

SEQ ID NO: 7467 - DNA, 1479 bp, Diabrotica virgifera
  SmartBlast Evalue=4E-83; Info=Battenin n=1 Tax=Camponotus floridanus RepID=E2A915_9HYME
tccagccaatgtaattcctatactatccccaaatgttgtaattgccatggaaaactgcttgttttcttcagcgacttcagttgaaattctgtaaaaggtgttaacataagaagatcctcctaatagtccttcccataaaaccagaactacaactatgtagaagttgggaatataataaaatactgcttctgtggtaaatatcacaacattaatgccctggaacagtgtcatccaccatgtttgtttaatatggaacaagttaactgaagatctggaaaagaacactccaatttggtaagtaacttgaaaccatctgtattgatcgtcatttgatatacttgagtttttgatcctaattaactcaaaagttccttgattgataaaatactcaaaaacgtatactaatgaaaacggtataatatatttgagcagtccaggaattaatttcagtttctttataaaagcttgttttgggttctttagctcatcgctgttgacaagattctgaatttctaatgcatgtgcaatgtcctcttgggatggccgtggaagcaacaaccaaaacgctaaacccatggcaacgggaactacaagaagtatctgtaaaattgtcctcatttctaaatggacttgggcaagaattgcatacgtagcagctccaattactcctgcaccacctgttccagaactccatgtcgatattacatttttatcataaaaactactatactgcatataggtgacttctcccaaccccgatgccaatgaagtcataactacccctaataatgcgataaccaaggtttcgctgtaggcaacacacaaaaatcctgaagcggcaaggacaacacatattgctactcttaagtgcacaaagaaaggcaaaaagggagcaattactttaataatcaaacctggcaaaatgtcggccaataatatggcacctgttgataaatatgtacagtctcgagcagtagtttcctctttagggggggtatcaccacctgtttctttgttcactatttcgttagctgctgtcaacatgactacatatccataattgttgcataacccaagaatccaataggcagttaaggctctaatccttctattcttattaaacgtggttggcgtacccttgccagtttcaggaggtacgatagcagcgcagctctcatagttataagacatttttgtaaatcaaagaagaaacagcaagaaaatactaaaatattaaagaaaactaaaacattttccaatctaatatttttaccgatcacattagcatggataagaaataaacacaaacacgtgtaggtatgtattatacttggttgattgtaattgaactgattcactttgcaggaaatgattagcacagattacgaatattaacccgattgcctatatgctggatttattgaactatttaactggggtttcattgtaagaaatatgaaagtacctattccacatcaa

SEQ ID NO: 7468 - DNA, 1479 bp, Diabrotica virgifera
  SmartBlast Evalue=1E-161; Info=Juvenile hormone epoxide hydrolase-like protein 5 n=1 Tax=Tribolium castaneum RepID= D0W015_TRICA
cgacaccggtgccactgatagtatagtggcagttgtgtgtgagaagtggaagagggaaaatgggttgctgcgctaaagttggagctgttgttgcagtgcttttagctgttttagttgtctatagtacaaaatctttatttcaaacacccaaggtgccagatttgggcgaaaaatggtggaaagtggccaagccggcaaaagtggatactagtatcaaaccgttcaaaattcaaatttcagatgaaattttaaaagacttgaaggacagactagatcgtagtcttccatttcaaccacccctagatggcgtgaaacaacattacggaatgaacactaatctcctgaatactatagtggactattggaagaacaaatatgactggagacaaagggaaaagtttttcaaccagtatccacagtttactaccaatatccaaggacttaacatccatttccttcatgtcaagcctactgagaccaaaggactgaaggttttcccgatgttgatgttgcacggatggccaggctctgttagagaattttatgaaatgatcccacttttgaccaaaccgcagaagggaagagattttgtatttgaactgattattccaagtttgccaggttatggattttctgaaggtgctgaagtatctggacttggtgcaccccacgtagccgtcattatgaagaaccttatgacccgattgggattccagaagtactaccttcagggaggtgattggggtggcataatagtagccaacttagcatcattattcccagaaaaagtgctgggagtccattccaatatgtgctttgccaatagtcctctttctcatctaaaattagcattgggtagtttaatgccatctttgattgttgaagccgacaagcaacatctcgtttatcccagaatgaaaatttttggattccttctactggaaagtggttatatgcatcttcaggcgactaaaccggataccgttggtgtcgctctacgtgatagccctgtaggtcttgcagcttacatcatagagaagttcaccacatggaccaatccatcatggaaagacttggaagacggaggattgacaaagaaatttactttggaaaagttgttggacaacgttatggtttactgggttaccagatctatcaccacctccatgaggttgtatgcagaaacatttaattccgaaatctacgccttgaatgttgatggtcttcccgtagatgtgcccagcgcatgctctcaatttgaacacgaaattacatatctaccagaatcaatcctaaaggaaaggtatcgcaacttattgttatcaagctcgcatacagacggtggccattttgcagcttttgaagctccaaatgttcttgccaaagatacttacgactttgttgaaaaagttcaagatttcgaaaagcagaaacataaaaagtaaatttttgtatatttatatgtttttattataagta

SEQ ID NO: 7469 - DNA, 1478 bp, Diabrotica virgifera
aagttcatgtatcatattatttattgtcttcatttattgagaatgcatttttaacatatataccgaattaaaacactgcatttttaggcaatattttgtttcaaatcgtagatacagatgtaaatttagactttgttacatatacatatgtactttttgaggacaatgagttatctagagagaaacaataagcaattataaaatatctttttttttaatagcctatacctagtatgtattgttaatcaccgttgctgatacgtttaagttacctttctgaaatcacattgtatacatttatttttcttaaactcagtatattcgtaagtacaaacataatgtcaattacaaacggaactaaaacgtatttttcaaaatatcctgcgaaacaaccacgcacaaccaacaagaattactaaactattacagctttctgaagattattatttaagtacggcaacactgtaaagtatcgatcttagtaaaatctctttacaaaaatcaagtggaaagtggcaaaaaagtaataactacacgtttgtgccaaagaatgaagaaacatctgcaaattttatcagtatttatccattgtcaatataaatctggaacatttttttgacctatacgattttgttttaatgctattgtatacttttggaaaaataaagattctggtgtttttctttggaatagagaagttaagttctatgtcaacagtcatcgttgacatatgacacagtgttggtttgtctatacgctctgagcttcgctggtgtcgctcctagcggttactaattcaacttttactggtaatttttaaatttattatttaattgttatcgcttaatatttacaacgcaaaaaagtaattaaattgtaatcgatttttttaagattttgctaatcattttgacgttctattgataaaatatgaatttcttacttcggatactttacaattatcgtgtagatggcgctaagattataatagattatttataattacatattacggaacattaaaaaaacttaaattcagtatttaaaacgtaagtatatttaaggtaaaaatatataccacagctttgaccaactaatattgtttataattaatgtttttaattttaattttaaattaatcactttgacatttatgtcaaatttccggtaaacgtttacagacttgtcactactggcgctcgcgaatttgtaaatatcccctctacgtacgagctcacagcgtataccaaggtacatacatgctacacgctagtatcgaaaacaatatgtcattgtcattagtcgaaaactatgatttacatttgatgaatatcataataataataatgatatgggatacacctcgtttttaaactaggaggagtaattcaaatttaccgctgttatgcttgtttgtaattggtccaaccgcaggcaaatttacctaagttatgaaattttaacaccattgacattta

SEQ ID NO: 7470 - DNA, 1464 bp, Diabrotica virgifera
  SmartBlast Evalue=2E-51; Info=CG7120 n=3 Tax=melanogaster subgroup RepID=Q9VSJ3_DROME
gtgggtgatgcagaagtggtgcagaaaatagtgtcgaaaatcactttaatattttcaaaatgttgggcaaacagttggacttcaaatatttaatacttgtcctaatatgtattacaatattggtatgtgtatatcaacaaggtaatgtaactgcccgaatcgaaattgaagaaaaaatttgtagaaaggaaccgaaatttacggtagtggagaaaaagtctgactcaggacggtttactattaatacccctggttgtacaattccatatctgcatccttatgataaaagtatcttagattttatagagcagccagccacatatgtttgtaataatggtacaccagcattatttgaatcagataggaaatccataagagttataaaagaatcgttgcccttttataatgtaactgacataaataatctgacatgttgttacaaaacattttggagagaagatcctgatgatgatgttgcagaccataaagtaagatacagtgaagattgtcaagcatttgttaatacgactgaagtaaaagaagagtttataaagttacatgcagctacaacaatcgtgatatttatactgatttatttgcttttgtccctgtaaaaaacctatcggaaaatgtgaaaaacgatctgatccaagacgagtcctctttaaatattttagtgttgggcttagatgctatttcaagattaaattttcatagacaaatgccaaagacattaagttatttagaacaaattggagccgtagaaatgatgggatataataaggttggtgacaatacatttcccaatctaattccagcattaacaggaaaaactgtaaaggaaatcgagaacgattgctggccaactaaaacacaccattttgataaatgtccgttcatatggaagagctacaaacaaaaaggatatgtaacagctttcgacgaagactcttcttgggtgggaacatttaatcatataaaaaacggtttcaaaaaacaaccaacggactatgctttcaactattttgattttgaggctataagattactgggaaatactgggttggaaactgttgaaatttgtcaaggagcaaggtgggtatataaagttcatttgaactacttatccaatttcgttcgaacgatggaagataacttactaaagtattttggctttttctggcagaacagtatatctcatgatgatctaaatttacctagaataggtgatgatcattactactctatgtttaaatattttgggaaaaatggttatctcaataatacaattctcttcgttatgagcgatcatggaataagaactggtaaaataagaagtacattccaaggcatgatggaagaaagattaccgttactatttgtatatcttccagattggtataaacaacgataccatcaggaatataataatttactacaaaattctttgcgtttaacaacacc

SEQ ID NO: 7471 - DNA, 1476 bp, Diabrotica virgifera
  SmartBlast Evalue=2E-15; Info=Endonuclease-reverse transcriptase n=1 Tax=Bombyx mori RepID=D5LB38_BOMMO
acatgtgtcatgaaatattcacaaaaatgaatagtaaatgtttactacacgaataatgtaatcattcaatactatattaaatcttagttttcttcaattctaaatttgaaagaatgtttatttaatacgaaacaaatattttccatactttattagataaactgacattcttatataactaccatcaattttgacataaaatattaaagtcatatgtcaattagctaacttagattccaacgtgcgttatgacgtcattggaatctgcaataaaatagtttcaatgaaattgtcaatcggctatgaataaatatacactaacataataaagacatactctttgcatttcaaaattaatgtgttttggttcacttgtaactttctaaaaacacgaacaataaccaacaaaaatatacctgcttataggcgtactgtttaatatctgttccttgtatcagtttcagcactgcgaaaaatttgtaaattatagttactccaaaaattaaaattgacaaatatatgaaagttttatttcaaatttcataaaccatttgcttcttagtttatttgttattaaaaattgaaatattacttacatgagacttaaaaagtatttattattcgttcttcggtctgagtaaacattagcaaacacgacttcaacctttttgatagaagtttgttaaaaatatggggatttaaatacttcataagctattttttcccattttgttttattagtactaggactgagctcctcatttaactgttcagatttataaataatcagcgcttttttgttaatttttgtatattatttacgacacatttggtctattcacagtaataaaaaaacactttgtcgaaaaaataataaatttaactgaacagaaatatgttgtcatacatattttttgtcattgtttttgacaattatatgcaaacttggacaaattacttctcaattattatgttgtttaatgcctactctaaaccagtttttgagacagcgttaaaataaccgtcgtgaaggtgttaaaatcggtggtgaaattattaataacttcagatacgcagatgactcctccataacggcagtctagaaaaccttcaaaccctgttgaatggtgtaaacaacgaatgcactgaaaaggacttaacaatcaacgcaaagaaaacaaaatggatcgcggtcggagaaattactatcgaagactcggtactaaaattagataacaaaatcctggaaagggtggaacaccttagatatctgggtagctagattgactgcagggttgaaagcgacgaggaaatttcgaccagaatagaacttgcacgaaagagctttattaactggagttctgcattgtgctgcagaggagtcattgaccgcagatctaagagaaaaaatcttaataaatcagaagcatctgagttgtggtgttaccatcgtatgctcagaactcaaggacagca

SEQ ID NO: 7472 - DNA, 1476 bp, Diabrotica virgifera
  SmartBlast Evalue=3E-93; Info=Microtubule-associated protein RP/EB family member 3 n=1 Tax=Bombyx mori RepID=Q2F5S1_BOMMO
tgaattgaatggccgacaggccggaaaattaattagaggataaaattgttttcaaaatatcctgtttaaacaattgaaatttatttaaaagacatggcggtaaatgtttattccacgaacgttacatctgagaatctatcacgtcatgatatgctagcatgggtgaacgaatgtttgcagagtagttttgcaaaaattgaagaattatgtacaggcgccgcatattgccagtttatggacatgctttttcctggatctgtgcaattaaagagagttaaatttagaaccaatttggaacatgagtacatacaaaatttcaagattcttcaagctagttttaagaaaatgcaagtagataagatcgtccccatagatagactggtgaaaggtagattccaggataattttgagttcctacagtggttcaagaagttttttgatgccaattacaaagggacggactacgatgcgctgggagcacgtgccggagagcaattggggcaaggaggatctaacgcccctagaggtcaatctttgatgttacgtcggccgaacgcgacgccctctgcgcacgtactccagccacaacagacttcgccgactaagccgaagcctgccattagggccatgcccaaggtgaatgccgttaaaccaactgctgcgaaaccaatttcaaacagacctcaagctggtgatgcaggtaaaatagatgagctagcgaaccaagtcgccgaattcaagttgactgttgatggacttgaaaaagagagggacttttatttcggaaaacttcgtgacattgaagtgatgtgtcaagagtgtgaagatggaaatcctattattcaaaaaatattggacgtcctttatgctacggaagagggatttgcgcctccagacgaagttgaaggtgtgggagatgaagatgaatattaaacgatgatcgccttgcggaattcgccttaagttattaaattaagagaaaacgaaaatcaagcttgtaactaaagcaacattgattttatttgtaaatcagttaagtttatgtaacaaatagtttttataagtgttgcttgcatttgtgtgtcatgatggcattaaaaaacgtgatttgattatataaaaacccattatatgttttacgaactttatttttgcaaacgttttttaagcagtttctagcataattcttgtatccagtaaatcattctgccaattacctgaaatacgttgaatgcgccatattatatttttttcttgacatacaaactctgttaatcaatgttatagaatttgatcgttttggaacagtatactgacaaatgttattttaaataagtgtattatatttttatatattggagacctaaatcgtagttgtaatagagatctgagctaagtatggcgatcaacgtattagaaaggtatttcattgcgaaaccgttaaaagcagtttaaacctatttgtgattctatttt

SEQ ID NO: 7473 - DNA, 1477 bp, Diabrotica virgifera
  SmartBlast Evalue=1E-63; Info=Translocon-associated protein subunit alpha n=2 Tax=Culex RepID=B0XFI4_CULQU
gtcgaaaccaaccgtgcttgtagaaagtcaagaaaggtggccggtcatttagtttagagacttgttaaaatacaagcaagttaagtgaggctgtgagatcttgtggttcagtaaacatgaacaaattaatatttttagctttattagtgttcccagcagtcattttcattttcgaaaatggcaaaatggtatcgtatgctgaagaggaccccattgaggacgaagtagaagttgaaggggaagtggactctgatgttgaagcgacgactccagatgaagaagtggatgaagatacaaagtcactttcatcaccatatgctgatactaccctgttgtttgtgaagcctgaatctactggagcctctcaactagaaattccggctggccttcctgtcgaattccttgtaggattccgcaacaaaggtgatcaagattttgttgtagacacccttgaagcttccttccgctatccaatggacttcaacttcttcatccaaaacttctcagctgttggatatagcaaaattgttcaacctgaagaagaagccactttcctctacagtttcctaccagctgaagcctacgcaggccgaccatttggattgaacatcttgttgaactatcatgatgcttcaggaaacgctttccaagaagctgtcttcaatgaaacagtccaaattgttgaattagaagaaggacttgatggagaaacattcttcctctatgtcttcctcgccgctggtgtagtattgcttctggttattggacaacaaactctgctatcagttggtaagaagcgcagtggaggaagtggaggtagcagcaggaaatcggcacctgttgagactggaactaacaatccaaacaatgttgactacgattggttgccaaaacaaacactagctagcttaaacaaggaaaagctgcaaaaatcgcccaaaggcaaaccacagagcccaaggcagaggaaagtcaaacgtactactggatcagagtagtgttaactagtgactgaataaaaaattcatccaattcgttttcatcttgatcaaaagactcgtcattgaagttactaaattctacttcatcagaaagacggaaaattactactttctttagatgtatctaagaaaacgtttttttgtggaacatgaatggcttacatatgtattaaaaatatgtgtggaataatcttgcacttcagaataatcgattctaacaccaatatagaaacgttttcttagagttttcatagactgtcattactgtacgtactcattttttaagtttttccgggaggtagttgttttttgttctttcgaaaaactatttataattttgtatatttcagtgtgttgtgagtttccagttgttatatttgaaatagattattatatgattgaatatatcccgtgaatattcaaattacaccataatggtgctcaaatgacctattaaagcgtaatttgatttgtaa

SEQ ID NO: 7474 - DNA, 1474 bp, Diabrotica virgifera
  SmartBlast Evalue=1E-122; Info=Rab5 GDP/GTP exchange factor n=2 Tax=Formicidae RepID=E2BGN5_9HYME
aaataatgacagtaggttgggttataggttaatgtgtgatattgattttaaaaataagtgtattacattttaaaataaagggagaaataaagtgttaaaaattatcgatatactcttaagaaaaaaaactacagcagttgctagtggaggtcgtacaaatacatcatgtacgcaaccaagcagccatccttgaggatcaagcaggctgatttgaagtgtaagagcggatgtggattttatggaaatgcagactggaacggatactgttcagcatgttaccgaaaccatatggatatcgagcgacagaagaaaacaacagaccagtccagatcgcaagtgcccgggttctcaaagttcgaagagaaaaagagacaacaaacagataagaagaacaagtatctgaagagcttacctgtctttagaaagtcgtcaaatgtaaaagatgctggaagacctgaaaaatacatcgacatcatgaggcagaccaacccggacgccaacaaattgatggttgaattcatatcaatgtacagccaatggggcgagctagtcagaaaagacttcttcaaatttagccaagtgttttccaacaaaatagtaaacgaactggacgtcaagcccattgaagagttagcggaaatcgcacagaatcactacaatttgtatcacaaccgcgtcaattctaacgtcatttaccaagatgtgcccagtgaggttagagagaagttggttgagttttttgagaagtacagcatgatcagtctatacagtttcctgttctgcccaccaaccacaaacgacgaggagaaagaccttatcatacaagacagaatccgcaaactcagttgggtaaacgcccaccatctcgattgctgcataagtgaaactagcatcgaagtacgcgacttggtctacactgccatcaacgacctcctcggcatggactcaatgaaagctccgcaggaaaaactggcttgcgttgtcaaatgctgtcgcagcgtcgtggaggtcctgcagcattgccaaggaggacccgtgagcgccgatgagttcctgcctgcgttgatttttgttgttctgaaagctaatccagctcgattgaagagtaacatattgtatgttacgaggttttgtaaagattcccggttgatgcagggagaagctggatactactttactaatttgtgttgtgccgtatcgttcatagaaaacctcacagcggaatcactcaacatgccccaacaagaattcgaagcctacatgtcaggagagttgactggcgtaagtgcctgggaatcggccttagtagcctgcgagggaatgcatcaattgtgcgaacacctctcgctgctgaagggactttccgaaagaactacgaccgtacagaataccacccagaaacttagagaagacatgcaacgattaaaggaagaaatctgcgaaaatgttgtagctgtacttgcacgaacgccga

SEQ ID NO: 7475 - DNA, 1476 bp, Diabrotica virgifera
  SmartBlast Evalue=0; Info=Putative GTp-binding protein n=1 Tax= Glossina morsitans morsitans RepID=D3TMA2_GLOMM
acccggtggtgcaagtgtgaggttaacaatagtgttttcaaaaaattttgatttaacactcttatattaatatataaaagtatgccacccaaaaaagcgcaagagccggaaagaaaaccgcttatcggaagagtcggtaccaacttgagggtcggtatagtcggagtaccgaacgtcggaaaatctacattcttcaatgtgttgaccaagagctcagcagctgcagagaactttcccttctgtaccatagatccaaatgaaagtagggtgccagttccagacgagagattcgattttctttgtgaatattttaaacctcttagcaaagtgccagcttttctcaatattgtcgatatcgcaggtttagtaaaaggagcgtcggaaggtcagggactcggaaatgcatttctttcacacatcagtgcctgcgattccatatttcacttgtgcagagccttcgaggatgacgatgttactcacgttgaaggagaagttgatcctgtgagagatctggatattatctgtgaagagttgcgattgaaagatgaagatatgttaatgaagaatttggaaaaactcgagagaaccgttggtaggggtggagacaagaaactaaagccagaatatgacactctacttaaaataaaacaagtcttagttgacgacaagaaacatattaggtttgcagattggaatgccaacgacattgagatattgaacaaatatctgtttttaacatcaaaaccagcaatgtacctagtgaacctctctgaaaaggactacatcaagaaaaagaacaaatggttggttaaaatcaaggaatgggttgacaaacacgatcccggttctctcatagtacccttttccggcgtcttcgaacataaactggtagaagaatacgaagatcccgtgcggagaaagacctttttggaagaaaaaggtaccaccagcgcgttagataaaatcattgttcaagggtacaagactctacagttagaatatttcttcactgctggagctgacgaagtaaaggcttggaccattcagaaaggaaccaaagcgcctcaggctgcaggtcgcatccataccgacttcgagaaaggattcatcatggccgaagttatgaagttccaggatttcaaagaagagggctcagaagcagcatgcaaagctgcaggtaaataccgccaacagggaagaaactacgtagttgaggatggtgatataatcttcttcaaattcaatgctggtgcaggtctgcaagctaagaagaaatgattgtcactttccgttactgtttgtgttatggtttatttatacatcaacatgatctttttctatgcaagcattcgttgttgaaaaatacctttactcttttgttatatgacgctgttttttattgccatttaattaaattttgcatagatataccagccttttaaacttataacattgtcttaaataaataattttata

SEQ ID NO: 7476 - DNA, 1465 bp, Diabrotica virgifera
  SmartBlast Evalue=1E-136; Info=poly-(ADP-ribose) polymerase n=1 Tax=Tribolium castaneum RepID=UPI0001A4719F
gagaaatccggaaacgcatggagaaatagacataacttcaaaaaaagtccctggtagaatgtaccccattgagatggactacggagaggaggaagctgaaaagctggacattgtcgagtgtgattcaaagctgcatcctggagtacaagatcttattaaggttatgtttgacgtgaacactatgcagaaacttatgttggagttcgagttggatacagaaaaaatgcccttgggaaaattgagtaaatcacagattcaaaaggcttttggagttttgagcgaattgcaaactctgataaacgaaaaagcagaaagatccagatttatagatgcctccaacagattttacacattcatacctcactccttcggtgttgatgatccaccaatcttggacgatcctgaagttatcaagcaaaaaatcgaaatgttggacagcttgctggaactcgaaatcgcctacaacttgatgaaaacatcaggttccgaacatacagtcgacagctactacaagcagctcaatacagagatcgatatcttggagaaaacaagcgaagagttccaaattatcgaagaatatgtcaagaacactcatgcagctgaccataatacttatgagttggttatcgaccaggtgtatactgtcaaacgaaaaggagaagaaaaacgccacaaaccattccgcaagcttccgaacagaaaattgttgtggcacggttccagagttaccaacttcgctggtattcttctcaaggtcttcgcatcgccccaccagaagcacctgtgaccggttacatgttcggtaaaggtatctacttcgctgatatggtctccaagtcgccaattattgttgcaccaacgtcaacagtccgttgggtctgatgctgctctgcgatgtagctctaggaaatatgcacgaaagattgcaagccgattatattgaaaaattgcccaaaggaacgcacagttgcaaaggtgtgggtatgacacatccagatccttcagtggttaagaagattggtgatattgaagtgcctgttggaaaaggggtttccagcaatgccaagtccagtttgttgtataacgaatatatcgtttatgatgtggctcaagtcaacataaaatatttactgaagatgcactttgaatataggttctaagtggcttagtagttttagttttgttattcactgttttaactgttagttgtaagttctaaaagttaaagtgtttgttttttacaagaattgtaatttatacactattttcaatacttttatcttatgctaaatgagcttattaacaattttgctttcagtgctattttagtactgtttcggtaagaccagaatagagtagatgagatcatcaaaattgacgagcaatgtttggcacaattgacacaattattttatatttcgcatgttcaaccagcgatcaattgttgcttttttgaccattagtt

SEQ ID NO: 7477 - DNA, 1475 bp, Diabrotica virgifera
  SmartBlast Evalue=1E-107; Info=Troponin T n=6 Tax=Obtectomera RepID=B2DBH9_9NEOP
aatattcaaatggtttatttataacttaaacctaacatacaaataaaacaccattaaaattttctcttgacaatattacagtacaactttatttaataataaatataataaataattgaaatttgttggaacaaaaataaaacaaattacaaattctattgatgataattggtataacttgtttttatttcttattgagaatctgatgttacatttcattcagtatataacagatcttatacatttcttggcatttattcttcttcctcttcctcatcatcttcctcttcttcgtcaacctctacttcctcctcttcctcttcctcttctggttcgggttcgatcactggttctttaagatcttcatcatcatcagcagcttgtttaccttcttcctcaccttctggagtttctgggtcaccagatttcttgcctggtctttcaccgaaccattttggaagtcttgttttttgcctggagtcgaattgtccaaatttctctttccaagatttttcgttgagatctttaacgatattttcaaatcctccttcaaagagatgtttcttatcactgtacgacctagtgtctacacgacgttcatatttggaggctacttggatttttggagggtatttgcctgtgagggcttcagggtctagaccctttttcaaggctttgtgtctcaactgctgcttttgtctttctttcaattctttaagatcgtagtcttgacgtttttgcctttcttccaagtcatacttttcagtttccaatttgacgatgcaatcccagagttctgtggctctttcgcggagtttatctacgctaaggccatcaaggaccaagggtttgatacggatggaaagggagattttcttttcttcttccaattgttccttagtcttattcctttcaagttgagcggcagagaggttggatgcggcgtctctcttggtaatggtgaagttaggtcctttgtttttgttttggtctttaagagcctgcatcatggcttgacgcttcttctcggcttcttcaagacgttgtctcttttcctcaatatctctttgtttcttctcttcaatttcacgaacgcgacgttcttcttcagccttcttacgttctgccattttcctttcttcatcagcacgagtaattttgcgtttagcctgtttttccttgagtttctttaagtcttcttcttccttggcacgttgtttgcgccattctgtgatgtactcgcgaagctgttcatcgagatctgatctcttctgatcttgacgtttgatgaattctggatctcccgctccttcctcgactttggtggtagtggtggtagtcgtttcaacgacttcttcctcctcctcttcttcggagtaaacttcttcttcgtcagacatggttaaggagatttaaaaaaaaactagttgatgacaaagaggtccaggagcaccacacaactcagggagtccgca

SEQ ID NO: 7478 - DNA, 1474 bp, Diabrotica virgifera
cgaagtattcattctttggcctattacgtcacttggtggtgaggatctcctttacctaatggaacaaccaatcaccaagggtgatgttaagtgtgaccatgttcaatttgctaattatagaaaaattaaatcagaggctacattaaccacattgtgggaacgctacaagatcgatatatccgctttcgatgcagctaatgctcaaaaagtcaccaaggagaaggaggaccataacatagaaatcggaactggcattaatagtggacctggggttattaataaacctagtgaaacagaacaggagatcaaaaaagctgggggtgattcgtctggggtttgggcgcacagacacaacgaaagtacctcagaagtcagcagttggggtaccctgaatccttatggtcaatatgagctgactgtcagtaaatcatttacgaaattcatcaacggccaggcggttaccacttgggaaaacaccacaactattagagatgcgcaaggcaatattattaaaactttatactacaacgataatactgacagccagtatggcaacggcaacggcaacgatgaattcagctacaaattcgaactgaaacgaggagaattcgaacaccgacaagcaagttatcagatcacgctcgacgaaaacggaaaccgacacattgtctggacaaacaaaacaacgattacggacgaaaacggaaatattttacgaagttactactgggatgaaaactactggcgaagtcataccaatcaacgaacacggaaatatactcactatacaagaagagctaaaaagacaagaacagcaaagattagaacaacaggaaaggagacgtcaggaagaactaggtagacaagagttatttaagcaagaacaagagagaatccgagttgaagaggaaaggaaaaggcagaaagaattgcttataaaacaagaagcgcagagaagaattgaagaacaaagaaggattgaagaacaaaagagaatcgaagaaagtaagaaaacagaggaagaaaggaggcgaactgaaattagattcagagaagaagaaaggcgaagagaggaggaaaaacgtcgacaagatgaattaagaaggcaggatgaaataagaagacaagacgaaataagaagacaagaggaaataaggagacaagaagagataagaagacaagaggaaatacgaatagaagaagaaaggcgaagaatacaagaacataatactgcaacgacttcaagatatcctacgtatcctaacagatatgaagaagaaaggaggcgagaggaagaaaggaggcgagaggaagaaaggaggaggcaggaacaaacaaaaatattggaagagaggcgtagacaagaacaaatcaggttggaacagtggagacgtcagcaggaagaaaccagaagacaagaggaagagaaaaggaggatgcagcaaagtgggcaattcgccggttggtctgaaga

SEQ ID NO: 7479 - DNA, 1469 bp, Diabrotica virgifera
  SmartBlast Evalue=1E-163; Info=Putative gut cathepsin D-like aspartic protease n=1 Tax=Callosobruchus maculatus RepID=C7AAS7_ CALMS
ccaaatttttatcaattttattcaatcattaatctaattcagtaacaattattaactattttattcgaaaacaactaagagagcaactaactaataattctaaagtgcactaaaaaagtcttattttacacatatgaacaagtatgcacaatgtttgtttatgtaatagtatataaatattgatttatgaataaattttaaaccgtctcagcaaatccaactcggttgttgcccatatcaaattcggtgtagtatttaccaataaagacgtctcccaaaatccatagtggaccgtttggtgggggaatatcgattcccatgaatccagacaagcagattgttttgcccatctgagataccctcaatatgtaatcttttccttccaaaggaaaacttttaccagccaaaacgaagttgataactgggagtttcgggatcagctgacaatcaacgatgtattctcctcctggaattggtgtacctccgatagcctggttgatggctgtcatctcttctacaggtccagcaatcaagctggtaccagtatcggcgatagcctggcagcctgcactacagaaagttttggaacccacagttacttgatccattttaaattgccaataagcttgacgggtgacaggtatatatgtaaattctcctttgtaatgctctggatcggagcctcctaggatgatttcaccaccttctttgccgctaggatctctgttcaagtagaatgagaaaacaggctgattgacaagaccttgtttgatcatttgattaaatactggaggaactccatctacggaaattctgtcataagccattcccaaaataccgtcaaacttagctgctacaaaagctaaaccaggctcgctgacagcttcggcaaaggtttgatctttaactgcaacgtttccaaactgaacgacatccgtagacaaaaatccactaagacttccagatccatagtggatttcaaacttagttccgttttgtttatagctagacgatttcgatgagtcatatttgttgtgtagcaagcatgctatgttagtaaatccacatttcttcgatggcacccacaaattagatgatccagtatcgaaaacgactttaaaattctgtggtgggttaccaatgctaataggaccataatattgtgcatctaaataattggataacggttctggagttggtccaccgtatttgtttgaagtttgtttcacagatacacgagttaattcggttcccacctctcttagtgagtttcttatagtttgaattttctgaagtggaattcgcacaaaatcgcaattaactgtataaatactgcatataaagaataaaagcagataattccgcatttttacttttctttgtatttctgctaataaaccggtaacttaaattcccttctattcttattcttaccacacaaataaaccactccgccaaagacagtgact

SEQ ID NO: 7480 - DNA, 1462 bp, Diabrotica virgifera
  SmartBlast Evalue=5E-79; Info=Endonuclease-reverse transcriptase n=1 Tax=Bombyx mori RepID=D7F166_BOMMO
gtccccaaataaacccatcactaggaaaaacgtcataatatcacttaaaaaaaaatggagaggagcaaagtgacttaaggaaaataacaaatatagtggaatcgttctatagcgaattatatgacacaaaacatgagcctgataataactcaaaagaaaatctaaaaagaagaattaaaatgtcaactctgaaattctacccgatatagacgtccatgaaatcaaaccgccctatctcaaatgaaaaataacaaagctgccggtccagatgatatccttgctgaaatttttaaggaaggtaaccaagctattatggaggagctaaaattcctatttcatctagtctacacaaggcagaaatacctcacgattggaatgagagtattacaatactgttattcaaaaaaggagacaaaagatacttaaaactacagacctatctcactactctcacaaatgtacaaactctttattagaattataaccaatagactaacaaataaaatggacagttatcagccagttgaacaagcaggtttcagaaaagggtttagtaccatagatcaatctcctcactatgaaaatattgatagagaaggcaaacgaatacaacctagatttatgtttagcctttgtagactatgaaatagcgttcgatagtgtcgagatatgggcgatagaaaaagctctaaataacagcagaatagactccaggtacaggcaactcttacataacatctataaaacagcaactatgacagtcgaatgggaaaataaaacaaacaaaaccaatcccatagaaatgcgtagaggtgtaagacaaggagatgtaatatccccaaaactcttcaccttagctctgggagacgtctttaaagaactgaaatgggaagacatgggtatcaatataaacgggaagaatctaaatcacctctgatattgcgatgatgttgtccttattacagccaaccaagaagaactagccacaatgctgactcaactagcacacacatcggagaagatagggttaaaattgaacatgagtaaaaccaaaatcatcacaaatacaaacgacagaataaacgtaaatataaataatgtcaatattgaggttgttgacgaatatatgtatatacctgggtcaaataatcaaagctaataaagagaaccaaataattgaagtacacagaagaatccgattggcgtgggcagcatttggaaagttaaaatggatactaaaaagcacaaagatacaacagtacctaaaaacccgtgtatttgaccagtgcatccttcctgttctgacgtatggctcagaaacattaacaaaggccagcataaacaaaatttaataactataacaaaataataaataataaaaattgaaagatccatgttgggaataaaactacaagacagaaaatcaaacaaatagataagatagaaaacaaaagtaaaaaat

SEQ ID NO: 7481 - DNA, 1462 bp, Diabrotica virgifera
  SmartBlast Evalue=5E-76; Info=Cytochrome P450 314A1 n=1 Tax= Tribolium castaneum RepID=D6X3I1_TRICA
accagcatacaaaagactcgctcaaagtgaagatacaatttattaagctggctttagaattaattcacactgcagatgaagctacacacgaaagtgccatttttcagtcggttctcaaggctgatattgatgagaaagaaaaaactgctgcaattgtagatttcatagcagctggtattcacacactcaaaaacagtctggtgttcctcctgtatttagtagcaaaacatccttctgctcaacaaaaaatcttggaagattcatctaaaggatatttgaaggcatgtgttacagaagcttttcgtgtccttccaacagccaattgcttggctcgagtaattgaggatgatttggaattatctggttataaagttcgcgcaggtagcgttttgatatgtcaaacaggaattgcttgcaaaaacgaaaaatatttcagccacgcaacagagtttagacccgagagatggctgaatcaagaaaaatcactaactacaagcaattccacatttcttatgactccatttggagtcggccgaagaatatgtcctggaaaaaggtttatcgagcatgtgcttcctattattttagaaaacgttgttaaaaattttgaaatcgaagtagtgaggcctatggagctgcaatttgagtttttgttagctccaaaaagtcccacggctatgatttttagagatagagatagaagttagtttattttaaattactgttgatgtaagcagcgttcgttttgttcattttttaatgtttgcaaaaagtaagtttatttttatatattttatctcgaatttatgtgttaataatcattatgccaagttggagctattgagcaaaaaatatatttaatgatcacaaggaatacattaaaaaacgattcaaaataaatattacaacaaaaaagtattttggaggatgtgctataaaatctatagtttctgtgatcttttcatcatacccatctattagtaattattgctttttttttcttttgctagattttcccaaatgtccagattctaataatgatagcttgaggccttcttagcttatgccttaggataaggaatgcttaaaagatgaagtgtgtatgtttttttttattattgaaagcccttttgcgttgtgatatacgtttgttaaaggatctaccaattcgaccgatgtaagttaattggttctcacaccttgagcattaaatatattttatataaatgtacctaattttactattattgtttataaaataatttattttttaaattataccaacttacttttgcaactgatgaattcgactttgattggaactaggccattttatgtatgtactatggtgattacaatctgactgtaataatttttattatacagggtgttggtgaataagtgtgagaaattttgaggtctagttctacatgaaaggataatgccggtttgctctataaac

SEQ ID NO: 7482 - DNA, 1467 bp, Diabrotica virgifera
  SmartBlast Evalue=1E-100; Info=Serine protease P98 n=1 Tax= Tribolium castaneum RepID=D6WPH3_TRICA
atacattaatgtatataacccccccttaaaaacgataaaaaaatataaaaattaacgtaaatattgcacgacattagtcgttatcacattcggaatatatatttttttcagtaaaaagtgaatatatgtgccactgaattgaactactggatctataaaaatgggtgtctctggtactctggtagtgtccacactactcattttatacatttcaaggatggccgcagctatagactctgtttgtgattaccgacaacagttaacaacgggtgcatcttacacctttaacaactatggttctccaaatagctatccgattggaagtgactgccgatggtgggtccaaggtgatgtagatactagagtctatcttacttgcacgatagacattccactgacaagtaactgtggcggagacaagtttagagtctctcttataggtgatggtacctacttttctgatgctaggaactactgcggattgcaaacaatatcactagtctctacgagaaatactctcgctgtggaaatgtattcaacgatttattcatccggaggggtgttcagctgttcaataaaggctgttcgaaatcctgttactacaactaccccagcacccacttgtgactgtggttggaagcaagcaaccagaattgtcggtggggatgatactggtgtccacgaatacccttcaatggcagctttattagataactctatccttgaggtcatatgtggggcagttatcttaaatcagcgatatgttatgactgcagctcactgtccaactatagttacaatggacaaaatgagcatcctcgtaggaggttgggatatgtctcaggttgattctaccaaggaatacgaagtatcaaattattggaagcatccccagtatgatgctaacacccaaatcaacgacatagctattgtgcaatcacgttacctgatagcgttttccttggacgttggaccaatttgtttaccatttatatacgaacaatataattttaactaccaaagtgttactttattaggatggggtcaaacattttacaatggtccttcttccgatatcctccagaaagttaatgtccaagtaacgaataactcgtactgccaaaaaatgatgcccggtaatcagattacgcaagctcaaatatgtacttacgcctcaggtaaagatgcctgtcagcatgattctggaggtcctgtaatttggcaagattctgttagtagaagactgtatgcagttggagttatttcttatggattaggatgcgctacaaatcgtccagctgtaaatactagagttacgagctacttggattggattgtaaatattatacaagattatggcttttgtatgaaataattttgtttgtatgatataaaccaagaacttaaaaaatagtaattaaaatatatttgttgttaaatgttgtaatatacaaaatgttactttat

SEQ ID NO: 7483 - DNA, 1472 bp, Diabrotica virgifera
  SmartBlast Evalue=0; Info=Tubulin beta-4 chain n=122 Tax= Fungi/Metazoa group RepID=TBB4_HUMAN
taaaaaatgaacacttttaggaattattaattctcgtcagcgacttcttccacgtcatcttcaaaatcagcatcgtcatctactgcagcgttttcgtattgttgatattcagatatcaaatcattcaaattcgattctgcttctgtaaattccatctcatccataccttctccagtataccaatgtacgaaagcctttcttgcgaacatagctgagaattgttcagaaatacgtttgaacagttcttgaatggcagtggtatttcctataaatgtggcagacatcttcaggcctctggggggaatgtcacaaacggcaaccttaacgttgtttggaatccattcaacgaaatagctgctatttttgttttgaatgcttaacatttgttcgtcgacttctttcatggacatgtgacctctgaacacggtggcaactgttaaataccttccattccttggatcacatgcagccatcatatttttggcatcaaacatctgttgtgtaagctctgcaacagttaaagctctatacttaatactttgctttggtgtaagaggcacaaatccaggtacgaagaagtgaagacgggggaaaggtaccatattaacggccaatttacgaagatccgcatttaattgaccggggaaccttagacaggttgtcacacctgacatagttaaagaaactaagtagtttaagtctccataagagggcgatggcagtttcaaagtatgcataccaatgtcgtaaagagcttcattatctatacaataagtttcatctgtgttttctattagttgatgaacagatagggtagcattatatggttctacaacggtgtcagaaactttgggagatggaacaaccgagaaggtattcattattctatcgggatattcttcgcgtatttttgcaataagaagggtacccataccggaaccggtaccacctccgagagaatgtgcaagttggaagccttgaagacaatcgcaactttcggattctttcctaataacgtccataacagcgtctaccaattcggcaccttcagtataatgtcctttagcccagttattccctgcacctgattgtccaaatacaaagttgtctggtctaaaaagggctccgtagggaccggatctggcagaatccatagttccaggttccaagtcaacaaggatggctcttggaacataattgccaccgcttgcttcagtgtagtagacgttaattctatctagctggagttgtgaatcaccaacataacgaccctgaggatcgattccgtgttcatcggagatgatctcccagaattttgaacctatctgattgccacattgtccaacttgcacatgtacaatttccctcatgtttccaacttagtgtgtactaccgccgggtgtagaattaagtctgaattacttttatgattgatttaagcgagcgataagataagatagcctcgtacttac

SEQ ID NO: 7484 - DNA, 1471 bp, Diabrotica virgifera
  SmartBlast Evalue=1E-176; Info=Mandelate racemase n=1 Tax=Culex quinquefasciatus RepID=B0X3G3_CULQU
gccgtagagttgcaaggtgacagatcatctgcaggctaaagaaaatgagtaattcactgacgggggtaaatttgaagatcgtctctttggatgtcaaggatgtgcgctttccaacttctctccaggctgatggatccgatgctatgcacaccgatcctgactactcttgcgcctacgtcaccataaaactccaatcggggttagaaggatacggactaactttcacttgcggtagaggcacagaagttatcgtagcagccgttgaatctctaaagtcattggtcgtcggccaagttgtaacagacatctacaaagaattcggtgtgttttggagatctttaaccagcgaaagtcaaataagatggattggtccagagaaaggagtaacccatttagccaccgcagccataatcaacgccttatgggatctctggggtaaactcgtaaagaaaccagtgtggcaactcttggcagatatggaaccagaacaactagtatcctgtatcgatttcagatatctcacaaacgtcgtgaccaaagaagaagccattgaaatgctcagaaagggtagagagggtagagaagagagaataaataagttgctcgaaaaaggttatccttgttacacaactcaagcaggttggttgggatattcaaacgaaaaaattcaacaactagcacaaaaatacatggatgccggattcacagctttcaaagtaaaagtaggcaagaatttaaaagacgattgcaaaagattggaatatataaggaacattattggatgggaaaaaactttgatggtggacgccaatcaagtctgggaagtacaggaagccattgactggatgaaacaattggccaaatacaagccactctggattgaagagccaacatcacccgatgacgtactcggtcacgccgaaatctccaaagccctcaaaccccttggaatcagcatcgcttccggtgaaatgtgttgtaacagagtattattcaaacagttcttacaaactgacgccatccaatattgccagatcgattccgctagaattggtggagtcaatgagattctatctgtgtacttgatggctcaaaaattaggagtaaaagtatgtcctcacgctggcggtgttggtctctgcgaaatggtacaacatctacaaatgtgggactacgtctccctatctggaacctccgaaggtaaatgggtagaatacgtcgatcagcagcacgagcactttgtgcacccaaccataattgaaaacgcccattatttagctccaagggctcccggttataacacagaactaaagaaagaagcacttgaaggctacgtttaccccaacggaaaagaatgggaaagcatgtttgccaaaggaatattccatgatccaagaaaagcacaataaattaaaaagtacattggaacatattactcttctgtttttatgaagaaataaactataaatca

SEQ ID NO: 7485 - DNA, 1471 bp, Diabrotica virgifera
  SmartBlast Evalue=4E-93; Info=Lipase 1 n=1 Tax=Culex quinquefasciatus RepID=B0W6G8_CULQU
tttattgttagtagccgtgtagtagtcaatatgaagtataaagtaatatttttattgtgcgtttggtgtgtttattcaacttctggtattaacatattggactccgccaaaaatcttatacatggtggatccgatttcgtcaaggactctatgaacaatgtttttagctttgattcgccgccaaagagaacccctattccagaatttatcaaagaagctggatatgagtcagaaagtcattatgtaactacaccagatggatacattttaaatatgcataggattccacatggtaacactaacaagactaaaaaaaatatacctgtttaccttcaacatggacttttatgctcatcggctgattgggtaattctcggtccaaacaagagtctctcgttcctactggctgatgagggttatgacgtttggctaggaaatgttagaggtaatacttattctagaaatcacacgacactcaatccggacaaagatgctgatgcattctgggacttcagctggaatgaaattgggatttacgacataccgaccatgatagattatattttgaaaaccacaggaaaatcgcaggtatttcatgttgggcattcacaagggacaacttcattttacgttatgacctctgaaaaaccagaatataaccgaaaagtcaaggcacacattagcttagctccggtagccttcatgcaacatttggtcagtccgttggttagagctttagcttatggcaacttaccttttggaaaccagcagacatttattggaaaaaatgaattttttccttctacagcatttttagttttgcttaatgacgccatatgtggtgtgggagttggagcagtctattgtaaaatttctatatttgccctcgctggtttcagtccaaatgaaatggacgccaaagatacagctgttatatatgctcactatccagctggtgctgctactagacaaatcttacattatacacaagaagtagtttctggccatttccgcaaatacgattttggcaaaattaagaacaagaaattgtacaacggatctgaagtaccacccgattataatctatttaacgttaaggcccctgttcatcttatctacagctctaatgattggctcgcgcatgaaacggatgttgaaaacttgtaccaacatttgaagagtgttagggaaaagttttgggttcctatcccgacatggaaccacatggactatctatttggaaaggatgctccaaagcttatttacgagaaaattatgagcattcttaataaatacgaagattgaaatatgtaatatatattatcatttataatgatatatattaaaatatatgttaagcaataaatattatatatattaaatgtcaaagtttcctctttatttttattgatacaataataatggtaagaaaattatgtttttgcactaaacaattaataaaaaattgata

SEQ ID NO: 7486 - DNA, 1472 bp, Diabrotica virgifera
  SmartBlast Evalue=2E-50; Info=Adenylate cyclase n=1 Tax=Aedes aegypti RepID=Q17KH2_AEDAE
aagaattttgtaaaataggaagatgttgcgtaaaataaactttcctgtagaaattcccttattttgttgcatatatagccagattctattgggtactatatcatcaaatctttacatatacagaacgtgctatgttacacttgggtatgataaatccgattgtgctcaattgggaagagaaacaaacaacatgaccaagaatttagaaacattggttcaacctacagtaaatgaaattgatatggcatcaaatttaagtcaaacgtttattcccttgataatgaatttgtttatcggatcctggtcagataaatatgggagaaaaccgtttttggtaataagtttaataggtttagctctaacctctgttcttatgacaatattcgcctacttcgaaaatttatcgccttggatatttcttatctcgtcaataccatcaatgtttactggtgcatttagtgctacgtttataaccatcaatttgtatatagcagatattaccacaccagaaacccgtgttttcaggtatggtatttaccaagcagtaatggccttggcttctctcattggaaaccttagtggatcatatttattttacgctaccagttatgtagctgtattctctgtagccacggccttgttagcaataagtgttttttatacgatatttttattaccagaatctctagatgtggaacgaagagttccaaaaataaaggatctaatcaaaatgatgaacattatggatactttctctattaccttcaaagaaagagaatctaacaaaagaaaatctctgattattatcctcatacttattataggttttaattttatttattatggagacctggctgtaagagttttatttttgcgagaaaaaattcaatggacattaacagaaataacatacggaaatagttttgccagcgttgtctacattttttgtatgatatttggaacaacaatattgtacaaaaaacttaacgaaatgcatttatgcatgttggctattttttccatgggactctccagcttacttaagggtttggcccaaaacgggatttatatttacgcaggtttcgcagtagaaggatttgttggtttaggtacttctatgttacgaactatattaacatatattttaccctctaatgaattgggtaaagtctacatgacatctagcgccttagatggcatattttgtttagtggcttcttctgccttatatccggctatttatggagctactcttacgacatatccgggaagctttttctttctggatgtagcaattaattctgcaatggcagtactcttattgtatcttatgaggcaccctatacccagaaatagtgaaccagaaaaagaagatttaggaaaagtcaataaaattgagtctgacatcatttttaacaccaaagatatcgaaaaattttagcggaaaggaatagaaatctcattactcaacg

SEQ ID NO: 7487 - DNA, 1470 bp, Diabrotica virgifera
  SmartBlast Evalue=1E-81; Info=UDP-glucuronosyltransferase 2B20 n=1 Tax=Culex quinquefasciatus RepID=B0VZA0_CULQU
cagtcgtatcctaagcatgaagttcctacatatatgtttaatattgcttataaactatgttccatcattggctctaaatatactgtatgcacacgatgtagcaagtccaagccatgaaatatggaattatgagctagcggctgcactagtgggaaagggacacaacgtaacaatgtttagtcctcttcccaaacaaggacaaggtcaaaaaaattaccatacaattcaaattgaaggtctattggatgaaattcaggaaaattttgatttagatgatgtcgtcgaaaataacgattttgaaaatctgttattgtatcatgattggggaactttctcctgcgaacatacagtacaaagtaaagggttgtcaaaactattgtcatatccgagagattcttttgatttaatattagttgagtacacttttaccccttgtttattctatttaattcaagctttcaattatccgccgacagtagtaataacaccatttctcttgccagcatttttagctgaaacatttggaagtgatgttcagcctgcttatatagctagtcatgtattaaaccacaatggaaaatttacatttttcgaccgattgcggaattttgctttgttgaagatggacactctactgcgatacttctacgtgaatgataaaataaaagaatatgccactaaagcattcgggaaagacctagcaccacttgattccttgatgaatcacgtatcactggttttatgtaataccataccaggatttcatcatgcgcaacctttggctccaaatattatacctgtagggggattacatgttaccctgggcaaagaattacctgaagaatttatgaatataatgaacaacgccaaggatggtgtaatcttaatgtcatttggaacaaatatacattctgctaacattaaagacgataaaaagaacagtattattgaagcattgggtcaactaaaacaaacagttctatggaaatttgacgccgatctggataatcttcccaaaaatgttatcctaagaaagtggttgccacaaaaagaaattttagcccatcctaacctaaaactctttataagccacggaggagccttaagtaccattgaagcgtctgccttaggtgttcctgtcttaggaattccatttctattagatcaaaatgcaaatatacaattgatggtagaaaaaaaagttgccttaaaagtagattataccaccatgacttcagcagtgttagtggataaaattaacgagattttaaataatccggtctacgctgaaagtgcaaagaaaatatcaaatgtgataaacgaccagccacaaaaacctcttgaaagggctgtattttgggtcgaatacgtagctagacataatggaactcacgctttgatccagcttccaagtacctacccttttatattacgtcttgtttggatatttatttgtttgtgttcattata

SEQ ID NO: 7488 - DNA, 1468 bp, Diabrotica virgifera
  SmartBlast Evalue=1E-110; Info=Cytochrome P450-like protein n=3 Tax=Tribolium castaneum RepID=D6X2T2_TRICA
ctatacagttcttcctccggcactaaatggtaaatatgcaaacggatgtcttttggcaacattctccggcaaaaatctatcaggatcaaatctctctggatcctcccatacttccgcgttatggtgcagatcataaatatgtataagaactgtcgaatttttaggtattgtgtatccagaatgagtgtgtatagtctttccagtcactcgggaaataaatggcacactaggataaaggcgcagacattctttaacgaatctttccaagaacctgagctcccctagttgttgctgagttggatattgggttgttcctaagactgatagaatttcttcatatatttttgcctgatattcttgctcattagctaaatttaacagaacatagcagagtgctaccgatgtcgtatcatgtccctcaaacataaacgtatctacttcctctttaattcctttttcatcaatatcttcaccagctgctcttgcttcaagcattaagtccaataaagctaatctttttcttttagagtaagaaaaatttccttgggcatccatttgtttgctttgctccctttctcgaattatattggttgataaatcatgtaaagtctttaagacatattttttaagggctctgccgattggaagcatattaaatataaaatcttgatacaaaagtggtttgagtattctatatgtggccatttttccatacgcatgaacagcctttttatactcatcacaattcttttcgcgtaaactcactcccaaagcagattctcctattgaaaataacgtaaaatcagtcattggtttcactacattaatatattcctttccagcgtccttatctagctcgtcaagtaaaatttctgtttctttattaaacacttcaagatatttctgtaagatattaaagtgaaaagctggagtcagaatctttcttctggaatgccatttgctaccattgctggttaataaccctgttccaagccaattatttaacaacctgtatacaaaacttttattgttattttccgaatgtcctaaaattagctccatgtcctcaggggggcctgcaaggctaattaaatataactcgaagaggccccatattttgtatattggatagaaaagttttgatctctcgcggaggattctaaaaagttcctcattctctaaattaactaattcataattgccaataattgggaaagtctctggtcctggaatttcgttaacatatttccagtatttatgataagtgtactgtcgaaataaaaatattgctatcacgcacaacaccagcaaaagaatatacatttttcgttaattctagacaacacttgatttatttgtgatgtaagacctcccaggataatgttctccttgcagtgaatataaattattataaacattcgttgataatggcatcatctttaaaaatgtaaacaaaatttatatagtg

SEQ ID NO: 7489 - DNA, 1469 bp, Diabrotica virgifera
  SmartBlast Evalue=1E-113; Info=Beta-glucosidase (Fragment) n=1 Tax=Tenebrio molitor RepID=Q9GSE6_TENMO
gttttgattgtacttaataaaatatgtatctcaaaaccttttgaccgttattattaaaatcgatgttggtaaataataatctaaaattttagtgcaatttatgtagtagttatgctactcaattttagggttctgattttaactgtttcatttagcaacattttggcagaagattatgtaattaacaataaacgattccctgctgattttatgttcggcgtggcaacgtctgcataccaagtggaaggtggatggaatgaggatggtaaaggtgttaacatctgggactactttacgcacagaaattcttcggttataagggacaaaaataacggagatatcgcctgtgattcctaccatagaattaaagaagatatagctatattaaaagaccttggtgtaagccattataggttttctattagctggccaagaattttacctaatggttttcgggatgaagttaaccagaagggaatcgattattacaaaaaccttatcaaagaacttaaggataataatatagaaccgctagtaacactctatcactgggatttgcctcaattcttacaagatttaggagggttctttagtagttcacttgaagtttggtttgcagaatatgccaggatttgcttcgaagcttttggtaaggatgttaaatattgggtaacgttcaatgaaccttcatctatttgcaataatggatacggtaaaggaaaatttgctccaggaatttataatccaggaattggagagtatctatgtatccataatctcttgaatgctcatgctgcagcgtaccatgtttatgataaagaattcagaagtacttataatggtaaagtaactacagttcatagtataagttattgtcagcctaaaacaaataccacggaagacattgaagcagcagatcagaaaatgcagttcaatttgggttggatggctgatccaatatacttcggggactatccagaaatcatgaagactcgtatagcgacacgaagcaaattagaaggtttcatcgagtcacgtcttccagaattcaccgaagaacaaaaggaacgactaaaaaacacctcagactatttcgctgtaaactcctatgactcctacttcgcgtttgccataccagagcctgccattgttctacctccatccttagatgcggattctggagttggtggtaccaaggaagggattggggatggttcttttggaatgggcaaactactactatggattaaagaccgatacaacaatcccgatatgattattactgaaaacggactgatgacccaaacagaaacgttggaagatgatgataggattagtatggtaaaaaattgtttgagccgattcagagatgttatggatcaagtcaacctgttgggatatacgttatggagtgtaatggacaattttgaatggacaagagggtatactgcaaaatacggaatctacca

SEQ ID NO: 7490 - DNA, 1466 bp, Diabrotica virgifera
  SmartBlast Evalue=1E-157; Info=Sphingolipid delta(4)-desaturase DES1 n=2 Tax=Formicidae RepID=E2AQB5_9HYME
gaattgatacgaatacgagtacgagtaccgtcaggttggtcaattcagtattcagaatcgtagaattttgaattttctgtacgtgtacgatgagtcgtgagtgaatcgtatcgtatcgtggtatcgtatccggtccggttagctaagaatgtgtcaaacagggaagtttttaaattgttaatttagaagttaattttttgattaagttatacctaagtgcgaaattttcaaaaatgggccaacacgtatctagaacagatttcgaatgggtatataccgaggaacctcacgctagccgcaggaagcaaatcttagaaaaatatccccaaatcaagaaactctttggatacgatccgaacttcaaatgggtcgtaacgagcatggtacttacacaattcgtactgctgtacttactcaaagataggtcatggccagtgctaattttagtagcgtattgcttaggaggtgtcatcaatcactcgttaatgttggctatacatgaaatttcccacaatttggcgtttggacacgcacggccgttgcacaataaattatttggattttttgccaatttgccaataggattaccgattactataagctttaaaaaataccacttggaacaccacagatatcaaggtgacgaacagaaagatacggacatcccaacgtacatagaggccaaactattttgcacgacctttggaaaattcatttgggtgatactgcaaccgtttttctactctttccgcccactcgtagtttatccgaagccgcccacgcttttggaattcgtaaacctggtaattcaactcgccttcgatgctctcgttgtttattttttcggaggaagaatgttgggatatctccttattggatctgtcatggctatgggtcttcatccggtagcgggacacttcatcagtgaacattacatgttcaaaaagggctacgaaacgtacagttactatggtcccttgaactggataacatttaacgtggggtaccataacgaacatcacgattttcctgctgttcctggttcaagattaccagaggtaaagaggatagcaccggaattctacgacaacctaccgcagcaccacagctggagtgcagtgttatacgacttcgtgatggatccagatgtaggaccttacgccagaatcaggcgaaaagccaaaggcctatcaacgtaattcccatcgacaaaacaccaaattacctataattttattgctcgcgtctcattatgattgtctgtgacaaaatgagacgaggacagtaaaatcttttgcttatgtgtggttaaaagtagcctttagttgactgtacataaccagtgacttatgtcctttttaaatatagtttatttataatataatacttatttaaaaatgttattctttctccaacattgtgatatatgtacagtgcctgtaattcgtgtgtaaagattataatta

SEQ ID NO: 7491 - DNA, 1459 bp, Diabrotica virgifera
ggcccattgactttttttattttaatccattttaaatctaaataatgcaataacattttgatctaacttatatgtcaaatatttatatcaatatcttaaatcaagtattggtctagtggataggattcctgcctttcacccaattttcctacaaaacgtattataaaaaatttttttttcacgggataacagcaatttcctaattattaccatttaataatctagaagtcaaacaataaggaatgcacgcaattttccccttgttgccatattctaaatttgaaaaaatgggaataaaagattattttgacatgccattcctattacagcgagcatttattggctagaagtagtgacgattatatatgacgtcattattatatttggtcagatggtaaatggtaactgacgtctttcataatattgtaggttaaatataaagaggaaaagtagtaggaaagaggaagaatccactagtttacattatacttatagttccacaaaacttcattataagtttttaaagttattaagctatttttagcattttagtagtaatttgactgcaaaacttgtgtaaagcttgtacattgggaggaaccattttgtggacccacaagatctcacaattaaaaaatcactcaaatcggacaacaggtttaggaaattcgagacatcaaaaatgtcccaattttaaagtggtgcgttaattttgctgttcagtgtattatagatatagaaggtacgtagaattttaatgggatagggacatcaataggtgtaagtgaaacaatacggtagtttataacgaaaattgctttttatttgccgagtagcacgtattcacctagcgccatctatcggaaaaagctaaaacttaattttaattgccttaaaataagagatttttttttaatgaacataactttacgttttttgtaatctaatcgactcttttatattatctgaagtaattggattttgtcagattgataccagaatgatcagaaagcacgaattctaagtacctatgtcttcattcagtctgtatatcatcaaattaacttattgtacaacacgaagaaacatacataattattatgacgttatagtacgggatctgaatataggtcgatctgtaccatctgctttccggatgaaacatttttttattaaatatcatacacaggcaaatatttccagcatgggttgcctatcaaaatcgtgtcatagccatccttagggcgggccgtaggggttgaaatcaatatttcaagcacatctttttttaaatatggtagaattattcctatctttaaattaaataggcgcattcagcacatttcatagattaatcaagaaaaaatttgaaaaatatgccacggtggcaaatttttgaagacaccacaaaatataatgaattttgcggtggacatcagaactcatcattggatcatgg

SEQ ID NO: 7492 - DNA, 1466 bp, Diabrotica virgifera
  SmartBlast Evalue=1E-159; Info=Trifunctional purine biosynthetic protein adenosine-3 n=1 Tax=Camponotus floridanus RepID=E1ZV59_9HYME
gaatcgaagaagtcaaattaatttattaattcccatagtattaatttggccggtgtaggaaaactaggaaaatttattgaagatgtcaaaaaatgtgttggttattggtggcggaggtcgtgaacatgccatagtttggaaactttcccaaagttcaaaaataaacaaaatatttgtcagtccaggtagctatggaattcaacaggtggcaaaagctgtatcaataaatttggatattaaacaatttaaggatgttgttaagttttgtaaagataaccaaattgacttggtagcagttggtccagaggatccattggcaaatggaatagctgatgcccttttagcagcaggaattaaagtttttggaccacaaaaagatgctgcccaaattgaatcagacaaaaattgggctaaagcctttatggataaacatcaaataccaactgccagatggaaatcttttactaatgcccaacaagctaagaatttcataaacagtgccccatatgcggctcttgtcgtaaaagcaagtggattagcagctggtaaaggtgtagttgtagcaaaagataaaaccgaagcatgcagagcagttgatgaaatcttgggtgataaaaagtttggatctgctggagaaacagtcgtcattgaagagcttctttctggcgaagaagtgtcagtcctagcgttttcagatggaacaactataaaagctatgttgcctgctcaagatcacaagagaatttttgataatgatcaagggccaaacacaggaggaatgggggcatattgtccatgcccactgttaagtgaagaacaatacaaatttgtacagaaggagattcttgaaagagctattaatgggtttagaaaagataacttaaaatttgtaggtgtattatatgcaggcttaatgttgaccccagatggtccaaaaactttagaatttaattgccgctttggtgacccagaaacagaagtcgtattaccattgctggagtctgatttatatgacattatgctttcatgtgccgaaggaaccttgcataaacaagatataaaatggaagcaaaatattagtgctgtaggagtggtattagcatctaggggatatccagaaacatcaagtaaaggacaagtaatctcaggaatagaaaaagttgcattaaatacggaccatattgtcttccattgtggtacagccctaaaagacggacatgttgtcacaaatggtggtcgagtgttgatatctgtagcattagcaccacaacttccagtcgctgccgctaaagccacaaaatcttgtgaaatcatcagatttgatggacaacaatttcgtcgagatatatcacataaaggaattgcaagggctattcttcagtcaggaaaactaacttacaaacagagcggcgttgacatagatgccggtaacgatttagttaatcatattaaaccaagacaagacc

SEQ ID NO: 7493 - DNA, 1465 bp, Diabrotica virgifera
  SmartBlast Evalue=6E-11; Info=Endonuclease-reverse transcriptase n=1 Tax=Bombyx mori RepID=D7F166_BOMMO
ttcctggtcatcgttttccttctacttttccctgtaaaattaggtacagcagtccatatatctcgctgttcctcatcatgtgaccaagcctttagattttggctgtttttattgtggttaccacgttgacggacagaacgtctatagacgtctaatttccattgatgtaatgtgacacaacgtctatagacgttgcattttccctattctactttgcaaaatacataatatatggtcacaacaattgcttatacatttgacgtactgtccgtcaacgtgttaacagctctttttctttttgcatactcaacaccctggttagttacgtgatcggtataagatatcttcaggattcgacgataaagccacatttcgaaagcctcaatttttcaaaaccagagttgttgaattaattgtaactaattagtgtaaatcggaaccaaaatggagcagctgaacagagacacaaagacacaggtgaggatctcggcacaggtggctgcgctcatcaacaacaagctgcgcttgtttcagcgaaaatctagatgtgatacctgcctatcgataaggcacatcattcaacccggatctatccactgttggatataggtctccctcggtcttttccatgcatttctgtttgtttgcatctaatttttgtcgatccgttttatgacatcaggccaactggttagcgaacgacctctacctcgatatgcttcttgtcttggtctccagtgtattattcgctgtgtccatctgttatccgacattctagctatgtgtccagcccaattccactttagggtcataattcgattaattaatcgataaggcacattcaatataaaaataagaatctcttggtagtgctaattagtaataaaggaacggagaatgtcactgatgactcaaaagtagaaattgctttagcaatgtgaacatgcagtaaataacggtcttgtctttgttgatacgattaaaagagtacacgaccttaatcagttaatgagatagtactaacagttggttttgtcaccccttccaaaaaatgtcttaaatgtaccaccaaattcagcgtagtttttgtcataacaccttaaatttcttccttagcgatacccttaagaaaagccaccaataagagcctgtagattgtagatttttaggacatagtgacacactggtgtagaacaattagacacaagtttttaatacacacatttttacaaactatagtacataaatgtattttattgtaaccattttactttgtaatttgtcatgtgtatacattttaaagcatagttgctctgacacttttgtcaagtatttgttgtaaataaagaggtcataagagatagtttcttcttatttcttacaggacgaacttgtatggtctatgtgttatactaaaaattatatgagaattcatagtatctaaagacttataggaagatatggc

SEQ ID NO: 7494 - DNA, 1460 bp, Diabrotica virgifera
  SmartBlast Evalue=2E-48; Info=CG4367 n=4 Tax=melanogaster subgroup RepID=Q8MSA3_DROME
gacatatttctcttttttgttagtttcgtattatctttttttacaattatcaaaaataagtaatacaacaggttttaagacatcaatatgacactaaaagtggttttatattttgggatgtatctaattgcagagatatctggacatgggatgatgttaaatcccccaggaagaagttctttctggaggtttaacgacactgcacctcgaaattttgacgataatcaagtgttctgtggtggagcttatgtccaaaatgaactgaatgatggcaagtgtggtgtatgtggagatccttatacagatcctcatccccaaagaaacgaaaataccggattttatggtataggaattgtcgtcaagacctatgaaccaggctcagttattgatgttaaaatcatgctaactgctaatcatctaggaaatttcacatacagtctatgtgaactcgaagattttgacgctccagaacctgaaaattgttttgaagatttgttactggaggatggttcagctaactataatgtagagtgggaagatgaagtagtcttcaataaggttcgactgccaaatttccaatgcgcgagatgtgttcttagatggacttataaagcaggaaacaactgggggctatgtgaggatggaaaatggagaagaggatgtggacctcaagaacatttcatatcatgcgcagatattgcactattataattataaaaacatttaacactattcagtaattttatagatctaatcctggatcccgcgtaccgaaaaaagttgattaatggcaagctgaaggtttgttaatggcttgacggtgtctattcggacaaactttgatgtatgggaacactctaacaggggaagttttaattgtggaacgtgattttaattgaggaacgtgtcatcctgacaagtttaagattgcgaaaactagcaggttgtgtttattgcaagtttattcaatagcaaactttatataatatatgaaacaatatttgtccgacaaatatgttgggcattttaataatccgacacgtagaacaagtcaaatgacaggaattatattggtggttaatagcagtctgattattgcatgagagtttaataaaagggtaacaaatcaattgaaagttctgtccgacaaaacacatgggacgtttttgtagtcagagttcgaaacttgtaacctgttccacaattaaaacttcacctgttcccgtatatcggggtttgtccgactagacaccgttgagctattaacacattttcagcttgctattaataaacttttttttggtaccctggatccaggcctataaacttattttccaaagtattatcctttatcgttatgtttttaatcatgtcaatattatttaaatatagttctagtttcttatgtcctagttgttgtgatttttgttctaattccacaaataataaaatagacaaat

SEQ ID NO: 7495 - DNA, 1460 bp, Diabrotica virgifera
  SmartBlast Evalue=1E-136; Info=Sodium-dependent phosphate transporter n=1 Tax=Aedes aegypti RepID=Q17KJ1_AEDAE
aagttgttaagatatttagtagtaaaatcgtagtgcaatataatataaaagatttaataattccatgttctaaaaatatgaaatatatacaacaacgatatgttttgggttttatgggttttcttgcatctgtaatagcatacacactaagagtgtgccttaatattgccataacgaagatggttctatatagagaaaatgcacatatcgatccagatgcttgtccagatgaagattctaatcatcaaatattaactgaagaagtcccaacaaatttatatcattgggatgaaacgacaaaaggtatcatccttagctctttcttttggggatatgcagttagccatattccaggaggtttgctagctcaaaaatttggaggaaaaaattctctcggactgagtatactctgttcgtctgttttaacattgatgacaccatgggttatagtaaccaccaatggaaactggataatactggtagtatggagaagtataataggattagcacagggagtaatgcatcccgcacttaacaatttattgtcaaaatggattccgctttcagaaagagctaaaattggtactttagtttttgctggaggacaaattggaacgatatcgagcaaccttataagtggaaccttaattaatgctacaggaacttggacttctgttttttacgtatttggagcagcgggaattatatggcatatattttggcagatattttgctactcggatccagttagtcacccgtttattaccaaagaggaattcagttacctaaaaagtgaattagaatctatatcagtagaatcgcacagcattccatggagatctattttcacctcagtacccgtatgggcgctggttattgctcaaattggccacgactggggcttttatacgatgataacagatctaccatcttacatgagcgacgtgttaaagtttaatgtcaaagacaacggaatttggaattcagtaccataccttgttatgtggttatgttctatgggctccggatggctttgcgactggttaatttcctcgaaacgtatgacggtgactaaggcccgtaaattttttaccacaatagcttctctgggacctggcatatttatcatggcagcttcctattccggttgtcaccgatattttactgtgaccatgtttacaatggctatgggatttttaggagcatactatagtagcaaaaaagtgaacgctctagacttagctccgaattatgcaggaatcctaatggcattggttaatggaattggtgcaattactggaataatcgcaccctatttggcaggaaccttaactgaaaaccacacactgaaagaatggagaacaattttctggattacattctttatatttttaatcaccaacataatattttgcatatttggtagtggcgaagaacaagtttggaataactttgataac

SEQ ID NO: 7496 - DNA, 1466 bp, Diabrotica virgifera
  SmartBlast Evalue=0; Info=Ribosomal protein L4e n=1 Tax= Biphyllus lunatus RepID=Q4GXN5_BIPLU
gtttacaagaaagaaaatcctttttaatggcggacacatcgttcgcttgatgtgtgtgtgagctactgtaaataatttatagaataagagaaaatgtcgttatccaccgctcgcccattagtgagcgtatacaatgagaagtccgaggaagtaaagggttcaaatatttcacttccagcagttttcaaggctccaatcagacccgatgtagtcaatttcgttcaccaacaggtttctatgaaccatcgtcaaccctacagcgttagtgacaaagctggacatcaaacatctgctgaatcatggggtaccggacgtgctgttgctcgtattccccgtgtaagaggaggtggtacccaccgttctggtcagggagctttcggtaacatgtgtagaggtgggcgcatgtttgcaccaaccaagccatggcgtcgctggcacagacgtgtaaacatcaatcaacgtcgttatgctttggcatccgctgtagctgctagtggtgtgccagccttagttatgagcaaaggacatgtcatcgaccaaatccctgaattgccattggttgtcagtgacaaggtacaagaaatgagcaaaactaaacaggctgtccagttcttgaggagaatcaaggcatgggctgacattcaaaaggtttacaagagtcaacgtttccgtgctggtaagggaaaaatgcgtaataggagacgcatccaacgtaaaggaccattggttgtttactacaaagatcaaggtcttcgtcgtgctttccgtaacatcccaggcattgacctcattagcgtacagaagttaaatttgttgaaacttgctcctggtggtcatgtaggtcgctttgttatttggactgaatcagctttccaacgtttagataaattgttcggcacatggaaaacagcatcattggaaaagaagggttacaatctaccccagcctaaaatggccaacactgatctatctagattgttgaaggctgatgaaatcaaagctgtattacgtgctcctcaaaagaaggttgtacgtcgtgtacgtcgtctcaatccattgaccaacgctaaggccatgcttaagttgaatccatatgctgctgtactcaaacgtgaagccattttgaagaatcaaaagagacagttaaacagggaagaacttttggccaagaaacgtggtattaccgtgagtgccgacaacgtcgtgattagatccagaaaattgcaagaaaggagaagggcacaaatcttgaaagataagaaatcaaagcctaagaaggccaagaaggctccagccaaggccgcaggaaagaaataaacggactgctacggtttttgcgtattgttaagttttatgcactttgactgtggtaatccgagttatatataaaataaaaatataaaaattgatatactgtgctagtttttttatctgtgtgaaaaaataaaaatattttacttttaaaa

SEQ ID NO: 7497 - DNA, 1461 bp, Diabrotica virgifera
  SmartBlast Evalue=1E-116; Info=RRP12-like protein n=1 Tax= Camponotus floridanus RepID=E2AJV9_9HYME
ctttgggttcatctgtttccatatcttcgaattctgaatctgaatctgccaaaatttcttcgacgctttttggtttagcctttacagtaaattcttcatcatcactctcatcttctctatcttcctctttcctcctcttctttctggcgtttagttttcgtaagtttctaagccttttgtacattactgtgtcggtatttggtacaaaaggagtaagagattcacaaccgtattttctgactagtctatccaaaatgtcacgaatttttagcctaaaatgcctcttgcagtcctccgtcatgttacataatcctttcatcaaatgttctaatgatgaagctaccatgggactagggagtgtcgtaatatacacttttataaaacttaaacatgatgcaactatttctctcgtaggagatccagctaatgtacaaacattatccacaattatcctgatattatccattcctagtgtacctgaaaaatgatgcaagattgaggctagtgccaagactgtacaactaacaagttgtggtgtaccagctaaaccggctataatcaactctaaaaattgttgcattttgtcgtgctccaacaataagtttccaatcgtatttaaaaggtcatatgctgtagtcctacatttttcgttgatgtctttgcaacacagtatggcttcgggaatagcagatttgatcagtttactttcgttatccaattgaggttgggccttaattaagtaattaagacagcgtaatcttgcgcctttactagaaactgcagctgagttgagagatttcatgagtagacgttgcacctcctttcgattacttttaacaaatgtctgacacccttctgattcacttccacatacttcttccaatagtctgtaagcctttttctgttccttgttattctttatttctggtaagttttgaatacactgttgatataaaatttcaacattctgagcattttggtatggtactaaagcacgaattaaatccaggatggattcttttataaaatggtcttctggttcgtctgaactactattcaatcgttctatggcgttattgaagagctgctgagttaattctggtcttgcaatcgataaatataactttatcgtatccaatgcagccaatctttgaccttcttcgtcagtaccaataggcttggtagtataaacgttaaacaatattggcaaatagttcttgtcaaatctacttatctcctgcaaatcttcctgattttctgactctttggcataagaaattaaccttcttaatgcagccataactgctaaacgaagttccttcttatcagaaattgcagtacccataactttagcaacagtcttaaaactgtccttgatatcctttggctggctacagaaacaaggtagaagattccataattgtaaatacagtaattctgaactgtgcgctcctattccat

SEQ ID NO: 7498 - DNA, 1459 bp, Diabrotica virgifera
  SmartBlast Evalue=4E-50; Info=Zinc finger MYM-type protein 1 (Fragment) n=1 Tax=Camponotus floridanus RepID=E2A2B3_9HYME
ttcagatccactttgggacatcgagttacatcctgaaaagagttctcctgaacgtcaaattctagtcgaaagtggtgttaatcgagttgatttacaagatccaaaattctggccaagaaattgtgtagatgaagtgctgaaagaattcaaaacacaggatcttaattctttagactttgaattttcaaaaagaaaaatataggaaaacaaaacaggtactgcactaaatcactattctatgaagttttaaagattggtgaaaaattcggcgtgactggttagtttattccaaaagcacaggctctttattttgcttatattgttgactcttttcaagcgaaaattgcactttttccttttttactggatttgacgactggaaaaagactaaagaaaaaagggacagtcatgaaaggtcagtcgttaatttagaacatcttaaaaattgtatttcaagaaattcattaagtatgagaaagattctttgcggcaatagattgaacatgagaccacatattggcgaaacatattacaaacagtcgttagtgtcataaaattcttagctggtaggggactaccttttagattttagaggaaccgacgaaaaatttagttctactagcaatggcaactgccttcgattagtagagttgttgacggaatagatcctcttttaaaagaacacattgaaaaatatgcttcaaatggctgtggttcagcatcttatttatcaaaaacgatttgttttgaatttttgcaagtgctttcggaccacatattggaagaaattgtaaaacaaattcagtgtggcaaatattattcaatcagtgtctcagtgttgactctacgcctgatataacacttacatatcaactgaaattcattattaggtattgctcggacaccggaatacctgtcgagaggttcatacagtttttagacaacactggccacaaagccgaagatatggaagccagcattgtaaaaattttgtccaacctgaatatacatatcgatgactgcaggggacaatcgtatggcaatgcgaataacatgtctggcgtttatagcggtctccaagcccgaataaaatctaggaatagtttggcaaaatacgtaccatgtgcagcccattccctaaatttgattgtacaacatgcagaagaatgcactacggaaagtacttctttttttagttgctgaagaaattttaataagaaataactaattatgttaatttactttataagttgtgagtttgtgtctttgtgacttttttgtatatttgtaataaattacctaataatattaaaatagttttaattaattgttaacctaagacgcatatatacctactggagagtggcggtatagtatgacttagcccccggcggtccatgaactaaatccggcactgcctgcagaggtaattaaatccacctaccaaggccgaaaatca

SEQ ID NO: 7499 - DNA, 1461 bp, Diabrotica virgifera
  SmartBlast Evalue=0; Info=26S protease regulatory subunit 4 n=5 Tax=Coelomata RepID=E2BWH6_9HYME
gtcaaaattgaaaagatgactggttaattttgcaatttcagagagatatactttgtttttaataaataagtagaacaaaaagtgtacaatgggacaaaatcaatctggaccaggaggtggtgacaagaaggaagaaaaggacaaaaagaaaaagtatgagcccccaattcccactcgcgttggcaagaagaaaaggcgtactaagggacccgacacagctttaaaactaccagcggttactcctcatacaagatgccggttgaaactattaaagttggaaagaataaaggattatttgcttatggaagaagagttcatcagaaaccaagaaaggctgaaaccacaagaagaaaaaaatgaggaggagagatcgaaggttgatgatcttagaggaactcccatgtctgttggtacattggaagaaatcattgatgacaaccatgcaattgtttccacatcagtaggcagtgaacattacgtgagcattttatcctttgttgacaaggatcaacttgaaccaggatgttcagtacttttgaaccataaggtgcacgccgttgtaggtgttttaggtgatgatactgacccaatggtaacagtaatgaagcttgaaaaagctcctcaagaaacctatgccgatattggtggtctagatacacagattcaagaaattaaagaatctgttgaattacctcttacccatcctgagtattatgaagaaatgggtatcaaaccacctaaaggtgttatcctttatggccctccaggtactggaaaaactcttctggcaaaagctgttgctaaccagacttctgcaacatttttgagggttgttggttcagaacttatacaaaaatatttgggtgatggacctaaactagtccgagaattatttagggtagctgaagagcatgctccttccattgtatttatagatgaaatcgacgctgttggtacgaagaggtacgattccaattctggcggtgaaagagaaattcagagaactatgttagagttattgaatcagttggatggattcgattcaaggggcgacgtaaaggttatcatggcgacgaaccgtatagaaactctagatcctgcccttattagacctggtcgtatcgatagaaagatcgagttccctctccccgacgaaaagacaaagaaacgcattttcaacattcacacgtctcgtatgaccttggctgaagacgtcaacttacaagagctcataatggccaaggacgatctttcaggagcagacattaaggctatttgtactgaagcgggtctaatggcgttgcgagaaagacgaatgaaagtgatgaatgaagatttcaagaagtccaaggaaagcgtgctttatcgtaagaaggaaggcactccggaaggactctatctttaaatacttagtttgagttgcaattatacattttatttaatttttggtaataaataatt

SEQ ID NO: 7500 - DNA, 1461 bp, Diabrotica virgifera
  SmartBlast Evalue=4E-55; Info=High affinity copper uptake protein 1 n=1 Tax=Camponotus floridanus RepID=E2AVX5_9HYME
cagcgtgagtggttgttgtgtgtatatacagtgaacagtacaacagaagacaacaggacttttaagctaactggcgttaccttgactacgtattacaatggatcactcgcaacatacactgcacgaaggtcacaacatggatcattctatagatcactcgcttcatcactccggtatggatatggtcatgcagatgtattttaaatttagtacggacgaatatgtactttttaaggcatggcattttacgactgctggcggtcttataggctctatgataggaatagctatattggcagcgatatacgaaggtcttaaatattttagggaatatttgttttggaaaacctacaactctttacagtatagggcagtttcgcttccagataaaaatgccacccccgaggagcctcaagtagttcagcctacaatgatgagcaagatgcacgcccttcaaacgatcctacacatggtccagatggtcttgtcgtacttcctgatgttaatcttcatgactttcaacgtgtggctctgcatggcagtagtggttggcgcaggaataggatattttctcttcggatggaaaaaatctgtggtggtcgacgtaacggaacattgtcactgataccaaccgaacaaatgcttagtatcatttaggattttaagatagataatatatcttagagtaagataaaaccaaagtgtatcagctgcgaaaagtctgctaaaactgaccagaaaaacttcaaacagtatgtaaaaataaagtaaaacattgatacttttgtgccttcaagatatatgaatactttagaaaaattatctaaaatttaataaaaaaatttaataaaaaaatgttttaacttcttgacatttttttcttcatatacctttttgaaacatcttgaaaccttatccgattactcatttctcatttatatgctatcctagtggcttttcatttcatatggttattcattcccactaaagttcttgtgttcatcgccttcttcttatgacgtagaatgtaccacaaagtttaaactgtgtggtacattcttagagtcgagtactttgttacctctagacgacatttgtgaactatcgatactttctttcatggcaattgtagttttagaaacagtcgcacgaaaaatttctgcagatgagtggtcaaaccatcttctcctcagttctttcagctacgagctctggcgtcttcctagtgatcttttggcctgtactttaccttccaatatgatttaaagtagtctatatctttcccctcttagcagatggcccaagtattatatttttctttctttgattattcttagtaattccttttgtttgttcatgcgccgaagtacctcattgttagaaactttttgtacccatggaattctcagcatccgtctgtatacagggtgttagtaaataagtatgaaacattttaagggc

SEQ ID NO: 7501 - DNA, 1461 bp, Diabrotica virgifera
gcattggcagattccgtaatatcaaactacaacactcttcagctacagctataataaattttattgttaattgtgctatctttactggttatattggtcagatgttggtgtcttagttatttttcgtcggcgtatcgtataagatgaaacatattccattctagaacgaccagttaataaccatggtgtaaacttaccactaaaaattccaatatcaacatctcgccatgattttgggagataatttttttatactttttatttagtagatatacaattgcattattatacaaaaataaccaatttttatacagttattaatgaataaaaagtaggatattcgcccaaatccggttcagataggtgtacagtacgtccaggatagcagtagacgtgagctatttataagttcagttaatatgaattctttgtactgaaaaaataatcaagctgttttgatcaaactataatttccgtatactttgagtaatcctaaaatatgtcttaaaatgttttaagtaaatattattcaaatattttagtaaaaaatataaatcttttaagaacatagtagggcaaattgtctcgacccgtctcacagtggttccaaatgccgaaaacgttgtcatgaacctttaagcgtatattgttcatccacttcggaattactttcgtacttaatggtttttggcatcgctgattacgaatctgacattatttttttttttaacaaaatggcgggtcccacatggcggatataaattgaaaatatcaatcaaaacgcaaagcttcttatcaaatttggtagtttaaggtcgctgattacaaatctgacattatttttttgaaaaatagaataacggatccaatatggctgaaagaaattcaaaaattccattttaaacgcatatttttttgaaattcttttattataagggacttttgaaattgctgattactaatacattttctttttgaagtacaatattcataacctattacttatgtacagctgcccatagatactcaatgcgtcatttcacacttttgtattcaaacaactccccagcaatgcaaagacagttaaaggcagctaaaccaatgtgattctgtatttccctactgtacattttgagattaataaacaatcccagaattatgtgctttttgaatgtattattacgaaattttgataatttcatgtatatttttactatttattcattaacaaattttatggatttattgttatcaaatatttagtcaacttttatcttaggctttgaaaactttgaaaagaaaatctgctttacagcgataaaactgataaactacaaaacgttttacagcgttttcaatatacgcgttctttttcactgccgaccaaaataacgtagtacatgggtcacttgtccctgagctatgaataagaatagatccggtctaatccgtatatctgcg

SEQ ID NO: 7502 - DNA, 1460 bp, Diabrotica virgifera
  SmartBlast Evalue=5E-73; Info=Catsup protein n=8 Tax= melanogaster subgroup RepID=Q2EJD4_DROME
tataacctcaatctttttgtcttcacttttgtttaaagccacataaaagtaaatgatgtggccaagtgttagttaagcaaattcaagtataaacacttaaggataaccagatagtatttagtattgcttcgacgcgtacataaatatgttttccagcaaactttttatcatttttatcttatttttaagtgttgaaatatgtatttcacattcccattctcatggagaccaccacgggcattcccatgacgagcctgcttcattcaaatattcaagagcagcgaatgaaccagaccaccatgagcatgttcatactcatgaacatgtccatgcccatgaacaccatggagaagtaccccataaatctaaaaaccaattaaatactcaggagttgtggatccaagcaatgggttcaacgttacttatcagtgccgctccattttttatattattctttgtcccgttagacaataccgaaagcagccagcctcttttgaaaatattattagcctttgcttcaggaggtttgttaggagatgcctttctacatttaattccgcatgccactatggcaatagaagagcaaaatccacatagtcacagccattcgcacagtcacgaacctggagaagaacattctcatgatatgtctgtaggcttatgggttcttgccggcatagtggtatttttggtggtggagaagtctgtaagaatccttaagggccccagtcatagccattcccatagtgctccagccgcttccaacgaaaaaactgccactaagaaagatagcggcgacaaaaaagtggccaaaacaccaaagaatgaagaagaaccagcgaaagagattaaagtagctggatatttaaatctggctgcagattttagtcataattttacagacggattagctatcggttcttcgtatttagctggaaatactgtaggaatagtcactacgatcactattcttctccacgaagttcctcatgaaataggagattttgcgattttactacaatctggagtttcgagaagaaatgccatgcttctacaattaactaccgcccttggtgcagtagcaggtactgctttgtcgcttcttgctcagaacagcaccggtgcaatggcagccacatggattttgcctttcactgccggaggtttcatatacatagcgttggtgtcagtaattcctgaacttctggacgaagagaaacctagtgtagttcaaacccttctacaagtcgccgcaatgttggcgggcgttggcatgatggtcattattgcagagtacgaatagattcctactacttatttagaatactgtctttatacacatttaattttttacttgtatgtgatctctaaaaacgtgtcaggttgatgtaaatattgcatttgttggcgacagttcgtaagactaagaagatataaagatagaaataataaatatattt

SEQ ID NO: 7503 - DNA, 1456 bp, Diabrotica virgifera
gcccacctcttatattatactaacaatatactattataaacctaaagttaagtagttcttagtagataattatattacaaaatatcactaaattattttcacagaacgatgatcattggggaaaagtcactactttcttatgaaagtaacttttttgaaccatccattcctcctggccctaccacattgtatggtttcgaacttaaagaaatggtatgtcattgtacgtttgttccaactcgtcgagaaccgtacaatgtacggtaacgcttctgcgcaatagataaaatgcgttccaactgaaaatggaccgttcattgtaccgtccctttgtcgttccaactcaacttgggatcgtccgacgtacggtttctgaatcgtcatctcagtacctggtcaaaagctattaccgtttggactgacctgcgcattatgcagtacctccaaaaattctcattttagttcaggttcaggtggtcgttttatttttatttcaaattattcaaagtgaagttaagggcgttcagccgcacttttatattatttattgtgaacattttattattattaaactattaacttttttttcaattattagattatttttgcttcaatttgactgattcttcttttaatttgttgtttgtttttttaagtatttctcattcctggccaatcgttcattataataaatcacacaattctaatttgacaggtgtatttggtttttatgtatatggaatttctttgttctgttttattatcatttaaatattggggtatttttagtctcagtactttggaatttttgatttctaatgtactaagtttgcattatttatattttatatacagtaaaacctcccttaaccgaaataattggggggaaggccgtttcggataacaagaatttcggttaaaaataacattattttttgtattcttcttgtatcaagttacatagtattcttggtcaaagttggtattaaaaaatactataaggtgatttcgtaatgtgttgttgttgtatatttaattgcgttctttagtctgttgacaaattaacatcgaattgtttccatttttcgataaaaatttactttttattaacgaaattattgaaactgtcggtcgtttcggttaaacggtggttcgattaaaaaggtttcggttaacggaggttataccgtacatataaatctaatcatttttatttatattttttgttaaaatacagaaagaggagacaaagtggcaaaaaacaaatgacaagaaaccaattgttgttctttatttattttttggcctattttaatgaaatggccagaaccttcaaacaaataaccagtactgaggatagtgtcaaaatccgttccagaacgtctcaccttcgccacagccaccgtaccgtaagcgaacgattccaagtcaaagcatgcgcataaaatcgatgcca

SEQ ID NO: 7504 - DNA, 1458 bp, Diabrotica virgifera
  SmartBlast Evalue=1E-110; Info=Cytochrome oxidase biogenesis protein (Oxa1 mitochondrial) n=1 Tax=Aedes aegypti RepID=Q174X3_ AEDAE
atcttatatgactgtatttgctgctggtttaatgtaaaaattaaataaaataacacttatttctacaatgtctcgatattgttctatagcttcatgtcagaagttaacaaaatcaattaaaaattcattgaacttgaaaaatgattataaggaagtagttcaaatatgtttgcagagtaagaatgtaaagaatacgtccagcttttggaacaaaatattgaaaaatattgcgaaagtcaaatcaaataattcttcagaggccgttagtgttttttccaacaatattgctgatcagcggaatgatattaacaggaagactaaaaatccaaaactattacacaaagaaattcaaaaactatgcagtaatctccaaaagcatatttcccaaaataagccactagcatggtccacagcaggagttgcagcagtaggatcaacgaatccaacagtcacagatataccaacacttgacagcaatattaatacagcatctagtgccacagaagttaaagttgaacctatagtagaggccataccagagccaccagtggttcctgacgtagttgagtcaactggggaagtgttgaatcagttgaatgcactaggagaaccaacttttgcttctttaggtttgggaggttacagtcctgtaggaatagtacagaattgttttgaatatttacatgtcacaatgggtatggaatggtgggcagcaatagctataggaacactagtgatcagaatttgtctcttccctttggtgattatggctcaaagaaatgcagcaaaaatgaataactacctccctcagatgcaagttcttcaactgaagatgactgaagctagacaaactggcaaccaaatggatgctgcaagatactcacaagaacttatgatgttcatgaaggagaaagggttaaatccttttaaaatatgattgttccattagcacagatgcccatctttatatcctttttcatgggcctccgtcagatgacaaatgttccagttgacagtttgagcaccgggggattattttggtttacggatcttacattacccgatcaatattttctgctgcccattattacaagcgcaaccttatatgcaactatcgagttaggaacagatacggccaaactgtcttcccaaaacatgcagttaatgaaatacgtattaagaggattaccattgatcgtcttaccttttaccgttaacttccctggtgctatactctgttattgggcctccagtaatttgatttcgctggttcaagttggatttttgagagtacctgctgtcagagagtatttcaaaattgaacagatgcggaaatttaaagctgaagagatgcccgtgaagcccaaaggttttagagaaggcttgaaggattcatgggaaaatattaagatcacgaaggcgttagaggaaagaaaagattggatgaactatccttcc

SEQ ID NO: 7505 - DNA, 1456 bp, Diabrotica virgifera
  SmartBlast Evalue=5E-68; Info=Windbeutel n=1 Tax=Tribolium castaneum RepID=D6WUG2_TRICA
gtctcagtattcgaaaaaaaagtgaatgcatttaaaaagcattggtccgaaattttgcgccttcgctcttaatactttttttaatattttcaccaggaactagtgcaccttcttgtcccaagttcaaataatactgtttttaccagaccatgagctttaaatttttaattgtgacatattggtttgctccctccaccgatatattttaaaggttgcgatataaatattacagttttttgagggaaaagatgatggatgagagaaaaataaaatgtttggagttacacttttgaactggatgtgcgatttgaggacagacacaacatgttttaaataaataaattgtcatgacatgtaatagctttcataattttttcaaatgccgacatttgccatgttgttgctcttataatccacagttgactctttcacttgtagaggatgcagatgtacttactcattttctttgtatttcaatctttacccattgtatcagctctttggcatttactttgaacaaaaacatacattactggaaaaactattaggtatgcaagaaaaatccacttccatcagagttcagtctttgagacttcttgactaaatgatttcagtatgttaaggcgattagatagttccctcttcttcttttcgtttacttttccttcagatactattttgtttagacgtttttgttcttggttaataaaagtgtctccagcctcaatagtttttttcatgaatttgatgtatgttttagcaatatccctttctctatctgtgtctagctttgcaactgccttctcagcttctttgagaacagaatccttatcattagcttttgaaaacttgttggctaatttgtcaaacgtttccaaacatcctggcagtcctaggtaaatgttagtgtggtctactatgaatttcttcaagttttcattattccataacatatttttgtgaaaagcaaatggttcatcctctccttggacaaaaagtctgagagctggtaaatcctctttggattgtataccgaatttttttgcaaattcttcgttttctttctcaccataatctttgatagcaacttgtcctagtattaagttcttgctatccacaatttcggtagcgagagtgttaaatacatcgtgtttgtcaccataggggtagttcacgtcgaatttaactaaaacagcttcaaatctggaaacgattttgtcgaagttgtattcatccaagttaacacatcccttacatccttcagaaacactagaaaatacacttagcaggaggccaagtaaaacactgtaaatatacaatttgttcataactgttatcaacggaagttttacttttccttagggtgtggtgcttatggtttatattttctttcaagttgagtttgaatagatttgcaaaatatataccggtgccactaccgctaagtagttttgac

SEQ ID NO: 7506 - DNA, 1456 bp, Diabrotica virgifera
gaattctaataaaatgaaaattcttcttttcatattctttcgtttcattttgattgcgttgatttttgattcttgttctgaattgtccagttttcgcttgcatatttgcattgtcatcgtattgtgaatttttctcttgacttccatttttatatcgttatgtcctagtatttttgtattacttacgtaatatttatgaaaatttccttaatttgtattacttacgtaatatttatgaaaatcttctccatttattatttcgtacgttgttattggttctaatattgtttcattacatttgatcaaaatgtggcttcgctgtcggctgtaatatcaataattatgaaattatatcaaaatatctttctctttaaagctaatgatccctgtatttatcttttgaccctctgtccgtcctgtcttctgttggagatctctcgctatatctttctttgctttttgataatgattggtgataatctgttacttctacgtttttctcaatatgtacttctatgttttttcaatatgtatgttttataactcgtttctattgtatttctctacgttaataaataataatgtactcaactctgcttcatttcctttttctctagaagtcttgagatgatcaaccagtttttctctttgttcttgtaaatccctttggaaaattctcattgatgaaaattttctttttttttaatttattagttgctttatcgttttactcaattccttcatctcgattagaactggtctttcttttttaagtttggtactccaattctttaatcccatttctatcattttctgtatctgtatctacttcaactgaaaaattcatagcacttttgctatctttactttcaaactgtcctccttttcttcggttatcaccaagttttttccgaatttctcttttctagtatttcgattttgtaatattgttctattattttattttttagcactacattttcttgctttattttcagctttacttttaaatagggccattttgagtggacgtggcgtatcactcgcattcacacacggattttactctataaatttttgttttcagtaccaattttctgttttttccaattgaagttaaacttacactgagagaaatcgcagagagacatgtttaacatatatttcacgtattattcacgtaatgcagttcgagtaatgctttgtagtatgtacggaataaactattgcttgatgtatgtgctctctaaaatcttgtacatttatctaagttttaacaaataaagcttttatgtaaatacctattttgtttatacttttatgcaataggctaatgtctaccagtaatttaacagacaataataaacagtgagttattcagttactggctattatttcgagtggatagaaatgttcacgttaatgacggtatatttatggaagttacccaatgtct

SEQ ID NO: 7507 - DNA, 1458 bp, Diabrotica virgifera
tgtagctaacctaacaataagcttttttcactttttcttttttcatcttatcatcgagatgtttggctttcatgaaatataatataaaaaaggtttatttgttattataattgtagcagcgaatatttgtagttgtaaacgcgtgtatcgtcaaaattagatttacttataaatgaaaactaaaccaatgttatgacctatttttgaacataatagacttaattgaccatggtcaaacgcaagactgtaagtgatagcgaagatgagcagaagccatcaaaaaaaatccaaagcctccacaagtgaagccctaaacccaaacacgccctttaaaccccttataataaaaaaagaaatccaggaagatgagactacaattcagcctaaagctacaccaaaagtgaaaaagaaaaaaaaagaacatgtttcatcaagtgattctgatcaggaaaaagagaaacaatccaccattgaatccatcctgaatgaaacaaaacgtttggtgttatctactaagaaaccaaaaaaacctaaaaagtctcaaaaacaaaatgatgctagcaaattaaatgagtcgtttacaaacaaaaatcttaaaacagaagccttagactcatttgaaaattcaattgtgcaagatgaggaatctggtgataacctcagcaatgaagtagaacctgtaaataatgtgctaaatggtgaaaagtctcctagaattagcataagcgacaaaaacgaggatgacaatttgatggaaaaaattgagaacaaagtccaaattcttcaaaacattcacgtatctccaaataaaacaaaatcatcacaagagtcccttaaggatttatatcccaatattaaaacgagtcctattaaaacaaaacttaagttgaagagttcttgtgacgtttacatgttaagaatccctaaaagtgtagatgctaatggtcttttgaatgtcagcattgatcttgaaggaaaaagcaaagtaacgatagggggtcaaaaatttgttatacaacatacatcgaaaatacctgatcccacatttgttttaagtacaaaaccccatttgattgaatttaaaagaaatttagtcatggagaagtacgtaaaacctaacaaaggtccaaatataccaactatagagaaatcttcagtaccactaccaggtacattgaaaaatcgccatcctctatttggttccaactttgaagacaagatacagcttgatgaagctgtggaaaagaagctccttgatgctattgagaaactattgaatcccaagaagagtaaaaaagataaaaaagcaaaagaagacaggaggtcacttaccaatagtaccatgctgccaaatgtcacatcctctcaagattcttttagtcccaatgttagctcaatttccccaaagaaaaaataaaaaaggagaaacggcaagttgaaacaaacaacagtgaaata

SEQ ID NO: 7508 - DNA, 1455 bp, Diabrotica virgifera
  SmartBlast Evalue=0; Info=Trifunctional purine biosynthetic protein adenosine-3 n=1 Tax=Harpegnathos saltator RepID=E2BDA3_ 9HYME
cgcccaagctaccggtgttcacgatacaattggaatagatcttgtagccatgtgcgttaacgacatattagctcatggagcagaacctttattctttttggactacttcgcgtgtggcaatttagatgtacaagtagccaagcaagtcattacaggaatcgcagacggatgtaaacaagcaggatgttgtctgataggtggagaaacggcagaaatgcctgacatgtacaaacctggagactacgatctggcaggttttgccgttggagccgtcgaaaggagtcagttgatgcctcacattcaagatatcaaacctggagatgttgtaattgctttaccttcatcaggagttcacagtaatggtttcagtttggtaagaaaaatcatgaaactagcgggaaaagattacaacagtgttgctccattcagtaaatcaaataggacatttggtgctgaactattgactcccacgaaaatctacgtaaaatcagtcattccagccatcaagacaggcaaagttaaggctttcgcccacattaccggaggaggtttgctagaaaatatcccaagaatacttccggataacgtggcggttgaactcgatgccaccaaatggtctattcccgaagtatttccctggttagcaaccgccggaggagttcaccaagtagaacttcttagaacctttaactgcggagtcggaggagttttggttgttaagccagaggatgccgatgctgtttggaatttgatcaagaacgaaggtgctacaattgtaggaaaagttgtcagaaaggaaaaagatcaagtgatagttcacaacttctctgaagtgatggaagctgcaatgagaaaatacgtcccaagcgttgttgaaaatacacctagtttgaagaagagagtaggagttttaatctcaggaagcggcaccaacttgcaagctctcattgacgcaactcaagatcctttgcaacagattggagccgatatagtgttagtaatctcgaataaaccaggagttgaaggactgaagagagccgagagggccggcattccaacaaaagtattgagccacaaagactattccagtagattagaatacgacatgtcacttcataaagagctggtagctgcaggagtggatattatctgtttagcaggattcatgagaatcttaactggagaattcacaagaaaatggaaaggaaggttgcttaacgtacatcctgcgttgctaccactttttaagggagtggacgcgcaaatgcaagctctagaatctggtgttaggatttcaggttgtagtgtacattttgttgaggaagacgtggatgctggtgctataatagcccaagaatcagtccctatagagctggatgacacagtacattcccttaccgaaagaataaaaaccgccgaacacagagctttcccgaaagcgttaaaacttctggc

SEQ ID NO: 7509 - DNA, 1461 bp, Diabrotica virgifera
  SmartBlast Evalue=1E-172; Info="Tryptophanyl-tRNA synthetase, putative n=1 Tax=Pediculus humanus corporis RepID=E0VYF3_PEDHC"
cagttcttgtaataggttaggttagtaacacttttctgatgaaattttataatacagtattaaaaatataaatgcaataattccttcgtacttaagtgattattatttatttatctgcatatacaactatttttgacgtagtgaaaattaacttaacaagaaaatgtctggagatataacaaataatattgaagcattaaaagttaatgcaactgaacaggatgatgatgtggtggatccatggacagtaacaagtactaaggacactggagttgattatgataaattaataaaaagatttgggtgctcgaaaatagatcaggaactgttagatagatttgaaagaataactggaaagaagatgcaccatctcttgagaagaggtatatttttttcgcatcgagatatgcatttaatcttaacaaattatgaagctggaaaacctttttacctttatactggaagaggtccttcatcctcatcgatgcatgtaggacatttaattccatttcagatctgtaaatggttgcaagaagtttttaatgttcctttagtagttcagcttacggacgatgaaaagtctttatggaagaatcttactatagacgaagcaaatcgattagcttatgaaaatgctaaagatataattgctataggatttgatccagaaaaaacttttattttctcagattttgactatattggacaacgaccgcagttctatagaaatttagtggacatacaaaaacatgttaccttcaaccaagttaaaggtatttttggttttgatgacagcacaataattggaaaaattgcatttccagccgttcaagccacgccatgtctctcgagcacttttccagatattttcggcaacaagaaaatccagtgctttataccctgtgctatagatcaagatccgtatttcagaatgatgagagacgtagccccaaaactaggatatccaaaaccagcattaatattatcaaagtttttccctgctttgcaaggagcacaaacaaaaatgtcagcttctgacgctaacagcactatatattgcagtgacacaccgaagcaagttaaaaataagataaacaaatatgccttctcgggtggtcaagccactatcgaagaacatcggaaacttggagggaactgtgatgtcgacatttcatatcaatatttaaggttctttatagaagatgatgaaaggctagaacaaattagaaaagattattccagtggagcgatgttgacgggagaactaaagaaaatacttattgacacgttaacacctctagttcaagaacatcaaaaaagaagagcagaggtcacagacgagattctaaaacaatttataacacctaggaagttgaattttgattattagatgttgttgtttacaatttttaatttattttttaccaaaaatgctttaaagaaaataaaagatataagatc

SEQ ID NO: 7510 - DNA, 1452 bp, Diabrotica virgifera
  SmartBlast Evalue=1E-125; Info=NIK-and IKBKB-binding protein n= 1 Tax=Harpegnathos saltator RepID=E2C9N1_9HYME
agtgtattgcagttccatttcttgagttgttagattagctacgtctaatacgaggtaaaattgagagtgtgtatccgctggcaaacatcccaattagtaacttgcaaagacggcaacatctccaacattacaaatactgagcaagatctgcaatattctgaagcaaaaccttcagatccgctgtattttaactttaattgaccttcgataattgatgtggaaggttgttgttggaaaagattagtcaatccaccggctaaactagaatgccccgaatttgaggatcgaaagcttgaattaaatctagaaggcaaagatccacctggcaatgaagtcgacatgctgctgaaaggaccactactcatatcgtgcggaattgttggtgaaatggctgaagttggagctaagaaattagccgcagaatgtagatttaatgtaatactaacagtttctcctggaggaatcggtaacaacttcttcacttcttctctatcccagctaaaaatttgatcttgcaaagaagggtctaagacactgtttacttctacttctagcatctctacgggtacttcactagcatttttcaatgttataatacattcagtactttcgccatgatataaacttacgctggctgaggtgacagtattttcatcgtgaaaattggaaaatgaagcactggtggggaaagaggttgatacctctagtaacggcaagctaggaacaacttgaactttatagtagggtggaaaattcatactggatcccatatggcgcagtcggcagtttgacttaactcccaaagtgtgtgtactgtaacctgacagttcgagttctccgctttctcttgcccacccgttaagcgttaaagaagttgggatatctggtggtaaaacaatagtctcgggcacagattcaaaaactacacctcccgtcaaaagtctcatattggatacttttaactcaaaaggtaagggattgatcaactttaactgtacttcgcaaacttcattttgaatccatagaaaatccaatttggaactagcctgtcttgatttccgctctaaactaccaccccaaaatgaatgggagtaaacagaaacggtcctgtatctgtttgtttattttcaattcttcttggtctcaaatggggctgcaaatccttagggacaaacgccgcacatataggtatatcagttaggtttgctggagggaccactaaaccactgtccaaaacaagagggacaggagatccctcgcactgagaagatagactttgcaattgaatggctaattccttttgttctgttgaactcaagtattgccacatcgtctgcaaaaggaatgtcatatgtctcgttgctaatgctgaatgtcctgttcttctcgcagctacaactagctcctgcattagttgaatctgtaatgctggccatccttgatcatagccct

SEQ ID NO: 7511 - DNA, 1454 bp, Diabrotica virgifera
  SmartBlast Evalue=2E-88; Info=Endopolygalacturonase 1 n=1 Tax= Chrysomela tremulae RepID=C3UTC2_9CUCU
actaatatattatacaacatttttgtttaccgataacctccatattgaacaattattgacagataatttcaacacccaatcagagtgtgcgcatgcgcgcagatcaatataaattcaccctcaatctcaatcgcgcctaaagaagtataacttcaaaaaataaaaatcccaacctgcattggaaaatgaaataaaggagaaaagggctgatcatgaaattatggataactaatcaacttaaattcttctactgttagtcaatgcattttacaaaaacttgtaatacacaaatttttaatatctactccaatatacaagtaatctaacagctataaccttctggttggaacgtacaaatactgttgttttgagcacctgtaatatcaatgttgtgaaattcccatttatcacaagctccatctccgcaaagaataagggcttctgatgttggagattcgttaaaactcttcatccatccgctaatgttgtcgagacttaaaccaacaattgggatatttgttcctgggattcccgtagcctcaccattcacataatcttgttggatattcagtgcgaaattgttgatatcttcgaatcgaatgtttcgataaataatgttttgaataattcctggtccactatctgcatgtgtcttaacgtgaattccattgggagagcgatgaacaagactgtcttcaaaaataacgttataaacggaattcttagcaaaatcgtctttggagaatccagcagaaatactgagaccgtggcctccataacaagccatatttctgactaggatgttggcacctacatttacgacgacacaatcatcttgatttttgactatactgttttgcaaaatcaaattagtactgctcaggtcaaatccatctgtgttatggcctgtaaagttgtttttgtctccctcagatacatcgatgagccacccatcaataatggaatttgaaactgcgacagaagcgcaatgaacaggacagtttttcaaataaatgttctcgtatcttgagttgttgccttgtagtctaatgaattttggtttcttgataccctttcctcctaagtgatcccaatacaattctccttgaccatccaagacgtgtcctggtgcaccacgcacgattagatcatctcccgtgatattaacaagaggtcctttccattcgaaataatcaaaatacgttcttccttcaaaggttagttcagagccgtcctgaagatttaggtttaaagtcttgttagcaggaactctgaggttagaaattacgatatttttacaagtttcgactacatcaggcacttgagagtactcggtaatggtgcagcagtcttcgtttaggctttttgcagcagcactgataactacaaaaagtagcgaataaattaacttgttagacgacataatgaagagcggatacttggaaaagattcgt

SEQ ID NO: 7512 - DNA, 1457 bp, Diabrotica virgifera
  SmartBlast Evalue=9E-92; Info=Shc transforming protein n=2 Tax= Culicini RepID=B0WGX0_CULQU
ctaagactaataaatgtgtattaaattttataaaataatataaattggataaatactacaccgaaatatgcaatcatttataaaactttaagtgtacatagctcttggtattttatttctgagaactaaagcgctctctgctgaaataataggcaaagcattttcataatggaaatcgatgagatgactgatgctgttgaatattctatctttcgtccttactattccctgtggatctatcaaaagcagatgttttttattgttatcttgcattcctgaaagaacaaactgcctttctaaggtattcgttgattctctgacgagaaaatcgccatctttttgaagtaaagtttctgcttctgctcggttaatttgtccgtgaaaccatatttcattttctagttgactaaattgatcttggcttttttcgtaggctgaactcgatgtatgggtaaatggttgcatatcaaaaacatccctttctctaacaaccatgacactatcattgacataatcatggtgggatccctctggaatgatgtcagcatttaaatctatgagatttggactctgaaccggtggtagtgttgtgaacggcggtaccagagagggtaaagggggaactggtggaggttcacacacatctggaggaacctttccgggtaaatcgttgtaataatctttgtcggcatctccacctgtagaacctgagtagtggcccattgtagcacctaaacctaaaggagttttattcgcaaattgttggaacctcaactcaaaagcttcaccaatagttgatataacatcttttgctagacctcctccacattccaatacataacaagctctcacctcatttggatctttggctatatatcctacaaagtctagcgcatctttttctcctccagatgcaaatgatattctaggcatttcatgacaagctattatttgattagtttctatacatgtaagtgttaactttatactagacacgtttaagttaacatacatgccagcataattcaaattaggcacttctactattgcttttaaaacctttttatccacttttcgtttcttatctatattctttaactttgagtattcacaaactctgttgatacattcctttgcaacaccagatcttgttttgaaattcaatttcttcatggaaactttaacctccaaacaccccacatacttgacagtataagtagccccttcagttgcaagaagcttttcagaatgaatccagccaccagatggttttatattaaatgcagacatcttttgtattgtttatgatttggtacaatttcatattttgttaaatcttgtgaatcataattgataagcacttaaactcaattaattaattaaagttcttccaggaagtcatcaatttccagagattccatatcggaatacttcaacatctgaaacttctcagtttc

SEQ ID NO: 7513 - DNA, 1452 bp, Diabrotica virgifera
  SmartBlast Evalue=2E-99; Info=Cytosolic sorting protein GGA2/TOM1 n=1 Tax=Glossina morsitans morsitans RepID=D3TND3_ GLOMM
taatacttattaaaattaatgcagccgattgatctggtttttatccttgggcgagctcgtcgatttggtattcgttgcacaggcgattgaaggcaaactctctgcagccgccgctctctcggccaagaatctatcgaaatcactactggtaactgattcctcaacgccactggattggtttttttgagttacagtactcaatcctcccgaaatctgatccggattgagattatctttataggtacttccgctttgcttggaactttcataagtaacattcctagattgggcaaacatatcaaattcatcactaggtactttgtcgtcaattttattagctgatgaatctcctgcggccttgtttggggtaagagttaacccattcaaattcttagatatatcatcgtcaaaatctataaggctatcgctggcctctaatggtggtttggtagttggaggtatagctttggctagcacagcagaagcagactgcttcataccgacatctctatttttctcccatctactatatcttaaaaatagattgttaagttcgtcgttaattctgagcaactcttcacacagcccatcgttggaaattttgcttaccaattctaccagtctatgttgcatgctctgacaagttgcatgtaattcctgtaataattcaagctcatcaggttgttcttctcctggtttaagctcgaccaacatttcgcccaatacagccatattactctgtataacgtctagttcagattgcaattttgctctttgttcaggtgtcaatactcccggagaagtttgagcatgtctaggcgaagcttgagccggcggtactggttctgtgggtaagggcatttctgtcccggagacactctttttcggtgtatggattggagctagcgaatcgagatctgtaggaggaaattctattcccttggcaaggagatcttgataaaccgctgttacgccagacatatcaggttgattttggaaagcactagcccacgactggatcagacttaacactttttcttggactgcggtgggtggatcattttttggccaatcagttttaccagttcctggataaaatctttgttgcatactaaaacgtgaaatctctttccacaattcttaacacaagtttctaggatagtcaaagcgtacataactacagtataattttttcctgcattctgagttagtcgtttacgaatggctttgattgcatctctagggccgtcctcggtttcgttgacgagatcacatatttccatgttaagagcccaattctctgacgccaaagtgccatctgtggcttgttctattctaccaccgactgcagtcgaaaaaggattgccaatgagggcatttgatataaaagacatttttattttgttgttcagggagccaccaaaatattattgtttccgtattcgatactcg

SEQ ID NO: 7514 - DNA, 1452 bp, Diabrotica virgifera
  SmartBlast Evalue=3E-54; Info=Death related ced-3/Nedd2-like protein n=1 Tax=Tribolium castaneum RepID=D6WJH5_TRICA
caatatcgcctgtatgatatgctctgcagtgctctagctgacgaaaacccctgttctgccaatacaaagcggtcagctacagaggagtatttccccagcaataactgctagtagttacgagagtaccctaaactctgaattaccaagatacgaggatgaagcagttacacgtgtccgaaagccatcatctgttactagtgtagacaatcaacaaccacaatcatctagacaacgtatcgatggagatgatcccttacaaaagattgctttggaagatattctacgtcgctctacatcacctctggaaattggcatcatggattaccagaatattttcgttccagatactaaagaagcagaaacaagcgaaaaagcaactagtgataaaagttctctcgacagatatgaaattgatctaaaccgaccaggtgtagtactgatcatcaatcaaagagatttttttactgagcctagagatgaataccataatttgctaccccgtaacggcgaaagattagaagttagagaaggtactaacaaagatcgggataatttgataaacacatttatacgacgtgggtttaaaaatattatcgttgcaaacaatcttaatcatattgacatgttagaaaaaattaaggatacagtaaataaaacaaccaacgaaagcagcttatttgtctgtattctgtcacacgggaatgaaggtgttgtttatggctgtaatagttgccatgttaaagtgagtaagatacaagaaataatgtcaaacaagaattttaaccaaaaaaccgaaagttctgatcctacaatcgtgccaagggagggaatgccttaaagttgactccaaagatgatgatgattccaagtccctaacaaccgatggcggaggtacgacatatcgtgacatgttaacattttgggccacctttcccggatatgcagccatacggaacaagcaaacgggaacgtggtttatccaaaatttgtgtcaggcaatacaggaggatggcgatgaattgcactttgttgacatatgcactaaagtgaatcagaaaattcaccaattgacctggaaaaaacacgaagaaattatgattatgacaccactgatacattcgacatttaatcgtcaattttatttacctaagacgaattgaaataataataatatgagttaatttctttatatatatatacacggtgaccggacgactacgaggcagaggcattatcatcaactacaacatttttgaaagacccagcgataaaatttgtgattaaagtgggtattttcgattattttacttacgcccctaagccggagtgagaatcatcccaaaatttttaatggcaatggggctgaaataaggtatcgtttaaaaaccactgtaatcctattcattactctttaaatttttaaatccggtccagtactttatttgatttatt

SEQ ID NO: 7515 - DNA, 1453 bp, Diabrotica virgifera
  SmartBlast Evalue=4E-77; Info=Lysosomal acid lipase n=1 Tax= Culex quinquefasciatus RepID=B0W003_CULQU
aatatttttttttatttagaattctaaatcaacacaatgctctaaatacaatgttaattacctctttcaaaaaataagcaaaatcatattatttatcatagtattatattaatacacaagtaaatactagctaaagctgcaacaccaattggcacaatgttagaagacgatccctttgttgttggaggatcttgtgtcgttggaggagagattgttgttgtagcattgtccttgccattatataaattaagtatatttattacatgacgattaagcagactgtcgacatctttagctaataagaaatcgatgtgattaaagcgatcatattcaatcgtatgattttcgactatattaggtaaatcacttgcgagatgttgtacatccgcacttgttgatataagatcattttgaccgtaaaataaggctactggaacagtaacattacttaaatcgtaaataggtggttttatactgttatatatttgtttattttttatcattccatagtcatattggctgaatagaccgttcattttccattgtaaaacgtgattaagttccttaacagatataccagcaggaaatgatgagaagaatggtataatagaggacctatctaattgatcagtatcgaatccagtcagtaaaaatattaaatcagcacacagttccttaaacataccacatatggcacccaaacctaaatcccatattatagagttgtggtctaaaataactgttgcttttgcactttcttctgcagccaaaatttgtgcataattatctttagttaccattttcagaagaaaattagttgagtggtcaaggtaaactactggagctagtgcagctgcgatcttaaccttattttgatattctggtttcatagatgtggcaattaaaaattgggcaactccagtagagtgagcaacgtaggataaggtcttctctcctgttttgtctaaaatgaagtcaatgactgctggtgtgtctcttacaccaatctcgtgaaagctaaagtcccaaaacgacgcatttttgattgtagtggaactgtgtttttgagagtaagtatttcccctgttgtttccaagccacacatcgtacccttcatcagataatcttaacggtaatgcttttccaggaccaatgtgaataaaatcagctgagcaacccaggagaccatgcatgactaatacaggaggtctctttttattcttaattccatttggactttcactaatgcgatggatttccaatatgtaaccatcttcagtggttacttcaaacttatcaaaagtgtaaccaaaacttcttacattttgcgcaatatcgtatgcaacaacggttgatattcctagtataagtaatataacagtagtattcattttagcacaaatatttaatactaaattttgattacataccgttgccctttatcgcttacaat

SEQ ID NO: 7516 - DNA, 1448 bp, Diabrotica virgifera
  SmartBlast Evalue=3E-29; Info="CG1674, isoform E n=2 Tax= Drosophila melanogaster RepID=Q9V4C1_DROME"
gcaagggacagtcgatgtacgtgaaacgaatgaaaagatctgttaaatgggtacacgaaggagaaggtcgtggaggcttcaatggtcaagaactaggcagcagcgatggcacaccaaaagaccctcttaaacttgttatgaacccgcatgggcaggttcatgacataaattctctaagaaaacaaggatacaacgtcgaaccagcgctactttctccggaaatcgcacaggagattgtcaaaggacttaattctccaaaaggaaaaggagccgagttattcgcaaaaagacgcaaacgctcagaaaagtgggtagttggagaaacaaacggtaccagacagacaccgattcctgaaatagttccagctccagttccactggtgtcaccactagcaccaccaacgccatcagtcaatatccctccacctacctatctgccagagtctgcagagagacttcaacacaaacaaaaattggacggtattcaagaaaagttcagccgtcctagagtgaagttaataaagtccccttgggacgctgctttagaaaccggttcagttgacgcagcttttgttgaagaaccaacttggccaacgaaaggcaactacgtagctcctgctgtaaattcgtacgaagcagctctgaaaaacgattcattggacaattggagcgtaccgaagtccaacgaccagaagatgtacgctcaaaatccaagctataacagcaacagcatcaataaaataatcgatggttaccagaaaggatcgagcaatgttgatgtatataaaccaacaatgcctcaagggtgggctacccataaacaatttggatcgaacactctaccaagaactaaaccaaagtctacagcctcaccaacttacaaaccaccaggcagcccttcagttttcatccctaaagaaagccccagctattttactccctctgaatctgaacctaactacaattacgaaccctctttgcaaatatcgcaagcgcccaagccaaccaaaatcctggacttacacagtcttcaaaactataatgtagcaccaaagggatggacagaagcaaagaactactacaagccactgagttttaaccagcccaaagaaatgtactctgatttttaaaatagcagttcatattttgtgttgtttgtatttgttttgtttctgtttttagtaatttaagatgtgttgttgatatttttgaggcacattcatgcaataaattagcactaagtgtatattattcagaataaaagagctggaaatgcagtagattatcagcttacaaaattaaacttttaataaaaatttgtaatacaacattgtaagtggtatctacaacaaattaacggcaaaccattatttgtagatttggttagtttaaaaaattattgttgtaattgtttttcaattattcatgaaaataattggtttaacatg

SEQ ID NO: 7517 - DNA, 1449 bp, Diabrotica virgifera
  SmartBlast Evalue=1E-178; Info=ATP-dependent RNA helicase Ddx1 n=2 Tax=Formicidae RepID=E2BW30_9HYME
aatattaaaacgcaaatctcccatcttcagaatgttggagctgatattattgttggaacacctggaagattggaggatctgattacaggaggttacttgtctctagcgaactgccgattttttattcttgatgaggctgatggtttacttaaacaaggatatactaatttgatcgaaacactacatagacaaatgcccaaagttacatcagatggcaaacggttacaaatgatcgtgtgtagtgccacgttgcatgctttcgaagttaagaaaatggctgaaaaattgatgtattttcctacatgggtcgatctgaaaggagaagatgccgtcccagaaacagttcaccatgttgtagtaacagtagatccccaaaaggataagtcatggggtaatttaagaagacacattaatacagatggcgtgcacaatgaagacaacgttagacctggcaataatagtcccgaaacattgagtgaagccgtcaaattattaaaaggtgaatactgcattcgagccatagacaaacataacatggaccgagctattattttctgtcgtacaaaactggactgtgacaatttggaaaagtatatgaagatgatcgatagaaatcattactcctgtgtgtgcttacacggtgatagaagaccccaagaaagaaaagctaacttggaagctttcaaaaacaataaagtcaaatttttgatttgtactgatgttgcagctagagggctcgatataactggtctaccgtttacgatcaatgtaacattgccagatgaaaaatccaactatgttcacagaattggacgtgtaggaagagctgaaagaatgggtcttgccataagtttagttagtacagtaccagaaaaagtgtggtaccacggtgaatggtgttcatcgagaggaaaaaactgccggaataccaacttaaccgataaccatcctaagggatgctgtatatggtacaatgaaccacagttcattggcgacattgaagaacatttgaacatcaccattcagcaaatcggacctgacatggaggtaccacaagatgaattcgagggcaaagttatttatggagaaaaacgaagaaatatgggctcgctgtatgaaaaccacaccgcgcagatggcgcccattgtcagagaactgtctaagttggaaagcagtgcccaaacactgtatgtccagagacatctaactaagttaactagaatttgctaaggcttaacagatgattaatttgctattaaaggagttctaaagaaaataaggagaaataatgttcttcattttgcaaacgtaattataaactagttaattatacagtaatctccacgctactagattcataggtagatacctagttgctatgattataggctaatccgatccgttctcagatgttaatttcatccctgtcatgtgactgtcgagacacta

SEQ ID NO: 7518 - DNA, 1452 bp, Diabrotica virgifera
  SmartBlast Evalue=6E-21; Info="Protein takeout, putative n=1 Tax=Pediculus humanus corporis RepID=E0VZK3_PEDHC"
aattggaagttctgtccgacaaaattcatgggatattttcgtagtccgacgtttgaaactgtctatatcttacaggtttcgaaagtcggactacgaacactttccatgcattttgttaaatagaaattccaaatgatttttttaccctttcagtaaactctcatgcaaaaattagactgctttttaacaccaacataattcctgtcctttgacatgttcatcatgttccacgttccactcattaaaatgcccggttcagtctgatttttgtatgagagtctaatgaaatggtaacaaataaattggaagttctgtccgacaaaatacatggaacgttttcgcagtcattccatgaacgtttggaacatgaagttccaaatttttaacctgttccacaattaaaactttccctgttccagtgtttccatacatacccatgtgcctgtttcagtgttcccatacgttgacgtttttccgactccacaccgttaatccatgaacaaattttcagcttgccatcaataatctttatttggtacgcgggatccaggactattatttttttaaataatatggattttttaatagtccagcggttttgacaaaattattaaattaataacaatttacctaacaaattgtaccatattttctatacagtctactcaatttttatacctggaaacaactcaggtagttcataacggtcgaagacgccgcctgttgctcctaaaatgaatcctttaacaacttctacaacaacaggagcgaatgattctaccaggacttcttgattttcattaaggattttattagcattctcagtaagttctggattgtctttaaataaattgtggaaatttagatttacttttcctatttttgttgtaacatccgttgatttgattttgaagaaagtttttccgtgtcttatttgtctttctccgtgaccaattaaggatacttccaggtttgtgatatttatctgaccaggtccacttccatctagtgtcaaaattaataattttcctttaactgtgtattctccttctgcacgaatatgtgggatatccactttgatttctatataatccttgtccaaatcaatttttaaatctttaataataaacgcaggtaaaccatacaattttatatccttcattgatgctttggacttctctccaagatccatttgcgcaaacggaatttctaacggattaatactaggaattctcatctctggaataccatcgtttagttgttctctaagttcttcaactctttgcttaatacattctgaaatatctgtttctttcggtttgcaagctttgatataattaggcaattttctagcaacacaataactaataagacacaagaacacaaaatatttcatgattaaaaataattttcaaaattttttgaaagatgagtatggtaaatcctagaatt

SEQ ID NO: 7519 - DNA, 1452 bp, Diabrotica virgifera
  SmartBlast Evalue=0; Info=Septin-2 n=3 Tax=Aculeata RepID= E2ANZ9_9HYME
agttaaattaggactgccctctaaaataatacttaaaaacataaaagaatctgtataaaagtacaaaaacgaacactggcattttacttttttcttactttttccaagggtgagagtgtgatggctctgacccatttgttggtactgtgattttcgcctgttgaattctacaatttcgtcttcaagctttttgcgggaatcttctattttcttcttttcctccgtatggtccttctttagtttgtcaaatttggcatgtaactctttctcggcttcttttaattcagattccttttctttgactctcactacaaacatctgcctcatttcatcttccttctgttgcaattcctgcagatgagtggatcttttggcttcgaatgtctgctgaaaactaactggcttgttgtcttcgtctacatcacttagtcccatttgctcgagacgtttcttcctgtataattcgtagtgtctgcaatgtgttttttcacgcatgtcttccatatttgtgcggatcagcatttcgcgaagttttacgaaatcgcagtgagattcattctcgacttgaacagtaccccatggatattgcctcgctctgaccattttatttcctactttaataaagtcggtgctgccgataactgcaaaaggtacatgagagttcatggtggaattgatatcagaaacggattcgtcatctactggaaattcataaattgaaacaccattgttttgaagttcagcgatgattttagatttgaatttttgtagttccgttttcgatattgtgtcagctttggctattatgggaatgacgttaaccttctgatccagctgtttcatgcataccaaatctattgattttagtccatgacctgttgggcatataaaatataaacaggcgtgaattcttgtgtcgtggaatgtggaaagagatctcttaatttttaattcttcctgtaggtaattttcaaactgtgcatctatgtagtcgacgatggctttgaaactgttttccttgttaatttgatctccataaccaactgtgtccactattgttaacttcaatcttacattactttcttgcagctcataggtatgtgcctttagttttactgtaggtaaggaatggggactcggtgatgattcaaagtttgtgttaaaaagggaatccattaatgttgatttacctaaacctgtttcaccaatacacattatgttaaagataaaaccattctggacactctttgagaccaactggtctggtaatgaatcaaagccaacatgacctgataagtttaagttccttatttgaggttccacaggaactgtatccacatcaacgggagccatggttatttagtttcacttactactagagaaataaactccagctttctatttttggattaaatagtttttaccgttcgcttccgttagcgaaatcgaaaa

SEQ ID NO: 7520 - DNA, 1438 bp, Diabrotica virgifera
gttttaacttctgtatgattttttaattatggtatacagccagttactgggattttcccattgattttttgattgaataataatttttttcaatagatatttcgcttaccttattattgccgttttgatttatattatttatttttatattctcatattgactttctttccttccctgatctggtggtatattcctatcgtcatctatttccattttgtgttacagacaaataaaattaattgttcaatagacccagctgatgttaaaatctggtaataataattcacactgcctaattgctttcgatgtacacttgattaatgttaacaccgacaactaaactacaacgaaaaagtgaagaaaaacccttcaaagcacaaaaaaaggttaaatataaataatttgcacaatactgtatttgcaacatatatttgaagtacctgttagagaacagtcgatttttttattgtattactaacgggtgtttaaaatatttcaatttctgatttttataaagtgtgtttattagacaaaaatgagtgtatacctttaaatatgtacaaagtaaataagtatttattcctagttgccatatttattgggtgcgccgaaattccttggaatttggcgtattctgtatagttaatcgttaagctattcctatacgtgtgccatttatcaatttttgagttactgtgcaaaatcagctggtggtatctgcgacaatcgaaccgttgtatacttttccgtacactcgttatcaaaaagcaccaattttttgtattatttcggaaaatttgtctaaaaggtgtgtactgacgagagaattttcttccgaatataccaaactagcctggcgagcacaaataagcaaatggtcaagttattcaaagtgttagttcttttcgctgcattcccatgttctgctcattcgcattttatttcagtattcgtccggctgtggtagcagagaatctggtgatagctgccgaagctatttttcttattcaatttattacaaataaaaagaaattaagaaaaaaacattaaatatacattagataaggaggttgtttttaaatcataacaaaacaactctatagttgtttttggttcacctctatctaaaagaatgccatagggaaaaactataccacttagatacatatatttcatccgttcctaaaaaactgaacagtaatttattattagttttggtaaaaattttgaaaaatctaccttttcgtgtacctgtcaatttggtactttttaccttttctctttgaaaattggctatcacattatcctgtctttgcctcttcgggggtattgtaccctcggagatcgctgggaaaatttacactcaaaataacaaaattcagttttggcaacactgtgttaatgttgatagtaacatgtatcttttaagataaacag

SEQ ID NO: 7521 - DNA, 1451 bp, Diabrotica virgifera
  SmartBlast Evalue=1E-170; Info=Phenylalanyl-tRNA synthetase beta subunit n=1 Tax=Glossina morsitans morsitans RepID=D3TMA3_ GLOMM
gaaacatcttcaggcaagcccattgggagtaacatttctggtcggaatactccagaattaccagtttctatccactttccaagacccggatggaagcagaaaatttccatactaggttcggtgtagggattgtaggctggtttgaattccagttggtcaatacctaattttttgaagaactctgcgaaaactccgatcaagtctccaagagttaaattataatctgctatcactccttccacttgatggaactccgctaaatgtgttgcatctaaagtctcgttcctgaatactttatctatactgaatagttttatgggtttgaattctttctgctgggctactttgtacaacattctagcactaactgcagtagtatgagtcctcagtaaatttttctgtgcttcttcaatctgccagtcataaccatacccttttgacccataccctcctttactgtgaactttctttaccctttccatgtaatctgcaggaaatttagtactaattctcggattagagatgaagaatgtgtcatgagcatctctagcaggatgttgctgaggttggaagagagcatcaaagttccagaatgaattttcaatgtaattattagtaggcatttcagagaatcccatttctaagaagatttgcctgaattcagatcgaactttgagcaacggatgaagataaccggagctcaaaggtgcacccagtgcatcgaagttgtattctttgaatttcaagtttttccaggcaccagagtttatcatttcacaagtaagatctgtttctagcttggtaagagtaagactaaattccggtcctttctttaaatcaaagcttttcacaaccacttcttgaataagtttcctctttttatactcctgttttctttatctgatattgaggatatatcttcagacaaaatttgtttgagatgttcatgaactacgtctttaatttgaggcacttttcttttcaccattggaggtgtaacagatttatctacttctacccaacctgctgacattgctttactaaaacctattttggcatttggtagtttcattacttcagcttgaggtaatccattttcaccaagactattatatatcatagcttcatagctgcctttttcagctattgtctttccttcttctgtaagttcaagtttcttattactgactggctctgctacaactaaatctccatgggcttgaatactttttaaggctccaataactttctgatggtcttcgttaaatgcggaagctaattttaacgtattaatatctccgttatcggatatatattttaaaatattctcaattaactgagccatgctgaccttatgttaactggttttaataacgtatatatgaatacataaatgtcctagtaaaaaatttaaaagaattgctcttttaaaaagatctgcttttcacaac

SEQ ID NO: 7522 - DNA, 1447 bp, Diabrotica virgifera
cttttatcaacctagggttaaatggaatgttcattttcgggagatctgcttggatgttatctctccatcgcattctgggacgtccgagtggtgttttgcctgtaggaatctcctcccataccagtctgacaagtctctcgttatgaagtttatgcaagtgacctgccatcttagtcgctgtaatttaatttcttggacaatatcggcatcattgtagagtgcttttaattcgatattagttctgatcctctactggtttgtggtgggtccgaaaatttgaagtatttttcatggaaaatgaatcccgacacgaaaaaacctcatgttatactagattacaatgaaacgaaaggtagattgggcactggagacaagatctgtaccgtttacttggcctgtagggtaacaaagagatggccctgtgtagttttctagtctgacaaatattgacgacataaatgctcaaatcttatacacattgacatgttcagcccaagctcctaaataacgaagaattttcttgaaaaatttagcgttgagcctaaagaaagagcatcttatcttcagatcaaccctcaaatatttacctcaagatacatgtccttttctcaaggtcacttatggtcgggaggtttgacctaccgaaggacaaaatagaaaccctagaaaaaacacgtaaaatttaagacacgcgctcacttatgtgataataatgggcacgcccgctggaaggttaaacaatgattttaactttttttaaggtttgttttatctaaaactctgcatcagagtcattacaaaatattttaaattatatccaatagccttgttagtttttttacttttactaacatttttattctcttaacatgtttttgaatgaaatctttatattagtttcatacataaaatatatttctttaaggaattctataattttttaccatcgaaagaatgattcattaacaaagaccaaataaaaaatgtgatactctgctttgtagtaaatatttgcaacaaatgtttaccatagcatttggcctatgacagttgcgttaaattactgtttatatatatataattttaagtattcattgtatattgtacagtatgtgtcaaaacttatttgttaattagctgtttttatgttgccttgtgttcggtgtacttcaggaaattaacaatgtgattacataaaggcacatatccactattttcgcgaacctcttgcgctctgtgctccctgcaactgctccaatcaatacggcatgcgctcctctacatacacttctccaagaagttaacgcaccaccttgaaatgggcctatttttgatgtctcgaatttcctaaatatgttgtccggtctgatgttatagctttatacattaaaaatatcgctgtggtaatgttgttgctggacaggtgaattgtcattgtatgcggggt

SEQ ID NO: 7523 - DNA, 1452 bp, Diabrotica virgifera
  SmartBlast Evalue=6E-88; Info="Trans-1,2-dihydrobenzene-1,2- diol dehydrogenase n=1 Tax=Camponotus floridanus RepID=E2AXQ4_ 9HYME"
aacaaatatagtgtttaatataatcaaaaattaacaataaaataacaatgtttataatataaaataagttgatacttaataatgtataataaggcacaaaagattagttcaacagtcgttaaaatcatctatgcgtatattggcactagataaaagtaacaacaaagataatattacatgatttacatttgaactgacttacaacatcccaaaaagaaagattgtgacatcaatacattattgaatcagggataggcacacaacatcaaaaacattagtaagattccccatctgcaggaaagactactcccaattctgctctcaatttatccatgagctgtgccaattccaaggtgttatcatgggtaattttggaactttctattttatttttcattatacattgccttgcctcttctgcttcatacgccaaaccagcgctgttcaggtaattgaactcgccttcatttttaatcaaaggaaattctatgactacaccatttacttctagagttgtgggacaccaaaacttaggcatcttaatgcatccttttgtgccatataccacaccttcacaggcaagtttcgtaaatgaagatgcagaaagtacagcagttttcccttcagggaaagtcaaaatagctgcaacggaactatcaatgccctcttcatttagatgtccactagctacaacttttgttggcttcaaaccgttgaacacatactgttgaaactgaagaatgtacacacctagatctagaataactcctccacccagatctttgtttttaatacgatcaacatgactaataggtactccaaattctacagttacttgtactacctctccaatttctccagatttaataacttctatcattttatcataggctgggaagaatctagaccacactgcttccattaaaaacaagttcttttctttagagatatccaacaactttctggtttgcttctcattcatggtaaatggtttttcacagagtacatgtttcccattttccaacattaattttactacttcataatgttgtggatttaacaccccaacataaactatgtttacattttcatctttggccaacttatcataaccctcgtaagcattgggaataccatgagttttagcgaatttgtctgaattactttgagacctactcgcaattgcgacaaccttatgttcagttaatggcaaggcctttaaggctgtgacaaaatcattagatattttaccagctgctgcaattccccattttaataacattatgaaataatatattaagattttagacctttaatcactaatatgctaatggaattgtatctaacttgtgatataaagcaattcaagaattgataactaaattaaaaattaacagtttaattttggtttaatctacaggttcactacttaaatattgtaatctgtaaacg

SEQ ID NO: 7524 - DNA, 1451 bp, Diabrotica virgifera
  SmartBlast Evalue=1E-147; Info=NADH-ubiquinone oxidoreductase 39 kDa subunit n=1 Tax=Culex quinquefasciatus RepID=B0X750_CULQU
caaatagtatatttttattttgtatccataattagttctataaaataatatatacattgatagaattgatttaagatttcaatattgaaataatgatctaatgtttaaattgcgaaaacggattaacaacgcagtacaattattttttattaactcatacaaagatttttacacatttaaacaagagcctttggcggagcagctggagcgacaggttcgtcgggatcttgtcctctataaataccccatgtccaaggtttgaactcccatggcatttggttttctacagctgttaaattgactcctagatcttccaaagttggaatatcacttttaacatcgtccgttaagtgctccctttctattttttcccagtgcaaatgcccaattggccaatttatggagaatttctctgttagagaaacacgaagttggaaaagtgggtcccaacgcatgtcgtaacgtttataaccccattcgtcatctttgcgcattattctgtggaaatagtcgaccaaatctgataaaaggtatcgtttagggccgacagcttgatatattttccctgcagtatcaggatcctttatagcatttataatacctgaggtaacatcactaacatacacaggttgctttacagttctttcacctttatgccacagtgggaaatagttggcagatctcctccatggatgggcataatatctaacaaatctatcctcctgtccatatacatcagatggtctgaagattgtagcctctggaaattcttccaaaactgcttcttcacctctagctttgcttctaagaaaattggatccaccttttagtatccctgccctttgagggttttcatcagcatttatagacgacaagtgaataaatctctcaactccagcctgttttgccaaacgtgctagccgtcttgcaccatctacatgcacatcatcaaacttaaaatttctagtttcccagtctcttcctactaggttaacaacaacatttgagtacttgatacacttagcaatagactcttcatctcttaagtggtatggatgaaagtaaacctgacccaagtctcctaccagtttcaatctgaaaggctcgtagttgtctcctctgtatgggataatgatttgtgaacctatttttcctagtctattgcagacatatctaccaaggaagcctgtggctccaaagactgtagctacaatgccattgaaactggatcttcctccagtacctcgttttaagctggctaaattgtatgccctatcttcggtgctatagttatttgagcggatatatgcgaccgcaactaatccaggctgttttgtgattaattttgatccagttaaaataactacagccatcctaactatattaaattaataatcaaatgttgacatttaagaggatcaaaaatcaaaatcgctctaaatttgacattg

SEQ ID NO: 7525 - DNA, 1451 bp, Diabrotica virgifera
  SmartBlast Evalue=1E-120; Info=Putative CAAX prenyl protease n= 1 Tax=Chorthippus parallelus RepID=D2T1B0_CHOPA
attatcgatataaatataaaatttgcagaaaggtttggatttggaagactgaaaacagtgaaaactgcattttaaatgggatttagtagaaattagataacattatacatttaatgatggatttagaatcaatacaaaatatatttgacgcaacatgtgtccggtattccatagtatttcttctttggatcgagttcatctgggaaacatatttatcgttccgacaataccaaaaagcacaaagtgtaacagaggtcccagaaataattaagaaggtaatggatgcagatgaatttgagaaggcgaggcaatattcactagcgaaattaagatttggttttgtaagagacacatatggtattctgtatactaccgttgtaataacctacggtctcctcgcatttttttgggaccatgctgaatctatcaatcctgtaaaaggagaaatcacaactagctgcatatggctgtttagtgtctcccttatatcaacaattatcgatttaccattgacaatataccacacattcgtgttagaagaaaaatttggttttaataaacagtccgctggattctttatttgggataagattaaagcttttttcgttagccaactcattacattgattatttgttcagtgattataagtataattaaaagtggtgggcagtacttcttcatctggctatgggctgttgtttgtgttatctcaatggttttactgacattatatccttctgtaattgctcctctcttcgataagtatacaccattaccagaaggtgaattgagaacatctattgaaaatttggcttctgaattgaaatttcctttaacccaactgtatgtagtagaaggatccaaaagatcttctcatagtaacgcctatttttatggtttatttaaatcaaaaagaattgtgttgttcgatacattattgcctaaggatgatggtacaggatgcaaaaatgatgaaatcctagcagtattatctcacgaattgggacattggtaccacagccacattatcaaaaatcttattgtaatgcaggttaatctgtttttattgttcttaggattctctgttatatttaagtacgaaccattatacgaagctttaggtttcgttaaagttaggcctgtactggtaggactctttgtagtattgcagtatgttatgatgccgtataatacagttcttaacttcctaatgacttgtttatctagaaagtttgaattccaagctgatgactttgctgtgaatctaggcaaatctgaggctttagaaagagcacttgtacaactgaataaagataatttaggttttccaattaatgattacctttactctgcttggcatcactcacatcctccattactagaaagaatagccgttttgagagagagtgcgagaaaatcccaatagactgagttttacacaaccattgtt

SEQ ID NO: 7526 - DNA, 1445 bp, Diabrotica virgifera
ttttaaatgaaactaaaacaaaaaataattggagtaagaatgtgattatcacagcttagaataatctattatcttcactacatagttcaatatatattttttacaaaatttcaacacatatatacatattttttaattcaaacctaatgcacagtataatacagattacataacaatttaatatttaaacatgatatgtcaaagctaaaattatctaattaaaataattgcaaaggaattatcttttaaaaagagatatcaggtatacagatgacactgtgataatggcaaagaatattgtagatttgcagagaaaactgagaaaagtccaaaaagtttataagtccagtttacattatggcttaaatatgaatttttggacacaagaagtttctaatctttaccaaaaaaaccaaataatactgcccaacttattatggatggccaaaatatagcatgtgtatacagtgctagccagcagtcctctccccctttgtatcttctgaacggctatatttatacaattagtgaaatttggagggacgaaataaaggacgtaggcttgtcaaatagacattacactataatctgtatttactgcgaaggtgcatttatctagttattatacatacatttcatattatttcaaattaaacagcaaatattccatctttttttgggcagcagtcaaacaatgagggataatcaatttaatagataataatttgttatataacaatttaattgtttaactgattctaattcgtaaactaatacaatataaataatttttacaaaatgcaaaatttgtttcttaaaaaacctacaaaaggatgtttggtaaaactttatccaatcattagaactgaagatattgtaaaattagtgcaaaaacattgcaaaattacgacatttaggcgacttttcacttgtaactcagttgcatttagagtaaaatcactttataataactcaaattaaaggaaacactaccagctttaaaagtgaaccttattataatcgaaatatttatggcaattattataaacggatatttttgataaaaaagcatataatttgtttgtaagacttttagctactaaaactttagattatagcaaagcaagttacagtcattgtacagatccaagatgaagaattttatgtattgttagttttttaatattataatcattcataagaaatggattcttaaatgcatcgacaactaaagccatttacatggtacagttgatttggaaatcagatagtgtgtgtaaatgtcttgttacttagtgaagtcgacttcattgtctttacaaagagacactaattgttatccgaacatctgcggcccctccggtgaatacctaccgatcccattaggatagaaattattttcatttattaatgtttaataaagacaaatttcctattcagctggg

SEQ ID NO: 7527 - DNA, 1450 bp, Diabrotica virgifera
  SmartBlast Evalue=3E-33; Info="Trithorax group protein osa, putative n=1 Tax=Pediculus humanus corporis RepID=E0VC68_PEDHC"
gatcctacaggacacaaccaacgttatctccggcgtacggaggcggttcagcagcaagcccgggttacagtgaaggccgctccaattggtcgagtgggccacaaggtccgggtggacacggtccgggccctggtccaggacccggaagtcctggacaggcgaattcctcagcgccggtcagtcaaccatctccgcagccgtcgcaaccacccagccattcacccggacccggtcctgggatgccgcctagtccacagcaccagtctcaccagggttttccctcgagaccggcaccacccaccactccgaatgcacacggtccagatgctgcggatttaagtgggggtaacagcaatgacagctctggtggcccagcaccgggtacaccaaactcacagggtatgaggccgaccccgtctccaactggatcaacaggctcgaggtctatgtcacccgcagtaggccaaaacattccaccaatgccaccacggccttcaagtggacagtccgacggcaacggacctagtcgaataagtcattctccaatggtaactcagggcagctatccgacttcgcactcgagtccacatccaagccatggttataaaggtcaccccagtatggtagtatctggttctggtaaccaacaaatgcctctgtatcaaccaaaccaataccctcaaactggctatcctccacggcctcctagtaatattcaatatcccggtcaagggtacggtccaccaacttcccaaaccccgccgaacaatatgcctccacagcagtttcctggaagatccgcacctaaccatatgcagaactcacaatttccaccataccagcaatcgtggcagtcctcaatgtctaccagctcaaaaggcaacgggccaaatacgacgacgcaagcgccagcgtcacaatctcctggatcaacgccacgaccaccgcactacctcaaacaccatcttcagcataaaatgggttttcaaaacgttccaggtcccacaacaccaagcgctagtcctcctcaaaactatcacatgggtcctccatctggtcaccaccattctggcatgggtcctccgccttcaatgggacctccgaatatgcctcctggtagtaaccttcttcccaataaccatccccatgagggtcccatgcctcctccaagttcaacgccaaattctcacacgcaaatggtttctgatatgatggataacggaataacaactacagcacagggtggactcaatactcacgtgactaccgcgtcgggaggttctgtcacgtctgttgtaacgaccggacctgatggtactcccatcgatgaaggttcacagcagtccacattgtcaaacgcatctgctgcatcaggcgaagatccgcaatgtacgacgccgaaagcttctcggaaaaacgacatgagcctctatagccatccaacgacacc

SEQ ID NO: 7528 - DNA, 1445 bp, Diabrotica virgifera
  SmartBlast Evalue=1E-174; Info="Ser/Thr protein phosphatase, putative n=15 Tax=Coelomata RepID=B7QHS1_IXOSC"
aaacaattttccgaccgcggtaccgcctggtactctgtggatttattataaggaactctttttgagtaagtatgtggaaaaaactaatcggaataatttacctaacggaggcgacgatacatcggaggcgactaataaagaccatttttccgaatcttttggtaattttctgataatacacaaatcaatttagatgccataactgaacagattcctaaaattacgtattaaaagaatctgataataattaaaacattgtctaatctttttacatcgagccacaaaagtaacaacttaaacacgagtttcttgtactgcgttttttcatccatatgaaaaataaacttaaaactaaaggatacagatagactaacttagtttacgaaatatataacattcatgtagatggtaaatcgaaaataaacaacaatgaatggaccttaaaagagtaatactagttttacaaaaagtaatctgcttggggtttctttgaaggtattcccctggtttcctgtggggctgcttcgaaaattgtgaaatctctttgtaggtgttcgttcagttctaaaatggcggccacgttaccacatctgtaacaataattcggagctgaccaaacagttaaaacagtctcattaaaatgccatttgtatccttccattactaattgatgggcgcgacatatcatgtctatgtcattggcagcattgaattgggctactacatcagatccaaataaatatcctgctcctcgtggagaaactccccatccttgggtatcttctggatcactccacaacaagtcacacataggcccatcatgtggaacttcctgttttctatcaattactctaatttggtctagggtttgaatggaaggtgaaagtcctccatgaacacaaaatattttaccgtcaatgatggcagacaatgataggtagtcgaaaatttcagtgcagtatctccaaacagtgatggaaccatatttccgcaggcattcatcataaaatccatatacttgggtgatttggcgagactcgtgatttccccgaattagtgttatacgatctggatatctaaccttaagtgctaatagtaacaaaaacgtctccacactgtagaaacctctatctacaaaatcccccataaacaagtaattggtttcaggtacatctccacccactttgaaaagttcttttaagtcataaaactggccatgtatatctccacataccgtaactggtgaatccaccctttgtacattactttcttccaccagtatttccctagctttagcacacagggctttgacctcactttccttaataacttcacaccttttcagttggtctatctgtctatccaaatcgctagtatcacccattattttgttaaatttaaaggcccagtacagtgtttaatattttcgtaagatcagtgggcta

SEQ ID NO: 7529 - DNA, 1443 bp, Diabrotica virgifera
  SmartBlast Evalue=1E-147; Info=DNA ligase n=1 Tax=Tribolium castaneum RepID=UPI0000D55B11
gagatcaccaacaccagaggagacatctccaaatattagcagtgctaaaagaagaagtaaaagggctcggattttaagtagtgatgaatctgaccaggaggagcaatccaactgtatggatactgatccaaaggacatcaatggaaagaagtctgacgacgagaaaaaaacagaattggttacaaagaaacagaggctcagtgaaacaccagtaggtatacctgatagtatcactaataaaattaaagaggaaaaatccacatcaccaaaggcaaagacatcacctaaaaacaaagataagcctgatacaaaggacaataaggaaaagataaaggaggttaaagaagtttcaaaagatgagcctaagaaaaaagttaacacatttgtatttggtgttcaaaaatcagatgcatcaactaaagatgataagaaaaaatataacccagcatccaccaaatatgatccaatcaaagatgctacatggaaacacaaagaaaaggttccgtacagtgcattgtcaagcacatttgaagaaatagaagaaatatcagcaagattaaagatcatagaaattcttagcaactattttagatctgtcattgttttgtcaccagatgatctgttgccaagtgtttatttatgtttaaacaagttggctcctgcatatgaaggtttagagttaggaatcgcagaaacaaatttgatgaaagcaattgctcaaagtacaggcagaaccctagcccaaattaaagccgacagtcaagaagttggagacttgggattagtggcagaaaaatcaaaatccaaccaaagaatgctcatcaagcctgccaggctaacagtgaggggagtttttgataaactcaaagatatagcaaaaatgactggcaatgcatcgcaagcaaaaaaggtggagaagatccagtctatgttcgtggcctgtcaggattctgaggccaggtatttgataaggtcattggccgggaagttaagaataggtctagctgagcaatcagtcttacaagctcttgcactggcttgtactatgactccaccaggacaagaatatccacctgaagtgatgaatagagcaaaggaaatgggttctgatgcatttaaagcaaaatatgataaatatggtcttattttgaagacagcttattgtgaatgccccaactatgataaaataatcccagtcatattaagtaccggcatcaaaagtttaccagaacattgtaagattacgcctggtatacctttgaaaccaatgttagctcatccgacaaagggggtccaggaggttttgcacagattcgatggattgaaatttacgtgtgaatggaagtatgatggggaaagggctcagattcatatagatggtacgaatgttagtatattcagtagaaaccaggaaaataacactacaaagtaccctgatataat

SEQ ID NO: 7530 - DNA, 1446 bp, Diabrotica virgifera
  SmartBlast Evalue=1E-166; Info=Acyl-coa dehydrogenase n=3 Tax= Culicini RepID=Q16FF1_AEDAE
aaaagaattattaagtaatcagtaaacaatccgctcagcgatattctataaataagacatgttatgatagtacacagataacaattaattagtgacgacaataatattacaagtgctttatttttctacaatacccagagtcccagagtaaagtacttttctgattttctagcagctgttaatttttagtaataacatgtctttaaatacactagtaaagttaagcaaagtcggtgccgaaattgcagtaaaaaatgcaaataaaaatattccaataagatgcagttccaagtttgcaccattcaactggcaagacccattgaatcttgaatcgcaactaaccgatgaagaaaaattggtaagggatcaatttaggtcctattgccaggaaaaacttatgcccagagttatagaagcaaacaggaaagaagtttttcatcgggaaattatgaatgaaataggcgaattaggtgttttgggatgtacaataaaagaatatggatgtgcaggagtatccaacgttgcttatggtctgttaacacgtgaagttgagagagttgatagctcttatagatcagcggttagtgttcaatcatctttagcaatgggtgctatatattattatggaagtacagaacaaaaacagcaataccttccaaaattggccaaaggggaatatattggctgttttggattaactgagccaaatcatggaagcgatataggacaaatggagactagagccaaatacgactcatcttcaaaaacctatattttaaatggtagtaaaacctggatcacaaattctccaatatcagatatttttatcgtttgggcaagatgtgatgattcaaaaataagaggattcataatcaataaaaaagaacatggtaaaggtttagaggctcctaaaattgaaggaaaattttctttaagagcttcaactacaggtatgatactattagataatgtaaaagtgcccgaagatcatttattaccaaatgccgttggtatgagtggaccttttggatgtctgaataacgcgcgatatggtattgcgtggggagcacttggagctgctgaagcttgtttagaaattgcaagaaattacactttggaacggcatcagtttgacaaacctttagcggcaaaccaactcatacagaaaaagatggcagatatggtgacagaaatctctttggggttgatgggatgctaccaagctggcagacttaaggatcaaaatttgcatacgccccaaatgatttccttactaaaacgaaacaacgcagggaaagcattggaaattgcaagaaatgctcgtgatatgttaggtggcaatggaatatctgatgaatatcacgttattagacatgttatgaacttagaagctgttaatacttatgaaggtactcacgatgttcatgctttaatattaggaagggg

SEQ ID NO: 7531 - DNA, 1447 bp, Diabrotica virgifera
  SmartBlast Evalue=4E-73; Info=Serine/threonine-protein kinase 17A n=3 Tax=Eutheria RepID=ST17A_RABIT
cgaggagtctgtgaaagtactactgagggtgtcaaagccgttttttcgttgtcctggagatttcaccgtgccagtgtcgttgatgcaggcaaaacttttgcgttgcgttatcggcgtcgattttggcgttatgttgttcgattgaatgttttggtgttcacatggttttaggtgtaaggtgggtgggatgttgctctttaacgatatccagggatggtcgagcatttcgtggattgatggccgattcctagggtcaacaataagggcacttctgataaaatctatcgcagcactggaaacgtctccaaaatgttccggttcgaaggtgagcgaacatttggaaatgttcaggaaagtttgttgtttatcatcggctccgaaggggctgaatcccgacaagagaacataggctaatactcctactgaccaaatgtcggtgctaaggcctattggttcgtagctaagcacttctggagctacataatcagcagtacctaatatttctcgtaccgctacaccaggcatgagcgccttcgatatgccaaaatcacagagttttatgtcatcacagcagtcttgtacagatagcagtaaattttgaggtttcaggtccaaatgagcaatgttcttgtcgtgtaagtaagcaactccttctaatatttgtttcattgctttacgggcttccacctctcccagacattgtccgccatcgaggatgtgctgtagttcgccgcctgcggctaattccagtactagaaccatctcggtgattgattcgtagacctcgtgtaaccgtatcaccctgttggtcattttgcactgcatcaatacggctatttcgtggatgatttctttcatctggtcttgatttcttcgcctcttcttcacaaattttgcagcgtacgctgtgccagtcttcttgtgaactgctcgccacactgttgcatattttcccctgccaagtggtgttttgtccaagtcatatactcctgtaataggttccttaaggacaagggtcgaaagaagatcgtcttcgatctgcaacagtccatctcgagaaggagtaaatcccaacattttgcagtaaaataattcacttttcaaaactaaacaacgtcacaatacgtcaatattattcaagtcccgaaaaacgttaaacaaactttctacctgaacaaccacgattttaaacagctggctgttaaggttatgttgtttggtcgaatactttcaagattttgaaagatttcaacgataaatggggcgagacagcacacagttttacatatttattaacttaacacgtacgtatcttcaaaagaaactggccggaaaaattatgaaagaaaacatgaaaaagaacacaatcaagccgatattatctacaacacagcttgctatgcttctcctgcattacacactctctaacaacagactgaagtcattt

SEQ ID NO: 7532 - DNA, 1448 bp, Diabrotica virgifera
  SmartBlast Evalue=1E-164; Info=Putative IDGF n=1 Tax=Diaprepes abbreviatus RepID=Q5PXZ1_DIAAB
tttgtatagacactaatttatttaatagaaaatatcaacaagatcacaaatattttatcaacaatctcgtcagtaatgtgtaaatcatcctaacaaaactattacaacctaaatttagctgctctcaaaattggatatttgtctccggtgcacaaaccacggaaatcgtccaaagataaatctacaatggaaactcctccaattcctttggctttgacgtagctaccgatttggccagctgtgtcggggtcttcgaaggatacccagataccttcttggccgttctttggttcacggaaagcataagttcccattctctttgtgggatcattgactttcctaagttttcctacgtagcctgccttgatttcggttggatttgcaattttggtgcagacttcgttatagctaagtaggcctggttcttgagtgtaaggaccagcttcaccgggagcctcttcgatagttagtggcggtactccagttaaaccagaagcttgagtcattttccagctgcgaccgaaggtacggataccgtaaaggattttattggctggcataccgttgttgagccagtacataacttggaagtcaccgttttcatcatctttcctgtcaaaaattttgtataatggagatgagtaatctgcttctttggggttacgctcgggagtgtaaaaatcaaagttttgaagagtaacgaaatccaaatgtggagctaatgcacgaggatcgtaataaactgtgctgttaacgttagggagaacagaaagagtcaaccagaatccatcatgacgaagagcatttttaaattctctgatgaaggcagtaaactgttctctatgttcatctgctttatcgtccacaactgaggaaccaactattctccttttgattccgaccaaaaagttcttaacagttccgaatatcttctttggtttggttcttggcatttcccatgcgagatcaattccatcgaatccataatttttgattagatctttggcagagttgatgaaagttaatctacggtctactgcttctaacacattcctgtaaaccatattcttttcagtatcttctccactaacatctctgtcaccaccaaccgaaaggaaaaccctaagaccagggaatttcctcttaagatcagtaacttgtctgaagttgtgttggttaaggtctagctgttcattcattagctttattttgtaagtatttgggtcaatacctgcgtacccataaattaagtgtgtgcagaattgtaaagctggttccaaaaaggcaacatcgaacttgccttgcccttgccgggagttgcctttttcgtcatagtagcaaaccaccttaggattcgcctgtgtataacagacgtacgagaagagcacaagcaaaaatatcttgaaaccggcagccattgctactggtcagtctttagtctttatcca

SEQ ID NO: 7533 - DNA, 1447 bp, Diabrotica virgifera
  SmartBlast Evalue=1E-106; Info=Tumor susceptibility gene 101 protein n=1 Tax=Camponotus floridanus RepID=E2AZS6_9HYME
tgtgtgtaggagttgaatttttttatagctttatttataaaattaaaattaagataagatattttataattatcgagaactgtagatctcgatagttttagctggcaagaaattaattcgtagaaaatggtagatacggagagacttaggacttggctaactgcttatcacaatcctgatgtagcttatagagaaataatcaacatcaccacacaatacagaggtttacatccagaacagagtgtctacaccttcaacgatggcacaagaatggatctcattaacttaactggtacaattcctgtgcgttacaaaggcaatatttataatattccaatttgtatatggttaattgacacacatccagagaatgctcccatttgctatgttaaaccgacttccgacatgtccataaaagtttccatgtttgtagatcaaaatggaaaagtttatctgccatatttgcacgattgggtgccgaatgaatcagatttgctaggattaatccaagttatgattgttacatttggcgaacaacctccagtgtttgctagggccaaagacaatgaatcgtatccgtcaaattcattcatgcctcaaccatctggtggttacatgcctccgtatcctaccccctacccaccagcatcaggaggtttcggcgggtatcctccatatcctccaaccagcaacaattctttccaaggatatccaccctacccttcttcgcaaccgcagtatccatttaatttcccccctggacctcaggccggaacaggtactataaaagaagaacatatcagggaatctctgatgacagctttggaagagaagctgcttagaagaatgaaggaacaattccagcagaatcaagctgaactagagacgctcaagaggacacaggaggagttgaagcaaggaaaattgaagttggacggtatattgagccgattagaaaaagaaaagaatgatctagacaaaaatattacaatgctacaagacaaagaacaagaactaaataaggccatagaacgaataagtaatcaagaatctatagatgtagatgatgcggtaacaacgacagctcctttatataaacaattattgaatgcattcgctgaagaagctgccttagaagacactatttattacatgggagaggcattgagatgtggagtcatcgatttagaggtgtttttgagacaagtgcgaaccttgtccaggaaacagttcatgctcagagctttaatgcaaagatgtcgccaaaaggccggtttgtccgtctgaaaaatgaatccgaacgcgccatagtttggagagatatgattgatgtttttactcaaagtgtaatatatattttagttttatgcgcaaaattaaggtttttattgatttgtacactgtttatcggcgatatgtaatcacaaataaatataaagtaaatgtt

SEQ ID NO: 7534 - DNA, 1447 bp, Diabrotica virgifera
  SmartBlast Evalue=1E-115; Info=Nuclear valosin-containing protein-like n=1 Tax=Harpegnathos saltator RepID=E2BIR9_9HYME
agaaaatatcagtccctacgatgaaatgctattttggttgcatgatcagttgcccttatcacaagaagaattggcctctttgcgtgtaactatggatgactttagagctgcattgaagaaaattcaaccttcagcaaagcgggaaggctttgtgacagtacctgatacaacatggagtgatgtgggttcattgaaaaatataagagaggagttgcagctgaccattgtggctcctgtgcgccattctaaacaatttgaatcgtttggtattacagtcccagcaggcgtgctcctctttggcccaccaggttgtgggaaaacacttcttgccaaggctatagcaaatgaagcagcaattaacttcataagtgttaaaggaccagaattgctgaacatgtatgtgggggaaagtgagagagctgttcgaacttgctttgaaagagccagacacagtgctccatgtgtaatattctttgatgagttggatgcactgtgccccaaaagaaacgactctgataacagtggaacatcaagggtggttaatcaacttttgacagaaatggatggagtgtctggaagacaaggagtatatctccttgcagctactaacagggtagatattattgatccagctgtattaagacctggaagattagataaggttctatatgtaggattgcccaatgctaatgatagagctgacattttgagggctattactaaaaatgccaccaaacctcgacttgcaaatgatgtttctttatcagacattgctgaacgacaagagtgtgaaggctttacaggagcagacctgtcagcactggtgcgcgaagctagcatttcagccataaaggacatattctctctttctgcccaggagccagagagtaacacagcggtcagtcttgagcattttaacaaggctttccttaaaatcaaaccctcagtgagtgagagtagtagaaggtattatgaaaatatgcgaaggactttttcatcagataggatggatagtgaagtggaggaaatggagttgaattagatttttgtaaagatattgaaatattttatttgtttctagtaaaacacctttatatcaactcttcagtttttcagtttttacaaaataatatatacatgctcaaaaagtcaacattgttttacctatgtctggttaaaaaagtgaaggatcattacccctatttgtctagcaatcttcttcaggtgccatctctgctatggaggttggcaatcagcatagctattttaatttttgaggcagtatatctaaatagtgttcgggttaagtggaagaacattttctgtaaatggcgacatttcagaaaatgaacttcgccctttatttctgaaaataatatattatgttttatataaaaatgtacatttctatattgaagaaataataaagacgatattattattatta

SEQ ID NO: 7535 - DNA, 1427 bp, Diabrotica virgifera
tgagccgccgccgtcattcggaaggcacgtaaagcggtcggtctgggcgcttgcgcgacttgaaccctaagactagacattagccagaaggttatgcgaactttactattttttgggtttacccgttatcaaagaaacttgtaaaacacttcgtgaggcctttgtccaggagtggatgcaaacaggctgaagaagaagaaggctattttttaccttttcagttactgctggcagtttcacagcttgtttttttgaatttatacttgataaggattcgcagatccgtcaaacagattgaaacatatgctttctttttatcatttagcttgaaaatctttaaaattaaaaattgcgtatacatcaccaattagtggaatacattgactcttcttgtttattcttttgactcttacacaagtaatgacattttatttttcttctaaatgaactgttgtaaaatacatgtatgtacagcacaaccaaatttattttcaaccgaacttcaacaatagtgcgcatccaaatctcaaatacgaagtgaatttggtcgtgctgtacgattattaacttttaccggtttatatattgacaaatattttagtagggatcgtgaaatgtgcggattgttccagatatttaaaaaacagctacacaaaattcccgccattcaccatttcaaaaattcgataatttattgatttattaaaagtttcttaagtgttttaaaattggaaatggttgaatgctcgagtatatgaatcttacggaaatagaaggcagatatcgaacactgagttttattaaatcttcccgaagtatactttcgttcccggagcatcatcaggagcgtctgaaatgagccaaaaaggcgccgttgtaaaacgagaaaaagttcatcatcttcgagttttgtcgaagttttccaactcttccttgttttacaatagcgtttttttggcttgtttcggtgcccctatgatgctctgggagcgaaagtatacttaaacaaactttatgaaattcagtgctcgatgtctgccttctattttcgtaaaattgagtgttttagttctgttcggacatttttagcgaacaatctttacatatcatgtactctaatacgatatttcttcgtataagcagcactaaactgtttgggatacgtaaacaaatgcatttgctaaactaggctccccctttctcacagtctatacgattttatgtcaaatactaaagttttttttgttgtttacgaagacttgtatattgggacttgacactaaattactttgtaaataagtaccaaaaagtgtggatgaaaaatgtacttatttggataacaaaacgaatgatacggtatgcatatgcgctcagtttgtagaatgtttgacaatgagtttctgtatatatgataaagtatttgtagt

SEQ ID NO: 7536 - DNA, 1443 bp, Diabrotica virgifera
  SmartBlast Evalue=3E-20; Info=Tumor protein 63 n=1 Tax= Harpegnathos saltator RepID=E2B2V4_9HYME
atcaatcatctatttacattggagataaagcaaataacgaacgcttaagcataatcattccactctcgtttccacaaatgggaactaacagtattcgagaaatgttcgaatttacttgcaagaattcttgtcctcatcctggcatgaatcgaagatctattgaagtcatatttactttggaagacatggactctcaaatatatggacgcaagacattgaatgtgagaatatgctcttgtcccaaacgtgataaagaaaaggaggaagcggacgattctggaaagacgcagccgccgaggggcaaaaagagaaaactggataaaccggccaaaaaaaattgttagtaataatcaagatttgagagaatttactataccgatccccatcgctggaaaacataatattggaaatgtccttaaatattgccatgatctgatggcaggagagattgcacgccattctggtagtggggtggaaaccacagcgccatacagtaatgccttgtctaaaattagtacaatgattaaggacctaaacgagtagcattccatgttattcctacacgttttttttttgtatttctttttttacacatttacctttgtctacttatttttatattatcacttgttttacgagcatttgtgtaagtgggtgtgttttatcagtttagggcggtttctctctttgatttttcattagtttacagttattgaatagttttgttaaacatattcttcagatatatgaatatatgctgaagttgaaaaagtaactcatatatatgagctattcttttaacaacttatttttcctttaacccggtagcagtcgcgccgcttagaaaaaatctaacattttatccttttccgtgataacttgatgaaacattttgcaacataactttccactcgtaagtgcctctaggaagattgtagtaatgttagaaatttgtttacaaactaagaatatgtttaatactgctatttactttatttacactctttatagaattaaggttgattcgcattttacggaacgtcagcgtcccgtcacggaccggcaacgttacgtaacagtaaaaaagttacgtggtacagtaacgttcaccaaggtttgtcacgtcattcaattacaacgaaaagttaagcgatgagcaaattaagcacaaaaaaatgagcaataattctattaatgttggacgaagaggagcaggcaagcaacaaccctaagaaaaagttgtgggtacgaaagacgtttcttaatggaaaatacgtaggggagtaagtaccataggtacattgtttaaacttaaagaactagatgatgacgaaatttgttataaatacttcagaatgtctcgggatcagtttcatgtgccatatttagttcaaacatcaaactgaaaagacaatctcgccaaatattcaattgattgacggc

SEQ ID NO: 7537 - DNA, 1443 bp, Diabrotica virgifera
  SmartBlast Evalue=0; Info=F-box only protein 11 n=3 Tax= Aculeata RepID=E2AKZ9_9HYME
tagattcctccatgttgtccgtgatgtattttgttgtgtcttactattggatcactgttagtgcggatctgtattccagcgagagcgtttccgtaaatattattatgttcgatcaaacccctaccttctccgaatatataaactccaccttggtgtccgttgtatatttcgtttctacggatcgtagggttactatttgatgttatccacacccctgcaaagttatttgaatgaattttattgtcgatgaactgtcctagtccgttttcgtgcacgtatattcctccagtttgtccatggtgtatttcacaatggacaactgtaggattagcaccagctttaacttcgaaaccagctattcgattattgtgaatatcattcgcttcaaaataaccgagaccattatcgaatgtgaatataccaacatctcgcccgtggtgtatatggttccggcgcatgatagggtttgcgtaattttttacccaaataccagccaaagcattccgactaatttcgttatcctcataagtgccttgtgcataatctgttacatataggcccacgttttcgcaatcgctaatatcacaatgtcttataactggattagcacctactccactcacacaaacagcagctcctaccacagacgtgctacgaataatacagtgatcgatcgtgggactacaattctcgcccacttcaagacaatagtgtttgtggtgtggaacagtcgatgtgacatctggagaaaacttcaaagttaaatggccagcgtaagcgttcttcgctccttctacaaacataacagttgattcggattctctttcgaggatgacagactctgcaacatttccagaggcagcaccaattaaagcaatgtcggaatcaataacaagaaattctccgcggtatgttccagagtgaagaaagattaaagctccttgtgatgaaccttcggcggaatgattactgcaagaaccagatactgaaccagtgctactgttggaaccgctacgttcgtcagcgtaatcgagagctccttgaacggtattgaaatagaccaaattacgacctttgaaagtaatatcctgatagccttgacgaacgtgaattcctctgtacaactgtctaaacgattccttccacggattagccaaatctgattcctcgggacttataaattcgaaacgacacggagccggattgaataatggcaaatcgtattcatatacactttgatacaaacgtttccaaatctcggtatcgttggcaatggcttgaaatctcttacacacctgactaacgcgacacaagtcttgctctaataaatagttaaaaatagtgagcaaaacttcatctggaagctcgtactgcaagtaatgagcagctgtgttagtgcaattctcgtatgatgcggagcaagttcttctgggcctctttcta

SEQ ID NO: 7538 - DNA, 1442 bp, Diabrotica virgifera
gagtttttgaagcgtggaaattttgcaaatctcatttttatacaaaactgaacattattatgtaataaaaaaaatgagcttaaagatttactatcaaaagaaaaaggtagaagccaaagatcgcgaaggaggatccccaacaagatggatcgatcaaattacaggaatatgcaaaagacctgtgcatgagttaaagagatgactagagaccgagatctttggggacggacaaatcatgacatcacaatgaccactacactacacaaagccattgggttgctatttaaagaggtcattattggagtttcaactgtatatttgtttaatccaattgatacatacatgggcatggtttgttttttgcctgtatagttgtaataattttaataaacgctcagtaactagacattcaggtgttcatttctaattttggtatgtcataagtgtagctatatcctgtttttaaactaggaagagtaattcaaatttaccgtgccgtaatgcttgtttgtgattggtccaacctcagacaagtttactccactgttatgaaattttgacactattgacatttatgaaattttgaccctaataataataataatatcgtatggcatttttgccggggagatcctttcggacagttccggcgccatttacatctttaaccctgtttcaagtaactagtgccgatgtacactagcccagggggaccgaaggctttacgtgctctccgaggcacggtgagacggctcgtgtcattattggaaatgaaaatggtttgtttttggcagggctcaaacccacgtgcactggcgtatgaggccagcgaatatgccgttactccaagccgctcacatttgaccctaatggcatttcataggttaattaagttatatcggcaattttttgtgttttctgcgttattcctttaacttttaaatcgttagtgtgcttttatataaaccgttgtgtttggaactctttagcgacgtattagtataatataatatttatggattaccgtcgaaggccgccatgatgaaataaaatagatgtatttggtgatttttctagtgacattattgggtgtgaatcttcttttcagtttattcctcctggtttaaaaacagggtacagtacaataatagtgagttgacaattgtgttgaattaaagacacggatagataactaaatagtacagcgttttatgactttgattatttaatacgccttgcatgctagacctcgagggtatccatacgtttttcctttgtacaggcattgcggcattaatcggtacatacgatatcattgacgactagaatttaagaggattcacagctgtcaaaatatttaaaagtcggaagtaataaaaacagattattttgacttgcacagtagcagtagcttaaataactaagaacaaaaaggaaaggca

SEQ ID NO: 7539 - DNA, 1443 bp, Diabrotica virgifera
  SmartBlast Evalue=4E-84; Info=Cytochrome P450 345A1 n=1 Tax= Tribolium castaneum RepID=D7EJT0_TRICA
tagccattgagcaccagcgagtacagtgagtcacttaaagatgcttttgacttcgtcatggatcgtagataccataatattgacagtaacactaagcttgctggtgtacaaatatctcacaaggcattttgactattggaggaaaagaaaggtcacccatgagaaacctatgctactttttggaaacttctatgaagttttcacctttaaaacaactattcaagagcacataaagaagatttacgatagaatagatgctccatattttggaattcatattcttgatgaaccaatactagttttaaaagatcccaagttggttaaagacgttctaatcaaagattctgctgtgtttgccaacagaagacctgccacacctacacatcctcttatgaaacacgcattattctttctgaactatcctcactggaaacctcttagagctaaaattactccagttttcacttctgctatgttaaaaaatgcacacaatcaatatttgactgacatcggtcaatccatgacgaaatttttgaacaaaaataaagaaaccatagatagcagacgtattggggaatactttgcatcagaaatgatcttcaaatacttttttggagctaatgctaactgcttcgaagatataccatctgtatttgaaccatacgtaaaaaagatgggtgaattcagtgttagaaacgccgttattcaaaacctgtactttatcaaaccatcgtgggtaacgttcttgaagctggatttcatctcagaaagtataatgacattttttgaacgtgtttttaaagaaggaatgataaacaggaaaagttatgatggcaagccacaaacttttgtcgatatggcaaataaagctgtgagagaaactgaaagtgggaaggaggataccctagatttcaatatgtccatctcgactgcaatattcttcctcatagctggcagagacactttgaatacattaattgcttttactttgtatgaaattgctatgcatgaggatatccaagacaaactcagagaagccatccaagaaaatgtagaaaagtacggaggcattacctatgagggagtacacgacaacaaatatttagacatgtgtattaaagagtcaatgagaaaatatccgcctataccgttcctggataggatgcctttgtctgactacacactagacggtactgatttagtggtcaaaaaggatatgacagtaataataccattctttgcacttcacagggatgaaaatcttttccctaactctgatggatacgatccagaaaggttcagagaagaaatacaatcagagggactattttaccttccgtttggagcaggtcccagagcttgtataggtaaaagacttggactgttaggtttattggtatcattatcatatatagtacttaattttaaagtagaaaaatgccc

SEQ ID NO: 7540 - DNA, 1443 bp, Diabrotica virgifera
  SmartBlast Evalue=3E-33; Info=Protein charybde n=2 Tax= Formicidae RepID=E2AY67_9HYME
atgagccacagaaggtagtacatgtgttttcactcgagcagtagaaagccggtcaattgaattaatttgataattttatagtttagtgtgtttttggacatttctttttaaattaaaatggaagttttacccttcgttgacatcaagcagcacagcggtcttgaaggctgtgaaccagaatataatgaatttttccggttagaagagacgtccctgatagaagcattatctaagcgtctcgaaggagagcttaggactgcgaagagaacccatctttcggtaggagaagttcttcttcccaatggactgacgcattcgatagccaaagatcttttttacttggccgattctgaaccttgtggacttcgtgggtgcactttgtatatagactttgagaacaatgatctcaagacgaatttgagccaggtcaagtgcgatgcttcgactccttctaccttcgaagtgtacttgacgcttaagcaggcgaccactggatggaattcgtttctgccacagtttcttaaaaaaatcacaagttctggagcgcttatgataagtgcagaatatggacttaccaagaagcaactgtatcgctcgagttactaactcgactgatttttgataataatatgtgatcattcacacacatatacgtacacatttacatttacaagtatctcgaaattttttttatttcattcacgtttttgtattcataactatatcattagttgtaatcgttcgtttctttatcaagttagttaacattgagttgtatgtgtaagatataaaagagtttttaaggtttttggtaattttaaaaattctaaaattgtgatataggtgtgcagattataaaagtgttatattcatattttttgtgatattagttcgatacgaattttatttttatagaataggtgcgttcagctgatatttggttgagaactgaaaaagtacatgggggaatatatgtgtacagtaccctgactaaacattatggcatatattatgctaaccgtttagtttgaagcttttagtgtactgtacgtatgtagttcactgtgtaacgtgtgatttgttcagtattaaaacttctttaccaaatatactaagaacacaatctgatctcaaattaatatagatttgttagatatgtgggaatttttatacatttttaatagaagtcttcataagatttatgtacttccatactaatatgtctagatttgtaaacgatatacatggaagagcagaacttcatatcccagtatacacactatattctgacatgacactttacaaaaaaaatttacataaagtactaattactttgttctcttcttctgtgggtgttgtttggatttagttataaaatcaaataaatgtctgtaccaagaaaaaaaataatgcagaaaaaataataaatctttgaagtatgtt

SEQ ID NO: 7541 - DNA, 1442 bp, Diabrotica virgifera
  SmartBlast Evalue=7E-86; Info=Lysosomal acid lipase n=1 Tax= Culex quinquefasciatus RepID=B0W003_CULQU
aaatcattcactagtgaacaagctggttaacattgtatgtacttttcgaaatgttaatcaaatatattgcagtagcagtaattttagtaaactctatattttctgaaccagtcgacgtaaataaatatctgcctaaagaatggagaggtatggtcaaaaatgttaaggtccattcggatattgggatgactatttatgactttttaagaaggtacaactatcattacgaaaaccattggatatccacagaagatggctacaaacttcttttgcatcggattccttatggacagaatcaaagtgttcccgataccaaacctagacctgttgttcttattatgcatgggcttggagcaagttccttgaactggatcatcaaaggaccaaacgatgctttgggactagcgttggctgatcagggatatgacgtgtggttgggcaacactaggggcaatcgttattccagaaatcacgaacgattgaatccagatattgatactactgaattttgggattttagttttgagcttactgggagatatgacgtagcagccaaaatcgactatatacttaaacaaacgggccaacaaaaacttttttatataggacactctcagggtacgagtcagtttttcgcattaacatctttaagaccagaatataacgacaaagtagcgttgatgacagctttagcgcccatagcttacttggaacatttgagttcacctattttgagactcgcggctgacaatatggctttattgcagacacttgttaatatttttaatattcatgaatttagtcaaagtccacttacaaacaccttagtaggtttggtatgtgctaaagaatctcctcttaaagatatatgttccacgtatacatttttaacatccggatttgatcatcaagaatttgacgagggctttttaccattatatttgtcacacgtcggagtcggcatgtcaattaatatgttactgcactttggacaagaaattaaatcacatcattttagaagatacgattatggcagagaaaaaaacttaaaaatataccataccgcagcgcctcctgattttaatttatctgcagttacagctccagttgctctatattatgctaaaaatgattttctatcatcagtaaaggatgtagagagattaataagcgagttaccaaatgttaacaagacacgtctcatcgaaaacagaagatggaatcatattgatttcattgttgccaacgatgtacatgacgtaattaacaaagatataattgcccatctacagacatttattgatgatggagctttagatccaactacaagtgaacctatgagttccacaacagagagaacaaaggtagttcagatagaattattagtcaaagtgtatatacattaattatgactgttatgttggtattatattattaataaa

SEQ ID NO: 7542 - DNA, 1438 bp, Diabrotica virgifera
acaatattttacatgacctgttatatttcatgacttatgtaataactagttgtagaatttaatgtatatagcggaagcatgattacaaagtatggttcaaaaacttttttaaacccatcagaaacaagtctctatctgtctgcgaaattttgcgcattcaaagagtctttttaggagaaaatgctctcagaatctgtatgggaatgctttgaaaaactaaatttaacccagtatagttaatagcaagtagggataaaataattaaaagccctgaataaatgggaatatccacaaaaacaaaacaaaaaagtcgtccataacatagctataatctattcacagcaaagaaaaagtgcacctcaacaagtgtatgtaacagaagtcaccgcctactctctctaaccgatcattctactattgaatgtggggtctgaaatattttcacgaatatttcaagagtttctgacgctttttcttggctgtgaatatatattataagtgcaaccatttgctgtacgacatattcactacaagaattaaaaaaacaccgtttcctcataaaagtatccggagctctaccaatctttctatcgaggaaaaacgtaaaaaacaatgaccattactataaaatttattctggaatatatttattatcctaattttttaatcttccatagaagtaccattttattgttaagagattgttatgaacccacgatttagataaacataattcaattagtttaataattaattatggacctgtaatctggtttagttttaccattaaatgacaatttttacagtattcgattttcaaagtttaatagcatattacatgattattcgaataatattcgataaaaacgtgtgatttcatgaatgaaaaatatatgatgtaatactgtacacttcggaaaaccagttcattcaagtagcttgacaagtattccatgaaggcatttagttagtccattttattggagtacaagcctcatgtgaacgttcctatatacaatatatcgtatagcactattcagtaaaaccgaatactgtaaaaagtaccagtagtatatttccacctgaatgaggtataaaaactggcaggccgatttttataaaccgctaatgcctgttaatgatacggtacctttcacatgtcaaaccatgccacatgtcaaacgtcaaaatgtgcattatgtcatacatgaactaacaataacaaagtatcctattacatgaaatctggttagaaaacatttaatacgatcttcgtaacaaatttgtaataataatatattcaattttttgtcttatttgacgttttatgtatattctagatatttaatcagaaagaattagatattttttacatttacaaatatcagtggttaattagtagttctttaatttcatacttgtgcgaaatttcatcaat

SEQ ID NO: 7543 - DNA, 1440 bp, Diabrotica virgifera
  SmartBlast Evalue=1E-115; Info=ATP-binding cassette sub-family G member 4 n=2 Tax=Formicidae RepID=E2A627_9HYME
atcctgctgattacgttatggaggtagcatgtggagagcatggagactacgttcagaaactggtggtggcagtaaacgctggtcgttgcaccaaattcgccacgccagatcatagaagtagtaagatagtttccaatgatattgctaaagaagccaacgggaagaactcctcgggagatgtaatatccgtgccaaatggttctgtgaagcctaccacccccacaacgccagtcacttgcacaacgtcacttttagattcttcggagaatttgtcgccaacggaaaagaatggtttttcaacgacaggtctccaacagttcacaatattgctcaaaagaagtatgtacatgattctaatggacaaaacgctaactaggatgagactggtgtcccactttgtgataggatgtcttataggcctaatttactatgatataggacaagatgctgccaaagttaccagtaacgcagggtgcctcttcttctgcgtcatgtttatgatgtacacagctatgatgcccacaattttaacatttcctttggaaatgtcagttaccgtaagggagcacctgaactattggtactcgctcaaagcgtactatatggctaaaacattggcggacataccgtttcaggtggttatgacgttgtgctatataataggtgtttactttataacatcccaaccgttagatgtcactagatttgggatgatattgttagttacagtgttaactgcccttgtatctcaaagcttcggattgctcataggtgctgcgtttaatattgagggaggtgtattcctcggaccaatctccaccattcccatggtgctcttctcaggcttcttcacaaacctgaacgacattcccttctacctgagatggctgccatacctgagttacctgaaatacggcttcgaagcgtgtatgatcgccatctacggcttggatagaccgaagctgacgtgcaacatcgagtactgccactttaagtaccccaagaagttcttggagcagatgtccatgaaagacgacatggtcagctatttcatcgacgtcggggtgctgggaggactgttcatctttcttagggtgatagcgtactttatgcttcgcattaaattgatgcaaaatcggtaaaattttctttttatagagaatttatgtaataggatgggactttgaggttactaggcacttgttaaatagatactttattgcctctgttgaaattattgcagagttaacctcacataacctaaattaccgcctcagaacgatatacaaccaacagggctgttgtagcgataaagaaaagttattgaatgaaactagacatattctagatctataataacgtaaaaacttgtttcgaaagtttaaatattctagggcaataaagtaactatatattgtactgaccaattaagtcttgttt

SEQ ID NO: 7544 - DNA, 1421 bp, Diabrotica virgifera
  SmartBlast Evalue=1E-115; Info=SWI/SNF-related matrix- associated actin-dependent regulator chromatin subfamily E member 1 n=1 Tax=Camponotus floridanus RepID=E2A1G6_9HYME
tttagagttatggctactatattttagacataagtcctaattaattaagttcttaattactaacttcgtttaaaaaactggtcttttagtgtattttaagtatacagtattttttaatagcccaagtttaagatcttcacaacaatggcactgccagccaactacaagcaagtggcaatgcaggtcacaaatactcaatcttcaaatcatttgctgtcggcaggtgcgcccatgactttcaacatattgaaagagagattaagggcttcaggaggagctagttcgactacagcgaaagagacaaatccatttgttgcttcaactaatggacatcctggatttgtgccccaaaaaatcggaaaaaatactgctaaaaatgagtccaagacacccaaaccgccgaaagcgccagaaaaaccgctaatgccatacatgcggtacagtcgtaaggtatgggatgcagtgaaggctcaacattcggacctgaaactgtgggaaataggaaaaattattggacaaatgtggagggatcttcctgaagatggcaagaatgagttccatgaagaatatgaacaagaaaagattgaatacgaaaaaacgttaaaaacttatcatagttcaccagcttatattgcctatattgctgcaaagaataaaggaaaatctggtacagatggagaaacccacgagagacaaagcacgtcatccaaacagcaagcagccgctgatagaagaatcgagattcaacccgcagaagatgaggacgatcaagatgatggatactcagtcaaacatgtggcgtatgccagatactcgaggaatcaccgtctgattaacgaaatattctccgaaagtgtcgtaccagatgttagatcagttgttacaactggtcgtatgcaagtgttgaaacgacaggttcagtcgctgacgatgcatcagaaaaagttggaagccgagttacaacagatcgaggagaaattcgaagccaagaagagaaaatttattgagagcagtgaacagtttcaagaagaacttaaaaaacactgcaagccagctgtagatgaagataccttccagaaaatggtcgaaagacaatatgatataataaagagagataaaagcaaacaaattcaagatgatgttaaaccgaaaacagaggaaaatgggcacgctacttctcccactactcaggaaaatggaactaatcaatctgaacccatggaacaagatcaatccgacaaaatggaccaatctcaaggtcctcctgcaccatccgtgacaaacggtccctcaccaccccaagcggaaaaaacaacaatggaccatccccaacagtctccccatccagttggccaacctcactatgcccatccttcagctgctcatccagaacaccatcaaccaccaccacccacacaacc

SEQ ID NO: 7545 - DNA, 1434 bp, Diabrotica virgifera
  SmartBlast Evalue=6E-11; Info=Putative uncharacterized transposon-derived protein F52C9.6 (Fragment) n=1 Tax= Harpegnathos saltator RepID=E2BUQ3_9HYME
aagacatgcccgaggaggcaaattataccaatgttgagaaaaaagaagtaatgacctgaacaactttggaggaatatatctactgattacaacatacaaaattctaacagtccttactagacaaaatctcactcaattcacgtagaaacaaattgggaactaccagcaaggattcgggaaaacagatctactacagatgcaacttacataaacataattatacaaacaattgagaaatgccacgaacacaacatagaactccacacctcttcgtagactttagacaagcctttgactgtattggaataaataagttattaaatgaatttaaaaatcaagatataccggaaaaactaatcagatttacaaaaatgactaaggatggatcccgagcttaaatgacaacggaagaacgtagcacaaacacaataattgcaatagaaacaggagtgcgacaaggcgattccctgtcaacaacaatattgaacgtagcagtagaagaaagttaaggcccttaggaattaaaggaacatagcccactccttaacataaatacctagtagtatttgcagatgacatagttcctatgggaagagataaggaaagaattaaaaagaagcattaaaataatcacataacaatcaaaatccaatcttctctaagagagaagagaagataacaggacgaaagaaatcaagttagaaaactacacttttaaaaaagttcattaatttaaatatgtacttggacaaattgtcaatggaaaaatcagagaaataaagaattaacggagcgaatactagcattcatcaaaacatcctggagataccataggctaatgaagggcaacaacttgaagtacctagatgactagatgacttgaacatactacttgaacctacttgaacatacctagaaacaaaactgaaaatatacagagttgcaatcagacctatagttacatacgtagctgagacaatatgcctaacagataattatgaagaaaaattaagaatattcgaaaggaaaatcctagaagaattatgggtccgataataatggaaaacggagaaatgggaagaagaatgaaatattaaataaaagacatactgaagggagaagatataattagatttatcaaaccccagagactgaaatggctgggatatatagagagaaggtaaaacgacccactgattaagaagatcatcagatggaaaccataaactaaaagaccaaggggagacttaaaaagcgatgggaagatcaggtaaatatatgtcaaagatatgtcaaaatcctgatagtgagaaactgaagggatctgtacacacatcgaaataaatggaagaaaattgtaacgaaagccaagtcatacaacaaacttggacaatacacaagaagaatgcgaagtgattcgctgcgataagcgaa

SEQ ID NO: 7546 - DNA, 1435 bp, Diabrotica virgifera
  SmartBlast Evalue=1E-136; Info=Heat shock protein 40 n=1 Tax= Locusta migratoria RepID=A4U848_LOCMI
aaaattttttataattgagactatacaaactatttacattatttttcaccagtatagaaaaaatggccagactgatatatttcaatgtaaataattaacctatcttataccttagtatttttatttatacacagtaatatataactcaaaatgaagtaatgtatataaaaatatacattatttgatttatacataaatacaataaaaagtcacatttatatgtactataacgtacaaatagggaacttattatacagttaaccctaatttggtaaagtatcataaataatatctcgtgcagattgtgagagaggttctggaaatataatatcaaagttaacaattaaatctcctcgtctgttgggttcctttggtacaggcaaaccatatccttggagacgtttaactgtagttggtttgataatttcattggtatatacaagaggaatggattttccagacatggttggtacttcaatggtacagccacacaaggcctgcttaagtgatattttagctgtatacttgatgtcactgccttctcttttgaataatggatgtggtttgtccctgatgataaaaacaatgtctgcaggtatcttatttctgccctggtctccctctcgttggaatgtaattttggtaccagctttccatccaggttttacattaattgttaacactttgtcttctttctttgttgatccatcaggctgcatcactcttctacagatcttcaatttcttctgacaccctttggtaatatcctccaatgagacatagagatcatgctcaatagctggatcttgaattttgtctgcattttgtcttctgttaggtgcattatgaaagttaaacgaatggcttcggaatgcaccacctggaccttctcttggttgtctccaatctccaaggaacatatatggctcatcaacatctatatcatcatcatgcattgctccaaacattctgttgtcaaagaatgttgcaaagggacttggattgccaaagaactgagcaaacgttgcccttggatcaccatggtatgtgtaagagaagtttgtgccagaagaactgttgcctgttccttcaggatttccatgtagcccctcctcaccatatttatcataaatttctcgttttttcttatctgataatacttcataggcttctgcaacctctttgaatttctcttctgctccagctgctttatttttgtcaggatggtattttagagcaagttttcgatatgcttttttgatgtcatcatcacttgcacccctttggatgtttaatattttataaaaatctttacccattgtaaaatgcacacaatacttaaaatagttttaatttctacacagatgttaagttttgcttcaaatcactttatgtaccttatatgtgaattcactggtttcacgtctactcgatt

SEQ ID NO: 7547 - DNA, 1438 bp, Diabrotica virgifera
  SmartBlast Evalue=1E-156; Info=Dolichyl- diphosphooligosaccharide protein glycosyltransferase n=2 Tax= Aedes aegypti RepID=Q17J35_AEDAE
caagtgacagtgacagccattcttgacgtggtggaaagttgaatggtggataggtgtgaaaagtattcattttcaaaaatgaatttattcttgatattattttccgctatagttgtatgtaatgcccaaggtccaactttagtgttactcgacaatcaagttattaaggaaacccattcaatattcttcagatcattacaagaaagaggctacactctcacctttaaaatagctgatgattcctccttactcttatcaaagtatggagaatacttgtacaagaatttaatcatatttgccccttcagtagaggaattcggtggcaatttaaatgtagaaacaattactcaatttgttgatgatgggggtaatgttctggtaacaggaagtagcacaactggtgatgtcttgagggaactggcctctgagtttggatttgaggttgatgaagatggagcatttgtaatcgatcacctaaactatgatgttaccgatgaaggtcagcataccaaactagtcgtctcatctgaaaatctcatagatgccccagtaatagttggaccaaaaagaggagtagctcctttattatatcagggtacaggaattctagttgactcggaaaatcctctggttttgcctttgttgacagctgatagcacagcttacagttttaatccaaaccaacagatcaaagagtatcctcatgcggtaggcagagatgcagttcttattgctggtctacaggcaagaaacaatgccagagtagtgttctgcggttctctggctttcttttctgatgaatttttcacctcttctcctagtaaggctcaggtgcaagaatcatctcccaaatctggtaatgaagatgtagcaactgcagtaagtcagtgggtatttaaagaacacggccagctaagagtgagatccgtcaaacaccacaaagccggtcaaaaggaagctcctcaagactatactatcatggacaacgttgtttacaccatcgaaatcgacattctcgaaaaaggacaatggaaaccgttcaccgctaacgacatccaactcgaattcgtccgcatcgaccccttcgtccgcaccactctcgaaagaaaaccctccggccaatacgaagccagatttaggattccggacgtatatggcgtgtatcagttcaaagtcgattacgatagggttggatacactcgcttgtttagtaccactcaagtgtccgttcgtcctctgcagcacactcagtacgagaggttcatcaccagcgcttatccttactacactggcgcgttttcgatgatggtgggagtttttgttttctcgtttgtgttcttgcatttaaaagacgatgagaagaagtcgaagagtgagtgaaactctttaatattttgttttttacaagacttaattatttagtaaatattatgatacg

SEQ ID NO: 7548 - DNA, 1436 bp, Diabrotica virgifera
  SmartBlast Evalue=1E-147; Info=Vacuolar protein sorting- associated protein 26 n=3 Tax=Aculeata RepID=E2C901_9HYME
cagccattttcaatagtaatttttaatatccttgttggacgatttactatttgttcaaaatatccagaaatgaagtttatttgatgattagtctaattaaagccacgctgtttttacattatattgaaaaaaattaaattgttatcatagcggtattatattttttacggaaatataatgagtttttttggatttggccaatcagccgaaatagaagttactttagatgggcaagataacagaaaaactgcagaagttaaaactgaagatggcaagaaagaaagattgtatttgtattatgatggtgaaacaatatcaggaaaggtgaatgttagtcttaagaaaccaggcactaaactagaacatcagggcattaaaattgagtttatcggtcaaattgaaatgttctacgatagaggaaatcatcacgaattcatatctttagttaaagagcttgcaagacctggtgatatgattgcacattcaagttatcctttcgaatttagtaatgtagaaaaaccctttgaagtttatacaggcactaacgtgagattaagatactttctgagagtgacaatcatcagaagattagctgatataatgaaggaaattgacatagctgttcacacactctccagctatccagaaatgaataactccattaagatggaagtgggcattgaagactgtctccacattgaatttgagtacaataaatcaaaataccatttaaaagatgttatcgttggaaagatctattttctattggttcgaataaaaataaaacatatggaaatcgccatcattaagaaagaaaccacagggtctggtccacatacatatactgaaaacgtaactatagctaaatatgaaattatggatggagcacctgttagaggtgaaagtattccaatacgagtatttctggcaggttacgatttgactccaaccatgagagacataaataaaaagttttctgtcaggtactttttaaatttagtattaatggatactgaagatagaagatatttcaagcaacaagaaattacactatggcgaaagggtgacaaattgcggaagcccaacctacaaagtccagccataatggcaggcacccagaatcttcagaacactgctcaacagtatcaacagcagcaacagactgacgaaagcgataaaaagacggtaaaggaggactttttacgggcgcctagttcgcaatccaatgacaagctcaatgattcgtcagatcccttcgaccaacgagtttcatcgccgacagaaagccccgaaaatctcatacagaatatgacccgggaagctggggacggccagaacgatagtggaaatgataatttagagtgatatacattatgactggatgaaatgtgatgtagtattgttggagttaatgaagtggttatgtttaagggcga

SEQ ID NO: 7549 - DNA, 1438 bp, Diabrotica virgifera
  SmartBlast Evalue=0; Info="NADH dehydrogenase iron-sulfur protein 2, mitochondrial n=3 Tax=Culicidae RepID=B0WWS9_CULQU"
ttaaaaataacctatcgatcgatctcaccgaatacaacgtcaagagtaccaattatagcgacaatatcggctaacatgtggttctttcctattttgtctaaggcggccaaatgggcgaatcctggagccttaatcttacacctgtagggtttcgagcttccatcggacacgaggtacacgccgaattctcctttgggagcttctatggctgtatatgtctcaccaggaggtacttggtatccctgggtgaagagcttgaagtggtggattaaagcttccatggatgtcttcatttctgctctgctaggtggcgttaacttagcgtcgtcggtttttacttccccggcaggcattttgttgagacattgatctatgattctcaaagattgtctcatttcttctatgcggcataaataacggtcgtaacagtcaccattggtaccgatgggaacgtcaaattcaaagtgatcatatgcatcgtaaggctgttgtttacgcaaatcccatttgataccggaacctcgcaacatcacaccgctaaatccatagttcaatgcatcttcagcagaaatcactccaatatctttggttctttgaacccaaattctgttatgggtgaggacatcttctacttcatcaattcgttcattgtatttgcaagcaaattcgtaaatatcatccatcagacccaaaggaagatccagagatactcctcctggcctaacatatgcagcgtgcatacgagctccagaaactctttcataaaactccatgatcttttcacgctcttcgaagagccagaagaatggtgtcaaggctcctacatcaagagcatgggttccgatgcccataatgtgatttaaaatcctagtcaactcaccaaatagaactctaatgtatttagctcttaaaggtacgtcaatattaagaagtttctcaattgctaagctatagcattgctcattacacatcatagagacgtaatctaatctgtcaaagtatggcaaggcttgagtgtaggttttgtattcaatcagcttttctgtgcctctatgtagaagaccaatgtggggatctgatctcttgacagtctccccatctaattctagcactagacgcaacacaccgtgagcagcaggatgttgaggaccaaaatttaacgtaacatttttaacttccttctctactggtgctttagtagcattccaaggctgtagagcccagttcttggttatctcatctggatacatcacagggccatcaaattgttttatccattctgtatctggataccatttaccagcatttactttttggctggtgtggatcagggcagctccatttttcaaaaataattttgatggaagtaattccacggttttctttaaaattgtgttcattattgctgtagccattgccactgacactgacagccgag

SEQ ID NO: 7550 - DNA, 1436 bp, Diabrotica virgifera
  SmartBlast Evalue=2E-73; Info=Inositol triphosphate 3-kinase c n=1 Tax=Aedes aegypti RepID=Q17H08_AEDAE
gggaatctttgaaaaaacaatccagtcgtctgtctagctccaaagcttacaagtaaaatatacatatatatctttgtgagaaaatcaagaatggcaagaaagttccatacaggtctgaagataacaaacaattgataaaatttgacagattaagaaaccatgggaaaatcggaagtccagtctctaccaatacatcgtcctgaaccaaaccttatttgtgtaccggccccttgtaaaatcttacaaaataactgtgtgaacggtttagaaaaactagacttgggagaagaactcgaaaacgtcgttgaagaggaagacaaaaccgtggcaataccagagggttacgaaatatataaacatcaaatggctggacatatggataaaggggataatattgggatattgaaggaagatggaatgatattaaaaccagtgataaaaccagaaaacggcgagagggagatcactttttatcaaaacctttccaacacattagataaaaccattttagagctacgaaacttcgtaccaaaatattatggaactaggtgtttagctgtaaatggaaaaacatacgaatttattgttctcgaagatctgatcagagactttaaagaaccttgtgtaatggatattaaaataggcagaaggacttgggatccaacctccacatatgaaaaaatttgttcggaagagagaaaatatcaagactgtaaacgagatctagggttctgtatccctggttttcaagtgtataaattagcaaatagccaattagttaagtacgataaggaatttggaaaaggtctaaacaaagacagagctgaagatgcaatcaagactttcctgaacatggatggcaacagagtatgccgaagtcttatagttcaatttctggcctccctgtggcaggtccaatactgggtaagaaatcagcgacaacttcgcctgtattcttcgtccattttgcttgtctacgatgctagaagacttcgagagaagatgaaatgtaacaaaatgacttcgaccttcaaactgcagaggaaaggcagcctctatcgtccattaagtttggcagttttaaacaaaagcaacgaatgtgatagagtaccgacaggttttagcggtcaattgacgaaagaaggcccgatcttaaaaccacacaggtcccctagtaaaatcgttaacttggatgggcctaactttgtttgtaataatacgtggcacaaatctattcattctttaaaaagaactcattctttccaaaataattatgataaggacgtacaaaacaaaaaacaagattatacatatcttttagatgaattgtgtactgatcaaaaaagcgaatgttgggcttttgctaagatgatcgattttgcgcacgtttttcctgcagaaaattgtgatatagataagaattatttggatggtat

SEQ ID NO: 7551 - DNA, 1434 bp, Diabrotica virgifera
  SmartBlast Evalue=8E-30; Info=Transposase n=1 Tax=Salmo salar RepID=A8C5I4_SALSA
gcccattttaaacttttgacttgaactgtatttttttcagaaaaataggtatacctactgtttgaaagataataatttaatatgcttaaatatgagtaggtatacatttatgaacattgatttcgacttcgtatgtttaacattgtaaaattaatgcatcaaacttttttgatgcatcaaaaaattgtattgtaaaatgaatgcaacttttttattgctaacacaaaaagggcatttgacaattaacaatttaacaattaatgttttaataatggacttcacctcttgcattaataacttttctcatacgattaggtatagatttaatcaagttctctgctattgcttcttgtcggatgttaagccactctccttctactgcgacaataagctctgggatcgagttttgggtatgaagtctagccccaattctttgttatagctcatcccataaacgttctatggaattgagttctggactgcacgctggccattccatcacccgaaaaataacttctgaaatgtaatcttgcacgatgcttgaggtatgtggccttgcattgtcttctataaaaataaattcatctccaatgtagtcaacgtaaggtaccacatgcattgctaaaatgtcctcgaaatatctagaacacgttaaacctcctcccttgtgaagacggttacccgtacgaatgcaaacgaggtcggttcgtgcccccatggaaattgtaccccagatcatttaggaaccacctccattaggactacgctcttcaatgcagcattctgcaaacgctcttcggtacactttctttttcgttattcgggcgctaccctagaggcatattctggtctcatttgagaacagaacctcgattgttgcaacgtctagtttagatgatcccgtgtaaaaagcaagcatgcttgacgatgagctgcagtaagtttttgagcaatagcagatattagagaagtcagactattttccttcagctccgtcttactgtccactgactagtaaccactcctctgacttcatggagctgttgctttacttgaatggcattatggtgacgatttctaaatgttgaacacaatggaatttacacaataaagcgatcattacgagaagttttaaattgctttctacctattccaggtcgtctacgaaacgattcagtcatggaaccttttctaatacatccgattttatatacactatgggccaaaataaaggtgtacattttttagttaaaaataacttttttgtttttttgggcgatttaatttttttttcagggctaatagcctaacatgtcctcaacatgactggaaagggtacctactaaatacaaactaatgaacaaaggacaaaatgttttgattcacaaaactacaagaagtatgatatattaaaatgtactttttgtaatttat

SEQ ID NO: 7552 - DNA, 1429 bp, Diabrotica virgifera
atcacatagagcttgaaaaagtgaaagaaatgaaattctggtagtaggggagggtattttttggtttatgtgtcccgtccataagtggaaagtttgatgcgccgctgtcgacgcgtgtgccactggaaagtgacggcacagtgctcaattgttttcttttaggttctactgtttaacttgtagggtcccgtcgtgcctgagatgattggggaggtttcacctatagcggctcctagtctactactcatttgtatatgaactgttttgcaaaaatgcaaatattcagtgtgagttaaaaaaagtcactgaagctgggctaatatgaaattaatataaagatataagttagctgatatgtttattatttctagtgatataagccctgtaacatatgaaatgcataccatagtactataattttacttttctgacatgtaagtagatggtgtgatgtgactcactgtaattttttttaaattaattcaaatcaactgttaaacaattattttgtttcataaaaactggcactgggccacccaatcaaactatctttacttacaatcaatcctatttgttgaacttctaatgttctaatgaactatcttcgaacataaaatctaataaggggactaagagacttattaatattcagttcagcggtgaagtatacagggtgattgttaagtgtgaggaagctcagtagatctgttacagtaaaaataaaaaaaaaagttattgacaaaaattgtaggcagctttgaactccacattttaaaagtagttacaatcttacagggtgttccataagatggtggcagaccaaacttatttttttttaatggaacaccctgtattttactttaatttgagatctgcttcacttccacatcacaacaatgtgaaagttttgttatgttataccgggtattaaggggttatggccagtgttgcctgaaggtcgtattaagtttgactccctgtatagtttgaaaggagtataggagcattgatctgttgcaaccgtagttttttagtaattgttaaaaattgtgaaacatgttcgttttcgtagtattcgttgagtcaaatacagggtgggtcggggtgcaagtacattgttttcttggtggttttaaatggaacgccctgtattttgtatcactgtcgaggagtactagtatcgtgcttcagattttgtgcagtactacctatacctagagttatcagctttctagatatttttatttttccatcaaagtattaatttggtaggtgttttggcgtttaccagtaattattgtgagttggccatgactggtttgtcagaggctgacggtttgacattgttgtttattatcagtaacgaaataacgaagaaaagaaaacaatattttaaataaaatttatataaaataaccgacggaaaatt

SEQ ID NO: 7553 - DNA, 1435 bp, Diabrotica virgifera
  SmartBlast Evalue=1E-157; Info=Cathepsin-L-like cysteine peptidase 03 n=3 Tax=Tenebrio molitor RepID=Q7YXL3_TENMO
gttctgggaaggaccactgccattattaataaacagttgaatttacagtttgaaaatcatttgttgtcaagaccttcaagttaatagttttgttaaataggatacatcatgaagtttttgctgctttttgttgcattttttgtgggttgccaggccatttcctttgttgatttggttcaagaagaatggactgctttcaagatgacacacagaaaaagttacgaaagcccaaccgaggaaaagttccgtatgaagatctttatggaaaataaacataaagttgccaaacacaacaagctctttgctttgggattggtttcttataaattaggactcaacaaatacgctgatatgctccaccacgaattcatcgatactctcaacggcttcaacaaaacgaagaacctgttgagacaatcagagttagaagattccgtcactttcataaaaccagccaacgtagagttaccctccgaagttgattggagaccaaagggtgccgttactgctgttaaggaccaagggcattgcggatcttgctggagtttcagtgctactggatctctcgaaggacaacactacaggaaaacaggaaaattggtttccctttctgaacaaaacttggtcgactgctctactaaattcggcaacaacggatgcaatgggggtttaatggataacgcctttcgttatattaaagccaacggtggtatcgacactgaagcaagctacaaatataaggccgaagacgagaagtgccacttcaatcccaagaaggtgggagccactgacaaaggtttcgtagatatcgaatctggaagcgaagatgcccttaaggctgctgtcgccaccgtcggaccagtctccgtagccatcgatgctagccatgaaaccttccaactctacaatcaaggtgtatattatgagcctgaatgcagctcagaagaattagatcacggtgtcctcgttgttggctatggtactgaagacgaccaagactactggcttgtcaagaactcctggggtccatcttggggactagacggttacatcaaaatggccagaaacaggaacaattcctgtggtattgcaactcaagccagctatcctttagtttaaatttataaataatgctcagtttaaacaaaaaaccaaaaagtagagaaataaaaacaagaaagtaaatttttagtaatgtaattaaaatagcgaaagtctcgaatcatgttttgagtttgtcctgaaagtatctgtattgttcggttaggttaggttaggatgtatgttttttaatattggtgatattacaacttaaaatatagtaaataaataaaaaaaacaaaataggtgtgccattttattttcttttatgatttttaccaattctaatagctatatattgaagtctgtatattttagaataaaatttgaattc

SEQ ID NO: 7554 - DNA, 1426 bp, Diabrotica virgifera
  SmartBlast Evalue=1E-117; Info=Endonuclease-reverse transcriptase n=1 Tax=Bombyx mori RepID=D7F162_BOMMO
attaacatcttagtagatgtgttgtggttcataattgggcttcagcagctcggacagtttgattgataatatttctccactggtcgcggtcatcagttacatgtattgcctcagtatactgtttgttgagaagctttttagtaatgtccgcccatcgctgtggagatcttccgcgttggcgttgagtctgaggccttccttggaccaccaaccgctccattttgtgatcacttcgatggatatgaccaaagaactttaaaattctagagtaaacggtactggagagacgctgatccggtttaatttcatccagaaccgagatatttgtacggcgagccgtccatggaattcgaagcaggcgtctccatgtccacatttcaaaggcgtctatacgtcgtctatctgattctttgactgtccatgtctcgcatgcatagtaaaatatggaaaagaccagagttgaaacgagtctctttttgtttgtcatagtaatgtgacgatcacgccagaccccgtttagttcactcattgctgctcttgctagttgaatgcgtcttctaatttcgggttcacaactgcctgtgtcgttaactagagctccaagatatatatcatagatgagactacctcgcatcccgcaatagtttgggtttcaggaaactgttgttggcgatcaataaccatgattttggttttgttgtagttaaccatgagtccaaatttagcactttctacctcgagtttttttaataattcagtaatttcttctggagtagaggctagaagtgtagtgtcgtctgcgaaacgcaagttagatatcttaacaccacctaggtttactcctccctcccaaccatccaagactctgcgcattatgaactccgaatagatgttaaataataagggaggtaaaacgcatccttggcgtactcccttctccatagtgcatttgtcagacaggtatccgtccattcgaatatatgccaggttatcttggtacagtttgctaataaggtgagtcaagtgtttaggtacacccattgtcgtcaatatgttccatagtttgtcccatctaacattatcaaaggcctttgtataatcgacgaaacatataaatatcgggatctggtattctctggctttttctatgatgtttcttacattaaggatttgttctctagtacctctgccctttacaaatccagcctgctcaggtgctatttgcctttaactttaccttaccatttacttattactttattgaagtagattgtaaattagcaatgaataaataaaaaaaaattgaacatggataatcaatacccaatatctaacagatacatacgacagtatctggaggacaatgttgccccctatgtccctttcgttgggggataatttcttatttatgcagtataatgcgcgt

SEQ ID NO: 7555 - DNA, 1429 bp, Diabrotica virgifera
gtcgcgtcttacatgctcttgacatcttttagccgcacttgactttttttgtagactgttaacaaaaaaactgcttcgaaaaatgggacaaatgaaaatgtcaaaaacgtctagtcttaaaaaaatacgttaaaccaaaaaacatcaaaacatattactgtgttattacatttgctatttgctcagttagtttttaataatgtactatgaataatcgaaagcacgtttgttgaatttaaaaacggtgaaggaaaacaataattctaaactgatctgaagctagaagcgtcttcattgtagctgagaaattgtagcagtggtcaccgactttaaatacattttcaacaaagtgtgttttccatcatcccgaaacttttacactttggtcctgtgagccggattcgaacctatggatgaatgtgtaaaatcgatcagaaaaataccactgttttagtttttgaaatattttatacaatggcaaactgtattcctttaaagaactgtacatttgcccatttaacttccttcaaatctcttcatcgactgagtaattcaatatgtctcaacacgaagtgttgtagattctattgccaagtttctgatatcaaactaaaaaatattcagtgactactgagtaacaaaccgtacgaactttttggaacaccctgtacgactcaaatgacatctttaacctacctaacgtcaactaaaattaagtgcctcttattaaaatatcaaataagttacaaatggacaacaaaacaggtatttacatatcagtttatacacgtactacaactatgaattttccagcactaggaagtaaaaaatatatgatatctcttttcaattgagctgacacaccttgttcacaagtgtgtaaatcttaaatgacttatgaacaaataatcaatactacaattagagcacaggtctacaacaacaatatttttggctaaaatactctttaatacaattaaaaccacacaagaaatttataagactctttagatatatgtaggtgtcttatactgtatgtttttctaatatctacaatattttcagattggaagcttccaccacctttgacgtgcgctggagatgaagtcattgtcagattcttaccttgagaggaacgtcaacgttgtggcttgacgtgacttttataaaatccacaatattaaaaggtgtaagaattaacaagcagttacttgtttgaggtacttttaagttcaaaaggaagaatgtcagctgtattgatgtataaataagctcaaaacgaattattcgacatcaactattacatttgatgtcagttataacccagtataatttgcagtcacatgtcacgtcaagaaagtatgttcttatagatcgagaggcagcgctgaaaaatctctttgaatcaccaaagctaaactgttcacag

SEQ ID NO: 7556 - DNA, 1434 bp, Diabrotica virgifera
  SmartBlast Evalue=3E-44; Info=Putative alpha/beta hydrolase n=1 Tax=Glossina morsitans morsitans RepID=D3TNG1_GLOMM
tatatttgtatggatattcaaagaacactttcttcctaaaatattatttgcacagtaaaagaaaataaacttatctacacatcacaataactattgttaaagattatgtgtggtgtttatatgatcacagcctttttacttctttgataggagctatttgtcattttctttacgtctttttgttcatacggttgtacccatagacggtaccatcgtcgtattgttaccttcgataatcctcttactgtttacttgttcgataaaattcatgatataaaacttcataaatggatcttgatacagataataatgcttgtaaccaaacatcgcatcaaattcatgataaactgtagtgatgtttctgctttctgctatgtcagccagcctccttccaaaatagtacggtatttcattatcgtcttgcgcatgcaaaatcatcacagggcaagttattgtcttcagatgcttagtagtgttaaatacaaatccgttgtgcattaatggttccactacgactgtatcgaaccacggcaaccaggcaaataactttccatatggatgaacatacagctcatccctcatgctggtaaatcccgactccaaaactaatgccttggtatgcacattgtagtaattttccatctcagccactgtcctagtagctagggcagcccccagagaatggccccaaacataaatatcagattttgttcgatttctgacccatttgtatagttcaacacaatcttctacaactgtatcttcagtaagttttccatctgaagagtcaccatatcccctataatcaaaagctataatttggaagttataactcagcaactcatattttctttcgctgtacgatctcacttccccagttccgtggaaataaagcagaacactgtaattactgttgagtaagatttcatcatagttaatgtcagtcgcattgtcatatagatcttcatatgctagatttacgggaagaatgtgccagactccaagaagcttactgccttcatcctttgtataattaaaactgacatatctgttcctgtaggctgggaaatgctgattttcaaagtattcgggatttctgggtaagttaaagcgtgtaaatataaggcttgtttgcagtggaatcgagttcataaaaacgaaaggaaatacgatgaacaccagcataaacgcaatgagggccaagacaacacatagcgtaattgttatacagatgcatctcttgtaacggcatcttggtttgcggaaatctggcagtagatcaatctcatctgcatcattatcatggaccaaacagtaatcttgaaaacgcccgtgtctggtcattttggtaacaggacattcacattttttataaactggacaataatttataataattaacacaatacaaacacctactcttctgtgtttgtt

SEQ ID NO: 7557 - DNA, 1430 bp, Diabrotica virgifera
  SmartBlast Evalue=2E-73; Info=Uncharacterized aarF domain- containing protein kinase 4 n=1 Tax=Harpegnathos saltator RepID= E2C531_9HYME
tttgaaagcaaaatatgaggttatttcaaagtttttaaattttgttaatattctaaaaatataggacatagctcgctcaactagtcaactaacagtaaatagaaaaaccgtaattttagaaggatttaaaaatttctcaaatgttacatcaccttgtggaagaaaaccaaatttgagattttaatgacttacctaaatataaatatataactattttaaggtatcagactgttcaatgtcccgtgctcaagatcttgcttgcctgctgaaatctttgcaactaatctcggaggcttgcgttaaattgcaagcagagaaagccaagttcatatggtcgaattcaagtttgagacatgccgcagagagctgctctactgcatgccaaaaggccccgcagttcggtgggacaaatccccctgatcttaaagacagcattgaccgggtatctaccgtcttgcatggattgagagtgtacacaaacgtggccttgggccagaaagatacagtgacagcaatttctgctgaaatattgaaggacacatcaaatgtattgaataaggaggattacaagagaccacctcagctcaaacctgaagttttagacagtaataataaagtatatactatagaattaacggaggatgacaaaaagctcctaaaaagattagatatggaacacagagcaaaattaatcaaagaaaaagatagggaagagaacaaagatttgtctacaagagaaaaggaagttaaagctaaacctgtgaaagaaaaagaagctgccaaaataacagctgttccaaacgttaaatctaagatgaagataagtgatagtgctaaacaaagaaaagtaccatcatcaagaataggtcgtatggtatcatttggaaccctggcggcaggtctaggcattggcacagctacagaatatgccaaacgtactcttggtattggagatcctcctggaaatgcctctacactgtttatgagtaaagccaatatggacagagttgttgacactttatgtaaggtgagaggagctgccttaaagttgggacagatcttaagcatacaggatgactctataatcaatcctgagctagcccaagcattggagagggtaaggaaatctgctgattttatgcctgactggcaactagaagaggtgatggtggctgaacttggtcctcattggagaaacaaatttggagattttgaaaatgtaccatttgctgctgcctctataggtcaggtacatcaagccaaaaccaaagatggaagggaagtggcgattaaaatccaatatccaggtgtagccaaaggaatagaaagtgacatcgataatttgggtggcataatgaagatgtggaatgtgtttcccaagggaatgttcctggagaacctcatggtagttgctaagagagagttggcat

SEQ ID NO: 7558 - DNA, 1434 bp, Diabrotica virgifera
  SmartBlast Evalue=4E-59; Info="Apoptosis inhibitor, putative n= 1 Tax=Pediculus humanus corporis RepID=E0VBA0_PEDHC"
gacaactgaacattgcatttatatataggagtcggatgaagcaaatctttaatcaaagtattgatgttagccaacactactggcgccaatttaatttttttgtcgtccttcttttcgccttcctgcaacttttcgagagatcgtaaacatccagccactcctctggagaagtaagtcagcctagatttaaaatctctgagcacggctggatcagctgtcaggaaatcgggcgactgtcttgctagtctgtggaaggcgtagagtaaacattctacagaagtgaagtctaaatttggcattttgtctatatttccatcttctggtggtaggggcatgtaccgctttaatttatcaaaaatatgcacaacatatgacgaaggtgtttccaatttaccacaataagcagatagtgcagcaagttgttgtaaaagctgaggctgtactgattcttcgccatctttaatgtcagctagcgcatcccattttgataatacttcttgacagtaaaattttacaaactctgttgactcaaccgatgcactgaaaagtggcaaagcatgttcggtacatattatcagtcgatgacagttgttctcttcgacatcaaactcttggtcaagttttgctctctgttctattgcattaagcaattcctgttgcccagtcgttgtttgtgtgagtttagtggttgttaaaaatgatattacagttaaaaactccgtaacagtggaatcctctaatattttttccctttctctataagtaaatccatacatattgctgtaatatttggatccaatgttacaagcttcttgtatatgtatttaaccacatcctctctggcactcggcttattaagtttaaatatgtaaacaaataaacatttaatgtttttctgggtatgccctgaatacttgactcaaagaattacaagtaacattaaattcttgttgttctaataccatcattaattgtataagaatatcagctattttgtggacaagtcttttagattgtttgcatattgtaggtaataccctaattccacttattcgtgtcgatggatcattatcttcgcatatatctataagagcgtccacagatatgtcttcttgctgtggaaaatgtttgaagtactgcccaataatttgagtcaccaatttcttctcatttgcactaccctctctatggctaatacattccaaatattctttagaaagctttgaaatatcctcggcgctggataaacgactgtatgtttggtacaattcttccaatttgtcggccatcgttagggatctaattttccaaaaagaaatagataatgtttgtgaattaaccactgctgtgcaatatggttccttttaaaccggttagttacaaattttataacaactcaagctagattatttatcaaccatttttaaattcttc

SEQ ID NO: 7559 - DNA, 1434 bp, Diabrotica virgifera
  SmartBlast Evalue=4E-17; Info=CG7896 n=6 Tax=melanogaster group RepID=Q9VAD1_DROME
atatagtgcatgggcctggatattggaaaatgtaccacctatggaattaaaataattattccttaaatcaatgatatttaagtttaacatatttttaaatgcaccgttatttatttgctcaattcccaatcctgagagttgcagtccattcagtttacttaagtcttgaaaagcaccactatgaatagttagtccattacgtttagtcaaattacttttagaaaatattattgtctcaagggagtctaagttggagaaagcgttttcttttatggcttccaaatagttttcagaaagatctacagctgttaaatttttcaggttgtagaaagtacttgattctatgactagtattttattattgcttagattgatagattctatatttcttaacaatttaaaactatcggatgcaacatgttctattaagcagtgtgacatatttatgtattttaaattaacacaacgtctaaatgtatttgacgtaacttctgatagactgtttaatgacatatcaagagaatacaggtcagtcaaattatctccaagctcagtatcacaaatactttgatctaaataatttcctgttaaatttatttcacctatacgattttgtgctttagaaaatatagtccagatactttttatttcggaaaaggaaagatttattttttcaatgttgttttccctagtataggactatctaactttgataggttattgtaactaagattcagttcaaaacagtctgagtcaaaatcaaaaaattttctggtattgtggtaagattggtattggaaaaatctattactgcagaactactttgacagaaaatgttaggtgatattttttcagttactaaagaatttaaatttgtatgagaaatgtcaaacaactcaaaaacaataagtttactagagtatggcataaagttagtaaacattttttgtacttttaaatgatcaacaaaattttgaacattacatcctaaaatgtatagatcattttttcctaaaacgtatacatcacttaaatatgtgttataacttaggtcaagagattttcccatgaaatcccgatcagtggtatactcggtgtacttggtaagattattataacttaagtctaggtaatctaaaactacttgtcttttacttatatcaataatagaaatattattatgacttagattcgctatcttaacggaatctggcaaaccagcgcaaaacgcaacattatctatgtaattttcacttaaatccagatttaccaacttactaaatactgtgaagatgctgtcagatatactctttacagatgacctgcggatggctaaatctgttatagttatatttggtaacaaatcacttaagttaggaagtcagcaatggtctcataattggagtcttcaattattatcgtatttatataatt

SEQ ID NO: 7560 - DNA, 1432 bp, Diabrotica virgifera
  SmartBlast Evalue=1E-34; Info=Npdc-1 n=1 Tax=Aedes aegypti RepID=Q16MY4_AEDAE
aaattattcggaaagcgtagctgggaaagcttcgaccatcctgtgacgtcaatgcttagctcccaatagcgtgcgcattcgaatattgattattcgggaacatggctgatctgtgaaaacatatggagaaaaccgattccaaatttacaacatgaaattcactttcatatgcattgtcatcgtcatatcatgtagtgtttgtgcttgtaacgatttggacatattttccgggctcaactttgactttgatcgacctagtaaagatgttccgagcatttctgattatgatcgacccagttattatacaaaattcagatatccttacgagaatgtaccaatagatgactacgaagacccaaaaataggagagctacccgattacgatacgaacccagaaaaattacgaaactacagggaagttatcgattggcaaagatcacatattcaccaacaccgtccaaatcatccacattataaaccaaaatcggtcagtcccagagtgcaatatctactggaaaaacttgccaagaatgaaaactatgatatagatcctcctaacttacctcttctagatgatcgtagaatgtatccattcgacgatgatttaggtttaaattttaacaatgaaaaattcgaagatcggaaagaaagaattctggatgacccaatttttggtgcaaattatagaaataatgaaagattactaagaaatgacgaagactccgagaaaaacgaagaacggtctcagactatgcaccataaggttaatgaaaatgacagtgagaacaaagaatttactagtaataggtttagtggtgtgaaagtagctgaagatccgtcagaatttgcctatttaccatccgattcccgattttataagaaactgaaaactaccacatacgttcctgaaacaacaattaaaattgaaaagacagtaatgttaaatgaacttcctactcctgcagcagcggataagttaatggtcaatttaagaagtgacaaggatacccaagaaagcagaaaagatggcatcgaagtggtgcctatcaaaccaggaattgccgatgtagactcggctggggtttatataattgcgatagttgcaggaataagtgccgcagctacagtggggcttatagcagttgggataggatggtacaatttgcagaaacacgtaaagaatgcttctgatgttgagtatccagcttatggtgtgaccggaccaaataaagacatgtctccctctggagatcgtcgacttgcacaatctgctcaaatgtaccattaccaacatcaaaagcaacagattatagccatggaaagagctccgcccggagacaggcatgggtctgtatctgaagcggaaagcgacgaggagaacgaagagggtgattatacagtttatgagtgtccaggactagctcccacgggc

SEQ ID NO: 7561 - DNA, 1433 bp, Diabrotica virgifera
ttattatatattatgacattcgtgctatataatattatgtataatattataaataattctacatattattatatcttgttatatttttcgtattcattactgttcttcggcttaaattttctgatattttcctgcaaataatttcattttgtctttccaagggtttgaagaatattcctgtaacgcattaaaatccgtattttgacccattttccataatacggttttctattcattattcagtgtaccatcgttttctcaacgttttgtttaactatattttcatgagagtaacgtgatgagcagtctacatttttctaaatggttgattctttatagggttttcttgatatataaaggtttttatctgccaagtttattaaaatccttcgtacaaggtctatatttattaaaatcccttaaacggctacatcaaaatcacagaacctttttgatctgaaaagaacatcattagtgctgatgcaagtttataacatgctaagccaccaaaatatgtgggtaaaaaccctttaaatattacggacgatgattagcaactccgtacgtaagagttgctgacatccttcagacgtggatgacacatgacacatccttcagatcagcaacccacttatcgtgtgaggattcctgtgatgcctagggctatatctaggacaatttagaaaacgtgtgattttgatgtagcccttgatgtagttctttaggggattttaatgaatatgatatacctttcgtaaaggatcttaataaaatttttgtgattaatggtatacagctctagctacaggaaatttttcctcgtggattttatataaagtttgttttccgcctctcgaactatagcaaaatatcacaatgtccttacttacctcctgcaatttctgtaaatacatttaccattcttcaaactgtgatggatcacctattagttgtttacaagccaataaaatattggaattgtggacaaaaacataattttactcataattaaaattttcgtttgtaaatattttatgtttttactttaccttgagtttattgtgtatatatcattattgttaacaatagtattattattcaggaagttttgtaaaagattattgctggtagtgggtaaaaattaattttttacctactgctcctgcctagcttcggacaaaatgaaaaatttttaatcaaagatgagagactagactagtgggaaaatactagattatatactagataataaaactagatgaattggagacaaacttaaatataaagcaaaaaaataaaataaaaagagtgagaaaccaagatccaatgaaaggaaatgattacggaagctctaattattacaacacaaaccctacctaacataaagtctgatattttttcatcgtgaaaatatttatgtgctcatcattagt

SEQ ID NO: 7562 - DNA, 1430 bp, Diabrotica virgifera
cgactagtcgtagacaggcaccgcgaacgcacttaatatctccggtctaatcttaacacgctagttttaatttctattccgtttttcattgcataatatcgctttcattttatagaacgcgcttcgggccatatcaacgacgttttatttctacctgtaatatctgtcttcaatcttgttcttactaacaattatgatttgttttctttatgttcagagcccttccatatatcttgcagtattacttagtgcaatcaatcaaaatctgtactccttctctgcccgtacacatgtgaatatcccacattaccatgtggtaacgccaatcaaaaaagaccaccgactggatggaccgataacttgaaaaaagtagcggaaaaggctacaagcgctcagtgtagagcatattgaaagaggctgatgatgtaccgatttaggggaggtcccaggtaaccaagtgacgtcaataacgtcgaggaaacgtcagcttttggttgaatatatacacgtgtttgaacattacgtcgtataaacgtcttttgtaggtgattttaaatacgtaagattaatgacgttaaaatacgtttaaaaacacgttttcatttcagacagcccaagtctgacgtcacaaaaatgggaggagcttaacgagttaatgcttataaaataatgttgtatattgacattggctccaaacaatttcgtttataagcttaaattgtcataagaaatttttcatttattgtttacgtgcgttgtgtggtattaaaataagacttttcatttagatatttagttgaagaaacgtgttaattaagagattttcattcagtttttctcaagtgagttagtttaatgcaatagttcttcttgaaaacggtttgagcttatgtgttttgttttggtgaatattttccgttaatgaactaattatgtattatcgagtttaattaaattaatttgttaataaattatttattagtttatatgttgtttcagttttgacacagtaactacctacacttacacctatcgagggtattgtaattctatgcatttggttttacttttagcctataagctaaatttaaaacagttaaatgaaaaattgcaataccaacaatgcccatacgaataattattattgtgtatttttgaaaccataaaatgaaaaataatctaaaaaaacgacataaaactacgtttttatatcacgtatttaaaacgtgataaaaatgacgtcagttatggtgggacatattcacgtgactttcgacgtcgaaaaaacgtgataaactgacgtggtttggtgatcattatgacgtcttttcaacgtttagtaaacgttatttggttgcctgggacacacgaaagatgcaccatcaagaagtcaagtatttagcaatcaaaattgaagaaccaacagtttt

SEQ ID NO: 7563 - DNA, 1428 bp, Diabrotica virgifera
  SmartBlast Evalue=3E-58; Info=Integrin-alpha FG-GAP repeat- containing protein 2 n=1 Tax=Harpegnathos saltator RepID=E2BY06_ 9HYME
ttcttatcttggtctagaatgtaggtctctccgtcccacgaacacgcgacgatatcgtccgaacccgtgcccgtaacgtccagtttcgtgagggcgaaaatttggtggtccacagcaattgcccatagtattacttcatcttgtaccagcatgatagttccatctagagtggctaaagcatatggtttgccttttgtaggggcactggaaggctccttctgagatgaacaagaacttttgtcgatactaacaccactatcgtactgtgagtacctcagatctcccaagatttcagtcgagatgttttggttcctcatacgagatattcctaggaactggtagtctatggaactggttatatttcaccaagtgagctgcctgaattgctatgtacagagctttcaatgcactcctcaccgattagatcatcactttggcacttgatcctcatgaaggttcctccaggttgagcgattagtattgaaggtttaccgtctgctgaatgatgcaatgttatggagcctatttggttggcacattcccatttgttcagtgccacgaattttcctagtattttatctgagggctcgaattgattgctgacatcagaaatatccagcgttgagcgatttggattgctaatccatttgtaagacctaaccactcgatctgttagccccaaaaccatttcaaagttgccatcaccgtcaatatcgcctattataatatccttagtgtttgcaggaatcctttgcacatgaaaacaaaccaactggattttttcctttttctctgtcttaactttagaggtactaggaacatctgcaggtggtgtaacttctatatttcctgtcacagagtgagactgaccatcaacctcttctacgccctcatctttttccttttgaaatgagtcttctacaagtggtactgggttgatatagaggtaacaccaaccatcggcagtgatcactatcagtacattcttattctggtttgtaatatctcctacagccatgcagccgatgaagttcagttttggaatggattggtgcctttccctgcctttgaatatcgccacttctccattttgattccccacaattaactcattacagccatcgttatccacatctcctaatataatagcattcctagccacgttcccgggaaactcaaactcgaatctgtttactaatgatatagctctcatcgtattaacacttcgcaatttccactaggcttccggacttcaaactaggtttcagattaagaggtcttcgagattcaggtacagatgagtaaatgagctgccacctggaagggggccacactatgcaagtcgctttggcagtcacaaggcctacggatacgggaccgaagttgttagagtccatagaatgaccagtgtggtcgccctcgatccag

SEQ ID NO: 7564 - DNA, 1432 bp, Diabrotica virgifera
  SmartBlast Evalue=7E-94; Info="Uv excision repair protein rad23, putative n=1 Tax=Pediculus humanus corporis RepID=E0W1I7_PEDHC"
tattacatttattgaattctctacatgcctcttaacatctagattcttcgatgtttcaagaaaaatcgctaatatacacaagatttgtatttatacataagttatatatagaataaggtgtgtgccctcaactcgcttatcaacattaaactgaaaatgctattaacgtggatgggagctttatcaaaaaagaaaaataaaaacttaaagcataagaattattcatcgaaattttgggagagtaagaagttagccgccaagttttcatttttttcacaagcgaaataggcctgcactactaggtgttcggggaagcccaaggctttcagcctttcgatggcgtccttgtcttgtggggtgacttggatcatgccttgtggcggtccgcctgcggctgcttgagatcctcctaatgcacctcccccactaggtacagtcccacttccagtcgttggtgctcccccgctggcaggttcattgagcatcctcacaaaagactcttgattctgggatattaactgtaacaaagcagggttggttgttccgatttgttgtagcacagcattcaacagctgtgggttctgttggatgacttgtctcatttgttgaaactggggttgagtcctcaaaaatgccaaagggtcgtctgattcagactgtctttcgtctacacctgagagatcagcagtttcactgactgcctcctgatcatccataagaggtataccatttatcaaatattctactgccctatctggattattaaagctagccctcagtgcttgttcaacttcgtctcttgcatatcccatatccataatgttcctcaccatggtctcgtattcctcacccataagcagggtggattcggctacgctacttatagtagaaggtgcttcagaagcagcttgagtggtgggggcggaggcaggtggtggagtatcctctgatgcgactggggtactggtgggagctggttgtgttgctggagtagcaggggtattactggctggagtagagtttccatctccactatctgttttctctggttgctttggctttgtaaccataactacaataaatttcttttcatcgatgttatattctgacaaaactgtttcatctgtaagtattttgcctgcatagatcagtctctggttttcagaaggataatcttttcccttttccgtttcaatcttctgtttaagttgtttaaccgtttttgtcgcttctatatctacaataaacgtttgttgctgaagattttttagtgtcaccttcatgttgctccttcgaaattaataaaacagtcttaaaataaagtaaataacactataagcagctaaatttttgtccactgttcgctattttcggctaaatatttctgtaagatgatatagcagaactgataaatttggcggccatattatag

SEQ ID NO: 7565 - DNA, 1431 bp, Diabrotica virgifera
catcagtatatccgcttcaaaagaaaagtctcctaaaactcaacgagtagtcttctctgcaactactgattcacgcagttctggatcagaaccgaagcctaaggaaggaccaagcaagttccagctggctttgagagaaaaagccgataattcaagactaagctacagaatattaagaagcctcatattagcctgcctgataggcccaagttccagaagccaaatctacaaaggttcaaaattgaaagaaaattcagcttaccgaaaatgccagacactagtaaaataaacatgcctaaatttagcttgccaaaaatgccgactaaaaaacctgtaaaacgaatgtcctcgacggaatccaacgctggtgattctaagaaaccaattttcgacttcggtacttatcctagaatcttcaagaagaagccaaaggcatccgacggagctgtttcagactttgctacggtccctagggggaaaaagcctgacagtaggacgaccgaagatagtagagattcaagagttagtggtaccgactctattcgaattccgcttcactctgaagactctatggatagagaagattataacttacaaaatagagaacttccaagtgactccagcgatatcaggcaaccatctcacagatatgacgaagatatcgatagtgagaatgagtatgatcgcgaaaacagggagttaatggaagaaagagacttcttgagtaggtggcagagaggaaggtttaatccagacgaatttgtagagcctaaaccagttactagaataaccgacctggactctccggaagataaaggttacgattttcctccaagcaacggaaaagaacaacgttactcgtctggtagttctttgggagtacacagacaaggagttctcgaggaaatcaatccagacgaattctttttaaggcaaaagggtatatctcaggataacatagaagtaggaatgtacctaagtaccgaaatcagagaagcattccgtaaccctacaaacgctttggtacaaatggaagaaaataataactatgacgttaaaggttctcatacgtctctaccagaaattataaataagaaaaagcctattaagaaacccaaaaggaaaaagactcctcatgcttcgcaggaacagataccttatgatgaagaaactgcagatgaggaaatgaacacatttcctccttctcgtccaaaacgtagaagtagacgcagaaaaaagactaatgaagaattcattccgtatcaagaaactattccagttgattcgacagatgaaaggatagctcaacacagagaaagtatcgacatttttgctgacgatgagagggaaatagctcaacatagagaaagtatcgacatttttgctgacgatgagagggaaattatgtacgagaatgaaatcatggagggc

SEQ ID NO: 7566 - DNA, 1431 bp, Diabrotica virgifera
  SmartBlast Evalue=0; Info="Homogentisate 1,2-dioxygenase n=1 Tax=Culex quinquefasciatus RepID=B0W013_CULQU"
acttaaaaagattttaattgtacaaaatatttttgttacaaataaagaagatatttgttaaaagcatgtgttttataaatcagtaaaagattaagtgtgttttagtgtttgggtcctgtaaagtgtttttcaagactctgccagcatttgtaataatcagggttgactttctcgcatgttttggctccccatttcgtgagggctaatcccaagcagctttcaaacataaaagactgagttccttccgcaactctcgtaggtttcaaatgttcgttggaggcgctttcaaagcaattcctgtcgggaccgtgaggtgtcatgatgctgtgcagagtagcaccgccaggtgccagacctcctcgtttggcttcgtattctccaagaatgagtcccatgaactccgacatgcagttcctgtggtagtacggcggtctgaaggtattttcttgaactgaccatctcggtgggaagattacgaagtccgcaattgctgtgcctttcttttcggattggcaagttagaaccgtgaagatggagggatcacaatgatcgaaagacaccgaattgataaccataaacttgctaagatcgtatttataaggtacatagttcccatgccaagctacgacgtcgaaaggactatgatcttgttcacatacaaacaattttccttggtatttagaaacaacttcgaaattttcctctacgtcttcgtaccaagctgtcggatgtaaaaagtctctaggattggccaatccgttggctccaattggacccaaatccggtaattcgaagtgacgaccgaaaacctccaggatgtaacctcgggaagctgtttctacttctatttgaaaccgaattccttgttgaatgacaactatttcgttagggatggcttttattttaccgaattctgtttttatgtgtaaatttccagtttggggcactatgagaaaatcaccatcactattatagaaagctttgttcttcattgatgtgttgcaggaaaatacatgaatagcaaggccagttttgcatttggaatcaccagctcctgctacagtgtgtaatccctctacgaagtctacttttttggagtttggcggcatttcaaaaggatcccatagtaactgatttggattcggttcctcttcatcccagttatgactcacgtcgctactcttgatggattcaaatggtttatgtaacacagacggtctaattctatagaaccaagttctcttattttctgatctaggagcagtaaaggctgatcccgataactgctcggcgtacagaccataggggcatttttgtggactgttttggtctggtggcaaggagcccgggcatcttggatcttcggattgtaattctgagccgaagccgctcatgtatgttaattcagtcattgttctcgttgggtttttt

SEQ ID NO: 7567 - DNA, 1428 bp, Diabrotica virgifera
  SmartBlast Evalue=4E-13; Info=Endonuclease-reverse transcriptase n=1 Tax=Bombyx mori RepID=D5LB38_BOMMO
tttcatcccaaatgtcaaattagcgttaacgttattaccgtcccttatttcgacctaaatagcgggacactttatctggtattagcgtaacattcactctgcgcttgcatacatgtcaaaatagcgtattccgctattagcgtgcgataaaaatgtctttgcgatatatctctaatattatggattgaccaggttataaacagagaactgttcttctcgaaatgatctcaaaccaagtgagccagattgaattttgcacgagaacactacttgccttggacaataactgattggaatgtattgatttgtgataaattgcaattctgtctagcggctcatataaacgggtatgagttatgagtttggcgacgaccaggtgagagaaggcaagaaatgctttcaacaaactgaaaaaagtattctgtagcagagatattacaaactctttaaagataagacttcttattctatgggttggagacttggacattaaagaaagatgtttcagacagactagaagccttcgagttatgggcctacagaagaatattaataataagttgggtggatagagtcacgaatgtcgaaatgttgggaagaatacgaaaagaaagagaggtttaaatataattaaagttagaaaacttcaatatctggcacatgtcatgaggggcgagctttataacttgtaacggttaataatacaagaaagaatacagggtagaagtagtcgtggaagaagacacatatcctggttaaacaatttgagagcttggtttaactgcacttctgccgatctctttaaaacagcggtatggaaagtgtggattgccatgatggttgccgaccttctaagaggagatagcacatgaagaagaaggcgagagaaatgttcaaatgtgtattgaagagcgattttcatttggcgtacaatcattatattatggtgcatagtgagatatatcttttgatgtttgcacggagttagtcttcatctagaattggacgtttactgcacgtaggtacctggcataggttttagaagaccgaccgttttgtttttataattattcaaaaagacgacgcaatatttatgcatgataatacccgacctcatactggtcggatagtaactgagtttcttaacgagtttcaaatcacgcaatttatttaagctgctcgtagtcaagatttaaatcccattgcacatatttgggatgagatggggagacatgtgctggctaccagacattctaccgagcttcgcgacatagtggagaagtaatggcacaattttcggcggaatgtgatccaaggtatgtatcttcgtttgcaagctgttatcactgccagtggaagtactcactcctgaagtccttaaattttcttctgtttcaacgagaagcgtatgaaagtaatctttgttac

SEQ ID NO: 7568 - DNA, 1430 bp, Diabrotica virgifera
  SmartBlast Evalue=1E-167; Info=GDP-mannose pyrophosphorylase n= 1 Tax=Glossina morsitans morsitans RepID=D3TND8_GLOMM
atagtgacgacgtttcttatcgagggattatgatagaagattaaactgttttttgttgacgtgttatgttataaattaaattattcatctatttgtattgaacttgtgaattatacaaaacatatgtgccagtgactattagtgtctaaaagaaattgtaaagttagaagtatcaacattgtaagaagagttataattctctgtacatagtagtatcaatctaagaaaatatgccagaagaaggaaaaagggcattaattttggttggaggttatggtaccagattgagacctttaactttgagtagacccaaacctcttgtagaatttgcaaataaacccattctccttcatcaaatagaagcacttgtagatgctggagttactgaagttatattagcagtatcatatcgtgctaagcaaatggaagaagagttgacagtggaagccaaaaaactgggaattaatataatattttcccatgaaacagaacctttaggtacagcgggaccaattgcattagccagggatcatctttctaaaagcactaaaccattctttgtgttaaattccgatattatttgcgacttcccatttaaagcattggctgaattccataaaaaccacggaaaggaaggtacaatagtggttactaaagtggaagaaccgtcaaaatatggtgtagtagtatatgataaagacaacagcatccaaagttttgtagaaaaacctcaagaattcatttctaataaaattaatgctggtttgtacattctaaatccaagcgtcattaataggatagaattaaaaccaacttctattgagaaagaagtatttccttacatggctgctgataaacagttgtatgcatttgaattggaaggtttttggatggatgttggtcaaccaaaagattttctgacaggaatgtgtttatatctcaaacatttaaggcagacaaatgaagacaaactttataaaggaccaggtgtcgttggcaatgtattagtagatcctactgctaaaattggaaacaattgtcaaatcgggcctaatgttacaataggaccaggtgttgttatagaagatggggtatgtataaaaagatctacaattcttaaagatgctaccattagttcaaattcttggttagaaagctgtattgttggatggaagtgttgtgttgggagatgggtaagaatggagggttccacagtactaggagaagatgttatagttaaagatgaaacatacattaatggaggtcaagtgttgcctcataaaaatatcgctacttcagttccagaacctcagattattatgtgaggctaaaatattatttaccatgtaatttttgtatcttaaaaagtatatacccaatgaacttttttgtatttttaatacacaactaaataaaatatgtacattaat

SEQ ID NO: 7569 - DNA, 1424 bp, Diabrotica virgifera
  SmartBlast Evalue=0.000000006; Info=Endonuclease-reverse transcriptase n=1 Tax=Bombyx mori RepID=D5LB38_BOMMO
ttgtgacctaaaaatatgcatgggtatgccagtagttatcttttttaataatatgcaagcctttttcgtttatcttaagattttttacgctgacgtgataatcatttagacgtgttgtgtatatataattgtaaataccagctcttgttttgttcttctagatgcgtcgaaagtgaagatgtgatagttataaattgtagagtatatatatttcacgttgatgtagatattaagagatataatatatgactagcgacattctgaaataatcttttaaaccttttagcgtttttgtcgtcactacatattttacagactaatatcagaatagacttattttcaaattactctttgtgtaattatgtaaaataattaacctttagcaagtgttttattattttttactgttgaaagcttatcgcttaattgatgctaattgtaaacagaaatagttatgtaatttttggagttatcgagctaaaaatatacaaaagtacaaaaaatatgatgagaagctaaaggattatgtaccggtctcctctaagatcaggtatgcaattttcttattttaatagttttctgctgtgtaactcacgaaatacattttcgttatttaacaaaccttcactggtctacatcgctgttcaaggaatttgaagcattcttctatacaactacacctcaaccgcctctaggcgattgatcttatcagccttcagagtccacttctcggtaccaagcgagtaacaagctctccatgctttgttgagctacctttagggaagcattctcttgagtttggcgactaaatataataaaatttgccttaggagcattcatttttataccctttacacttcctgttgttttgacgcaatcccataactgttagaggcactagaggctgtcgcataaaataacagtatcgtcagcgtatctaagattattaatcagttcaccattgattttcattcctaagtcttatcttacaaagcatgtttgagaaatatgtggggtagatattaagagcaggtatataatgaatccttgtctgacacgcgtctttgaatgtaaaattcatcgcttaagctactattaactcgtacgactcttttctgcttccagtataagttttctatgatacttggttctccaccgccaatgcctttggttcttaatatgttcaaaacatcccctacggtcattatctaaagccttttggtaatcgacgaaagccacatacctaaagatcttaacgttgttcgcggcatttttggagaagtatttttggatccacctcttcttaccatgtaacattaatgtcagtatttacctattttgatagtctaccgttggccttattttacatacttcattaaaagtatccattaaaaaagctaaataaaaattataaagtggcacaa

SEQ ID NO: 7570 - DNA, 1427 bp, Diabrotica virgifera
  SmartBlast Evalue=1E-136; Info=Collapsin response mediator protein n=2 Tax=melanogaster subgroup RepID=Q8IPQ2_DROME
ccgctgcatatacatataaatataataacttacataacttagtcaaacaaacattaaaaaaaatgattaactattaaataagctttggtatcttattgcaaaatataattgttgcagaagcaaagcgctcgtggtcttcaccagaatcctgaggatttgccacctgggggatttctgacgcgtatggaggacttcctgtctggatcaagctcctgagtaagagaaaatgtactctcttgtatatttctttgaccttctggtctcattcccctcatggaaggagtcgatacatttgattccggcaaagttggtgtcggacacggatcatctaacagtttgatcttaagtactttaggtgttatttcaagatactcatcatcatcatatcttgacggcttgatcttatccaattcctcaggattatatacatatggtgcaaatactggggtttcaacaaagtggccgtgcccttccacaactcttaactgcccctcgtccaaacaaactcttccgttaactattacatattccgcaactccgtgacacgtcattccctcaaaaatgttaaaatcaactgcttgatggtgcgtctctgcagatattgtgcgggtagcatttccattccaaataacaatatcagcatcggatccaacagcgatacatccttttctaggatacaaattaaatattttggcagcgtttgtacttgtcacagccacaaatctactgggtgataaaataccagtttgcacgcctttttcccatataacagacattctgtcctccacgccgttgactccatttggaattttcgtgaaatcgtttttaccgagttccttctgggatttattgaatgtgcagttgtcacttcctgtcagttgaagaacgtcttgtgctaaacaattcattaacaccaaaggcgtgctgggatctggtctgagagggggactaagcacgtgacccgccgagtgatggaagcattcatgcttgtagtgggtaccgtccgtacccaatgctgcgactaaggtctcgccatacactcgggcgccacttctatgaatatctacggctctagcagccgatttactcattacatgcactacatataacggacagtttacctgcttcgctataacgcaagccctgttgacagcttcagcctctacctcctccggcctcgacatctcgtgtccttcaggaccagttacgccttgagccaacaaccgttcagcgtttttggcgatgatagatccgttttcagcgtgaacttgagcaagagcacctaaattctggcaatgttcgaaggcgctatataactctgcgtcgttcaacataaaaccataggccatgaagactttgaaggagttgacgccgtgttcttgactagtatctccatgtccctcttaacttgttcagaccaacgaggg

SEQ ID NO: 7571 - DNA, 1429 bp, Diabrotica virgifera
  SmartBlast Evalue=1E-112; Info=Rab-protein 5 n=1 Tax=Tribolium castaneum RepID=D6WJQ8_TRICA
gccttgttgacgtcgtttagtagaagtgtcatttttgtctgctctcgttttcatcttttgtgtataaaattggtgctaaggtagataaactatattcgaataggcgtttttatgtcgcaagaaagtgttttgtatatttgtgatacgtgatctcgtagagggagtccagaaattcataatttatagttaagtaaaaaatggcggcaaacagaactggacctgctcagagaccaaatggcgctacccaaggaaagatatgtcagttcaaactggtcctactaggcgaaagtgccgtcggtaagtcgagtttggtactgaggttcgtcaaaggacagttccacgaataccaggagagtaccataggagcagctttccttacacaaaccatatgcctcgacgatacaactgttaaatttgaaatttgggacacagcgggtcaagaaaggtaccacagtttagctcctatgtactataggggcgcacaggcagctatagtcgtctacgacataaccaatcaagacacattcggcagggcgaaaacgtgggtgaaggaacttcaaaggcaggccagtccgacgatcgtgatagctttggccggcaacaagcaagatttggccaacaaacgtatggtagaatacgaagaggcgcagacgtatgctgacgaaaacggcttactttttatggaaacttccgcaaagacggcaatgaacgtcaacgatatatttttagcaatagctaagaaactgcccaagaatgaacaaaccacaggtcaaggcggcagtgcccaaggcaggcggctagcggagggcgattcgggcgccaaggcacccggaaattgttgcaagtgatggtatacgcctgcaggtcgagtgttgttattaaaccgtcacgagaaaggactggcaagtgcagcggcactctagtgatatctatgtgtaataaaggtccttctattaacaaaaaaaattaataaaaaaatatattaaacttcatatacactgtcacatattccatttagatgatgaaaaacaaaagagcagaagcattttggtctctaacggtcatgttgagttggaatgtctcgtggggcatttaaatttgtgataattgtacctatattttgtttttttatatatataattaatatatctgacagtgtaagttaagcgtaaactgtttatatcgatcgtattagcagcaccaattaaaaaataaataaaattgaagatcttttttattgtttttgtaattttaactctttggggaaggttacaaaagaattgataacgttgtgttgaaaacattgcattataataaagtaattccacccacttacgaattattttgaaaggagaatcaaaaatgtgtcaattgtcacctgtcatcttatgatgacactctatgagagtgggggcaattgcagcgcgcg

SEQ ID NO: 7572 - DNA, 1426 bp, Diabrotica virgifera
  SmartBlast Evalue=5E-54; Info=Nova n=1 Tax=Aedes aegypti RepID= Q16EY8_AEDAE
taaactttaaattcctttaaaacacgtaaaaattacatatcaataacatgttatatttcaatttttcaaaaataaaatacaaacaaatatattagactgtacgacgtacagtttataaacaaacaatacaatacacatagacgggtctttttaggttatggcatacatttttagatttaacattgatgcaagcttggaacaggtgatgtttggagtgtaaaggaaacggtatcacaacagtaaaacacccgcgaaagacccagtcaaattatatagtacggtaacaggacacaatggtagttttaccattaaaatagacatataatttttaacaaaaatggcaattattagggcaacttaaattcagaagctgaaatcatatagcatctcatttggaagatatatgtattttaatagatagaaagacagattgacagctcacgtcaagctgtcaactgtccaacaagctgtcaactgtcaactcctgtcaaagtaggatctatatactaaataatagaagttttttaggtaacacaagatgtaaataatagatttctagcatttaaattgccctaacgttccggcccatcccaaacaacctactcctcgcaccaagatagtcccttttcgataggtttatcctcattctgcggacttctgttgtttgtacatgttgtaacactatttatactaacgccctcttcaggcattgatcactggattgcgagttgtcctaagccgttgttacgtgccctttttatttcttcttcgcttatgcgctgttcgattagatattgagcagtgttgatggaatgcgggtttcctgtgatggtcacgatacggttgcgggtaccaggggcgaatatgcctttctttgatatttggatgcttgcaccgcttatctgttgaatttctaccaacgatctgccaccgggtccaagaattgctcctacgatgacttctgcaatttcaacatttttcgaatctttagggccacctaaatctgcaggagtaggacttttactcagtacagtcatctgctgacccgttcccaaaccgaaactattattatttaaagaaataggcgccgtagcagctgaggcctgatgccgaaaagggtcgaacgcagattcgtatctttctaaactagatcgtggtgcagcaggattggcagctagacaatctcctaagctaacctgaccaatagctccaaaaactcctgcacctggatttggcgcagctccttccataacactcaaataatttggcaaggttcctggatgggcttgaccaattcctaatccaacggatatgactccatatttggccagaacggcaagtgcagcacaaatttcaacgatttgggaatcggccagaccggatgtcctcaattgcatcttgatatgatccaataactgcgcagtta

SEQ ID NO: 7573 - DNA, 1426 bp, Diabrotica virgifera
  SmartBlast Evalue=1E-149; Info="Mgat2, isoform B n=3 Tax= Drosophila melanogaster RepID=Q59DT4_DROME"
tgtttggacccgataaaactcagactgtgcaatatgtttcctggaatgttgttaaatttatgtgttgatctgtgtgtttattaactgtgctttaagttcaaataccaattctctttttttatgaaggtctggtggctatgccgtacaatgagcagcgggagtagccaaatatggcgtcgtcgcagtggtacagcatggatccgcgctggcctagtaatcttcatcttggtattcatatggatccagatgacgttcctgagcttcgctggttcatcccctcaatattcagaactaaacgatagtaacgcggctattctgagtatggttccagctgttttgcacaagtttctatcacccagaccaaaaaatctttctactattactttcgctaacggcagtttctcaaaatttatttctacagacgttctaaatatatctgaaattaaacgaaatatagcacaatacaacagacaacaaatcgtttacaatgaaaatatatttgaaccgcttcaaaacgactcaattgtcatactagttcaaattcacgacagaatcacttacttgcgccatttaattgtcagcttagcacaagcacctggtatttctcagactcttcttattttctctcatgattactatgacgaggaaatgaataatctagtcagaagcattgatttttgcaaagtggtacaaatattttatccctactccatacaaactcacccatacgaatttccaggagaggatcccggagactgtcctaggaatattaaaaaagacctagctttaagaaaaaaatgtaataatgcactttacccagacgtctatgggcattatagagaagcaaaatttactcaaacaaaacaccattggtggtggaaagcgaatagggtatttagtgacctggaggttaccagaaatcacaccggtctggtagttttactcgaagaggatcactatgttgctgaagactttatccatttgttgcgattgatggaacgaacctacaaagaatcttgtaagcattgtaatatattgtctttgggaacatacttgaaaacatacaattactatgccgattcgaaaaaggtagaaatatcaccatggattagcagtaaacataacatgggaatggcttttaacagatcaacttggatggagattgtagattgtgcatcacatttttgtaaatatgacgactacaattgggattggtcgttacaacatgtatctcaaaactgtttgaaggataaactacatgcaatggtagctcgtgcccccagggttttccatatcggcgaatgtggtgttcatcacaagaagaaagactgtcaggctactgcgatgatatcaaaagttcaacaggtcctcaaaaatgcaaagaaacatttctacccagattatttaatattaacgtactccacag

SEQ ID NO: 7574 - DNA, 1424 bp, Diabrotica virgifera
tccattgtgttgggcttcaaagttgtttgagttttataaattctaggagtcattaaactaaaatatgtctagtgtacaatgtactataaaataataaaaatataagggtatattattactcttactatatccgtccttttttcaattattaaaaaaatgtacttgaatcggtacatggtgtggataaatgttactggtaaagcggttcaagtgcagatgttaactacatattactaatcatttttgtcacagctgttatccacagtgtaactacaactggcacgttgcataatacttaattagtcttcaaaattggtcacaaatctagtatttatttacttaaaaaataatcctgtattaacatgtgtttacacattacagaatactaaaaatagttttgtggtaaaatggttcaagcgcacttaaacccgtttattactatttgtttttacagaatactaaaaatagttttgtggtaaaacggttcaagcgcacggttaaacctgtttactaccaaagcaaactgcaattgttttcagtgaactaaatgtaatggcgatagatggcgactgtagggcgaaatatgcttaaatcgttttaccacaagttctaataccatttaagtatgcgaatctgtacttaggtcagaatttgaaaaaaatgcactaaacccttttacttccaagcccctcaattattgttatcataatactgtgccttagtttttgatagtaatagtgtcactgtcgacgcactgtggaaagttagtagaacttccgaaaaaaaaatattgctgacgcgctcatgtagcctcttacgttgtgtatttgtaggatttaattaattaatgagttaataaaaagtatcgagtacaacaagtaactaattcttcacaaacctacttagcttctttcgtaaaaatactaacaaaacattaaagtacatacgtttccatcatacctgtccattacatgggtaagtcagttctgcaaattatgcgtttctatcctccaataagtgttcatcatcaggtaaatactctgcataatatcgagaaccgaattcccatctgtctttgtatttgttactaaaactaatgattttactgttcgaaaatgtcttgtcgtacggtcgtgctggccgtcaagtctcagttggaaattaacacgtatatcattccgtagaggtagtagaaaaagctgagtaggtagaaggcgagcttgacccatccctctctttggcaccttgtaagtacatctgcgttcatgatgctcgtaggatcgtatattccataacctgacatcacaggacgcgtacgatacctattgatatggtaggcaatcaaaggtatattcaggcaaagggaaaaccattctcccgatgcagcaaacaagatgttgaagaggagatggagcaggtactct

SEQ ID NO: 7575 - DNA, 1426 bp, Diabrotica virgifera
gatatgtcaagtcaccataacaaaaaaatccttttaattttaattggtagttaatttataatcgccaaatatgctttacggaatattatctaatggctttgacaattgaacagtgcgatgtcttattgggaatattagaaaatcacaatgttcgtaattttacgctagaagctctttcaaatgaagtacataagaagtttgaatcttcacatttctttaaagtgggatcttgtattgttacattattacagaataatttattaacagacccagaacaacgtttagcagcaattactctgttatatgaactatatcgtggagaacccattgggaatactccttttgctaatgtatttattcatctactgaatcctccagaacaacaaagcagtgtaggagctccaaagttagaatatcctggacagttgcctagaataactgccccagaaaaacattttatagttcaacttttggctgataaacctaaagatgctctactaaaaaagactgctgcacaaattgttaactcagatgtgccatcacaagtgaatgcagatttttcagctattcagttgactctagcagaaaaacaatcagaattacctcaaacttgtaagacaggaatcccagttgttttatcattaccagagaaaaattataatagctacactgttgacaccacgaaagatgatactataattaaaaaaatagtaacatctgataacgcacccgtcaacaaagtatacaaaccagagtttgtaacattagctccacctttactaaattgtaaagacgaacctgtctggttaaatccaacgacaccaaaagaacatactgttgcctacgatataaccatgtgtgtccctgatacagttggctatgaagcccgacaactcatgaacaaagcttataagtcagctctatcaattcaacaacagcaacagttgcttggtgagctagaagatgatccaaaactagtttaccatattggtttaacacccagaaagttgcctgatcttgtagaaaataaccctttaatagccatagaagttcttctgaagctaatgcaatccaagcaaataacagagtatttctctgttcttgtaaacatggaaatgtcgttacattccatggaagttgttaatcgacttacaacaactgtagatcttcccacagaatttgttcacttatatatatctaattgtatatctacttgcgaaactattaaagatcgatatatgcagaatagattggtgcgattagtttgtgtatttttacaatcgcttataagaaataagataatcaatgttcaagaattattcattgaagtacaggccttctgcatcgaatttagccgtattcgggaggctgcagctttattcaggttgttgaaacagttggagtctggtgaattgggattggtctc

SEQ ID NO: 7576 - DNA, 1425 bp, Diabrotica virgifera
  SmartBlast Evalue=0; Info=U2 small nuclear ribonucleoprotein auxiliary factor 2 isoform 1 n=1 Tax=Bombyx mori RepID=Q1HPI9_ BOMMO
aatctgtcaaaatataatttatatatcgccaaaataattaattattgtgattttttggtgtaaaaagtctttaatctagtaaaaagcaagtttagtaccggaaaaatgggagaagaaaaagattctaaagagagagatcgtagcagggaaagaaatgaaaaggatagaaggaaaagatcacgttctagagagcataggcgtagatccagatcaagaagccgtggaagaaggaggtctcgttctccatctccaagaaataataaacattcttctggttattccagaagacgtaaaccatctctatattgggatgtgcctcctccaggttttgagcacattacacctcttcagtacaaagctatgcaggcagcaggtcagattccagccaatatagttgctgatactcctcaggcagctgtacctgtagtaggatcaaccataacaaggcaggctagacgtctgtatgttggtaatattccatttggggtgactgaagaagaaatgatggaatacttcaaccaacaaatgcacttgagtggtttagcccaagccgctggtaacccagttctggcgtgtcaaataaatctcgacaaaaactttgcatttttggaattcagatctattgatgagacaacacaagctatggcattcgatggtataaactttaaaggtcaaagtttgaaaatcagaagacctcacgattatcagccaatgccaggaatgtctgaaaactccataagtgttccagctggagttattagcactgtagtaccggattccccacacaaaatatttatcggaggtcttcctaattacctcaatgaagaccaggtaaaggaactgcttatgtcttttggacaattgagggctttcaatctcgtgaaggacactgcatttggattaagcaaaggatatgcatttgctgaatacatcgatattacaatgacggaccaggctatagctggtctaaatggtatgcaattgggagataaacgattaattgttcaaagagctagtgttggagctaaaaatactacagtgttgcctgctgttcaaattcaagtgccaggtctcagtttggtcggtgcttcaggacctgcaacggaagtattgtgtcttctgaatatggtcacacctgatgagttaaaagacgaagaagaatatgaagatattcttgaagatatcaaggaagaatgtaataaatatggtgttgtcagaagtattgaaattccgagacccattgatggtgttgaagtaccaggttgtggaaaggtatttgtcgagttcaattctgtgttggattgtcaaaaggcacaacaaactctgaccggaaggaaattcagcaatcgtgtggtggtgacatcatacttcgatccagataaatatcatagacgagagttttaaatttcgacttacaacatttta

SEQ ID NO: 7577 - DNA, 1423 bp, Diabrotica virgifera
  SmartBlast Evalue=1E-137; Info=Transcription elongation factor SPT6 n=2 Tax=Formicidae RepID=E2A0W0_9HYME
acgtttaatctagctcgttcaaagaaaatttctcttacgcatttccttactaatggttctcttgctatttgtaaagctaccatgtgtttagtagcttgcaacacttcttccactgtaggaaatttcggcgatacgaattctttagcgacttctacaggttctatatgttcttgatctacttcgtgcctctgataattatctctcaggttttcggcaaattcttcaggcgttaaaccaaatttcttcgctagaggacccaaacctcctttattacatagtgcatagctgcctgatctattggcgtattttaaggtttcagcttctggttcatcatcgtcaatttcctcaggctcttcaggaatttcagcaccttcttcactttcagcgatgagcttaagtctagcctcctttctttcctgtcttctcctttctctttctttgactctccacgcggcatgcatggctggcaaatctgcagcataatataaaatgaaatgattgtgaacgtcatttaactcttcggcggtttgaacatttttcaatcgctcaatgtcggactcagtcataatacgaaggttgtctggaattggtgcatctggatctttcattatgtggtcagtttgatatgacctcattttttcaaaaagcttcaagaggttttctttgcgtgttttcaattggcaccactttgcatcgtatttatatactttccacaaatcgttaatattaagttccggttgaacatactcctttctataaaaagcaataaacggtacttctaattgttgatttcttataaaatctaatgcttttctgatttttccgatggcatgatgagtcttctttaatttctctcttgcctctgatgataaatgagaatccacattggaaacagttctgttacaaaacgcttgcctgtaaatccattctgcttcatcatcaagttcagttgagtcatccggaacagcggtgattggaacatcacgaagttgcattctttcgggaatatcagtgtttcggatttcattatcgagatcggtaaagaaccctcttttaagttcactaggttcatacacttcaaaaatggatttcttcgtcggttttttctttgaagtctttttaggccgtttccttttctctacatcatcttcctcgtattcgtcatcctcctcctcttcatcttcgtaatcatcttcatcgtatttactaaattcatcataatcaaaatcgacaccgaaggtttcttgagcctcttggagagcggcatcagtaaatattggttttttcttcttcttcttttcagctatcggtctaccgtcatcgtcaactataaaatcatcggcatccgagtactccccttcctcttcttcctcgcctacaccataagtttcttgttcgacggcaggtctgtgacttcgttctg

SEQ ID NO: 7578 - DNA, 1425 bp, Diabrotica virgifera
  SmartBlast Evalue=1E-104; Info="Vacuolar ATP synthase subunit D, putative n=1 Tax=Pediculus humanus corporis RepID=E0W3E9_PEDHC"
gaacagagttttatttctaaccaacaatttacaggccatgtatacatttgatgaaaaacaatttagagttttaaagaatttaaaacgaataaactattttatctgttcaaagtatattaacaagtatttacattatctagtgtccatatcaataaagcattttccattgaaaagctgctttctctaaaatctacaagttcatagtgtcacgtacaagaatttcaatcaaaacttttataatactattctggaatatacgttcaatattaagaaaaatatttggtacctttttaattttcgcaagtaatattcacttcaaattctattgcacgatgtgttgaatattgtattaaaatcctaaaaactggagttaataaaaagtaggaagttatttatataggaaatatccgggttcgtatatcttttactattgcaaggcataagaataaaaaccagttaaaaataaagatatatcttaaaaatgtattaattaatgcgaaaaataaacagttaccgtctaaaaacaagttagcgttatatatttattcatatgtacagaaccacacttcaggctgtttgatgttctagaaaagtagatcttcatcgccctcatccaaaagcatgtttgcctgggactctttaagtagcccagcttggagaagagcttgtttttgtttctcggcctttgctctgctgatcttctttttgtcctggatcttctttaatctatagaactcctctctttctaactcgtccagttcggatatgatgtaagccaaagtacgctctattcttggaatgataacatgttcaatggcattgactcttctgtttgttattttgattacatcatcaagagttacaaaagaagtttgcaaagaggctaattcaaccaacagtttaacagcactttgataattcttcttgagttttgtcaattgttgacctcccctagccaaaccagccaactcatatgtatctgtaccatcttggtagcattcaaacactggtaaagtaacaccagcaacgttgtctttcttagttcttatttttatttgagccttggtgacattttgaagaacaacttgattgaagtcaccagttgcaaactttgcttcagctaaagaaaaggcagcttctttcattacttcacccatgagagttttggtctcaataattttgttcaaaatcattctaaatctcatttgtaaagcatcagctttcttctttaataaactatgtcccttttgggctccctttagcctggatttcatcatcatttgggctcctctagatggaaaaatcatcaatctgtcttttgaagccattcttgagatttagaataaaatatttaatatccaaagtgtgttgaatataggactggaacaaaaagtaaaaagtcagctgacaccaacagcacctgac

SEQ ID NO: 7579 - DNA, 1424 bp, Diabrotica virgifera
  SmartBlast Evalue=1E-173; Info= "Phosphoribosylformylglycinamidine synthase, putative n=1 Tax= Pediculus humanus corporis RepID=E0V9E3_PEDHC"
tcccacacattgctgctgagctatcaaacctgtaacacaccgatctactttgtttgttaagtaccgcttgcttccaatagatggcaaccttaatactctcagcagagattggtagatcgaaagggcttttgggaattctattggtttactggctactttgtgcctgtttagcttaaagaccttctgaggcatctttcctaatacatgctccaattccaaattaaacggtgtaacagccttgctttcgtctaaagccagaactactcttcctgtatcagttacttcacctacaacgttaacagggcatctttctcttgcacaaatactcttaagacgaggaagatcttcttttttacacaacaacgcattattttcttgatattcggctccccacaactcaagaacgtttattgtcggatcacctaaatcaaatttattggcgtatataattcctcctactggttctactaattctttcaaaacatttccattgcctccagctccttggtcatgaatactgacgatagggtttttggaacctagttccaagcaagcacgtacgactctgttcaatttgttttccatttcggcatcacctctttgtacagcattaaagtctaactctactttgttgtccccttgtacctcgactgaactagcagatcctccacctacaccaattctgtatacaggtcctccaattttgatgatttggtgtcctaatttaggtggcagcttctcagtcatatcggcttccatgctgccaatacctccactaaacatgataggtttaatccattcttttctctctccagccgcgtcaacaagaccaaaggaccgtacgaagccggaaatcaagggttcaccgaacttgttaccataatccgaggctccgttactggcttcaactagaacttctaaaggtggagcaaagtttgatggataagagaagtttttgtcttcccatggtagatcataatctggaatctgaagattgcctacagaataaccagcagtaccagctatgcaataaccaccccttcccacactttgcacatccctaattcttcctccagttcctgtagtggctccactgaaaggagctacaccagtcgggaaattgtgagtttctgcagtgaaaataagatgagattctactggtacttgcttaagctcactgagagaacctgctgttacaggccttaagcttcggtgtaagaatcccttaattgcactactattatcactgaattttataacattgttgggatttgtgtgttcttgagtttcaataatcatatctatcagtgattgcttatgctctacaccatcaataaccattttcccttaaaaaaccaatgtctactgtgttcactgttagattgagccaagtcaaagcattcaacattagtgggattcctctt

SEQ ID NO: 7580 - DNA, 1423 bp, Diabrotica virgifera
ctaatccaggaacctctagtttgtacaaagattttcccttcactttctctaatgtagatgtggtatcataatttctaatatctattctgaactgattttcttcaatatgcaatagtttttcaaggctgataaaatagttggtttcgtcaatgccgggagtaaaatccaactcccgactaaattttttgtaatgcgtaggtgctctcataccaaattctggatttcttgttaatagttttttaaatatctcttctaatttatcgggtattttaaaatgcttcaatggtaacttctcagtgtagtgtgatttaaactcttctagcttttgtcctggcacaatattatctttcatattagaatatattgaataagcatctggtattggactaacataatttttcgaatttgactttaggaaagaaaattcagagactgactccacttctattgtaattagatgaaaactttttctctttctccgagtaagtaataaaatgggatatacaagtgattcgctgtgttcgaaataagcccttatagtgatatctactgttgccgatggttccaatgggattcctttcacaaattctttctgaaggctcacgtgtttctgtaaagtgttaatttggataatctttagaatctcaatttttttgttcgtaacgttttggatacgtagcgtggtttgcatatctgttttcactggaacttgtagtttttgctctgtatattcttcttcattacatattaacactgctttgatttcattgttgttcttgaaaattgacttgtttttaacgtaactcaaacgaatttgatgatccatccactccagatggcttttatattcatctggattattaaatataacattgcacaatgaacaattctggtcattgatataggtttgctcattaaatggctccttattcagagagttttctccgagttgaacagcaaaatagtttatccattgttcgttaaatttaattgtttgcgacgtatacgaattgacataccaatatttccatagctccttcttaaatttgaaaaaagatagctttccacgttgtctgtacttctcgaaataaaactcacgtgcagtttctttctgagccgtataattttggataatattttcttttaaaagatctttaacatagtcctctaaaacggataatgccataattaaatcagcaagcaacttacaacaataataattctaactccctggtttattatagaacagaccgtaatataaaatatagttgatagttgctaagcacctaaaccacagctgaaataatcacttcagtaatcagttcagttatctgagacaaactgcagtactgcagaggcagagcagagcacaatattcttattatatggatggattttctattcgaacatcgatcggtaaaag

SEQ ID NO: 7581 - DNA, 1418 bp, Diabrotica virgifera
  SmartBlast Evalue=1E-73; Info=CG3277 n=4 Tax=melanogaster subgroup RepID=Q8IQ00_DROME
ctcaaattcaaaaatattatcaggtactctctggctcttgtacaggagggaaaatgtacgtcgggctcaacgtattaaagtctacgtatatcttcttcttctttgtatcaaggtgctctacgatatcgctaaagtttggtctgtcgtccggtttctcgctccagcatttcatcattaacttatataggtcgtccgtacacaccttaggtctttctagtcttttaccgagcttaagatcgtacagcacgaaattgttgtgagtcttgggatacgggaaggcacctaatgttccaatttcccataaaactacagcaaacgaccatacgtcactcttgttggtacaaattttctcttcgatcgcttcgatggccatccacctgagaggtaatttttgaccttttttgctgacataagtacccactctcgataatccaaaatcggatatctttagaaccttattgttgcccattagaatatttctagctgctaaatctctgtgtgttactttaattttttctaaatactccataccgctggcgatttgtagagcaaattgctgtaattcgtcgttatctagaagaggatcaattctttgaacatacccagctgcattaatacattctttaatttctggtgttggcggcaaagtagttacttcagtatcagcacacgacaacaaagcgcttgaagttatagaagtaggtgaatgcggatcctgcgacttctcagaaatgcgtcgaagtttcccaagtgataaatatttggacatatattccatgtttacagcattttgttctggtctgtaaaatgacccgtcctctaataggtcgtcaggagttatgtaagaattctctgtagtatcgaacactacccttgtataatttaatttatcggagtccatctttttatttggatcccagttttctgctgtgtcatcagcaaagaaaaaccgactttttcttttagaccatttttctcttaacttaagaagatagtcttttagtgatccattaggagctaactccagaatcatcatgtacggctgatccattgtcacgcaacccaacagttggactacatgtttatggttgccaacttttttcataatttttatttcattttttagatcttgcttttcttcgtcggatgcaccttcttttaactgtttaatagctacttttgtatatccaggattgttgttaagttcgaaagcttctccataatacactattccaaacgcaccttcgccaagtactcctctagcaattaccttatttcttggaaattcgaatttgtcgtatttatgtacattcattacaaattccaatggtgtatactgactatttgttacttcttctttgagaatagtgtgagataacggactggtggatttgaagatactaccaaatttacttcat

SEQ ID NO: 7582 - DNA, 1423 bp, Diabrotica virgifera
  SmartBlast Evalue=3E-72; Info=Heparan-alpha-glucosaminide N- acetyltransferase n=1 Tax=Harpegnathos saltator RepID=E2BSR6_ 9HYME
gtctttcggttgtgtgacttgtatgatataagaatcattcctccttggactccaagaaaagtgtgaaatattgtagttagacatcctaatactccttctggatcaaacggtttggattcgtaagttttataaatggtaggattttggtatctatggtttccgagaattaacccatcaatgtatcccgtggctccccctatgcagtttttgtaggaactgtttttatgcaggccacctggacccatataacccctaggacatcctggagctgctacagcaaatattaatattgtatgtaatattaacacaccaagggctagtaaccaggcttgataaattctgtttatatcattaaagtgtttcctccacgaactttcctctttttcatcgttttgttttctctccattaaatatactaaagatacagcggcaacaaaatatccaattcctagtctttgtaaaactccaaatattcgaagatagttaatatcggaaccaccatttaagaatactcccaagcagaatagttttagagacctctttgtaatagtccagatcatatccctgttacttttatttttcttaaaattcgaaaccatccctatgggtatacatgctcccataatccacaagaaagatggaaataccaagtcagcggcatgtaggccgttccaacgcgcatgttcgatcacggtatagccaccttgtccataattggcgaatatcataaaaagtatggttaaacctctataagcatccaacgatgaaattctttctttctttggagtagcggaggaagtgatttctgcgttggtcctatcaatggtcttctttgatacaaattttttccaaagtcggcagctggcataaatcaatataaatattgcagcatatattaaaattattgttaaaattggtgcatatatattaacaggttcctttaatgtttccaagaaacacccagacttattaacatctacattgtatacaccgaactctcccagttcttcttttatatcacatataacattatccttttgatcttgcggaagatactccgtccgttctgtggccaatctgaaggtaacatcggtactaaatatattcttagtgagatcgttgtcacattctttagcagaacccttgcaatagtttgttattaaatacggacactgatagcattctttgttgagtgtatataaatacacgtttttataatcagcaacttcgatattcaaataatattgatccaaagttaaattggctaaactatatcctttgtagtcgctgacgtcatagtcatctattaaacaccatttcattttcttagactacctcaatttatggttaaaatacttcgaaacatacgaaactcaaattgaacagttatattacagatcaatattgaatccgttgttttaat

SEQ ID NO: 7583 - DNA, 1421 bp, Diabrotica virgifera
tcgttatactgtaaacactctcgtttcgatttagcagcacaggatgctttaattttctttctttaaacttaagctcacagaagaagcctttctcttttggaccgcaaaactttgcttcccatgttacacgatcatcgaaatatttgacataggtgtagaaaacacctttttcttcattcaccagaaaagcttccggaattgtgtgaaatgtcacaataaacgattcgaggattttcttggtaccgtgtatcagcttaaaatgcttacatatatgcttgaactggccttcgaatgcgcagccttcaataggacactgatagtcgcagaaggtacagttgatttcgtggtcttttagttctgtgctcagaagtttttgtggacagccatactttttgtatttacagtgaaggagaaacctgccaaaattttcttcaaggctactgtttctatacccacaatcacacagaaatatcggaggtcttatactgtttccgcattggggacatgttgtataagtgtctccatcaatctcagagattgcccccaagctcagcgtacttttagctcgtttaaatgtcctatttttcaaatctgataaggtaatagtttgtgctctgctcaaagatactccctttttgggatggtattcgttataactgtatttcctattaggcatatatggtaatgtattttccatagtctccacttcctcaaatatattatcaaattcgtcctcattggtgttctcctcttcaacttgttgatttaatggaacaacctcaatgatatcttctaataagttcttgtttataataaaagtacaatctaagaagttaacttcacccaaatctttttctatttgttctatattaactacaatagttccatcaggctttactgctatatattttggatggcaaagctcataatttacacgtaccaatatattgtagttgatcgcttttgctatttgggctggacctaaaaaccgtagcctcacctctaatcgtcttctttcttcaagaaccgtttgagctaaatatatttcttcttctacaaacaggagatggttttctgatggttcgtgaaggtcaatgtcaaaattgttatggaagtgcagtaggtcttcgtggttttcttcgaagtggtgaaggatttcttccgatcggccttcccaaggacaggagtatttcttgtctgcagggcaaaggtatattaacatttcgttaaattgttaatttgtcgtaggtatttacaccaaaacgtctgcgttgaacttgtattagattagaaaatacaatttgagcatttcctgataacgaattttatgattacacctggcgggaccaggagggatagataaaatgtatctacgtttacctacaattaggcacacacgttaatgtagtgtggagggtatg

SEQ ID NO: 7584 - DNA, 1420 bp, Diabrotica virgifera
gactagcagtaagctcctggaatatttggtctattcccaccaatggttccatggtaagaaaactgatagaagtatacatcactaaattgtgactgtagttgagcgtggcggattatacctcttgtaaaagatgtatcactgaaatacctaacagctgctccaggattatcttggagtaatccttctgtgtatatatctcttattgcttctcccgcttgtttcttaagaactgggtcagatagatgcatgtttctattaactaaggtcgtaacatcatgctcgtattgtctgacaattgacaaaaagttgtttgctgccgctcttgcaatggattcttcagagcatattccaatcattaaaggaactttgttcatatgcccctttgaaatagcatcatactgatattctgtaataaatgcgttctgatgttcaggttcgattacgggagtaaaccagaatccctggacaatctgctcattgccaacagcttgcttaaagctacttgccactgtattaatctctgcagctgatttgctccttaagagatttaataactcttgtgaagagctggtatttttaaaactagggtctaagccactagcaagtttataggccatattacgatgttccctttggtacgcccacgggcacaaaatggaaccactttgagcaatggcggctctaaatagcccttcagactgcttactcatcaaatgaaaggttactgatgcagctccggcactttgtccaaaaatggttactttacttgggtctccgccgaaatataggatattatcttttacccatttaagcgccaacagttggtctttgagtccataattgccagctatggttgtatctccagttgtaagaaagccaaaaggcccaacacgatagttgatagtcacaacaattatatcatgctccatcaagtaatgcggtccaaagaagtcgaagtttcctgcgccatttacaaatcctcccccaaagaagaaaaacattacaggcagtgaactgtatggatatggttctcttggagtgtatacatttaagtaaagacagtcttcgttttccagttcctcaagatttggtacgttgtacatattgctctgctggtagcatatttttgtattgtgtgtagcgtcaagtattccgtcccatttttctgctggttcgggatccgcgaaacgtagatccccaattggtggttttccaaaaggtatttgctgaaaagcatagaatgttgttttggtcttcctcagtgagtattcttttcttccccgtatctctccatttggaatttgaactacgatgttttcagcatccacaaagattgtcactaaaatttgaaatagaaataatataacaaacattatttttacggattaatccttaaacatcaaatacaaactgcgagttc

SEQ ID NO: 7585 - DNA, 1421 bp, Diabrotica virgifera
  SmartBlast Evalue=3E-78; Info="Protein Kr-H2, putative n=1 Tax= Pediculus humanus corporis RepID=E0VDR3_PEDHC"
agttcatctcatcaagttcttgttttgtctcgaggagttgattcgttttgttggcagtacattttataattattggagtcggaatatttaattaatgtgattagaaagtgtatagttttagaactagccatcacttacttaaatttctttaatagactcattgttttaatatagtttggtcagttagttaataaagtgtaattaaaaatgagtgaccccacaaatcctactggactacctagaagtttaaattatgaagcattaaaggctcatataatatcgcacaaaataaattgcggcctatggttaattagggtcataggcattctctgctccatagcttacttcattccaatttttggaaatccttacaactactattacaaagtactcctagcaaatgcagctatcagcgcattgagattacatcaaaggataggcagagtgcaattcacgagacaatttgctgcagaattactttcagaagatagttgtcactatcttttctattcgttgatatttttatacgtatcgccagtatcattggtactcgtaccaattatcctcttctgcgtactccattcagctagttattcactcacattgttagatacattaggtcaaaattcatggtggggcgcaagattactgatttctctagtagaattccagtcccttaacattctcaaagcagttgcatttacagaaatctttttgatgccttacacagtcctattaatattgctgggtagagccagtttgttgacaccattcatatactaccacttcttgacgcagagatacacctcgagaagaaacccctacacaagaaacatgttcagagaactgcgtgttctgttcgagaacaccgcagccaagcccagcatgccttcgtttgttaagcaattccttctgttaattgtcaacttcaccacaaaacttgctccagtacaaattcagatgccaccaaatcagcaacagcatcaacagtagaacatagataatttacttcattattagtgtaaaagtattgtatagttactgggaaatgttttgagtcacaatcaatggaatatttgttaattatgttttttaataaaacgagttacgaaagttttctacacaatgttaccaaactattttatttcctactaaattttactaatacatatttataattctcctaaagaggtccaatacaaaagaagaacgacaattttggaaaagtgacggtttatttcaacatagtcgctttgtagcttgataaatttgacccactgttgctattctttaaaccgtgtgaaaagtaggccttagtgacagcgataacctcctgatttgacgcatgggaccaaatctggagaatatagtggatggggcagcagttcataaccaaaatggccgtggcgatagatagcgga

SEQ ID NO: 7586 - DNA, 1418 bp, Diabrotica virgifera
caactgaataagggtggtatacatttttattttatgttcgtattttattgcgtattgttgtttcattgcccatatttccgctccatatatattcagcactatgctctgaaagatcctttgttgttctctttggtagagtgttgttccgtatcacttcatggagtgctttcgtgactcgttttccccgtgctattttcatttctacatcctgcatacaagtaccatctcggcttatcattggtcctaaatacttaaaaagtcttaccagttctaatagtattctaaacttacgatcaaatctgcaagctctgatccaatacataagtattcagtcttttatatatttatcttagctcccaatagctcatagtgtttctttaattttcttatcatatattccatgtcctccgtggcttgtgcacaaatgagttggtcatcggcgaaaagtagtgaatgtaatatatattctcttgtactagtattgttccacattttctataccatcttttcaaacatttttctgattatctatttcataactttaaatgatttgtaagattgatgatttgatttttttgaagatagtgccagacgtaagtgtttctttatctaatatgtaatgtgtatttaatatcaatgtcaagtgccaactgtaaacttttcttaatgtcaaacttttatataatgaacaaggaaaaataatcttatatattacgtgcaataattgtagacggatagtttatttgtgatcaacatttataaaattgtcgtagggttcaatttttatcatcaggactgtggtgatctttgcagtcgtgaggtagttggtggttttgatgatacgaattgaattctattttatattggtgtatttttagtcaatttagtggaacattccttatagttaatactcttaaccttcaaggctataatttctattgatttttgcttaatatatacgttttagaggtaaattttagattgtttattgtattttgttactgaacaacatatacgcactatctgggtaacgatatgatccatgtttagtagatttttttcaatttattctacatttacccatgacggaaaattgtattatatgttgcatatctaatggctaatggcgccctacagtagcttggaagctccttaaaaaagagcaagaaaacacactcaatttgttaaaatatcaatattatttactatctttaaggccaattaatccaagtttcaattgaaaatacatttattttgaaaacttcggaaatagaaacctattttcaatgaaatttaggttaattccctaaacttaagatggtagacaatattaaaatgtctgaagaaaatagcttgagaacaatatttaaaatactaataataaataacgtgcaataaatcgtgaagaaacgcattta

SEQ ID NO: 7587 - DNA, 1422 bp, Diabrotica virgifera
  SmartBlast Evalue=1E-44; Info=Ryanodine receptor-like protein n= 1 Tax=Phlebotomus papatasi RepID=A8C9Z3_PHLPP
ctgtaaagataaactaattatctctattgactcacctcattttatacgtagcaggtgaaaatacaccattgtagtgaaaattattattagttcgatttataataagttcgattttttacgaaaatgacaagtatcgagactgtggggaccattgtcctgaaattgctgaagttggtgatcaatttgatatgtctcatcttgtaccgaaccggatatcaaggctacttcttgggagtaggaggaacctggaatctaaacgaagaaaaaaatcccgatgcagaaattgtggcttccggcgtattcgtaggatttatgatttacacattcgtctcgctgatcagcctttgcttcgctagtggagatcacaaaacgacattcactgatattctgatgaatatagtagggatttttatgtggatagctgttggagctacagctcttcattattggcttgggtacttgtccgaatacaaatacacgacaatagattctgaacgacaagttggtttggcgttaggagcgatgtgtataataaatggagcggtctatcttgtagacggagtactttccgcaatctttatcctcaaagccaaaatgcaataactttcatcgtaatataaatatatttatttaggttatatactttactttaagcagctcaagtataccgtgacatcccactcatacatcaatgtctataattgtttcatgacaaatcatttaatagtattttaaagcattcattcgttcaacaccttttttacatttttcaagtattatatcaatctttttaaagaattgtttggctattaaccggattcaatccatatagttccgtaaaataattatgcgttttaataattaatgtaattaaaaatagttagtatatttttgaaataaaacaactgccgcaacaaattagggagaatacttttgtctcctgtagttttatctgttatccaaagttcgattaaattgtttcaatttaatgtatttttccatataacgcaccaaatagtcttaaaaaaatagtgcctgttactacctaatactttctacgtatgccttatggttagtagtggctccaataggtgcattttacatttttcatgaaaattcaattcacattattttcctcccgttctcttcatattatatttatttattctttaatatagttttgggcgtgaagcccagtaaatacctatatgaagtatattgatggaactgccatgcttgatgggttttgtctgcaattaaaataaaaccaaaacaaacatttgtacagtattgtaaaattcacaatatttaggtagatgtttaaaatttaatattttttaagagtttgcatttatgttaatcgtagttaagtttttataaaaatttagtagttgtgagaaataaaataagtaaaagagaaaa

SEQ ID NO: 7588 - DNA, 1412 bp, Diabrotica virgifera
  SmartBlast Evalue=2E-32; Info=Mevalonate kinase n=1 Tax= Camponotus floridanus RepID=E2AQ72_9HYME
acctcctgtcagctttccactgagtaccgtgttcagccaaaatgtcaactattttgttaagcttgttatgaccaactcctattgaattcagaagattatgatttatagtaaagagttctgctaaactttcgtatatttctgtagtgtcgtctgtgtctgataattgggataactcagatattttatctacaactgtagtcgcaacttgatccatagactccaacagatgatccaataccatgggatacttcctccggtactcagctaccttcgcgaccattttcttggtttcccttggtacattagagttaatcaacagcaatttgagaggacaagtggcttcaatcaatttcggcaaggaaccttttctatattccacaacagatccaaacgtacaaacggtattgtcacacctgatggtgttccgtgtatgattttttctgctctgtatgaccactggcaaatccaatctaagtcttgtttattaaactcgattaggttaagttcccccctgattgatttataaccttcaattgagaaggattcctctggtattttttgatttaattagctgtagcagggctgctgaaaggcatacagtaaaagaagctgaactgcctaatcctgcacctgcatttaattcggtagacgctgtaaccagaagagatgtcaattgaacactgctggatcccaaaataccaataagcaaataaaagaacgcctttactgccaaagtttcggttgcagacaaatctggctgtgtaaatttgataaaattatccactttatttagcaaatcttccgggtctaagggaatgagatggttaaaaaaaaacttctttgattttctgtatgtcatattgaaaggtaaactttaatgcatcaaactggaccactaatgtattgggaagatctatttcgtttatttcaactttggatctaaggcctatacttgctgccaacgccaattttccataaactactgagtgttctccatttaaaatcactttccctggagccgacacatgtattttacggccaacaaatttgaagttggagagatcgaggggataattattggtcattttatttttgctgttgttcctgccactgttctggtgttaacgttttttgggaaaaagcgtgtatggtctttaattcttcttccaaaacagaattaaccaaccgatgccgtgccagtaatggttttcccttaaacttttcagaaacgattacacaagcgaactttccgccacatccatttgattggtctactacttgcacataagaagcatccagttcttttaacaatttattcttcaggtaattttcagtatacgtcattacgagtaccggtaaataaaattgtgttaaatattttcttgtcttatggtatggcactttagaaactt

SEQ ID NO: 7589 - DNA, 1421 bp, Diabrotica virgifera
  SmartBlast Evalue=8E-55; Info=Nuclear receptor coactivator 5 n= 1 Tax=Camponotus floridanus RepID=E1ZW91_9HYME
ggcggttctggagctggcggtgcttcagatttgtttagtatgttcatgatgcggttctgcaactcagtttgcttgctgtctccctcttcgttgggcgttataccttcttcgagttcatactcgtgctgtagtactctacgttcttttagatacttgatgagcttgtcatattggagtgagtagatctggcggttttccgacagtagatttaaaagaatttgcatttggctgggatgtctatccagcaaggtcatttgagattggtctgtaggaatgcgctcacccttcatgtaggtttcaaaatctcttgaaatcaatatcatggcatcttcaataggcatattcctgtgttcttgcggaacgccgtgaagtatattaagagtgaggctcctacgttcttcatttacaggcatgatcagaatggcgtacaggcatcctctactcgagatgtttgccaagacttttcctatcggtacatcttcattcggaaacagcagatcaacgattagaccttgtgttttcagtttctgttctataaattcggcgtattctgtaagctgttttgccactacaatgatttcacaatcattcttgtctgctggagctggtggaggttcaaacataggagcatgcatataagggtcatttcttgtaggtggctggaagtccatatccctcatatacgcatctctgtctctgttatctctatatgaatctattttaggtggtggctcaaatctgccaccaaatctgttgtagtcctgatctctggatttatctctgttccctccgtctctcctacctcctctgttaaaacctttgtcttcattatgcctttgtatggctggtggtttaatatttggtctgtcatcctcaggaaagtcatcaccagattcttgatcaaaatctggttcatctgacttcaaattttgtggaggtggtggtggcgtcttttgtggaataggttttgggggtacattttgaatcggcgatctttgaggaggtccttggttaggtctctgttgattttgattcggttttgacttgtccatagcttgttttacaatgatttttctgccacacaacatcgttccattttctcctttaattgctgcttgtgcttcattctctgattcgaattggataaaggcaaagccagtgtttaaagacaaaccggcaatagtaccgtgtggtttgaacttttcttccagatcattagcaataacagtttttgctaaacctccaatataaatgcggcatgctgcagtagctgggtttttcataaattgcttgtcagttcgatacattttaaatgcatgaaatattgtatattacttagtaactctttacttgtatcttaattaattatttaacattaatgcaaaaacatttatcaacatgaaaactgaaaagaaggaagc

SEQ ID NO: 7590 - DNA, 1421 bp, Diabrotica virgifera
  SmartBlast Evalue=1E-31; Info=Transposase n=1 Tax=Agrilus planipennis RepID=D2WLV0_AGRPL
gatatttagctcttatacagtatgtctgcgtaactaggaacgatatgggaaactttttattatcaattttacgaaaaaaaagttattcttcatagaatgttctgcatagtctaaaaatctaaaactcaaccatcagatatcgaattttatcaattttataggaggtatgtcaaaaatatgaatttcgctaaagagtaaagtacctttatatttcagaatataaaaaattgttattatgaaaagttgtttcgaattaaaaactatgttttaatatgcaactaaatcctcccgaagcacccaattctggagtagaactttttgatatgttgtttattaaacatttcttaatcaaattacaaaaagttctatcttgtttgattttttccgaagtctatttcctattgactcccctatcgctgggttatgttggttcgtaaatttagttgcgaaattagacagcgaatcttggaatagaagtaacatttgcattatatttatttgtttttcagatcgaatactatgcatactagggcggtccagtaagtacttagccttcaaaagtaaaacgaacattttggaatagtggcgatttatttctgaacctagtctcttattcgctcgattcctttgactcagcgatacctcatcttctttaacccaactgaaaaatacgttttctcgaggtttgcaaattaggcttccgtggcggtgatggggcgatgaactctttattcgactaaattttctgcccagcgagtgactttcaagtttggaaacaaatagaagtcgtacaggcccaaatctggagaatacgttggatggatcagtttgtagccaaattcgaccaatttggccatggcgatggcggaggtgtgagctggagcgttgtcatggtggaagagtatttgtttccaattggaaattcggcgttgaatcgggctgataatgtggcatagtaaggctctgtgatcgttttgcccttttccaggaattagatatagatcacaccttgtgaatcccagaaaattgtggtcatcgccttttcggccgattggacagtcttcgctctccttggagcacgttcgcgggatgacgatgacgtccactctatttactgtcccttggactctgtgtatatcagtcaaaacatgtttcgtcgacggttatgaaacaacgtagaaattcatttggattactcttaaacatcatcagacactgcttgaagtggtctcatggttgcgtttactattgttagaaaatgcggcagccatcgcgccgacaactatgcccaaaattttatgcaggatatgatcaacgagatcttttgagatgcctactgtctcagctatctcacgcaccttcaatcggcggtctatgaatacgatatcgtggatttctttaacgttatcctcagtggtagc

SEQ ID NO: 7591 - DNA, 1416 bp, Diabrotica virgifera
  SmartBlast Evalue=1E-117; Info=Glutathione synthetase n=1 Tax= Culex quinquefasciatus RepID=B0WSC1_CULQU
cataattttattaggggtacatattaaaaccccataaataccgatttcagacacgaggttaaccagaggcggtgggttgggtgctcctggtaagatcatgtatccttgggataaaggcggaaatattctttccataagtatataactagttcgttctttattgtctttaattttaaatagaagttctttgatatcattgtcgtagtaattataaccaccaccttccctttgcggtttcaatacatacttctcaggttgctctaaagctaactgaacagttctttctccagcttcatcaaattcaagaccatgtatgttaacaaatacttctcttactgcttgaacttttttggtctccgttaaaaataattctaaaacacctggtttcgttaactcttgttgaagtttcttttggccgattagatgatactttacatctgggcactttatggccatagatcgttcgatcattagtctagcatcccactcactttctgttgggtaatggctaggagcataaccttctctgaagtatactacagctataacagtattatctacaattaattcttttgtatcactcagacagccttttgtacttatttcaccaaacgttcttctaactacttttgtttgtggacttagtcgctttatttcaaattcaactaatctttgatcagttatattgtgagttatatccatgacaagaaataatacagcagcatttggattagcatacattttccaagcatctatgaaaccttgagctaaattggtaagtgcgttgttttcaggaagtattttttactttatcataatatcctagttcctccagaatatatctatcatactgagttaatattgttgataaacttccaaagcttgcggcgatagtgttgaattcaacttgcttcaaattgttgcttgataaactatgcattaaataatctgaacgtagatgtaacatgctgattttctgtgcacgtccttctgtttcaacagtttcataaatcttgtataatcgtgcagtaaaatcatctgcttctataacatgtctaaaacactgtttaataaatgcatcgttgtttgttatattgtgtaaaagttcgtgtaaaatacattgcagatttactactttgttaaattcatttcgtgggaatcctgaaggaaataaaataaatggtgatatttgcactgtatcttcattaaaattggccttggatctcatagaaacgccatgcattatggtccattcttttgctttagtaacaatttctttcagttcgtcttcaggaaatggtattggaacacaaccaggtaatatttcaatatggttagccattatttaacttattctttagaactttagacactaaaaatacaactgtttaaaactgcaactagtttataaaaatt

SEQ ID NO: 7592 - DNA, 1417 bp, Diabrotica virgifera
  SmartBlast Evalue=2E-99; Info="Phosphatidate cytidylyltransferase, photoreceptor-specific n=1 Tax=Camponotus floridanus RepID=E2AG77_9HYME"
attatattccaatggtcttgcttataaaacgcttccaaataatacgactaaaatacaaaaaagtaaaaggtgatttttcttgtgaggttcttatgtgaaaatgaaatcgaagtgaagtgacattggacattgaacgggtaattccgtagttaaaataaatatggagactgacaaacttcccgctgaaaccaagccatcagtccaagaatctccaccaaaaccaaaagtcggtaccggtcttaaaagaacgatcactgggctgtcaatgttagcagggtttggtctagtagtatacggcggagtcccatgcattacactcactggattttttatccaattcaaatgtttccaggaaatcatcaaaatcgcctaccaaatcaaaaaaattcctgatgttccattctttaggacaatcaattggtattttgtaattacagctaattatatactttttggagaactattagctaaatatactcaagtatttattaagaagtactatcttctacaagtacttgccaggtaccataggtttatgtcgtttatttggtactttattggtatcatttggtttctgactatgttaaagaagaaacttatacgtcagcaatttagtctattattttggacacatttccttgttatgattgttagtgtgcagttgtacatgacgtaccaaaacatgtatgaaggtctgatttggttaataattccattatggttagttatacttaatgatgtatttgcttatgtgtttggaaaattttttggtaagacacctttaataagtctttcccccaataaaacattagaaggctttgtacttggaggtcttagtactttcatactaggcagtatattagcatggattttttgtcacttccaatatttagtttgtccaataaagtatatagaggttgaggataatattgttgcttctacaaattgtaccaggagctacctttttgaaccaagtccttattacataggaaatacaggcttatcaatcaattattaccccttcattcagcattccttatttatgtctgtgttcgctagtattatagctccatttggaggatttgcagcatctggattcaaaagagccaataaagttaaggactttggtgatctcattccaggccatgggggcattatggacagattcgactgccaatttttgatgatgacttttgtcaatgtgtatataagtacgtttattaaaacaccagacgtggatttggtgtttcagcaaatattgaatctaaacgaaaatgcgcagttggagttttataaattgctgaaagattctttacatgaaagacttttagatagatgatttgtgataaatatttttctatatttttagagcatgtaaagttgttgttaaattatatttttataataaaagattacc

SEQ ID NO: 7593 - DNA, 1402 bp, Diabrotica virgifera
  SmartBlast Evalue=5E-12; Info=Gap-Pol polyprotein n=1 Tax= Schistosoma japonicum RepID=C7C1Z0_SCHJA
ggaccgaacaaggaaaggctgtttccttagactgctgctttacgaggtgatgctgcagatatattaaggtcaattcctaagggtcaagaaaattgttaccagaccttgttcactcgtctagaaaaacgctatggagttgcccatctacaacaagtatacaaagcacaactgcgaagtagaagtcaacgagcaagtgagaatctgcaagaatttgaagcagatgtggctcgtgtggtgcggttggcttatccagaggtgccagacagcgttttagaagaaattgcagtagataccttcgtcaatgggctgaaagatagtgaactacagaaagctttacgactagcaagaccgaaagttttagatgaagcacttgctattgcattggaacacgaaacggctagtcaaacttcacgaagccatagagtaagaaccattgaagaaagtgacgaacacaacgatgaactctggaggaaatgatacggagagtattcgtaacgagatgccaaagagacgcgagcctagatgttggaattgtggagacgtaggccacattcgtcgtaattgtaagaagatcgtacagccgtcggaaaactagagcgggtcgacaccaaggggcaactgccgacctcgagaactagagccccatagtaactgtcaaccttacgtcctccggtgcaatccacaacttatacatcgaaggtcgtatcaataatagatgtagatcgtttttggtggatacaggtgcaacgagaactatcgcacgtccagatgtagtacgagaccataataaattatcacctgcaacagtaaagcttagaacagcgactggtgagctaattaatacatatggcgaggctaatatgtcagtatccattggccagaccacagttgaacatcaagtattaattgccgagatctccgacgagttcatattggggatggacgtactaagaaaagtgggggcaatattggatgttcaaaatggagttctcaagatcaatggtgaagagttgccctttcacgacgacaaagaagatgtcatccgcttacttactacatgcgacgtaaccatacccggtaatagtgagaaaattctgatgaccatgcttgatggacactgccgagagggaagtttaaggatggtcgaagatgtggaaaatgtcgagttcctaacggcgaaaactttggtaaaagttcgagatgtgatccctgtaagagttatgaatttaagggaaactgctatcaagttaagtagaggacctttgatcgggcagtgtgttcccgtggcttcaatttgctctgtgaataccaatgagaaatcatcgaaggcgaagtatccaaaaggagcttgttgagatgatcattgaaagatgccaagatcttgatcatgaacgaacggaaa

SEQ ID NO: 7594 - DNA, 1416 bp, Diabrotica virgifera
  SmartBlast Evalue=5E-90; Info=Serine protease P69 n=2 Tax= Tribolium castaneum RepID=D6WYU8_TRICA
acagcgcagtgatagtttgttgtggtgatgtgatagccaataattatgaggctgacctatgttgtttttatcctattggccgtagctcaaaaaataaaaggggcaatagaatccccctgtccaaaagtgtttgtttttgaaccagacaaatcaattgacgacagatggtatggactgatttcgttaaccacccaaaggagtataaaaggtattactttagaattggaatttgacaaatcgattatacagttagggaattggctaggcggagtaacatcggatgacgacaatactatatttactataaagaatgacaacaaagaagtaaacgccggtcaaacctataaagcagaaatttatgtagtttatgatccctactatgacttagaacctccacgattggtgagaattaagtttaacggtagggaaatatgtcctcattacgaagaggaaaaagttagcactacgatattggttgaatccaatgataataacaaaccaaccattctgctaaatattaacgtaccaagatgtggagtaactatagcaactcaaattggattgattactcatggagagtatacaaaaccagggcagtacccctggcatgctgcactctaccgaaaagaaggaagcaacagaatatacatatgcggagcttctctaattagtgagcaacatgtaatcacagctgctcattgcactactatcgatactcaaacacgtaatcctaatgacatggttattgtgttaggcaaacacgggttatgggtagatggtcaaaatgaacaaacctttgcagccaccaaaattattgtacacgaatcattcaataggtcaaattttttcaacgatatatctataataaaactagataaaccaagtcaatatactaagtgggtgagacctatatgtttatgggaagaggatactgatcttactaacatcgtcaatcacacaggtacagccgttggatggggcagagatcacaaaaacaatccaacaacggatctgttaatgcaagcacacatgccagttgtagataccctaagttgtatttatgcttatcccgaattttactcaatgtttaccgccccaaccaatttttgtgctggatatagaaatggtacttccgtatgcacaggtgactcaggaggcggtcttgccttcccgaaaacaggatcaaatgtctggcaactacgaggaattgtttccaatacagtagctaaacaagacacctgcgatccaaagtactatgtaatatttacagacgtagctaaatatttagaatggataagtcaaaaacttaaagcatagtctgaatcataattatacaaataaatttgatatgcctttttatactttaataaagtaaatttattttgtaaccattttcggggtcgaattattaaaaag

SEQ ID NO: 7595 - DNA, 1410 bp, Diabrotica virgifera
  SmartBlast Evalue=1E-31; Info="Sentrin/sumo-specific protease, putative n=1 Tax=Pediculus humanus corporis RepID=E0W3V2_PEDHC"
atgagccctaagatcagaagagttcagtctatcaacttagatcgagagaattattatatgagtccaaaacctttgagaagaccatctgtatataaaactcctagtataaaaaagatagaatcagtagttctagatgacgatgaagatgatataaatattagcagtaaaaaaataaatggaaatactctcagcggtaatgctaggactggaaaatttacgtctactccatatggtaacagttttagtaaaaaatcggtaaacggaacagatagtaaagatgtattatttgttaaagaactcaaaccatccagtgatgaagatgtaacatttgtcagagaacagaaatcatcttccctaaaaagagctgatgctcttagaaaaggattaaactatctacggccatacagtggaagtatttctaaaccaaaaattgtacagaacgaacgacagttaaaagaaaaatataattcaacattcggattattaaatggtacttcatcatccaatatgaattcttccatacgcttaaatgaaaagaaattgtatagagagatacttgactccacacaattttttacacctagatcatcgtttgacaactctttcatgacgaggagagataaaataatggctgcggctctatcgcctatgtctacaaaagacagaattaaaaaggtgttagacgattttgatagcgatccagtcgtaattaaggattcagattctgattctagacgtggttgtcgtcaatcctccttcacctaagcctgatatcaaagttgaaccagtcaatagtctgaagaacattatcaattttcccgagcagagcaagactaaatggttagatgacgtgataaatgatcaccaacaacgtgcagctgccagacaacgagagcttcaagagctcatgggctgttcccaacaacatgaaaaaattaataaagatctccatattgagttactttctaacaaaatcaacaatgcattaaaaattaaagaggctttagtcccattaccggaaaaggaagctgaagttgaactacctcctttgaccgatgaacaactaagaatggtcagcagggccttcaagggcgatcccaatgaagtcctcagtcgaaagtttaacctgaacataacgcggcgagacctgttaacattatcaggtttaaaattggctcaacgacgaaagtcataaatttttatatgaatatgattatagaacgaggaaaagatccaagttatccatcatgccatgcattcaataccttcttttatactaaattactcaaagatggcgcagaatctcttagaaggtggaccaaaaaaattgatatttttgcttgcgatataatatgcataccgatacatttgagcatgcactggtgtatggcgattgtcgatatgagagcc

SEQ ID NO: 7596 - DNA, 1412 bp, Diabrotica virgifera
  SmartBlast Evalue=7E-89; Info=Monocarboxylate transporter 14 n= 1 Tax=Camponotus floridanus RepID=E2B035_9HYME
gaagttctaagaatagagagaagttcagaagaccctttattaatttccaaaactgtgtgtaccatttcttttttactttctgagggacttcttttgagggacttttaccagatcgtctggtactcctgcttgcgttatataaattaggactggacattgtcattatttgtaaataactgtgaggttctggttcttcaattgcttcaggaattgtatacaataacggactcgtatgtattttctacttcaccattttcacctttattgtcctctggttgttcatcttcaggttcctcctgaacttgtaacgaaaattttacaggaactctagtcttacatccattttcctgaacatgcaggtcttgattagaggcgcttttcgatggtaccatgtttggatagttttccagtattattttgtacatttgtttattttcgctcaacctattaaggacttccagaggtactttttcattttctttgacgaatgttggaaggtccactacagatctaaaatgattcttttcgctgagatctaatgtagtattaatcctttgcaaaagcagctgcgtattttctcgttttatcttcgctttccgtttttttgcagcttttttggccttcttcacgcgtgcctcatcctgtatccattttggatctcgcatcatgactccacatacgcacatattcaaaaatgctccacctagaagcaaaacggttcccctccatccatattcggtgatgaagagcgacgttaaaggtgcaaatgcgatggtacctacaccggtaccactagctgcgaggcctagcgctatagttcttttcttttcgaaccaaaatgcaatggaaaccactgcggtaacaaatgtaagagctcgacctattccgcctataattccaaatgttatatacaacatagtcaatgattttacaaacatgctaaggataaatccactggttgagatcaaacttcccaatactgtcatatatatacatccatatctatctaccatcgcactgcctattggacctgctaacaacggcatcgctaaaaagagacttccaatccaagacgtcgctgacttggaagcatcgaacgcgttcagaaactccacatagagcagtccaaaggaaaagctaatgccttcagaaataccgttcaccacaaaagccgccaacactatcatccatccccaacctccatcaggaatcttcggtttgacatcttcgatataaagttcgatctgtgaagttaatatggattcttttccttgaaacttgtgaatgtcatgctcttgcgactgctttctctttctcgccggaggtgcatgggccatacttttcttctggttccgttgtaaaaaggtctctgtcttttctgtatcacatcaagttattttaactggtatttc

SEQ ID NO: 7597 - DNA, 1412 bp, Diabrotica virgifera
atgtatataaatgtattttttatgtatcctaaatgtttcctttgcatgtatgtgcctcctaggggcagggtacggacaacgacacaccggctttaagggcagtccttacagtagggatcctggccttacagaattatttaagcagatacacggtattagtgtattttggttcaatttgtggtgtctcggctaaaacatacaataaaggaatagaagagccacgtggcttgaaatttagtagaacttaaactagtttatggagctatttggaaattgcttcagtagaaaatacttttggatatgatatagctgtacaagatttttcagaagggtatcttctgataaatatttacagcatacttatttaaaaggttttactcaaacaacttatcattgttttaaatagtttttccctgtcaacaatttatctcatggtctattttactttagtgttctgggaaaaccgttatagcaacttttcacatttttgtttaaacttgtttccgttatattaatatatgcgcttgcacactgaagaaaaacgttacaaatgtgaaagttgttataagcaggtcttccaaaattaatttaaaataccccatgagagaacacactgcagaaaaatctttagaatgtgcgatttgatcaagacagttgtctcaaaggagcaatttaaataaatatgtgtttgcacactgaaaaaacaattacaaatattaaagctttcacgagttgtctgaacccaactgatacgttcatgtcataagtacttttcttgtgaaaagcatttgtttgatgaaatgccgaacgggttatgagaacttttcaaatttgtcatatttgtaaagtgtccctccaatgtgcaatcatatatttgtttaaattgctctttttagaggactgctttgagcaaatttcacattcgaaaggtttttctccagtgtgtgttctcatatggtttttcaattactttaggaagaactatttaaaacaaatttcacatttgtaaggtttttctccagtgtgcaatcgcatatatttatataaaatactcatttaattaaacaaactgttgattgtagaactaaaaacggttggattgtacactgggttaaaccttacaaatgttgaaataagttggaagtaattttatgtatgtaaactttaggacattaaagtattcgtaaaaccttgtttatctacaataaaatacaaatattcaaaatagtgctccgtaaaactggttacagttcaagtagaaagaaaatatacattttaatttaatattaacttacattagattctaataattcacttagctcataaggccgctttactaacattaattttaatactgatttttatgtgctgtaatagtgttaaaattttgtcaaaaataaattcatctacaa

SEQ ID NO: 7598 - DNA, 1413 bp, Diabrotica virgifera
  SmartBlast Evalue=1E-169; Info="Proprotein convertase subtilisin/kexin type 4, furin, putative n=1 Tax=Pediculus humanus corporis RepID=E0VJJ2_PEDHC"
cacggcaccagatgtgctggtgaggtagcagctaccagcaacaactctgtttgtgccctaggagttgcacacggtgcccaagtcggtggcgtgcggatgttggatggtgaagtaacagacgctgttgaagctcgatctcttagcttaaatccacatcacatcgatgtatacagtgcttcctgggggcctgacgatgatggaaagactgtagatggacctggagcacttgcaacaagagctttcatcgaaggtgttacaaagggccgtaacggtaaaggctcaatttttatttgggcatccggaaacggcggtagagaccacgacaactgcaactgcgatggttataccaattccatatacagtttgtccatttcaagtgtaacggaacacgggcatgttccgtggtacagcgaagcctgtagctctactttggcctcaacgtacagtagcggagctatgggtgaaaaacaagtagtcacgacggatctccgccattcgtgtaccagcagccacactggtacgagcgcatcagcacctttagcagctggaatatgtgctctagctttggaagcaaatccgaacctaacctggagggacatgcaacatatcgtagtgaggactgcaagacctcaaaatttgatcgctcctgactggaaagtaaatggagttggtaggcatgtttctcatagcttcggatatggattgatggatgcctatgctatggttcaactggccaggaactggaccactgtcccagaacaacataaatgtgaaataactgctcagcaagttccaaaagggataccaccaaaaagtatggtgattctccaacttcaagtgaaggaatgcgaaggcgtagaaatcctggagcacgtccaagccaaaactgacaatattttcgcaacgaaggggcgatttgaacatccagttgacttctcctcaaggaacaaaagtggtactgttggcacacaggccccacgataattccagggcaggatttaacgagtggccgttcatgtcagtgcactcttggggtgaatcaccgattggaacttggcagttggagattcataatgatggccgaatgttgggtgatgtccaatattggcagctaagtttatatggtactgcgacaccacctgcagctgataatccatccaccggcgaaagtaccaacaccattcctgactcgttcagcgaagatatcttccgcaattctatttataactctgtggaagctggcgctgagaatcgtaaggatgtcctagaagtggaagaaaaggaagcgtcaggttgtgcaaaaactaaaggcaatttttgttttagattgttctcccaactacgtgctatacaaaggttttttgtataaacagctgccaagaaaaattctacaacacaattttagatttcgac

SEQ ID NO: 7599 - DNA, 1413 bp, Diabrotica virgifera
  SmartBlast Evalue=1E-95; Info=Lipase 3 n=1 Tax=Culex quinquefasciatus RepID=B0W6G4_CULQU
tttttcattttattttttattatgaatttattagcaacttgttttattaattttgtgagagaacacttacaactttctcgtaaactagcgttggggcgtcttttcctaaaatataatcgatgtggttccaagtcactagtggtatcctataactctccttcaggtttggtaattgcttcgccaatttttccacatctactacggcagccaaccaatcattggaactatacatcaaagtaagaggggctgtaattttagataagtcataatctggaggaatgatctggccataatgttctttgttttttaatatcgtaaagtcgtactggcagaatcgaccggaattgatcaattggccatagtgttcgacttgttttgtggacgcaccagctggataatgagccatgagcagtggtaaatcagaaacgttcatttgttttggactgaatccggtcattgcaaaaagagtatttttacataatacttgtcctacaccttcagaacagacgctatctgtgagcatattgaggaatcccgaaccaggtaagaattcgttcttacccaaagactccaaagtcaagcctataggaagagtacctagtgccatagctctcattaaaggactaaataaatgattcatgtaggctacgggtgctaaactgatatggtgtgctattttggcattatattctggtctcattgaagccattacataaaaagaggtagtaccttgggagtgtcctacatgatacaatttagtcgctccggttttctcaagaataaaatcaatcattgctggtatatcagtagtacctatttgatgccaactgaattgccaaaactccgagtctttatctggattccattgagtatggttccttgaataatagcttcctctgcaattacctaaccaaacatcataaccttcatcggcaaggatatatgccaaacctcttttggaacccatcagtacccaatcatcggaagactcaaaaagaccatgttgtaaatatgccactttattaagttttttgccactttttccatatggtattctgaatatgtttaaaatatatccatcggatgtagtcaaataataactttctacgggatatccttcatttttaactagttctggtactggagtacgtttttgtgtcccaaggttttccaatttcaaatccaataaagtcttagaaatatctcctgttgtctctttgccgagatcaagagcagagttagctccaatttgaatagcactagcgtcagtctttattccatctactaaattggtcacacctgacgaagccttgtctttaatagctttggccactccgtccaggctaataccggcattggtactatacagaagcgcaaaaattaacaacaactgcttcataatgaacatttttt

SEQ ID NO: 7600 - DNA, 1416 bp, Diabrotica virgifera
  SmartBlast Evalue=3E-85; Info="Lipase 3, putative n=1 Tax= Pediculus humanus corporis RepID=E0V9B6_PEDHC"
ttcgtactaaaacactttatttattggtacaataatgcagtgagaagcattgttatgattggataccaagcactttttccaaaactagtatttgccgaattatcatgtggcggctcagatggtatgtacttattctgagtggctatgacatcctcattgatgattgtaccaacatctttggcccaaatgtaatcaacatgattaaatcgtttgtcttcaatcatccttagctttgctatgttgggtaaatgactggccaagagctcaacgtccttcactgctgcaaaaaagtcattttgggaatagtaaatagcaataggtgctgtaattgctgaaacattgtattctggtggagatatggacttatactttttaatgtttaggactccataatcatatcttctaaattttcctgatcgaatttcctgtccataatgtagaagcatttttgtagatataccagcaggcgcattggatactattattggaagaagattcgcatcgaattgtctgtaattaaatccgcagagaagaaacagcggtataccaaatttgtctttgtcttctggtttcatcttttcgaattctctttctgagatttcagcaaatactctatagatccatgaataaggcaataaattatgaaattttaaaacatccactaacaaaaactcaaaaatctcttggtattgagctaatagcctcagtaatggagaagccatatgcgtcatatatgcaactggtgctaacgctgtcattagagcgattttttcgttgtattctggtcttaatgctgccatggcaaaaaattgcgatgttccttgagagtggcctatgtagaatatttttttctggcctgtttgcttaatgatgtagtcaatttttgctggtagatcgtaatatccacacgtatcaaagctgtagtcatagtattccggatcattatcaggatctaatgtcttatgcatcgtagaccaagtagtccctctattattccccaaccaaacgtcgtatcctgcatctgccaacatcaacgcgattgatctatttggtccaacattaacaaaatccatagcactacttaatagaccatgcatgagaagaacagccggtttattactattgtcagagtaaactccatctttaccgcctactaatcgttgcattcgaagaacataaccgtcttcagtttctacccagtgagtttccactggatatttatactttcgcaaaaactgataaatatcaagtcccacatcagaatcttggttaaatttagaatcgcttacatttaaggattccctaaattgtctaacaaaattaccaatggcgtccaaggtttggcttttacaatgcacttgtacgacgattattattatcaataatgttttaagtatatacattttgattgatatt

SEQ ID NO: 7601 - DNA, 1404 bp, Diabrotica virgifera
tccgaggacctcgtccacagaactcggcgaaatcatttggaattgctcatgtacatattacaagttctcttttgtgatttttttattttgcaccatagttggcaaccctcagtgctattttgatgtggctgctatgataagttactctttcataattttcaatattcattcttgttccgctgccatgaaatcctctttcgtatactagtctcgcatatgtctcggatattgcagttttcttattttgatggtttctttttttttcattcacttacttaatttaactaaaaaatgattttattaacgtttcgacgtccaaatcagatacaaatattttgtattttgacttattttccatttagaatagttaattgcaaaaatgccacaaggaaatagcttcagagcaacattatttcttatagttgcagcatttaaggtctacacttctattctgtaatgtagtgatcagccaacgtaattcttgttacgttcagtgtaaaagtatcttcagtttattttgctatttctattcatactgtaaatccgtttattaaattagtttgatttattatcccaggtttttgatatggtcaacaaaattcgtttttgcaggtttttttattctgtacattttttaacttactcctccctttctcattgttccttccattggcatctttattaacatgatgggtactatattatagaagtctccataacatttagttttccatttgttttcgtcttcgcaattttattaatagttaccacgagacagtatacacaggttgaagtgtttgaggtatcttttgttttttgttatatgaacgttatattaattcaaaaaacgtataatactatagatgtaattttacagttataagtttcactgcctatgtcagatgttgataacaagtattttaatggatatatcaacttattaatgttagttttactgcgaatagatggtaaaggtaaattacgataaacgccaatcgttgatttcataaaaaatgtatttatccgatttttgaattaacaacgattctattgacttgggacttcagtgtatttttttgttaacgtaaagctttaggtttgtaaaaaaaatttttttgttcttttctagttttaagcaactttgttaacttggatcccgttcaagtgataagcgcttaacgcgcgttatcaaactgcgcgttgagcgcttgctatgtgaacggggccttaaagtcgagatataaacgcttttaaagattgtcttagtacaggatcttgtaaggtattatgactcagtaaaggtccagtatattactgtacggagacgggtcagttacttaaggctgcatatacattggatcggtatttctctgatccgatccgacgtgggattgagaacaaact

SEQ ID NO: 7602 - DNA, 1409 bp, Diabrotica virgifera
  SmartBlast Evalue=1E-121; Info="Acetyl-CoA acetyltransferase, cytosolic n=1 Tax=Camponotus floridanus RepID=E2A452_9HYME"
tatggtataaaagtagaccatttcgtagcaactgtggtagaaaccaacttgcacttgccgatgttcagagttggtaaggagtggtcgtatagttttaagaagtatttttaaaagtattacagtgaacaaaatgtctgatgtgtatatagttgcggcctgtaggactcctatagggagctttcaaggacagtttgaaaaacattctgccgttgatctaggtgctgttgtgattgcagaagctattaagcgagcaaatcttcaaccagaagatgtagacaaagttatcatggggcaggttttaactgctggtcaaggtcagaaccccgcaagacaagctgcattggccgcgaaaattcccacaacttgccccgcgcttaggttggattttctttgcggatcaggacttagcactgttgcatcaggatatcaaggaattaaaactggagactgtgaaataattatagcaggaggacaagaaagcatgaccagagctcagcacgctgcttatctccgaaatgccaaaatgggaaatttaaacttagcagatactttactaacggatggactacactgtgctattaataaagatactcatatgggccacaccgctgaacatttagccagaatttacagtatttcgcgagaagctcaggacgagtttgcctgcaaatctcagaataaagctgaaaaggctattactgacggtttattcgagaaggaaattgttggagtacccgaaaaaaagactggcaacctcatagcaaaagatgaatttcccaaattcggaacgacggttgaaaaactgtcgaaactcaggccttgttttatatcaaatggtactgttacagctggaaacgcttcagggatcaacgacggtgccgcagcagtattactagttagcgaaaaacagttaaaacaaagacagttgacgcctttagcgcgaatcgtgggatttgcagaggttggcgttgatcccatgatcatgggtatgggtccagttggagctgttaataaccttctgaaaaaaattggttggtcgaaagaagacgtcgatctttacgaactaaacgaagccttcgccgttcaaagtatcgccgtgaacaaagaactgggcatagacgagtctaaaataaacatcacaggtggcgctatcgccttgggtcacccgttaggttgttccggaaccagagtactcgtcactctgatccacaatctgcacagattgagcttgaagagaggcgtcgctgcgttatgtattggaggtggaatgggaattgcactagctgttgaagtttaatcaaaaaatatgtgtgttgagagttgcctattcagtatgaagtttatttatacattgtattcgagatatattttgtattttgtgacaatagacatatacgttttttaatgtg

SEQ ID NO: 7603 - DNA, 1411 bp, Diabrotica virgifera
  SmartBlast Evalue=1E-154; Info=Dedicator of cytokinesis protein 1 n=2 Tax=Formicidae RepID=E2A054_9HYME
tagtggtatgttttgaacacagatcaaccattatatcgtgaaacatcttcttatagtcatggtctcctttacctccttcgaatagtgcgtccagtttgacgatcatttcgttctcgaagtctgaaaagtttgcctttatatgtgaggaatctcgcttggtgtctccgtagctttcgatggcatatctggaggagtagaactcacattgcatcatgtcgaagaatatctggatagtggcttgacgaagttccggttcaggtatgagagtcatttctaaaatgaggcctactagggatggtacaaattgaactttattttgacctaagttaaaccacatggacttgatttcaaagcccatttctaccctcatgtccttgaaaagatccaataagcgaatccttttattcagcgagaaattatccaactgaagggcttcttgggtcataaaggctatggcacaatggaaaaaattgttccaggcgtcgtgttcgaatttttggaaaaaacagtctcggatagtatgagaaaaaaatcgcaacgatttaaggattatactattctgcagcatgatcatatcgcaccaatccttaggaaagacggaattactgacgagttctttgaagaccaccaggatttccattaggaagtcgagaatgtcgaagctggtggagaaactgtttatgtaattgttgtaatgctcattggtcatttgtctaaatatgtcgatcatcacagcgactaaattactcgcatgtggattatctttctccatttttatatgactctgcacgacagtcctcaaagctgattgaataatctcagatatgtcattaaacgtcgaacctacatctttccggaacaacaattccataatatcgctcatattttttatacaccattcaacctcctccttggtcgtaaataacgtttttacttggtcagttattattggcagcaagattttccggcattccggatataaaaatagcttactgtggatgatctcgttgatggtcatcatcttttgtttggtgagacgacccactggcatattgtttaacatatcgtataaaattgtacttaattctttagggtcaaaaattaacaacatatctggtatactacttggcaaatacttaaggcaagctccttgttcccgaatcaaggattctatactagaagacatcatgaagataatgttttgtaagagatctcgcatgctttcttcgaaatcgtcctcggagtcatattccgggtaaagttctttatatagaattctactcctggcaatgaacttcataaaatactgtaggcacttcatggttttgaagatcagactgtttgaaactaatgagtcatcactagcttttcccactattgattttaatactgatattaattttttgtaggc

SEQ ID NO: 7604 - DNA, 1405 bp, Diabrotica virgifera
  SmartBlast Evalue=1E-138; Info=Munc13-4 n=1 Tax=Aedes aegypti RepID=Q0IFJ9_AEDAE
cgttgtctacattagtttgtatgatgtcctccaaagtgtcggccagcatattccaaacgatctccaacgtcctattgaaattttcgtcgttcagttctcggtgtaaagtacacaaattattgtccacgtacatcattagcctgtccatactattagagtcctgatcgcatagctctgctccttctatcagaagccgtttcatagatggcgccatcttgtttactactgtttccagcaactctatgattttattcctgacggtatctatggcattagcgatgacgttttccaaggtttgttcgcacctctgtccgtccaacggacttttcaaatcacagattttttcaataacttcagtcattccgaggtctctcgtaaacggctccagcgtttcccgaacgtagtcgatgttgttgatggccaaacaccattcgttggtcacttcgaacctcttctcgtagatgtcttgggtgtctcccaagccgtccacgcgagctgccatcttgtccgcgtagaacacggaacatctacatatatcatcgattattttggctatgaaagtataacaactttctacgtcaggccaattcagctgttgccagaaaacttttacctgataaaaaatggtcaacgtatccacagccgaagagctgtatttgaccgtattgtcgacgtgaaccagctgatctaactccacagctttttctatcctttgcaaggctttgtataccgcaatatctaaccactgagccacaccaccgtggaaccattcatggaagtttttaatatgaaaactatcacagtcagcagggcacaaaccaactcctaaagtgtggaacctttgtatagacaggtacagctcaaaaagcgaagtaccttcggaaagagggtccatactaacttcaccgtcgatttggtcgtatccgtagttaagtttcttaaggcctttgcatatttccacaacctctggttcgcagaacgtcgatagttttgcttggtaaaatacgtatagtgctttggcatattggaaattaacagtctcttgaaatagtttgtcataaaactctatagctttctgtagatcgctcctaaccaactgaatgatctgtatcatattctgcaacctcgccaaatcagactcatctggcctcttattattttcgagaatgtgattcaaccaatccagcgcaccttgcgaaacggcatcattgattatagagggaatgtcgcaatttggttcctctcggaatgttatccaaggatacagcatcacgggaaagagatcaaagtttggaggaggttccagtgaattgatgttgttaaggattctaagtacctcagtcacttgcttcatcttcgtcttctcgtttatgttcttcttcctgatcttccttatgaccttcac

SEQ ID NO: 7605 - DNA, 1407 bp, Diabrotica virgifera
  SmartBlast Evalue=2E-61; Info="RING finger protein, putative n= 1 Tax=Pediculus humanus corporis RepID=E0VLP8_PEDHC"
ccgtcgcttttgtatcatccgtacacagtattttagaagtgaattacgcaacaaataggaattgacaaaatttacagttacatcattctggttccggaccggcgatattgcataaaagagttaagagatttggataaatatgtgtatttaaacggcaaaagtaattcttatcacaaactgaaataccaatgaacaaatctccacctcaaaaaaacaacaaaaaatattctgtaagacaagttcgttactgcaaattttcctactgatttatgtgacaactttaaattctaagataaaaagactacatttatattggtattttatataagaaattgtattgcattaattttttattgtaaggctttcgtgacaactgttttttatttccaagaaaataaaacttactttttaattagtgagctatatgtaatatctatttcagacatttacagagactgtttaactgtattgagttaactgtaatttaatttagacaatacgaaaaatttactgataaaataatccagaaaatgcattacatccccgctaaggacttaatttattcaaaattttgaaacagacccaatcatttgtttttaagccattagtagccaagtcagaaatagaatggcaagccaaagaaatatttttgacaagaattgctcttccatgtgttgttgtgaaccgtgagctgctgccgatggtcgaggatctccgaagttgaaagtagatgtgaaaaatccaaatggaaatgctcctatgccgaaagacatatgaaaactattgtctccaaaaccgaaaccgggaaagctggttccaggctcaggttcggtcctttgtccagctggtctcggaggaactttctccctgggatcttcttgtttggtactgcctcttccatagagtggtaccaccttttctttgcttatggccgctttacataccgggcaaacctgtctgtttggtctggtttccaaccactgatgaaggcatggccaacaaaacagatgtccacacatactaacaacagcatctctggctgtatctaaacaaatattacactcaaacatagaatcatcctttttctcttcatctttagtattggaattttgacttccatcgccggtggagtctctaatattttcttctgtactcgaagccatttcttatcgcactggaatgttctatttttactaaaaatccattaatatgacgtggccaaaataacttttaattaataaaggatactttgcatttgacctttacttttaaacgaaatatgattgttgaactatcacaatactatataattctcatttgaatttggtaattttgaaatcaggtgatacaagcagctacaccaaagtctatttacaaatatttgtgatgataaaaatcgagtgtcag

SEQ ID NO: 7606 - DNA, 1407 bp, Diabrotica virgifera
  SmartBlast Evalue=1E-177; Info=Flotillin-2 n=13 Tax=Drosophila RepID=FLOT2_DROME
gcgccaggaattttagataaggtcttggagagatcgactcccgttaaggcttggagtgctgggggtatctgtccgaccaagcgggtgatgtcagatgtggtattgtctggacctccgatcaagacgatttcttcggtcttcgcaagaggagaggccacttcggcagcaatcttaggtaaggcctcgaggacgagcgacataatggcagcgtctccgtattgcttgtaaacagcggctttttgtctcattctttcggcttcggctttaccaacgccggcaatggcggaagcttcagcggtacccaacatcttgatcttctcactctcagcttgggcggtctttacggtttgtgtccttcttccttcagcgaggatttcgactttgtaactctcggcctcagctggtaggcgcacagtagcattcaattctcgttcttttctgagaacttcctgtgcttcaatttcgatctgtttctttctctcaacaacgtcgatctgaatttcttcgtttcggattctttgtcgaatttttgcggcttgtagttcgtaggctaactgagcttgtgcttttgcagtgttgacttcctggtcaaagttcgctttttgcaacttaaacattctagaattgtcttcgatttttgtatctgtggaatacttgatatccattgcagacttctgacattcagattccctaataccagcatctctgttcgcctctgcgactcccgcatcagcgtctctcttgaccatggctgtttgggccttgccgagagacgtgaggtattgcacctcatcataaacgtccttgatggtaaacgataggatttcgatacccatccggccgacatctggagcagccacttcgcgaaccagggcagcaaattgatcccggtcgcggtagacctcttcgactgtaagagttccaagtatagctctcaaatgaccctccaaggtctgcaaaatggtcatcttgatctccttgacgcttttcccgaggaattgttcggaggcagtgtgcagtagttcgtcggctttcatgatcttgcattgagcaacccctgaaacggaaagagggacgccctgagatgtctcaacgctgatgcaatgagggttcagcgtcataacttcgagagaaagacgctggacgtcggtgacgcaccaccacgcccatgaccatcctccaacggtagttacacgtttcgttgagccacagcatccacctgatacaatcaaagcctcgttaggtcctacggtgtgaatgtttcccatcttcaaagcaaacttgtcactaaaatgttaatgaaaaacacaaacaataattaattattattaaaaaaatacactactcgtcgcacacactccgcaactcagcaacactgcttttttgccaaacgaaacgacgtcgatg

SEQ ID NO: 7607 - DNA, 1406 bp, Diabrotica virgifera
  SmartBlast Evalue=6E-88; Info=Ubiquitin-specific protease n=1 Tax=Tribolium castaneum RepID=D6WDD8_TRICA
ttaacgagtttgatcaactctagcatttcatcatttaatccgttcaacaagaatcctaggaactcttccgcatcctcttgcctgccttcgatgagatcagttcgaatcgcattcaacattttgtatatccaagtgggctcaaatggtatatcagtgtttatcatgacgttcaggtcctttttcgcgttcttatcagcctttttgttgtctttgactctcaagtttgcaggtagatgcttgaattctttgacgaaacgacacattccgtcgatgactggcgtgggcttccttttctcattagacgagatgttttgtgcaagtcctatgagtaaattgtacaacggcgggcatgcaatcagagcttgtagtatcgaattgatgtagcaatagttactttggtttaacaaacctcttggttgtaaactgagtgctttgccatcgatgacataggacagtaaatattctcccatcctataacaatctggatcaacaaattgatgtgactttctaggatgtttaatgggacacaattgggtattgttgttggattccttgttcacagcctgttcagaattattcttctctttagtttcctttgcagtggtgggagaggtattcggtttacttgaactaaacaaactagcccatgatttgttggcaggtgctggactaggagtttctacgttgtcaatgccattaactaccacaggtgtcttgggagtcacttcaggtgctttggctgtggcaccattttcatgtatttctttgtcttcggtaaccccattctgttttggtaccatctcattaacagctccctctggaacatggactggaagtgcatatgtggttggtggagaataggttctatgggatataaaaacttgtggataaggaggagacactggtgacatggcattagtggcataatatactatgttaggtggatgaggaatagtaattattggctgaactacaactgaaggttgcagatgattgcagtatactgattgagggattattggatgttggatgtatggattgtgatgttcatgatgtgcagaacttggtattactggttgttggatgttgcttaggtcaggttccttattcttttgctggcattttccttctgcaaacgactttttctctttcacccatggtagttgtacactgggatcatactgctgcaaggagtttcttatgtgaagctgttctttttcatcgactccatttaaatcaatgaactcaatattgcgcaactcatcagagtccattgcggcaaaaactacttcaaataaggaaaaataaattacaagttcattatatttgctatatgagaggtaataataacattatttcaagtaaattgtggtattggttaagtttcacgttactttcatttttgc

SEQ ID NO: 7608 - DNA, 1408 bp, Diabrotica virgifera
attaggtgaaccatcgagttcgtatattgttcaattttacatatacataagtgcagattcaaacattgttaaaaaataaaacaataatatatccttaatataaatatataaatgggtaaaaaataagcgaagtttgagtatagccagcgttagggacgaatagaaaagattcaacatcagattggtatcagttccacgatataagcacctcctacagtgaaatttacaaaacaattatgtttaaccttagagaggacgtgcggtcgtaaattttacgacagaaatacaaaatttcccaacatttaaaaaaaaaaaattaacacaaaatatcgtaaaatttacgatacgcgaccactcatgttgcattatagggcgcgcccactcgaagtttaaaatattgttacaaagatatacttggcctattaattatcaataactgctaaacattggttaatcttaaattttcaagacaattgacacatgatattgaaatacagactgaataatattataaagatcgagacttaagtagtatccccctctccatttaactatgttctaaactttaaatttgaattaataaagtattattgctctaacatctcgttattgcgcatataacatttcagtgatatataaccattaaaaatagaggacaggtgccattttggaaaatataatccatttaaaaatattttgtgacgccttctagatgtctcatcggtaagtctatgagctaaatacaattgtgtcaaaaaaaattagagtcaacttaggcacggtcttttcccctccgaacaactagttatccggaggtgaaaagaccgggcctaaatcgattgtaactctaaagggcttttcaacgcttctcatttgtttcgagcatctgtcatatgtcgtataatccgtgtatatgtattaatattatacacagattatacaacataatatgacggaagctcgaaacaaatgacaatcgttgaaaagcccaattagatcgatatttgatgtaactaatcaagtatttttcatataaaactgtatttaacgcatagacaagcctaattgaagttaatggtattgttcgtccgctataaccctcccatgcgtcacgattcattttcaaacaaattaaatcaaaccaaagtgaaacgtacaccgatgtgtgtagtatatagtatacagtatacaaaatgtatatacacatcgaccgttccactttatgttttgacttcatttgtttgaaaatgaatcgcgacgcatgggaaaagttagagtgtacgaacaataataggatagatttttctcggagatagggcgttgtattgtattagtttttatttgaaaattgtgtaagaaaagcttatatttttggcatatcttttttaaaatagcaaatcaatgggtg

SEQ ID NO: 7609 - DNA, 1403 bp, Diabrotica virgifera
  SmartBlast Evalue=4E-27; Info=Pol-like protein n=1 Tax= Biomphalaria glabrata RepID=A3FMR3_BIOGL
accatggtttgtcccttatttttggttgtatattcttaaaaaactgtcccttctctcctaattcatattttagctgccaattttcctttagttcctttcgaaaaattggaataaagtcagactctggtatttttgatccgagtattcttccatttttcgcaccattttttgctaaagaatccacttcttcattttcttctatacctgaatgggctttgatccatgaaatataaatttgttttcccatacttaatacattgtgatacaattccaaaatatcaagaagtatataatttaaattaggatttaaacaaaggtttttaagtttttctacagaacttttagagtctgtgaatataacaaatttatcatcttcttgttctaaacacatactaattgctagttttatggcaataagctatgcactgaaaattgacaacatttctggtagtttgtatattaacttaatatttttagaagggtaataaacggcacaaccaactccatgttccgatttcgatccatcagtataaatttttccatactccttccacttaactgtacattcccgataatgttctttttgtataatatcactgtttcgacacaagtatctaacattaatatgagtctttactggatatagaaacatttcatagggataattccataaagggataccattggattgataaagttgttcatatctgtgtacattggtaataaaactttcaactaataacggtgttttttcttctcccaatatttagatgtcaaaaccatactggctaaactggatattttagccaacaccttagatttctgagaacttaactttaatacgaatttgtcagacaaaaatcttctacgcaggttcagtggtggttcacatgtttcagcttccatgacgtctataggcgtgcttcccaagtatccaatactgagtcgaagacatttgttttttatttgatctatttttttaagatttgattccgctgctgaatggtaaaataaagaaccataatctaaaatagatctgacaagtgttttataaaacagtaacattatttttggatctcctccccaggaggaatgactgaaagtttttaataaatttacactattttctgttcttttgattacataatttatgtgttctttccaatttaatttacaatctaaaattactcctaaaaatttaatagaagatttgtaaggaaatacatattttgataactttatttgagaaggacaacgaaatctttttcttgtaaaagtaactaatactgatttttcttcggaaattgataagccattattgaaagtccaattgtctaaattttttactgcataattaagttgcttatggcctatctcaatggatttgtgacgagtgtaaataa

SEQ ID NO: 7610 - DNA, 1406 bp, Diabrotica virgifera
  SmartBlast Evalue=4E-79; Info=Protein purity of essence n=2 Tax= Formicidae RepID=E2AZ34_9HYME
ggtacgggaagttcccaacaggctgcttccaattcagatagtgatcagagttcaggaaataaaactcaattaacgaaacttgaaaagcttgtggttggcatacttgaatcactcgatggcagcttctctctgcattcaactgaagacaaactggctaccttcaagacaccaacacttaaagttgcaacgtccttgttgacccttcccacccagccgtcagtacaaatccattctaaggctcttttatcatctcttcactctacaaggctactgtatcataattacaaagaccaagcgttacttcaacatgttttgacaactttgacggaaatgacaagtaccaacattaaagatttagatgccgagagctattatagactggttttgattgtaagaggaatcgctgttgctagaccacagaatttggtgaaatttgctgatagccatacttcgatacaagatgttgtcctggaagatcctctggaaaatattataagagaaaagcaaggttcaacgtccaaagaagtcaaaccatttgaacgtaaacaacatagtcagcatcttcttcttcagctaatggaggttctttggctattgcactctctgaatcctgaaattccttcattgtccctagtagtttcacaaggactcaagcacaccgaacaaattgttcatgcacttgttgaaatagtgcacgcctttaatagctgtgatacatacagcaatgtcactatagcagtgtatcttcaactgttattgtgcaatgatcctctgattgcatttagtgctaaacaagctcttagcatagtgcttaaaccaaagacgaagagaagaaaggttttcatacctagtcctcctcattgcgtttcaccgcctcttcagaagaccacagatgataggtctaagactcctcccgctatacaacaatcggttagtcatgaagaagagatgcaagcaagacacccaaatcaatatgatgtggacgccattgaagctattggattactagaacagcctggtcaacagcaagacaaccacaatgttaatgctttggaagctttacttggtggtggcgtaggctttcctccattgctggatattccaccagatgctgatgacgaagctatggtagaattggcaattgcattaagcctacaggatcatgaaattggaggtgaacaaaatcagaccctgcaaagtcttcaagttcaattaggtcaagatgtgcttggcgcccaccaaggccaaaatgcgcaagcgcaagaatctgctaattttagcgacacaacagcttcggcagctggatcagatgatgaaggttcaacagctgcaactgatggttcaactttgaggacttcacctgcagaacaagctgggtctgaagtggcggtagtggagttgaaagt

SEQ ID NO: 7611 - DNA, 1404 bp, Diabrotica virgifera
  SmartBlast Evalue=2E-42; Info=Alpha-tocopherol transfer protein n=1 Tax=Camponotus floridanus RepID=E1ZXI3_9HYME
acacaaacataaaccacataaaattgtataaagtactgtctggagatattcgcatatcacatcgtttttttaatattacaaagaaaccaaattctacatacgacagcctgcaccaaaaaacgcaccaatactttttatctcgagagtagtcacttcgttcagtatttactcgagtccggttgttgctagatagtaacgcaaaaatgtcagaaaagtatatatttgaactgggagcagaagcagaagaatatgctaaagaaaatttgaatgaaactgaagaaaccagagaaaaggcattgaatgaaattcatgcgtggttgactgaagaaaaaactaatttaaatgcccgactggaaccgaggtatattttgccatttttgcgacaatccaaattcaacatagaagaagcaaaaacaaaaatcatcaactattacaacttacgacgagacaatgcaaaatggtttacagatcgggatcccaccaatccagaactagctgaaatcatcaaagtcggagtatttattccattaaggaaactctataagaatcaagttgtttttctgattagaacagctgcacatgatcccaagaaacattcccaagaaaacgtgtttaaggtagaccacatgattctggatattgctgcattatttgaatttgagatggctcatatatacggagccatatccatattcgatatgaacggagtaacggcgtaccatgcaaaacaactaacacctggtattgtcaaaagatccgttacagcttggggaaattaccatactacctccaagaattatgattttattaattcaccgacttacctaaatgtaatcttaaatatttttaaaagcttcatgagcgagaaaatgaagaggtgcaccagagtgcatactaaaggtatcgagagccttcatcagatagttaataaagaaattttacctgaagagtatggtggaaatgatggaaaattggaagatttgataaactattggtacgaaaaattagtaaataaaagggactggctactagaagatgaaaaatatagagctgattaatttttgacataaaccgttttttatttatacaaaataattagggtaggtgggagcaaaggtatgcattttctaaattttcatctctagtgaatctcctaatgcttgaattggcacagaatatagatgaaagtgaaattgatacattttgtaatcatattaggcaaaaaaagtgtaaatgcgtacctttgttccacccaatggggcaaaagtacacacatgcgtacttttgcggatttaagacattttgcaattgagacaaaattagctgatagaatatcaagctgaacatcacattcactgtgaagattgacttgaaacatgcatttgccaagtctacctcactggg

SEQ ID NO: 7612 - DNA, 1405 bp, Diabrotica virgifera
  SmartBlast Evalue=8E-98; Info=Lipase 3 n=1 Tax=Culex quinquefasciatus RepID=B0W6G4_CULQU
ttgaagttacaaaaaaatttatttcacaacaaatatacatagtacaaaaaatacaatctaagtaaagagaaataaataaaaagaaaataaataaattgaaatgaactcagataggttacgtattcaacatttgaaataggtacaataaaatatcaatagatgttaaatatactaatgatttcattataaatcagttttggggccctatcacagtatgtaaaatctaaatgattaaaggaatcctccgctatcaaaaattttccctgagcatttggtagttccttataaagtctctcgacatcttgtaaaccagctaaccaatcgtttttactgtaaaataaaaaaactggagcagttactttagataaatcgtaatctggggcccaaacgcttccatattcttcgagattaccgatcataccaaagtcatattttctaaaatgtccactgtttatttcttggccataatgaagcaattgcttagtagatgctccagctggtgcatgtcctacaattaaagggattttcgttgtgttcatttcattaaggctaaaaccacaaatcgcaaacaatgcattttcacagaggatttgtcccaagccgtctttacaaatggcctctgttaatagatgtaaaaagcctttctcaggaatgaactcattcattcccagaagacccatcaatatttccaatggcccttcccaaaaagaaatgatatgtaacaaaggacttgtcatgtgattcatgtaagcaataggagctagactaacttgaacttttatctttttgttatattccggtctttctgaggtcattacaaagaatgatgttgttccttgggaatgtcctacatagtggactccatcaatacctgttgtttctgtaatatagtcgatcatagcaggtaaatcataataaccaatttcattccaactaaactgccagaatttaccatcagtatctggatttaatttagtatggtttctggagtacaatgtgcctcttgcatttcccatccaaacatcataaccatgatcagcaagaatataccctagagactttccaggtccaaacaaaatccaatcagaagaagaggtgagaactccgtgttgcaaatatgccaccttattattctttttcccattttttccagatggtattctatgaatgcacaggatatattcatctgtagtggtcacatagtgagtttcaacaggatagccagcatttgctatcatttctggtgtggttttattgaagtcgtcatcgtcaattaatgggaaaaaatcatctattggtatagaggtgacaattagaaattgtgcgatagatagtgcaagtagtatttttataaccatgtttttgtttatttgccaacgctaaccgataatttgtacacaatgtt

SEQ ID NO: 7613 - DNA, 1401 bp, Diabrotica virgifera
  SmartBlast Evalue=1E-24; Info="BCL2/adenovirus E1B 19 kDa protein-interacting protein, putative n=1 Tax=Pediculus humanus corporis RepID=E0VNJ9_PEDHC"
ttctattacttatttcatattcccacatagtgttaactacaaagaccttcgtactaattgaaaaaatgaatgaatattctggactttatgccattagaatattgacagaaaataaatatatgtgtgtacttgacctatcatactaaagtgcttacaaaatgctttatcaagaggtttagtagacattcctgtcaagtgcgttagaagcatcgtttgaaactgtaaccaaacttttgaattataaacctaaactatagtcagataatcacttaacccagattcaagaaacttttcttcttcaaaaggttctaatctaggttgaagttatcgaagaatacattaaaattaaaataatgtcacatttgtgtatacaaaagctgaacaactgtcaaaattgtcaaataaaatcgttctaaatggcactcctgaatacctgcaatgctgtattagattttggcgattttcatctattgttcagcgaacttgttgttcaactccggtgtacactgccttaacttatgtacattattacatagtgtacaagatacctaccaaacgtgtgaaaaaaccttacctataataaaaacttttgatcaatttataaataaagccatataaaaacttaaacttattttctttttctaccagcttggaacactgacaagatttgattacttaacgtattttaatggcgggcacgaaaaatccatgtttacttagccaaaggcccacgccagttcccagaagaagagagatgagattagtaaggaacagggtgcacaggcctttacgggaaaagacgctactattgcccacacgggcatatcgaatacttagaagatctcgctttggcggacggaaactccagttcttaggcggtagttgatcagggcgactgctccaattgttaaaaaactcagaatccgattcctctttggcttcggtattaatataatagttttgccagtcgagatttagagctgttccctgcacagggctatttggtggcgatttggggctgcttctgggagagtctcgtcgtgatcctgctagagagactctggcagacgactggttagattcctgggcttctttaagtaaacgtaagtagtcttcaacggacagagtgtgcgttatggaccctggagtacctccgttggtggaaccgcaggtggagccggcgcccacgtccacccatgactctccaagaagatcatctacacttgatttcgtagatgacatgtttaaattactttaaaacgcaaagaaactgaactttttcagccctttatgaagattacttggatcgttttaactatttacgcggaatttgagagacctacgtatttacccaaacacaactttacggcgtacgtgacttaacttgacagtctattgcaa

SEQ ID NO: 7614 - DNA, 1405 bp, Diabrotica virgifera
  SmartBlast Evalue=0.000000005; Info=Endonuclease-reverse transcriptase n=1 Tax=Bombyx mori RepID=D7F161_BOMMO
ggggctaggtagtagggctttagttttatttcgtgtaataaaagtttgctgaacaagcagatttagctcaaatttttttttaattgtaaagttcatatttggctctttggctaaaaagtttgctgaccactgcgtagaagaagaagaattattctctgtgcagatgtttatcttaaccacattaaataaaaatggtttttcagggaactcgaaccctgtgtcttctgttaggtcaagttcttacaatgcgttctgttatctaaatgatttgaaaaacaattaggataattgctgtcaaattagaattgtaatgttttggacgtgaatgtattaaattcttgatgttatgataaataagccataatttaactcgaaaaaataattttattaacgtttctacttccaattcggatgtcgaaaacacaaaataataatgtttatattttatatcattaatattttgtattttgacaacgacgtccgaattggaagtcgaaacgtcaataaaacttcttttcaagttaaactgtggcttatttcccaattaaaatagttaattacacaaaagaaaaaatgccacaaagaaatagcttcagaagaatatttttattgggggtgttttcgccggagctattttagccggggctgtcttagccggggctattttgtgtgcgatctgttttgtcggaactattttgtcgaggctcttttgtatccgggctattttgacggggctgttttgaccgggccattttaacaggccaccaccgccgaatattgagaatataccgggttgaatatcgaacaaatgtatccataatacaagttaatataaaaaataggttgcttaactgatttgctgccgatcacgcgccagcgagtgatacagttacttcagttaggtgccaatcaacaaaatggctcctagcagagttccattctcttcgatcggcagcgaatgggttaaacaaatacaacaaagatattttcaatattttggacacattgccagaagaacaggcacgatgtaaaaacttatcatcgagggaaaagttgaaggaaaaagaccgaagggaagatctcaatgccgttgggtggatcaaacaaaaacactgatcatccgaggaattctagatgccgaacaactagctcagaacagagtacgatggaaagaaattataaaaatttgatgatgtcaccacatctctataaatgactaagaaccaagtagaaggagacaataaacatttttatagtaaaatattcgtcaaattaaaaaaaatattcaacctactcactagaattatttaacaactgttaacgctactttgagaaacatggcaatcaggtttaagatcattcgattaaatcgtcccaactattatacagaaaagacttatcttag

SEQ ID NO: 7615 - DNA, 1398 bp, Diabrotica virgifera
tatttttgtggtaatttgaggtcagtatccttgttcaaaaggtgaaagagatatttatttaaaagatatctaatataatttcggtttaatttaaaaatattcaaaaagattacattcattcaccggtatatactttttttaattgccatgttaccagactccagtacaagcctaagaagatatcgattgaattctggcagggaatggtggggaaaatcttttttagacatctaatgtcatggagcaagacaccctgacatcatttgaccgagcatgacacttttgatatgacacatgattggtaagaccacttaatgaagacctcctgctccttcttattcatcacccctgagatcaaacagtgtacctctctcaattctttctctcctctcatcaccatatttgccatgtccctttcatccggcctgaaacccatttgcccaaatatagaagaaataaagaaaaagaggttaacagaaagcccaagaagcctagacaatacaaaagaacgtatgtataacaaataacaactgttcaaaaatagaaaatatttttcatccgaggaaaggatgtacagaatgacatttggccctcaaagagatgaagtgacaggccgtaaagctgaattggtaactctgtatggtactcaaaacatcgtcagacatataaaagctaaccggataaaatgggcaggtcatgtggtaaggtcagaggaagatagtgttaaagacagtattttttgagaaaccagacagtagaagatcagtaggccgtatcagaaaaagaggggaaggatgatgttttagccgatttatctaggattggggtacaacgatggcaaatggaagcgcaagatcgtagaagatggaaggctatagtggatgtggtgaagagtcaccccgagttgtaaagccagttaagaagaagaagaaagcgatgtacacaaataggggtggggtggaataaatattaaagaaaaagcacaatctcgtttataagaatgctaggatggtgtctatggcttatagaagtggataaaataattttaaagcaaaaatattactttagtgatggtgtaaatttttatttacacttcgatggcttggtcacgttagacgtagaaatggaaactatgtgggttgaaggacagagctattagaacttgatggaaggagaggtagagcaaaactgagaagatggaaggactgtgtgacaagggacttgggagagaaagatttaggtaaaggaggcaggacagacagaaatgagagtaatgaacagcaacccccgaaaagggaaaacctgagtaagaggaagaaggtgtaattttttatttaaaaggaatgatttagaagatatctgaattaaccttaagagttttggatttgatatatgatt

SEQ ID NO: 7616 - DNA, 1396 bp, Diabrotica virgifera
  SmartBlast Evalue=2E-54; Info="1-acyl-sn-glycerol-3-phosphate acyltransferase alpha, putative n=1 Tax=Pediculus humanus corporis RepID=E0VLP4_PEDHC"
gtggatgagttaaccaagtttgaggtagtaaacgtgctatgattataaattagtattttttaaatggattgttacaaaaaaaagtaacttaaatacgggatgctatactacctgctaatactattggcagtgcttctggtgtggaatatcgagtccagatttcaaaaatgggctaaatatggagtctacgtagcttattgttatttagtgccatttttgattcccctgtggctatttaatcctggagatagtgcaaatgcattactaccagccaggggttttcgaatagtatgtagactcttaggtgtgaaatactccgtagaaggaaaagaaaacgtaaatcccgatagcgggggagtagtcctgattaatcatcaaagtattttagatcttttagttttatccattctatggccgactattccaagatgttcgacaatagccaaaaagtccctcctgtacgtcgtaccaattggtttcgcaattggattatgtggcgccatcttcattgatagagaaaaatcgtcacaatcgcacgaagctgtcaacaagactgccacacaaataaacaaaagacaggctcgagtacttatatttccggaaggaaccagaaacggcggtctaaaactgctacccttcaagaagggtgctttccatttagccatagccgcacaatgtcccatccaacctgtggctgtatcgaggtttaccttcttaggaaagaataaatttacctcaggagaaattaagattaagattcttcccgcgatttctacaaaaaatttgacaacagaagacattccaagattaattgatgagacttacgaactaatgtcaaaaactgtggacgaaatcactcagtaaaaaccatagtgccataaggaaaagaattggatgtggattattttttagaatgtgtgtaagtgagaaatacttgtggggtgccacttagaattttgaacttgtactacgcaatgttaacatctattgatgtcaacacaacttttaaatggagtaaaatatttggttttaaaaaagttttttttagctttaactttagataaaaaatttggaaaaacacatcgtgtttttccatatttgctttaaatagatacctcttttaacgtcaatatgttcttcattagttaaaatgttaattttttgactataaacgttcatttttgcgagtaagtctttaaatttaagtggtgccctttggtttgacttatttttaagatgtgagatacacttatacagtattttgtataagataatatcaaatatgttttataataattacaaatgttttgtaggtatattagatatttatattttgttttatttattgttttggtacgttgttctacctctttagtaataaaatgttaagtactgt

SEQ ID NO: 7617 - DNA, 1394 bp, Diabrotica virgifera
  SmartBlast Evalue=1E-164; Info=Splicing factor 3A subunit 3 n=4 Tax=Apocrita RepID=E2AMI1_9HYME
tcattccgtgggcgtgtctccattctgcaaaatgtctttggaatgcttttgggcctttataaacgtaatttcctacatatctcacaattatagctgatgtttaaaccatgtagtttatacagccagtacggtataggttttccatcccatcccaaaggaagattctttggattatacggaacatcatcgtcaccttcatcaggactatcatcttcgctttcttcattttcgctgtcgtctctttctccgtcagtacgagcttgttttctttgcacattttcttttgtcgcagctctctgcggtgagacccactctgctaatctgtacacttgggcttctaaagttgcaagttctctttgtctcaataactccttttctttgttggctttgcctttgttatttttcgtcataagtgaaggatccaaggaaccttttccttttgttgagaataatctttgagctctttcttccaaagtacctccacatttcaatcctaacgccattaaggcagatttcagtctgtctaaacctaacgatgccaattcttcccaacttgaaaatgcagagaggtccaagtgggctccaacatttgttagtgcagaccctgtttcttttggccatcccggtacacttccattatcccagtttagcagaacctgctcaacttgttcttgtagatcaatgtctaagtcctttagaggctttatacgctgcacaaaccaagtcaaatattcaattaggcataacaaatattttttatattcaccgctttttctctccttcggaatatcgtatagttggtcaaacatacccaaataggtaatgtaatctaccttttctatgccttttaagtttatatacttttcgtaacattcatgtaaatccaaatacttcccgtagccctcctcatctgtaaattctacaaagttagccatatcctcgttaggattttccctggctttggcaaactcatcaaattccactgacataggaacactgatttcgtttggatgccttctgtaaaagtctttgattaattttaacctactgtagaattcttggaactcgttggggcccgtaagagcggctacttcagccttacgctgtccgtctctatcatcataaagatctattagtctttctgttgaagccatatatctatccagcaggtacttttgtcggtggtctgagtttattgcttctctgaaagttgtctttttgtgaagcatttcttttaccatggcatcaattaaacgttctttttcttcatggtaacgacgctgttgttccaaaattgtttccattttgtattaatttgtctttattatcaattatcacaaataaagtgcaaaataaagtacaaacgacaaaacgaaaacgaaacgatttcgatt

SEQ ID NO: 7618 - DNA, 1395 bp, Diabrotica virgifera
  SmartBlast Evalue=0.000000002; Info=APC-like n=6 Tax= melanogaster subgroup RepID=Q9VAS9_DROME
ctttaattcgtccactctcaattcttcaacaatctcctcttcttcattactgaacgtaataacgttgggagcactaccggaaatacttggaaaggtaacatcatttggtgatacttcttcattccaagtgttatcacctgtggataccttataattttcgtccttgttcagatggctagcctgtgataccagttctgctgtaaatcgatctagggattcgatcatcgcgtccggatcgagcattctgttatctaccgctttagaatcatcacaactgcgaattagtctgtcttccatcacgtctaaaattttgtgcaacgaacttctagatccattcttcgtcccttctgggaatgagatctcttctgtaggcgagcatttggccagtgatgtacctgtgaggctgttccttattaggatctctgttctctctcgcacttctcgacgtcgatcgttcgcctctttctccgccacctcctttgtcacgttctcctgtaggatttctggatttttttctacgcctgctaccgcgctggactgatttgctggatcctcttcgttgtagatcaagttgctggtgggcaattcttgtgtgttcccggcaacagacgcagcactcacgttttttggatggtggtcatgtaatggcggacttgatgaatcgtaagagtgcgatacggggttcatcggttgtgatctagaattgggtatatccaagggcttagatctggtttctgagtgacttttaggcattccagaggaaatacattgtgctaaaagagcttgttcggcctctagagagcccaaagattctacactaatggaagatagggattctcttctggactgttggctgacattgtgttcgtgagaagtgttgacattgcctgtttctgagtcctgggttgcagatttatttgaaggtccttcacaatgatttccaccattccttttcaatgcagctacacttccgtccactgtcagatcgctcaaactacttctcaacgaaaaatgacaaggactattttccactgcgtagttttccacctcgtctctcgccgcattcagatacactggaagcgaattatcccttctatttaaatccgcggggtgcatcttcggggcttcgcttcttctcgaatttcctgcgagcgggacgggagagaatttggcggaggcgccgctagacggaatgctacgtcggggtagtgaagacggtatcgacggtttgttgttggcaggaattttcgattcttttttagctttcggcatgccggattggatgcattcggcaagaatgttgtcgttttcacctgataggttactgctatcatcagataaataatctccccttctagaaccttctttaccatttgaaactgataacaaacttaa

SEQ ID NO: 7619 - DNA, 1394 bp, Diabrotica virgifera
  SmartBlast Evalue=5E-71; Info=Putative RNA-binding protein 16 n= 1 Tax=Harpegnathos saltator RepID=E2BYL9_9HYME
gaaaatggcgtcgtaattgtggatgctagttataattgtagaaaaccatgattatcacgtataaacagattttctagttcatataacaacatatatgttacaataaaccatggacgctgtgaagtcgttcaaccaggagctctcgtctttgtacgaggttaagcctcctatttccaaggcaaagatgactgccttaaccagaggggcaattaaagctattaagttttataaacatgtagtgcaaagtgtagaaaagtttatattaaagtgtaaaccagaatataaagtgcctggactgtatgtaatagactctatagtgagacaatctagacatcaatttggatctgacaaggatgtgtttgctccaagattttccaagaatatgcagcagacttttgtcaacttgttcaagtgtccagcagaggataaaagtaaaatcatcagggtcttaaacctgtggcaaaaaaatagtgtatttccaccagaggtgatccagcctctctttgatttagcggatccaaataatcccatacacaaagaaatagaaaatgccatgcagcaatctaccaatggtctaaacagtactacatcgtcaatcatcaaaggttcgcctgcacttcagaagacacccaccaaaggatctcaacaaggaaacgaccttcacggaacaactagcttgaatttggcagatccgagtgtcttacaacaattgcaacaactgcaaaggcttatttcgaaaaatgtggaaaattcagtgcgaactgaaccagttcatttcgataagaaattgctggattttgattatggcgatgacgacgatgatgtacatccatctcctagaccgccacaacctagcgctgacccgtttttaccagttacaagtcttttgacgaatcctgaggtactgagacaacttcagacactacagcaaacaatggctaatgctgtacaaccgcaagaactcgatatggatagggcgaggaaaatgcaagaaatgaaacagcaggaggaggagtttgataaacatcttgcccaaactgtaccgaatctaccgtttgctgccgaatgcgacttccgtagcaaccaaaaccatttgatggtacaaaacaattacttcctcgaaggtatgaaccctccagctccgcagtatcacccagactttgaacaagcctcaagtcaagggatgacagacaaatcacaccaaccatctaatgccgaggtagaggtcatcactctggatcacgatgattcccgttcgccttcaccagctgaagacagatacaggaagaggcgaagaagtcgttctagatcgagggatagaggtagacgggataggagacgatcgcgttctaggtccgggtcgagaaggcatagatcaagatcgagggacaagg

SEQ ID NO: 7620 - DNA, 1395 bp, Diabrotica virgifera
  SmartBlast Evalue=6E-84; Info="UDP-glucuronosyltransferase 1-8, putative n=1 Tax=Pediculus humanus corporis RepID=E0VMM1_PEDHC"
gcagtgtgtaaaacatgttgattaatgtaaattttgtgatttttttcttctgtgaagtggttttgtcagtgaatgcagcgaagattttaatattgttcaatcattttggtaaaagtcactattttcaaggaaaagcattaggccatggccttgctagagctggccatgaagtgactatggttagcgtgtttcaggataacaagaaagtcaagggatacaaagaaatttatctcgatggacttctagagaacttaggagtggaaacaaatttcgtaaaagttcccaaaatgtcatctatgcgtatgctggctatgtttcatccttattctttaaactatactgaaagtacactccagcatcctaagcttcaagctttgatgaaatctgatgaaacattcgacgtcataatactagaagaactgacaaacgcagcactgaaggcactctcttggcatttcaaagctccactaatactcttctgtccctttgcaccacatactcctgtccatattttagcgggaaactctgcacctccagcctatgttgctaacacatttcttggttatacccatttcatgactttctgggaaagatcagtaaacacgttcacctatatatttgagatgttgttttatcattgggtgacaactccagcacaggaagatctgatgaaaaaatatttcccagattcgcccgatttagcggatatcgataaaaatgtttctctttttttaatcaatgaccacgaaagtattaactcgcccattccgcacgttccaaatatgatcaatattctaggctttcaccttcaagataaaactgaattgcccactgatttgaaggagtatatggatgcagcaaaagacggtgcgatattattcagctttggttcatttatacatccatcagaaatggatcctaaaattaagcaagctattatcaaatctctcggtaaactaaagcagaaagtattatggaaaactgacgaagaaaatttcactggaaaacctgctaatatgaagctcagtaaatgggtcccacaagaagcaattttggctcaccctaattgtaagctattcattactcatggtggttttctaagtactattgaaactatttaccatggagtcccgattttggctgttccttttatcggagatcaggacttaaattctggtagaatggtagaattaggcgtcggacttaaaacagaattcagtgaaataacagaagaaaagttagactatcttttaaatcagctgcttaacaataaaaagtacagcgagaatgccaagaagagatctaatttaattcgagatcgccctgtcaaacctatcgatcttgcagtgtattgggttgagtatgtaatcagaaacaaagatctgtctcatatgc

SEQ ID NO: 7621 - DNA, 1387 bp, Diabrotica virgifera
  SmartBlast Evalue=5E-51; Info=Putative reverse transcriptase n= 2 Tax=Takifugu rubripes RepID=Q90Z50_TAKRU
taacaatcctaccagcagataaaggaaatgcaactgtaataatggataaaatacaatatgagaacaaaattacagatctaattacaaatggaccttataccaaattaacgaaggatccaacgaagacactggaaaacaaaatctatagaactttattcaaatttaaaaatgatctaacatactatcaaagaaaattaatgacacctcattacagtaagacaccacatttttatggagtaccgaaaattcataaagcaaatattccacttagacccatttgtagtaccatcaattctccttgtagtgaactatcaaaattcttattaaatattataaaaccatttgcaaataataatgacacatttataaaaaatacaaaacattttttaaacaaattgtcaactattgaatttaatccaaataatattttagtaagttttgacataaacagtttatttacaaatgtgccattagataaaactttaaacataatcaaaacgaaattagagaatgataatacattgacaactaggacaagactaaatgtatcagctataatggagttattgacattatgtactaataatacctattttcaactaaataatgaattctataaacaaaattttggtctagcaatgggctcttctttatctccattattggctaatatatttatggaggatttcgaaactaatatcatttctaaacaaaatttaaaacccactttatggtggagatatatgtagatgacttgttttcaatatggcctcatagatcagaattgttggatacattcctgaatattataaacgattaagaagagacaataaaatttacaatggaaaaggaatataataacagtctgcctttcctcgatgtttgagtctcaaagaaggatactggatatgagactcaagtgtatagaaaaccaacacacaccaacagatatctcaattacaaatcaaatcacaacatcaacgttaaaaggggatcactaaatccttatatgatagagccaaaattacttgttctaacgaaaattcattgttataagaaaaacaattgttaacatctgttttattaaaaaatgattatcctttatcgtttataaataaggaattgtcaagattggatggcatagaacagaacaacgtagaacgggatcctataacatccacaagaaataatatgagaaaaatatcaataccatatataaaaggactatccgagaaacttaaaacaatagaaaataaattcaacatttcaacaacattcaaaacaacaaacacattgttcatagatctatttaatctaaaactaaacctaacaatgaacaagaaagaacaaagaattgtatttataaaataccttgtgaatgcggacc

SEQ ID NO: 7622 - DNA, 1392 bp, Diabrotica virgifera
  SmartBlast Evalue=1E-25; Info=Endonuclease-reverse transcriptase n=1 Tax=Bombyx mori RepID=D5LB38_BOMMO
taaatatcattcatttcttaaatctacacaacaatatcattaaaaatgattcattattaaaaaccgttaagcatatctgtgaatatcgcataccctcaaataaaatgtgtcatcataccgggcttgttcatgcttaaaaacaaaatatgtagacgagatataaatatatgtaataggtaagcagtttttgcaacgacaatccaatcacaatcagtgttgtttataataatagtatcggcatcggctgatataataatttgtttttagcaaagttcgcacctttggggacactgacgtacataaaagcaaattaattgttgagaaaacgtaggcatctaaagttttaaaaggtacttaaagccaaaaatgagatgcaaattacaagaggaagtagaaatctattgtccacagtcctagttattaggattttaggattagaatttttcttaaacatcacctcaaagccgcgtgcctgaaagggaaggaaattagcaaatatctcattgtattgtttctcaaaaaattagaaaataagtatttcattgttccccgaaaaattccccataattttaccattgcatactaatgttgtgtcacgcacaactgacaatctgacattgtttgatatacataggtacacttgatctagcgaaatggggaatagttataattctttgtttttttgtttctccagacaaatacgaatattaggaatatcgtagtgttgataaataaatttttgtgaaaaatttgcaattacgtcagtgtttccccaaaggtgcgagttattacagtaaactggttttgactatagaaaaattcaaataatgcgttgttggtgtggtagtaacttattacacagttaaaatcataattggagatattactaatattttaaacacattgaagatataaaattaaattaattaattaatcttcaagtgtttctgcgatcagaacggtatcgtcggcaaatctcagattgtttaatctaacaccatttattttaatacctatggattgctcagagtgttctattcattacgtcttcggaatagagattaaacagggttggtgacagtatacacccttgtctcacacctcgctttatttcaatttcttcagtagtattattctctactctcactactgctttctgattatagtacatatttgctattagtcggatatctcgtttatctaaattcttttctgccaggagtctgattagatgatcatgccgcactttatcaaaggccttgttataatctgtgaaacacatcagatacagatacatcagtattttataatcagtatttgtactcagtatctaccactgagacccggtatcaaaagtaaccgttacacgtccgcactgattttgcccgtccc

SEQ ID NO: 7623 - DNA, 1395 bp, Diabrotica virgifera
  SmartBlast Evalue=1E-116; Info="Mitochondrial 2- oxoglutarate/malate carrier protein, putative n=1 Tax=Pediculus humanus corporis RepID=E0VNA9_PEDHC"
tcatgcatactcgtttaatagtatcacagtgtaaacatctgtataaatattactctatacataaccagaaaaataaagttcgaacaactattgtataaaaataattataataaaaatataatattatacacattgacatacattttttaaaattaatcaacaaaaacactatgcgctccactacttccgtcatattgctttttggcatatattcattgggatgttccaaagtcaaatgtaaattatttaaagttgcgaaggtttacaaacctcccctactacctttctcccccaagacatacttataataggcggcgttcatttgttccaggaaaacaaatgtaagaacggtgtgtggaccaagtcgtagataatatggaaggaagcccttccagagagcaaataatccttcgtttcttactactcttccaagtacgtccaccagtcctttgtactctggaactccattaacggttttcatgttttgtaacctagttttgcctatgtccaaaggcatagaaactatagtagtgataagtccagatatcatggaagacacgaaatgtaatggtattccatctctcatatgtacatactctactataagttgtttagcttgtgaatacgtcgacaattgagcagcatttacagcaacagcacgacccatggtaggtatagctcctctccataaggtaacaagaccttcttctctgtaaatccttaccaatgcatcgcctacgtttttgtagtttcttctttcttccaatggaagacgtccatctgctgtcatacgaataagggatacctctgccggtgtaccaacaaaagcgccgcaacctcccgccaccattcccatcagcaatttaccaacgaaaccaggtggtgttccgtcggcagatttgaagttgtcgagaaggtaggtatacactcccaatcttgtgcctgtgtatgttaattgtcttaaaagtccagcagataagccattgtatagagagaaaacgccttctttttgaactatcacttgtattgcatgtaatgtacttctgtattctttgggttttccaccaactccactcaactgcattcggttctttactaaatctagcggttggacgaagcaggtcgctcccattcctgcagaagctccaaacacgaattttaaaacattagggatagtcttttgctcagacatttttcacttgaatatttgaatttttcctaaacttcgggagatacaaggaagtcacgacacgacgcgacagaggcagaggtgaaaaaggtcaccggagaggaatttttaagtctctgtatactgatatatcagtatttataattttatcatttgccaagcataaagcataagttcaaacgcgaaacaactttttgaactaattt

SEQ ID NO: 7624 - DNA, 1395 bp, Diabrotica virgifera
  SmartBlast Evalue=1E-92; Info=JmjC domain-containing protein CG2982 n=1 Tax=Camponotus floridanus RepID=E2AWK0_9HYME
cacatttttcacgtaaataaattcataatgaatactccaatttcagcgttttcagtttatagaaaaaagccaaatccaaaaatagttaaaagacagatcgttgtaaaaaaacaggttaaaaagaaaatgactatttctttaaaaaaatgcgtgaataaaatcaagcagaaaaataccaatcctaatccacaaaaattgaaggacactgtaaaaccaagagctgtgataacacataatctaaatcaaaactttaagaaggtagataataaaataaagaaaaccacatctccactaagcacaaaacttaaaaaggtacggtatttcacaataaagatccagtttcggaaagtttaaaattatttaaatggttaattgcacctctaagtccaaccaagtttttttgaacagtactgggaagttaaagccctacacatacaacataattcacctcactactttagtgatatcttgactacagcaagattggatagtatttttagggaatttccgttatactacaccaaaaacattgatgtcgtctcatatgaaaatggtgtaaaagaagttcacaatgaacaaggaaaggtggttgcttctgctttatatgattattattcaaatggttgtagtataagacttctaaatcctcagacgtatgatcaaaaagttcatttattggtatcaacattacaggagtattttggcactttagtgggagcgaatacttatttgacgccaccaaacagccaaggctttgctccacattatgatgatatcgaagcttttgttatacagttagaaggaagaaaacattggaaattgtataaacccaggggtagcgatgttttagctcgtgagtccagtcctaatttaaaacatcatgatattggagaaccttttatgtccgttaccttgaatgctggagatatactttattttcctagaggtacgattcacgagggtaggactgatcctgattgccattcattccatataacagtgtcagtctatcagcataattctttcgccgatttgttagaacatgctttacctgaggccctaaaaaaagcatcacttgacaacatacgttttcggaaaggattaccacttaattatttgaaacacacaggttatgtaaatcgaaatataatatcagaggaaagattaaatataaaggcagaaattgaaaaattatttgactctctgagggattatattgacatcgataaagcagctgatcaattaggtagaaggtttatgtatgattcaatgcccccgacattgtcaaaacaagaagtatgtcatacatctaaatatgatggtgatattatgaaggatggacaaaatttttaacagggccgaaattgatatggatacggaagtacgactacttcg

SEQ ID NO: 7625 - DNA, 1380 bp, Diabrotica virgifera
  SmartBlast Evalue=3E-24; Info=Reverse transcriptase n=2 Tax= Ostrinia nubilalis RepID=A4KWG0_OSTNU
cgtttccgagatgcgaggtgttgaagtttttgtttcaaactgccaatttttttattgctgtaagaccggttgggatatgaaagttacatttgctgggtttcaagaggtagttattgcgcatgttttggcatacaaatagcaattttatattcttcattggcgcgcctacgggtaatggtctgaatttttttaaagaaaaaaatggtacactgatggcagaagaacaggcgggtttttgagagctgctagatcgaccatagaccaccttttttgtatcactcaacttatagaaaaaaaggttgctgtagatcaagaagtccactttttgtttgttgatgtaaaaaaggcctacgatagcatcccccaaaataagttatggaacactctaagacaaacgaacatcaactcaaatctcataacagcagtggaaaaactatatgataacgccaacgccaaagttaaaataggaacgaatgtttccaaaggttttgtagtagacaaaggactgaagcagggatgctgcctagcgccgacacttttcaaaatatatctggaacaagcattaaaactttggaagcggaagtgcagcggcatgggtatacaattaaataataacaacctgtatactctatgttttgctgatgatcaaattgtgattgctaacgaatatgactatctggaatacatgactcggaaaattaatcgaagagtacaaaaaatggggattagaagttaacatagataaaacaatgtacatgaacatcggtggcaacgaacagaatctagttttaaacgacggacaacacattaagtacaacaataaatattcttatttaggagtagaaatcacggacgacggcaaatcagatcaggctataaaaaaacgaaacacttcaaggtagaagggccatatcgcaactaaatagtattatttgggatcgacatatatcaaaaaaataaacatcgaatatacaaccctattataaagagcatagtaatgtatggaagtgacgtgtggcagttaaagacaactactgaaagaacactacaagccacggagatggatactggagacgtgccgcaggaaaatcaaaactggaaagaattaataacgaacgtatacgagagattatgggagtcacacatacgattgtcgaagatataagagtacaacaactaaagtggtatggacatgtgcagagaatgccagaacaccgtctgccaaaacagattctagattggtcaccaaatggaaaaagaaaaagaggccgacccagaaagagctggagaggaaggaatagacagagagatccgagaggtttagacgaagacctttggtaagatagagatgcatggagattgggcatcggaagacgtcgg

SEQ ID NO: 7626 - DNA, 1389 bp, Diabrotica virgifera
  SmartBlast Evalue=2E-67; Info=Tetratricopeptide repeat protein 35-B n=1 Tax=Camponotus floridanus RepID=E2AII0_9HYME
ggaaaaaagtcaaactaaccagaaatcattccaacaaatttcaataaaaacttataaattcattaatattttaattggtttgatagaatagtcgatagctcactgtatcgttcataaaaatgggaaactttagaagggacctagaagaactaaagcagtttagagatagcaatgatagaaaaagcagagaagtagttaacatttggaacagctctattcattccaatgtagacaagctgggaaaagagaaacatgtagtcctggaacaagtttgcatggcagcactagattcgttcaacctgaaaatagcagagatctgcattaaagagctgtatgaagaattcccaaatagttgcagagtacagatattggaatcaatgttacatgaagcagatgagaattttgatagagccttactcatattaaaaaatatcatcaaactggatgctacaaatagttctgccaggaagaggaaaatcgccatacttaagtcacttggcaggaattctgaggctattaaggaattaactgagtatttaaaagtgtttatggctgatatagaagcatggcaagaattgagtgaattgtatttaactgaatttgattacaacaaggcagctttttgtgttgaagaacttatattgcacaatcctcacaatcatctactgcatcaaagatatgccgatattaagtatacccagggtggattagagaatattgaggttgccaggacctactattatcaagcattaaagctaaatcccaacaatatgagggctatgtatgggatttacttaactacttcagcactgttaaacacccaaaaagcagtaactggaaagaagaaagatgcagtaaacaaactgttagagtggattttaaaagaaatcaagcagagatatgttgagaaacaacaaatagatgcattaaaggaagcagtatctgcgttagaaatctgattcagtatttatttggtttcgttttgggtgtttaaatgtttctcgtgaatggtgattacagaattgtttaattgttatttttattgcactttcttttcaaatgttctaaataactagatattcaaggactactccataaatttttagaaaaatgcacgccacaaattaaactattgtttcattttttattttcattcattaatttatttttttactattcattccatttgtgtcataatcaatcatttcatctttgatattacgtgtataccagtaagaaatctcatttttttggaatgaaatacaaaaacatatatgtgagcatttgaagggactttgtttcaattttatgtaagagatttttaatggaaattggttagttttaattttatttaagaatttgttatatttgaaacttaaatatatatta

SEQ ID NO: 7627 - DNA, 1388 bp, Diabrotica virgifera
  SmartBlast Evalue=1E-102; Info=Autophagy-related protein 2-like protein A n=1 Tax=Harpegnathos saltator RepID=E2BCN5_9HYME
gtgaacgtgaatagtgctccatgaagatttttctggtaaaatgtcgtggtatcaaaacattttaccagaaggtataaagaaaaacgtttgtgcgtatttgttacaaagataccttggacaattctttgaagagaaattaacgagagatcaacttaatgttgacttctacaatggcactggcactgtggaaaaaatcagccttgatgttcaggcacttaacgaactcggagaaaaacaaaattggccaattgagtttgtggatggatacatagaaaatctacatgtgagggtgccgtttatgtcgatattaaaagatcctagttatgtagaagtaaaaggatgtaaaattactgttcaaccgaaacaaagacatgaatcggcgacgtctatgttcgaatccatgtggaattcaatgaccagttccatgcagctagctgaggaatgcgcaaagcaagattgtggggtgaatacgtcaaatccgatggaagcttatgaaggaattaaactcttcgcccaaaccattgactcaattctaagtagagtgaaagtaaaatttattgatacagtatttcaaattgaacatgttccaaaacaaagcacaacaggagtaggcatagtcatcaacattgatttgattgaatactcagacgaagcaggcaacgatccctctacagaagaaaatctcgatcagaccaatcaagactcaaagaaagcttacgtcgtgcactcatacactacgaaaaacttcataataacgggaataacgttctcgacggtcgaatttttcagtaaggctcgaacttttagtagatccgtgttgactcaatctcatctagaagccgaaaacgattcgttagttactgtgatagaaagttctaatatagctagtgatttttctctttcgacgccacaaaacgaggaagatgaaggacttccgaaagaggaagacgaagaggaagaagttagcgaagaaaaagatacagaaaaaagttttaacgggcagcgaaatgttatcaagttcggttatatatcaggcacacaagagattagagttaaattgaaacaatcagaaaatcttaccggaccgaaggtatcaatcgacgtaatgctaggatctttcatagtatttttatcaccacgacaattccatgtccttctagaacttgcagatggtttatctaaacccgatactgtggataaaagcaatgtcgcaccaagatcacaatgcacagctaaacccatgacagtactagattaccagagggtcgaacaagaacttcagtatcagttgcagtctctttcagaacttcagattgctggtttgcaagctgctcagggttggtcctccgcacctttagatgataatacagcagatgagaattttcttc

SEQ ID NO: 7628 - DNA, 1390 bp, Diabrotica virgifera
  SmartBlast Evalue=1E-179; Info=Methionine aminopeptidase 1 n=1 Tax=Harpegnathos saltator RepID=E2BLG2_9HYME
atatctcgcaacttttattatttctccagtggacaggtgaaataaaattacattttatttccatatgagtgcagcaagacaggcctcacccatccgctggagggttaaaacacctctcaaattgtttaaaaagaaaacttgtcagttcttatattctaaagcgattgtaaaacaagtatatgtttaatttttgtcattttatggtagacaactgcagaaaacatccaaattactaaaatttgtccataaagtgaggttgtccattcttttcccttcgccgtgtcaaaatttcacagcctgtttcattgactaagagtgtttgttcaaattgggctgaccattggccatcggcagtgactgctgtccatttgtcaggccacatttcatcacgccaagtaccttctgatatcattggttcgattgtaaagcaatggcctggtttcatcacaccaatagctctgttttttgcataatggggtacattgggtgctgtatggaataacctatggatcccatgaccacagtagctcctaaccacctgatagccatggctttgggcatgcttttgaatgatattacctatttctctatatttttctcctggtttaacaatatctatagctttcattagacattcgtgagtaacctttactaagtttttatgcttctcactgacatttcccacaaagaaagtctcattcaagtcaccatggaagcctctgtgataaacagtgacatctacattgcataaatcgccatccacaagtggtctactatcaggaattccatgacaaataacttcattgacagacgtacagcacgatgctgggaattcataataatttagaggagatggataacaatcacgttcaatgcaagcctcatgtactattctatcaatttcatcagtagttactccaacatcacatactcttgcagcttcatctatgacttctctgcctagtctgctagctactttaacgccctcaatttcttcatcatccaacactttaatgagtccagaacctttgacagcttgttcactaagaggatatccttgtgggtgatccgcataatctggtctttgaatctgaggtggtacagttcttttggctgattgtggaaaaggtctcaacttccctgtgtacgaataactgggccaaggattgtaggaatcttctttctttccatctacattttctcctttggctaaagagtggataattttgtgagttttccaattactcttgaagcattcttgtgaacaaaatatggagcccgggattcccagtttaatgcaagtagggcattgtaattttgccggatttaaacaacctggtgtttcacattgacccaaacttgccatttctataatttattttgttgaaat

SEQ ID NO: 7629 - DNA, 1389 bp, Diabrotica virgifera
  SmartBlast Evalue=1E-148; Info=E3 ubiquitin-protein ligase UBR2 n=1 Tax=Camponotus floridanus RepID=E2A1G8_9HYME
cgattagatgatgagctaatgttggtacagtaaacaactgaacagatagagatgatatagagaaagtatggtcgtgatcatctttgataaagtctttcattacttgcccatagtttttggtaaatattttagctaaagctttcttgttctcatactcgagcatcatgcctgatattaacaagcgatgccattggctcctagcgctcttccaaaggcctaaatctttttgtaggatgccctttattatgcacggctctggattctgtggcttcagcacaacatcggcaaaaatagctctgaatccttctccttgtattaagaccttttctagccaatttaatatctttcctgcaaatatctgatgagatataagatgagcatggttaacaagtaccttcaaaggtttgttgccgtgtcgggacgtaaacttctcgatatcttgtttaagatcgcagcagtgctgaaaagatgaacatttcacgatggctctaccttcccggtcgatgttcgtaacaaactctgttgagcttctctgattacatttaagaactttcgttaatgtactaataacctgctcaaaagtatgtatttcatcgttatagagtatagtacagtaagtgtctatatcaaaaaagttttcgacacctccacctaatcgtacatctttaatatgttcggtacttaacatgcgatacgcgtaccatacagcagtctcgaatacgattcgaacgcgttctttcatgtcttcaggtaaaccattgctttggttttcttcggttagtcccgccatatgtatggtgcagaaaggatttctcttccaggcctcgcgatctccacaatcgcaacatcccgcgccgcgggaagtgcccattttatatttgtgattacgatgttcggagttcttgaaacactcgacgcataacacacaggtagggtccataccgcattctctgcaggaatacgtgggttcgcccagcttgaaaactctgccgcaaactgatggaggtttctctgtaatcttctgaagtacaatctcgggatctccattgtatacgaatatgtctaaagtgtttatcaatatatcttgtcctaattcttcgttaaaattccaatttaaacagctttcatccaaagatgggctgtaaatttttgggacccatagcttccacaagtcttcaaaactggccgaattcaatatacccttgctaaagtgttcacgccaggttcccacgatttgtgtcacaagctccttggttctagtagaatcatcagcagagcttccttcaaaagaaatagcatttgttgtcattgcctgggcagcgtcttccatgactgcatcagatcttcttattcagtctgacaaggacaaggttagatctcatgtaaatc

SEQ ID NO: 7630 - DNA, 1382 bp, Diabrotica virgifera
  SmartBlast Evalue=5E-46; Info=Transposable element Tcb2 transposase (Fragment) n=2 Tax=Camponotus floridanus RepID= E1ZYL6_9HYME
tggtctatagaattttcatcagggctcattggtggccagtctagagcctccaacctcaacatcctcaagatattgtatgactgttcctgcggtatgtgcacgggcattatcatgcattagcacaaagttatcatacccaatgaagccggcataaggaaaaacatgcttcttcaaggatgtccgtatgtaccagtcagcattcattcgaatattcacctcaatcagctccgtacgactctcccaactaatgccaccccatagcattatggaaccgccaccaaaactaacattttgtacaagattacattctgcgaaacgttccccagaccttctgtatactcgatcacgtccatctggcttccataattgtatcctcgtttcatttgtgaaaataacttttccccattgatgttcgttctagttaacgtaggcttttgcaaagtgcaacctttgagttttatgccgtggtagaagaagtggaactctggcaggccgttttggattcaaaccaacctctttaagtcttctagtcacaattttgacacttacattaacttatcttgtgataagtaattcatttttgagatggggagctgtaagtgtacgatttcgcaaagatttaagtcttaaatattggtcatctcttggcgctgtatatctttttcgtccttgaccaggtcgccgtttgtattctccagtctcattgtatcgctttactacacgagaaacagtcgactgatggatatccgctattcacgtactatatttttgtctgtaaccctcattttttaacgtaacaattctaacacacactaactcgcttaaatgtggcatatcagcaagaaaactgcagaatcgaaaaataaaactctccaactgacatattctaactgacatttcaacaaaacaagaattgtcaagtcgccaaagcacactttccatactatgtttgttttgttaatttgtgactttattgcatatccggttataaagactatgtttaaccatttatttatctctagtaaattaaactaggtacagcaaataaataaataaagtaagtagataaataaataaataaaaaatacttaacatttcaaagataaaaaataaagaaataataacgattgaagataaaatatgcaatatttttgtcagtgagtatacacatatatatcacaccagtgacgtcatccatctgggcgtaatgacgtaattgaggattttttttaatgagaatataggtcgtgtgatacctcattcgaaaggttattcactaacatgaacattaacataattatttatacaggatgcccaaaaacaaaatttaaaaaaaatcatcgattacgtcatcacgctcagaatgacgtcaccagtgcgat

SEQ ID NO: 7631 - DNA, 1389 bp, Diabrotica virgifera
  SmartBlast Evalue=1E-156; Info=4-hydroxyphenylpyruvate dioxygenase n=1 Tax=Harpegnathos saltator RepID=E2BIZ1_9HYME
gaagctttgaaaaccattattgtttggtggcaatgaccagttattctgacaaaggaccagtgcccactaatggaaaatttttgaatttccaccatttaacattttacgttggaaacgcaaaacaggcggcttcctattatatatcacgattaggatttcaacctgtatgttataaaggtcttgaaactggagatagaaactacgttcaacatgttgtccgccaaaataacatatttctgttgctaacttccccctacaatccaggtgagcaagttttaaatggccacctgataagacatggagatggagtaaaggatatcgcatttgaagttgaaaacttggagggaattgtagaaagagcaaaatcccaaggcgctaaaatcttgagagatatttgggaggaagctgattttgaagggattgttcgttatgctttaatccaaacttatggcgatacaacccacactttaatagataaaagtttataccgaggtcagtttctacctggatattcgccatgtcaaccagatcctctaggaaaagtacttccagccacaaatttggatttcatcgatcatatcgtaggaaaccaggatgacaaagaaatggaatccgttgccaaatggtacgaagatgttttacaattccacagattttggtctgtagatgacagccagattcacactgagtattctgcactaagatctattgtaatggctaactgggaagaaaatataaagatgccaataaacgagcctgctcctggaaagaagaagagtcaaattcaagaatatgttgaatattacggtggagctggagtacaacatattgctcttaacacacaagatattataaccagtgttaagaatttgaaagcccgcggtgtagagtttatggaaattcctgactcttactacaccattttaaaagaacaacttaagtcaagcagaactaaaattgctgaagacctcgacgtactacagaaacttaaaattctgattgactacgatgagaatggatatttgctacagatattcacgaaatgtcttgaagacagaccaactgtcttcttggaaattattcaaagaagaaaccataacggatttggtgcaggaaacttcaaatctcttttcgaagcaatagaaatggaacaagacaaaagaggaaatctataaaatctgtttccaaaagcaagttgtttatggaattgaatatatcacattcccagataaataactagaaattatgggttatatgacaatgcatttcttgcatgtagttctttttattatttttacaatatatattttattcagtaactaagaagggaacacatttagactgagacgctgctgtggttataatatataagatcattagttaggtatg

SEQ ID NO: 7632 - DNA, 1388 bp, Diabrotica virgifera
agtgtttaattgccattacatttatttgtcaggttttccatctctgctataaacaataagaaatgtaatgattatatacctcctcttccctttataatctgtttaagctgaacattattagttacctttgatgtatagtatatttacagttgcaaacacaaataggctcaattattccaagtaaatattatattctagaactgttttcaactagtattagacatgggtaattttaatagtgtagaaattatttttcattttataaaaaatataacaaagttggaatattcgtgtctttgcaaaacctatttaaaatacagatatttttatctaaaagagaaacataacagctaaaagaagattatctaaatgaattttcttcttttttgtccgctgcaatgttatgcatattcaaaacttctagtttctatagtcttctaaaaaataccttacgctacagagaaagacgaagaaattttgggaatttttgaaagatttccaaagacaaatacagatattaaatgttgacgaataaagataatactaaactacacttttaaaagtttcctgtacaaattcacaatttcgttagtaattctattctattctattctccaacttaagttcattccttagtgtaaaaacatagtgaagcatcgcacctcgccaggcacattgctacgcacatcgcatcctcaaaaacaaattattttgttcttcaaacatagctaatataagggccgatttctcatatcgagttcaactcaagtttaacctgaacttttagtgaactacagttaaacgtcaaaacagtatttctcaattcccgttcaaacattgtggtggtttaaactgcgttcaatttgaacgctgaaattcgggcgttcatgaacccagttcagatgatttcagagattacgcttgcctagtattatcatgaaacattgggcgcgttcaccagatgcaaacgttggcaatcagtttgcgctttatgcttctgaacgacttgctaacgtcacagtatatagaggttccacagtaaaatcactcctctgtcggcgctttgatctcaagaagtaataccggcagtacgcaattggtaattcaccagtggtggatgcgggttttccctgttaaaatccgtacgtttctatgtgacttgctatgcaagagtggggcaaaagcgactgccaacattacgcggtcgccatgcgcgactacagactttacttccaatttttcggagagtggttctactgtccctctttatactgtgctaacgtcaaacttgtttggaaagtggtcgccatttttgcaagcataaaatatttaagttgaactttgcaaacgtgttgaaaattgaaaaaatatggcgggaatttaaattg

SEQ ID NO: 7633 - DNA, 1389 bp, Diabrotica virgifera
  SmartBlast Evalue=2E-70; Info=Rho-like protein n=1 Tax= Tribolium castaneum RepID=D6WKP8_TRICA
agtgtttcctttagttatattcccaatacgaacgtaactatacaatgtgtgtttagtgtcaaatatccatcgattgaggatttttttgtcgaaaaaatcgggacactggctgaagaatgtgatatttttgttattgcaaatccgtcgccatgacaactgtaaagataactgtcgtcggagatggtatagtgggaaagacatgtttgctcagtacttacaccaccggacattttcctgccgaatatgtacccaccgtttttgagcattacggacaaaaactcgtagtcgacgatgtagaatatgatatgaccctatgggacactgccggacaagaagattatgaaagacttaggccattgtcttatccacacacaaattgtttcctggtgtgcttttctgtcgataaaaatttggcatcctatgacaacgttattctaaaatgggtaccagaagttagacatttcagcccaaatgttccaattcttctagtagcgacaaaaaaagacttacggacagatcccagcttggcttgctacacgcccgaagaaggcaaaaagctgaaacgaagggtcaaagcgcagggctacatggaatgctctgcgttaatgaacgaagggttggaagaggtcttcatcgaagctatacgggtgtttaaaaagagcaaaaacaaaaaaccagttgctaggcactgtactgttttgtaattttcttccaaataaggactttttaaatatatgccatttaaaattgtgtataatacgataattgcacgttttgttattgctgcttttctaaaatcactttcaattaaaatacagtgtataatactgatgatgttccatttatattgccgaaacgttggatattaacccttaaaactaaaaataattcgactgacattgtaggtgttgaaaggctataaaaattgttttgttatgttttttggactccattcttcttctgggggatctgagaaaaaaaaacaaattagctggaaaatatgcgacaatatctactaaaaaatatggaaaaaataatgatatcagtcctaaaacaactaatgggtgatcagttttagagtttttaattgaaagtagtagcggaatgtaccgttaactatgcaaattattacggtattaaatttttgggttttaaaatataattttttaaaaaagttgttttttcttcttcaaaactatgtaactttttaacatatttgtctgcgtatttttagttcggtattttttaaatttcaaatggcatattcgtttctattgtttatattctcaaggaacaggcttaattgatattttgacacagtatttcagaactggatgtacatttacttatactctttaaatcgtattaaataaataatttattacaaaa

SEQ ID NO: 7634 - DNA, 1386 bp, Diabrotica virgifera
gtataggtatattatttcgtcagacacttaccagcctgttgcgttcataactgtgaagagttattaagaaaaacaacaactcaaattacatcttattttattattaattttgttaaattaaaattaacgtaagctttattttttaatcttataacttaaatagtttttgttgccgttggacaaatgtcataaaaatttgatgccgaataattactaagatcgatgcatggtcaatgaaattaaatactatatatagactacaatacgtacaactcttgacatttcccattaattttgtggcagcaaacaaaatagcgccatctagtggtatgcttttgatataaaaaactataaatttaaaataaaggtatttttatacgattaaaacaaaatacaaatttagttttgagctatttactttaattttatattgttactttttcatttacataatttttcctttttactatcggtaattttatttacgtacgcttttattaaaagattaaaatatttacttataaagttttgtgacaatttgtacatacattctggagagtttcgtgtaagtaacattttaattttaaattatatttaacattttcaacactcttgtatataattttgaaaataccttaaatatatcattaattttatctgcagctcccgttataagttacacctaaatttcacactatcaggtgtattattagaccttagaccgtataacccttagacctaatagtagaaaataaatgtgttatacagttttgggttagccttcttgtaaaatgaaattgcagctaaacaccctctcatcggggagaatgagggcaaagtaatacgcttttttagttaattttgttgacgtcctagttatttgcttagaatccattttaccgaacctattttattgcaacattttgtgtaagaatacaaacacaatataccaagattagctagttatccaacaatttaacaaaattaaatttgtatgtatacgttgaaaaaatgtagttatcaacttgagccggcagaggcgctagtggaaacgtgctgccagttttctgtgggagttggatgtattatagtctgtagtatttgatgaaatgatgcgccgacgtttctatggttaataaaaaatgttcaccaacgtctcgcaggatttttgccgggctttcacttaatgactactctatatatgcaaaagtattagcatttaccaaattaatgttacaatatttatcatgaacaattagttaatcaagcctaaaggagagttcaatttgaaaagcttggatgtattgtttctgacgatgtttagctgttcatattgggctaacttttagaagttgtaatatctatgttgtacatacaatgaaagac

SEQ ID NO: 7635 - DNA, 1374 bp, Diabrotica virgifera
  SmartBlast Evalue=8E-73; Info=Sodium-dependent phosphate transporter n=1 Tax=Culex quinquefasciatus RepID=B0WB17_CULQU
aatttatttgttcacttcgagagtgagatctccagttcaccggctgtggagcttccagctcttctgcattatcttctctaagaatgtgatacatgaatatttggaggataaataagtaatacatttgttagagaaacagtgatggacaaaatgacacctaaaaagactgcagaagtcagaagggttgacaaaggcccggcctttggtgtgagacacattcaagttattttcatgttcttcttgtacctgttaatgtatggaacacgatatagtttctcagtggctttggtagcaatgactcaaagaaccacaccaaatcccgaaatacaggtatacaattggaccaacacagggattcttctctctaccttcttctggggctacgttatcccacaaataccaataggtatactcggtacaaaattcggtactaaatattttctcctagcagcagtttttatgaactctatggctagtctgtggataccaacaatggccgagaagatcggtatagaaggtgtagctgtatgtagggttattcagggatttgcgcagggtctggtaatacccagtgtacatgggctgcttggaaaatgggcacctactaatgaaagatccagtttgtatggaattacagttgtagggtccatattgggcactatagccggcctaagcagtactggattcatctgcgcctcctgggcaggatggcctctaagtttctacatattaccctctttgggcatattctggatggtgctttattatttctatggagctggatgccctgcagatcattcatcaatcactgaagctgaaaagacttatatagaaaattcgctacattcgcaaaatatgcggaatgtggctataccttatagagcaatcttcacttcagtaccatttttggcaaccgtatttatgtatttatgcagtggatggggctttgccatcttcttcactgagttgccgatttacatgaacaaagtcatgcattttgatatccgttcgaatggtgtactatcatcactgccacacgtgtgtaatatgtgcgtgggtatgactatagcactagtgtctgacaaaatgatatcaaagaactatttatcagtaggtgcaactagaaaaattatgtcgtcaacaggttccataggatgtgccatattgctattcgttttagcattcatgccaacaacttacagagcattgtctgtcgttgtgctcatgttagcagcctcgtttcgcagcttaaacggagctggcttcaatatcaatcacttggatctggcacccaatttcggatcactcttatgggattcacgatacagctggagaacttttgcttagctactccaatagccatccagttcatgg

SEQ ID NO: 7636 - DNA, 1377 bp, Diabrotica virgifera
catgatattgtttcgcaaatttcaagaaaatgaaaaaattaataaaccagaatgtaaaggccggataaaaagtgaaggcgacaaaaatataattcgatgaataattcaagggttctattttaaaaaagaaatatcaccaataaacaaaataaaatcgaaatagataaatatattttaccaaactactatcccttccaggcttaaaaagaatcgtaaaggaaattaatttctgatattaaaaaagagatcagaaaagtgtgttagtacaaaaaggtactacaaacaacataagcattgtttacgtttcaaataattctatgaacagtttacccagtgaaaatccgttggtcgcttgggtcacaatcaccgttccaatcgaataattgaacgttatacttagaacgctgacatgacagcgcttgacaccgcgttttacctgataagcgcgcgcttgcatgtgtatgataccactgtgtcatcggtaacttgatacgcgatattaatcaaacgcggcgtctaacactctcatgtgtttagggtcttagtgacgacctgctatcagaagtaacgaagtagcagtacctctattttaatctttttacgcgggtacataaattagacatactatttgtttttttattattctacggtgtcaataattgctataatgacaaaatgtctagcttttagtttacaaaacacgaggtaaagaataataacaaaaataatttcttatataaatattcaaataaagaaaatttaagtatattaaaatatcaaatgccttctagtcagtgtagttatataaaagtgagggacataaattgatttttaaatagttttaaatcttattgtactcactatctgcaataataaaagagttctttatatatgtacaaacaactacctagccacgtttttttttcatagattagtctttgatgaatccttcaatagaacttggttcctatttgcgaatccgagtatcttaaaacaatttgttgtaaatgccgcaaagtatagttaatattattttaagatatatttgtaatataaggcatttgtacataagacacataaaacgtgctagggggtgttatgtaatcctactcgtttatattaaagataaattccatttctgccctgctttgtaaaacctttctatctgtaattttcatgttatcattttaaaacctttggggttcttcttcctttttgttattgcattcatgaaatacaagtacaagatagaaagaggaagacctctaatcagttgaagagacgattctaagaaatatgtttgagagaagaatgaaaacagtattgggcaaagatcagtgggaaacgagaaatcagataaacagagagaatacgacg

SEQ ID NO: 7637 - DNA, 1384 bp, Diabrotica virgifera
  SmartBlast Evalue=6E-12; Info=Endonuclease-reverse transcriptase n=1 Tax=Bombyx mori RepID=D5LB38_BOMMO
cggaggcgaggcatttgcggacatatatttgtgggataaactgtcattgttttttcatgcaaaattgccccatggagtttgtcgcacttattgagatattgatggggagcatggttggttgttgaagtgcctaactttttgattatccaaaatgacattgacctgtctagcagcaatattattacaccgatatctttaattagtgaggctacaatatatttaaaaaaaaacactgaaatcggacaggtggtttgggagattcgagacatcaaacaggcccccatttttaagtcattcctttgattttgccggtgtgtgtataaacaaagacacagagaggatttttagatgatcgattggacggtatgtaaatagaggctatcgttaagatttgaagcgcattttctataacatttaaagcaattattcgtacgaatttgaggcactgtcacatgccttaataaaatagtgcaattgatagattcatggcataccttgacttgtagaggacaagttttcaaaccgaatgttatcttcatcttctttgtgtgccgttggctatcatcgtatacaaggtgatgaaatgtttctcggtcggcagctatatgaaacaatttctcgacctttcgacctgtccattgtctaatgttacgcagtcaggacagttgttttcttccaacccagcgatttccttcgattctgccctgaatgatcaaccgaagtaagcgatatttaggtcatctcattatatgaccgaagtattgaacctttttcatttttatgacatattacacaatcaatgtaatattctcactccacttaccgcaagacatcagcgaaaataaaatcatagcctgctgcttttttatcttaagtttttccgcgctaattgaacctcggaaaaaagtgtcaggatcagattcaaagactctgttgtcggtgtctgcaagaggagtgtgatgggtccctgttgaaagagagtggaaagtagaggtccgacattcaaccacataggaggtgtccgtggtggtaatgttgattatagttactgtcgatattcgttacaaatccttacttttgtataaagtaatcatttacagtattcgttactttgattacttttgttacttttgtatttgagtaccgaaatcatatcgagaatcgaatttctgagtaggtaggtattttgtataggtattccgatataacaacgaccatcaccgatctgtttaacacgttggcggacagaatgtctatagacgtctaatttccattgatattgtgtgacacaaagtctatagaccacacttttaaaataacgaattgtgacaaaaaatcagtgtcaaaaaatgtcacattatataatagagatgcaaattaaatg

SEQ ID NO: 7638 - DNA, 1382 bp, Diabrotica virgifera
atataattacttttattaaggcacatgttagctattttataatatatgctcctaacaggtacaatcaatatacaaatttatataaataatggcactatatataaacaacttctcaaaacgtttatataaaatacatcgaaagcacttttgacttatatgtagaaaaaaatctataaaatgccacaaggaattaatataaaaactttgttttcttttacaaccaacgtcaaaacattcgactggagtgcacagatacaacaaatactttaaatttagaggtaaacaaacaaacatagaagtaaaatttactataaatttaggtgtaatgtaaagaaaatacatgtctaaaatttttataacagattttttatttttggatttacttttcaaatttttatatacgtttaccaggtttacctctaaatcgctggagtaatttgtaaacaaaaaaaaaacaaaaaattaatgggatagaaaatgcataaaaaactcataagtacactaaaataagtataacaatttgcatcgatggacagttgctcgttcaattttattcatggattctgttttaaacatatcaccactacaacataatatataaggaagtacaaggcaaaatatagtgaaatagcaaacaggtaggatgctaatgagaagggctattttgagtacaagaaaaatgttttggttaaagactagaaaaatccaatatagaaaataaatagagttcaaaccaaacccttcttttagtacgtcattaattttgacgtcatatatgattttaagaatgtcgcgaatcagtgcatgacatttttaattaaatctgacagttgacagaatcgtaataagccaaatataaaaaggttattgcattataacacttattgaaatttggtataacaacaaatcaatagtgtttatgataaaaagttctgttctttgatttgtatagtcgcatatattgtatagattattgtcgtatggataattatgtcatggatcatcaggtaaatcattttttccgattatagcgccatctagcaataactagtataatgttatacagggtgtaacaaaaatacaggtcataagttcaaccacatgttctgggaccaaaaatagttcgactgaatctaacttaccttagtacaaatgtgcacacaaaaaaagttacagccccttgaagttacaaaatgaaaatcgatcccttccaatatatcgagaactattagagaccttttcattgaaaatggacatgtggcactcttatgccaatagcatcttaagaaaaaattatagtgaaatttggacaacccataaaatttttatgggggggttttgttccgttaaaccccccccaaacttttgtgtacgctccaatt

SEQ ID NO: 7639 - DNA, 1377 bp, Diabrotica virgifera
actaactgaaagaacaactgccgcaactgttaaaccatattttcggataattttatttaccgttccacatcgttttttttgtagatcaacgaacagaagattatttaaaatgacgatcaagttgtgttaatccatgactcttcagaaaatcctgtcttttgaatatgtgataagatattttaagttaaatataggagaagctaaactcctaacaagtaaatcaatacagattgccgtctataccgatgatatcggcattatgtctcgcagaacgcaagaagtatattcacaattaaagacaaggacaacagagaccggactagaaataaaaatattcgaaagacaaaaaagctaacacaggcaagagctaggggaaacagacgcccagttgaattagaggacgatatcgaaatagtagaaagtttcacataactgagagttgaaatgcataaaacagaagaacaggacattttaaagaataatagtaaagggaaataaagcttgcttttcactcatgtattccgcttcaaaaaacacacactggagattaaaatttagggtctaaaaatttttatcagaccaatagtatgcgagttatggatgcagacatgggtgatcagtgatgaaagaaaatacaaaagaaagctggaagtctttgaatgaaaagtgctgaggaatgtatttggacttattaacgaaaacattataatgcgagttatggatgcagacatgggtgatgacataaaatataaaaagaaagctggaagtctttgaaagaaaactgacaaggaacgtatttggacttattaacgaaaacattgtatagaggtccaggtacaaccataaacttcaataggctggttatatagtgaaaatggaggctaaaatatatataaaatgcaggtcgcaacaccaaacggaaggcaacggaaaaggtgggaggatgatgtgtcagcggacgcgcaaaatttgctagccggaagttggctagggaccagcaaggttggaggtatagtttggaagaagccatggctcgattcggactgtagggccactggaaagagaacagcaactccttaaaaggaaaaagctgaggaagaagaaaaagaatcttgggtcagaatataattgcttattggcctaaaacaagtccaaattggtttcatattcaacacaagcatcatcatcatcagcatccaaccctttgcgtccactgctgcacataggcctccctcattttgtccattgtgctctattttgagcactttgcatccaatttcttttcatccattttcttgagatcgtcagtccaacgagtaggtggtcttcctctacttcttttgtctaatctcggcctccactcaagtaatctcttcg

SEQ ID NO: 7640 - DNA, 1381 bp, Diabrotica virgifera
acttttgtatttgagtaccggtaatcatatcgagaatcgtatttctcagtaggtaggtattttgtataggtattccgatgtaacaacgaccttcatcgatctagataaaaatatagagttctagcattcgatctttgttgatgacatacatacattacatatttcacatattaccttattacatactttacgtataccattatacctccctctgtttcatcttctatcttctcttcacacccctaaaacgcttcataccgataacgatattcggtaacactcgtaaaataccggtcacgtccgttactcgctgggatacgatttattagaaagtaatcaagtgacaagtgtactggttgtagatacaatagtcgttacccgctctgatacgattggtacgaagtaatcagagtaatcaaagtaacgatttgcctttctgtatagtaatcgttactttcggtattcgtaagtaacgagtactttgtaacgaatggatacttgttcaacatcactacagccactgtcgccgatcctcgctgtagtggcgtccattacaaaatcattggcgctacaaaatcgtctgtctaagccactttttggctccactcagtagcgctgcaaagtggctcgtctgtttctgcggtaaatcttacttctccgcaattcactcaattttctatttctttggatactttgactttattcatgaatccgattctatgaattttcttggtagcgtagaaagccaccaaattacagaaagaccaatgaaatcgagaaagcattgtaagaaaaatatgtaagatataagtaaactgttagttttcaaccgagacttacaagcccgtcacaatcttatgttagtgtcaatggaaccaatctgcaaacagttcaaaatattgccaactagaccagtcaaaggaaatccaatgaagaatttaagtcacaaaagcaagattcatgaacgtgaaaaacatactttaaaacagtggttctcaatatttttgagtcatgtaccataaaatactttttattatttttggtaccacctaactgaaatacccacctaactagctacaaaagtgatgctgattttggctgtttttgtgttttgtgtaccaccgcaaataatgatatgtaccaccagtggtacatgtaagacaaattgagaaccgctgctttaaaacacaaaattaaatataccaataagactgagaagactacaatggtccctgcttatgtatggctatgaaacatacacactcaaaagggaacaccaacaagttaaacgcatttgaaatgtggctgtagagaagaatattatgaataagttgaaccacaaaaacagtcaacgtagaagtgttgtcaatgacgaatactc

SEQ ID NO: 7641 - DNA, 1380 bp, Diabrotica virgifera
  SmartBlast Evalue=1E-150; Info=Isocitrate dehydrogenase n=1 Tax= Bombyx mori RepID=D2Y061_BOMMO
agttatttacaaataaaataataataaattattcaaacacattgttaccaaatattcaataatactattgtggcttgaaatcatggtctaatgtcggattgtaatatgtggtcaattattctctgaactacatctgtgcttttggcggtaccacccaaatctggtgtatgaattttatcttcagagatcgttttgaacattgccctttcgattaaatttgcatgttgttggtgtcccaaatgttttaacatatcaacactagcgctcaacatggcaataggattggcaatattttttccagctatggcagtgccagtattacgagtaccaggttcaaatatagcgtaatgatctccgtaattctttccagaaagtaacccagctcctcctactaatccacaaacaacatttgacacgatacttccatacaagttcgtcatgatcattacatcaaattgatggggtttagaaaccagttgcatacaacagttatctataatcatttcattgtgttcaatttctgggtattctttggcaattctttttgatgtttccaaaaataatccatcagagagtttcataatgttggctttatggatagttgttatcttctttctaccattgttctttgcccattcaaaagcaaaccttgcaactctgtcagaattggattctgtcacaactttcatgctctctactacaccatctacactctcgtgttctaacatagcatattcaccctctgtattctgcctgataattacaatgtcaatatctttttgtctagcagggacacctgggtatgatttaacatggagaacattgacaaaaaggtctaattcatttctaattgcaacatttcttgatatgacttcagcactttcactttttgtttcgatgttacctttaatggccacaccattccgttttatagatgtaagtgcatattccaactctgcattagattctgattttggatctatgtcaatgacttcaaaatctactggtgctgcagcatacttaaatacctcccttacatatgccattaattctggaccaatgccacctccaggtaacattgaaactgcatgtctacctccatataaagcaatgggtattgaggtttgtttcttaattaggggtgttttatgttgaagttcaaaggctgacattgtggattgggccctaaagatcctttggcccaaattaaatgtattctttttcataactctggatgccattttaactgattaagaagtaatttcacggtctcaacaattgattaatttaaaattttatcctatggtctccatttattttagccttcacaaacttcacaaataggaagacaagaataacccgtgcttgctcttgtcaaaa

SEQ ID NO: 7642 - DNA, 1379 bp, Diabrotica virgifera
  SmartBlast Evalue=2E-83; Info=Protein diaphanous n=1 Tax= Camponotus floridanus RepID=E2AKP6_9HYME
aaggtcgatgtctatatgtttttctttaaaatcaggatctagcccgccttattgagtactatctgcgttatcacttcttcaattaatttaaaataagctggcctgatattgacatcttccttaatgaacaagagatgttgcaagatactcaaaaaataaggctccgacggcgtatctagagtgatatttttttaagacctcgaagcaatcttgaatatcgtccatgtcgagcctgaccttgtcaaatcgttcgtgccattcgtccgcgtcatcttctcgtctgttttcgaatatttcgaactgagtttttagttggggattactctcgttccttagttcttgtagtttttcgtaaagtccgtttcttacaatttcgtttcttaaatgcatacggaactcgaagtcctccgtttcgcttaataaggcattgatgaattggaaacacatactctgtaattcggcattatcgctggcagtgattccaagtaccacagataggaaccgttctctcgaatgtatctctcccacctcggtaatggctctaagcaccttttttacaccttcttcctcgccgctcttttccaagttcaggatacatagaggtgcaagaatctttaaggcttgtaacatcacagtaggcttttcgtggtccaagcatctggctacagtcaaatgcgcttttgaaaatttgaaaaaagctttaagtcccgtcgtattgttcatgaatttttctaaacatcgtaaacattctgtttgaagtcgaacatctttattccttattcccgtatccaatacttgttcaagtttctgtaaacctcctatagtcccaaacttctctacccaactgactgggttgttagtcaaggctaccctcaagctttccacacagttcaggcatttgttcaactgcaagtactccggattgatgtgttgatccagatatctgtaataatcttcgggatcgttgaatcgactgcccgtgtcgtgttgtcctttctttttgttctgcatcttcaacattgcacgtttctgttccatgggcatttctctaaggggcttctttttgtcgtcgttgaggttcatgtcactcaataactcctcgatcttagcattaacttccttctcgctcatgacgtcgataagttttaggtcttcatcgtcagcgtctcctgtatctatctccgaattgggacgtgctgcctgccccgtggaagtgggcctttgccccgctggccttttcgtagtactcgttttgaaccatgactctaggcgtagctcagctccgatagttttgtttcttttttttactgaaagacatgcgaagagactttttcgcggatttttctttacttttcgaatccatttacacgcgcgatggg

SEQ ID NO: 7643 - DNA, 1375 bp, Diabrotica virgifera
  SmartBlast Evalue=1E-146; Info=Aliphatic nitrilase n=1 Tax= Culex quinquefasciatus RepID=B0W9U3_CULQU
tgaacgcaaacaaggtgaagttatttataaaatatacgagtaccacagtattaaaaacaaacgagtactatctactagaacgctagaaagttattgtaaacgtacatttacattttttattgttaaacatgtcagcaatagaattagatagtatagagagtgtgttaaaaacgctttccattgaagattatgaaaaagtgtgtggtttattatatgggaaaggagtaagcaaaattactttaaaagaggaggtacttcatcttgctgagaagtacgacatagaagttgcaattgaaaaattcatttcccaagaagaacaactccgttctcctagaaatacccgtgttggtcttttccagcacaagacgcctcttccaacatggagtcgtatcaaagaaatgagggacgctatgttcaaactagcctcagaagctttggagattgcatacaaaggaggcgttaacgtattttgtttccaggaagcatggaatatgccgtttgccttttgtacgagggaaaaatcaccatggtgtgaatatgcagaggaagcagaacatggaccaactacagaatttttgaaagggcttgccaagcggtataatatggtgatcctttcgtcaatcttggaaagggattctgtacatggggacacaatttggaatacctgtgttgtgattgataatcatggtgagtatcttgggaaacataggaagaaccatatcccaagagtaggcgatttcaacgagtcgacatattactttgaaggaaataccggacatcctgtgttcaagactgagtttggaaaaattgccattaacatttgttatggaagacatcatccactgaattggctagggtttgcattgaacggtgcggaaattgtgtttaatccttcagctactattggtggtttaagtgaacctttgtggggcgtagaagcaagaaatgcagcaatagcaaattcttattatacttgtgctattaacagagttgggacagaagtttttcaaaatgagttcacgtctggaaatggccaaccagctcataaggattttggacatttttatgggtccagttatgtaaccgctccaaatggttctagaacacatggtttatcacgaacaagaaatggtttgcttattgctgaactagaccttaatctatgtcgccaagtaagagacgtatggggattccaaatgactcaaaggctggatatgtatgcagatctactgaaagaagctattaagcccgactttaaaccacaactcatagagaaatcataactgctctaaaactgaagtattttttgcacgaaaaatgttttgttttgtttattacattttatttaatttgatattaaaatgtgagatcttat

SEQ ID NO: 7644 - DNA, 1377 bp, Diabrotica virgifera
  SmartBlast Evalue=5E-22; Info=Endonuclease-reverse transcriptase n=1 Tax=Bombyx mori RepID=D5LB38_BOMMO
aaacatgtgaagcctttgagagtactaaaacatgaaatcggggagagtaatgtatgtgaaaactgtagagtttcctgaaattgagtttttttttttgtaaaagaatcgcatgtgctgcggcgattttctccgttgtgtaattttacgaatcgatagaagagtattgattctataaggtatgggcgtcggttgtcataggtattttcaagattcttctataaagccagatttcaaagcttctaacttattcatcagcgttatattaagtgtccagacctcgccgttccatacaaaagtattgaccatacatagcattgcagaaaacgatatctaaggcttatattaatgctactgttacaaaataagcttttcattttgataaagcctggtcaggctacttctgttctcactcttactttttgattataatcaacttgattgttgaaccagcagccaagatattgtttacgtattcaagctgttggtggttcacataatatattggaaggggtaactttttgttccttgatatttttataactttggtttttagtaattcattttcatccccattttttcacaactctcagtaactttatatagtatctggagactgtagtcagaatcggtcattaaaacagcgtcatctgcatagcggatgttatttactctttgaccgtttatcttgattccttctgaagagtgcgataaagcgttcgcaaatgttacctcagagtaaacgttaaaagtatcggtgatggcataccaccggtgatggcctaccactctgatacctagttctatttccattggctttgacgtattcaactccaactctaaattttctttttttttgcttatattatattcccagtacacaaaaaggcacaagagaaaaaatcgtggttgaacttcgtagtgaaatcaagattattaaaataggtaatggtatctaaagtagtttatatttactatatttttatttgtttccaattgaaatgtgggtattttactatttttttttcgttaggccaacgttcctggtcttacagtattttataactatagtatatccccaaaatgccggttaaacaaatatattagcaatatttttatttatttctcatatttttcaattccataatcatcattttgtcttccagaacatagaggatctcaaatatatcgaaaactcggagtaatattatctttctaaatacagaagaaagtaattagggacaacaggcacaataactaaacctcatacttatactttatttatttataaagaatactgctcaccttttactccaaatttctacatatttatataatggaacaaagaaaaattatgaggccataaaattaacaccagac

SEQ ID NO: 7645 - DNA, 1380 bp, Diabrotica virgifera
  SmartBlast Evalue=1E-47; Info=WW domain-binding protein 11 n=2 Tax=Formicidae RepID=E2AXA8_9HYME
tgccaaacatgcttttatttttttaagtttgtaaatgtaaactttttaatcatctaatagaaaaatcatattgaattaaaaatgggacgacgtgcgattaataccaccaaaagtggtaaatacatgaatcctacagatcaagccagaaaagaggctaggaagcaagaattaaagaaaaataaaaagcagcgacagatggtaagagcagctgtactaaagggaaaagacccccaacaaattttagaagaaatggaaaagatagatcaaatggagttcaatgtaaaccaaccatcgcctctaaatgaaaaagtattaaaggataagagaaaaaagcttcgagatacattagatagagttcttagtatgtattataaagatgatcctgaaaagtgggttgatttgaaaaggcgacagacagaatatgaacaaaagaaaaaccaactagtagtcttttatgagtcagtgaaaagtgctcagcaagttacagtagatgaaattccattgcctcaactgccacaaaaaattactactatcacaaacacacctgcacagattcctttacctgcagtagaaagaaaacaggagcataccatatattctattgctacagcactaaaactgcagtcattgggtcaaccagtaagagaaccacccggttgtccacctggtccacctcctgaaataaatgatgaaggagaaatagaagaatttggtactaagattcaagatgaagtcaaagatgcagagaaaaaagatatagactcagaagaaacttcacctgctaaacctacatctttacaacaaaaaatggtggctctgtctggtcaaaatgttgatgagtttatgaaagaaatggaaactgtacagaaaaaggttgatatacatcgtattgatgagcaacgggcaaaattgactgttaatatagaaccattggtaccaccaggcacagaaatgcccaatataccatctcaagcacctgctgtacctccacatatattccctggtaacataagactgcctccaggtccacctccaggaagacttatgccccctggtcctccaccaggtctacctcccagattaccaattagattgccccaagtagcaacaaggatgataagattgacaccaccacaacttatccagcctgtattatctgcagcaccacagttaatcaataggtctgattctgtgaagcaaggagcaacaatttctgccaaacctcaaataagaaatctcagtgcagatgtcaccaggtttgtcccatctgctctaagggttaagcgagaagacaagaaacatgtcaagaacccgagtgcttttgctagagaaatgaaacagaaggaatttactatgcaccagaatgcccttgcaggtcat

SEQ ID NO: 7646 - DNA, 1370 bp, Diabrotica virgifera
taagataaacagtttccagtttcacagtcgccaaaaacacattagtgaaagatttatagccaaagatcactttggcggttagaattagcgtaaacacgtagagaaataaaaatttatctattcacgagaaacacaacctctgcctatggctgatccaatatcttgagaacgaaagaaccaaacatttccacgcaatacacggtacaattcctgaaacggatttagtatacagggtgaaacgatagtattagggattcaaaaacgttaatgatttttgtacccgttacagtaccgaatacagttttcatgtagaatcagaacctgcaatggaaaatagggtttcctatataaggcagcggttagacaccgcgataaattcgagtaatttatcgatatcgatcgagttgtttcaatttatcgttgtgtgtaaacggtacatcgtagcgatttatcggaattggagttggtatcggattgcatcaatttattgtaacgatctagttgtttcagtttataatcaatcgcgacaatatatcgcagcgtctaaacagctttaaaaaatcaataaatcgtcacaaatttatcgtcacaataaactgctcgcatttacagcggcgtctaaacgccacttcaggcagggtttagatgctacgataaattagagcaatttatcgatatctattgagttgtttcaatatatcgtcgcgtataaacggtaccgtaataaataaataccgtagcgatttattgttacgataaatctaaaccagctttaagaaataaacatttaagtgttcatatcgttccatttaatttgtatggaagtacttaaagagtgggatagttgataaagatttttaaaatactgtatcatttttaaaccctttatcgatgattgttttacttatgtatctactgtagaagtctgttcaatgttcgtgtttgtactattctagttattgttttttagttttagtttacaaaattaattttaatgtggttaggaaccagtgaaataatatatatttaagaatgtaaacgagtttggatattgtgtactggcattatgcaggttgagtattgataacacagaccgacaggcctgaaacagtgagtatactttccgaatctttttggtgtgctgaatacgaatctgaatactccaaattgccggattggttcttgtttctgagatatcctaactttaacgtgcaaaaaatagcgctttttctgtaaaattgattgttgtcgatttatacgcgatttaaaatttgaaaaatgcgaagatggccttttttcaggtcttaataactcgattaaaaaattattattatattgcactaattgttaataattaaaaataacagatt

SEQ ID NO: 7647 - DNA, 1379 bp, Diabrotica virgifera
  SmartBlast Evalue=1E-101; Info=Protein 5NUC n=1 Tax= Harpegnathos saltator RepID=E2BRD9_9HYME
ttcagtgctactcgaactgcgtttcgttcagaaactcaaatgtctcgacagcaaaatagttcatagaaattaagtgttgtgtagcagctacgtatacctccaattcagtgcggtgccaaaaataatattaaagtgcaacaactacaatgaaatacgccgcgctcttatttacttttctaaacctattgcatttgattttctgcgatttcgacctagtaattttacataataacgacattcacggtagatttgaacaaactgaacgaaattcgggaacttgccagccgaaaaacaggaacaccacatgcattggaggttttgccaggactgcccatgtgatacggaaacacagggaagctgcacagaatggaacaggaccggaagttctttatttatacgctggtgatacttttatcggaactgtatggtatactgtacatacatggaacataagttcgactttcatgaatcttcttagacctgatgcacaatgtcttggaaatcatgagttcgacaaaggaacgaaagaacttggacaatatttatcgaagttgacattccctacagttacttgcaacttggacttatcactagaacctaacatcacaccttacgttcaaaaatacataattattgaaaaagctggcagaaagatcggaataattggatatttgacacccgaaaccaagaaaatatccagtccggaacaaacaatatttttagatgaaattgaagaaatcaataaacaggccgaacttttggaccaacagggaattaaaatcattatagcagtaggtcattctggctacctaaaggacaaggaaatcgccgaaaaggtcccgttagtagatgtggtagtgggtgggcatacgaacacctttctttggaatggaccgcaaccagatacagatacaattgacgggccatacccaaccgtaataactcaaccttccgggaagaaagtacctgtagttcaagcttatgcttatacaaaatatttaggaagactgaatcttactttcaacgacaatggtgaagtaactgcttattctggtcaaccagtactgcttgagaactccttagcagaggatgaagatattttgaatgaattagaaatttatcgaccagaggtagacagagttaacaatttaacagcgggggcactacaagttaccttagatggaagcaccgccagctgtaggcacgaggaatgcaactttggtaatttaatcacagatgcttttgtactctacatggcaaaccaatctgctgaaagttggacgaatgcgccgataggtattgtaaacggtggaactatcagaactacaatcaccccatatccatcgaaatcagtgagtcggggggaactgttagcagct

SEQ ID NO: 7648 - DNA, 1357 bp, Diabrotica virgifera
cttcttaaactagtaattaattagtttcatatcgttcctcatactgagcgtgtctagattaacaaatctaggacgattaagattctgtgtatttatatttggaaaattttcacatccagatagacattgtacatattttatagccatctaactggtagcctttaatagttttttcaacgtcacgtttctcatttctgcaacatagttacttttttacaaattgtgaggatttccaaaatttcgagaagtttttctaccagggtattacatcaaatagaatacgaatttttagaaattttacgcccgtccgtacggatgtacacttgtcaattatcgcattacttatgtgtgccagtttttgaaatagatatttgcactttagtcttcaacatatattctatagtatctataggatgagtaaattttcactcgaactgttgatgtcaaacatattctttgggatattgactaagataaccaaatccttattttctactcacgtaattaataaaactgtgtatcacttgtgatggttataacatgactgtgtgttataatacgactgttaggggcggtatctacacggccgtattggtaacgtaacaacgtgttaacacacgttaattaaagtaaatataaaatgaataataataaaataattaagaaataaaacaaaaatatgtgtatagggagggaacatacataaattgtaaatattgcaaacatattattactaaaattacatggaacttaaagcatagaaaataatggaatataaaggtataatacggtaacaccacaatttttgaaatctttcgtactttagtatttgtgtggcccaacttccatgtatgtacttggttttttcagacattacatttaaacagttttaaaatcagaaatatgtgctataaattgagtgttacacatattttgctaataagcacgtggaccttttttagtgttttatgccatcttgtgcacaaaatatttctcatttttgacaacttttgcattttttgtatattattgtaatataaaataaatgagttaatatactcgtatgatatcccaaagtaaaaaatacatgtgtattgaatattatcgactttactacataattttttggacatctcaatgcatcctgcatcattcaaaattcactccattgcatgcgtagccgaccttctctgttctagttgaaatatcagtagtagatcattattaattaaacttctctatatgtactgttcctatttcaataagaatgtaataatatcgtttaactgacattcaagatattattttcgattattttactctcttacaacgttttactctcaaatcttcaaataaa

SEQ ID NO: 7649 - DNA, 1379 bp, Diabrotica virgifera
  SmartBlast Evalue=1E-150; Info=AP-2 complex subunit alpha n=1 Tax=Camponotus floridanus RepID=E2A8U3_9HYME
ggtcttcaaacagcacagcaacttacgctcagctgatgccgagctccaacaaagagcatcagaatacctccaactgagtattattgctagttctgatgttctagcgactgtcttagaagaaatgcctgctttcccagaaagagagagttccattcttgccgtgttgaagaagaagaagccaggacgagtaccagaaaatgagattaaagacagcaagagcccgacaccagtctcaactcatacaaatgatacgaataatacaaattcaggttctgcagatctcctgggattgtctagccctgcatcttctgttccaaactcggcaaatacaggtgttctcctagatgtattaggagacatatacagtggtggaaaacaagcaaataacaactcttctttgtccaacagaaattggtctgttgatgccaaaaagtttgtttgcaagaataatggtgttctctttgaaaatgatctgatccagataggtgtgaagagcgaatttagacagaacttgggtcgcctaggcttgttttacggaaataaaactagcacaccgatacataacttcatgactactttacaatggccagacgagaacaatgtaaaattggcgatacatatcaaaccagttgaaccagttcttgaagccggtgctcaaatccagcaaatgataaatgcagaatgcatggatgactacacagattcacctagcattgctgtcacatttgtgtgtaataaaatgccccacaagataaatattaagcttcccttaacaataaacaaattcttcgaacctacggaaatgaacggcgaatcattttttgcccgatggaaaaatcttggaaatactaatcaacaaagatctcaaaaaatattcaaagcttcatctccaatggatcttcaggcagctagaacaaaaattattggctttggaatgcaacttttagaaggaatcgatccaaatccagataatttcgtatgtgctggaattatccatatgagatcacagcaagtcggctgtcttcttcgcttagaaccaaataagaatgctcagatgtacagactgacagtcagatcgagtaaggagtctgtttctattgaactttgtgatcttctagcagaccaattttaaagtttaaggaagctagcaaagaagatattattgaatagttaagttttgttgattatagaaatttgtaaatgttttctaagttatttgacaatgtatgttctcgccgttttatagtccgaacgcttttgaagctatatgtatattttagtatctgttgttaataattgattgattgaattgtatatacgtcgtgttcatttttctaatttttgtatatatgcgttcttggcaaataaacatatcatat

SEQ ID NO: 7650 - DNA, 1375 bp, Diabrotica virgifera
  SmartBlast Evalue=1E-123; Info=rRNA 2'-O-methyltransferase fibrillarin n=14 Tax=Diptera RepID=FBRL_DROME
gttttctaaagctcttggcctgaaatcagcacgtggtggaatatattgttgaatttgtttattatatagttatttagttcaattatgggtaaaccagatttttctccaggaggtggtagaggaggccgaggtggcttcggcggtggccgaggaggaggaggaggatttgggggcggccgaggaggcggcggtggacgtggtggttttggcggcggtggacgaggaggtggcggcggccgtggtggcttcggtgggggccgtggaggaggaggacgaggaggctttggtggtcgtggaggtggcgaccgcggaggtggcggcagaggaggatttggtggccgtgggggcggaggccgtggaggtggaagaggtagaggtggtggaggaggcggattcaagggaggaaagaccgtagttattgaaccacacaggcacgaaggagttttcattgcgagagggaaagaagatgctctagtcacacttaatcttgttcctgggtctgaagtttatggagagaagaggatatctgttgagaatgaaggtgaaaaaacagaatacagagtttggaatccattcagaagcaaactagcagctgccatattaggaggtgtagaccaaatccacatgccaccaggcagtaaagtcctctacctaggagctgcatctggaacaacagtatcacacgtttcagatgttgttggtcctgaaggtctcgtatatgcagtagaattctcacaccgatcaggcagagatttaataaatgtcgccaagaaacgtacaaatataatcccaataattgaagatgctagacacccccacaaatacagaatgctggtaggaatggtagatactatattcgctgatgtagctcagccagatcaagctagaatcgtggctctgaatgctcagtatttccttaaaaataatggacattttgttatttctattaaagcatcttgtatagattccactgcacagcctgaggctgtgtttgcgtcagaagttaaaaaattacaagcagataaactgaaacctcaagaacagctcacgttagagccttacgaaagagaccatgctgtcgtggtgggtgtttttaggccgccacctaagaataactaaattttttacttgtttagatcgtgttcagttcataattgtttgataagttgttatagtagctttaagaactctaggatatcggcaaacttcttagtttgggcatcgtttgttttattaattgatatatttatgtatgtctacctcatatattgtaggtacataataaataacaaagaaaggcaattacaggatcaccaaaagagagcgttgatttaactatgcagaaactgtttctgcattttaatttttatatgga

SEQ ID NO: 7651 - DNA, 1377 bp, Diabrotica virgifera
  SmartBlast Evalue=1E-115; Info=Cytochrome P450 6BQ10 n=1 Tax= Tribolium castaneum RepID=D2A097_TRICA
atctcatacctatacataatctaggaccttctccaaatgataggaatgcaaaattagatctacccactgaattttctttactaaatctatcgggatcgaatttcagaggatctggatatatctctggatcgtgatgaacggccatcactggtatttgtacagctgtacctttcttaatcgttaatttagagtctacttcgtaggttcgtgtacaaactcttggaagtattggaattggtgggtattttcttagggtttccaaaatagtttgttccaaatattccatctcttttagagattcgtatgtcaattcaccgtcgtgcttttctaaaacgtccaagatttcagctctaagtctgtcttgaatatcttggttttgggccaattctaccaaagcaaaggtcattgtggtagacgaagtttcaaatccagcaaggaagaaggttagagaatgagcggttacttcttcaatcgtgaggaaaggtttgccatgggtagattttttcattacttcatcatctgttacagttcctgtatttttaagttctattaacatctgcaaaaagtcctttctgtaaataccattcttttccctgtactcaattgtactccttacaagattcgagaaaaatctgtcaacatcttcgtcagtctgtttataactaaaaagtgttagcattttatttgaaaagtacattcgcattagttgcttatatctttgtctaatgccgaaggccttttgggattgaattctgaactcattgtctggttcgatcatgcagtgacagtcaataccaaaggctaccgatccaatgatgtcagtggtaaatctagccagtagctccttgatgaagactggttctttcttagctgcttcttgcgctaataatttttcaaaaccttttgattgggtggcaagaatgtgaaacatcatcttcattttacctgacgtaaaagtaggggttagcttggctctatggttcctccagttttctccttccaacataaacaggcctccactaataggatcgaccttggtattaatgtacaaaccatggtcagtgaaatgtccaaagtcctttgacattatagtctttattaattccaaatctacaggtatccaagtaggttgtgttagctggtagagtcctccatatttcaatcctttcttctttacgtctgagtagaattttttgtagaaatcaaagtttgatattttaccctttcgtacatcttggaagctgccgttcggaaagactggttctacggtatatacgcctcttctttgccagtacccatacacccattttacgtatagataagcaacaatgggtagggcaagtaaaaataaacaaaatataataacatcgtgataat

SEQ ID NO: 7652 - DNA, 1376 bp, Diabrotica virgifera
  SmartBlast Evalue=2E-74; Info=Receptor type guanylyl cyclase n= 1 Tax=Bombyx mori RepID=Q9BPR0_BOMMO
aaggtcggagtaaactatggaattatactgacttgtgcatcccatgaaaatgttagaaaactggtaatagcagccacccaattaaaaatgatggacagaggagaatacacgttttttaatatcgactcatataatcatgcagacattccgtcacaaccatggataagtttgaacgatacagtggaaaacaataatctagccaaaataggataccaaaatgtatacagcattttacctaaggtagaaactgattatgcagctgttgctaacaaatcccggatcaggggatcgtcttatttggacgcaatatatgacggcatgatgatgtttacccagtcgctcaaaaatgtatcagatggatttacggacactaatgtttccacctgtcagttgttatatcactcaatggggaataaatttgaaggaaggaacaacgaatcttttcagatgaattgtaatggtgtcagaacaagagaagttgctttggttcatatgaactccagcggagttctagaacttgtaggtctgtacaattcgacatacaaagaggtgacagtttggaaagtacacgatatcttcaaacaaattagcgatacacccaaatgtggctacgatatgtctaaatgtcctacctatgatgttgtgaaaattttgcttgtggttttaattttagtcattgttttgggtatgttggtggttgcattaatcttatataggcaaattaaattaaggagagaaatagaagcaaagatatggaaagtgcatcctcgtgatgttgtaaccacacacaataaacctcgcgctagtatcctttcgtccagttcttatagggaatacgatggacttagcttgcctggcgataaacaaatcttcactaatgttgcgctgtataaaggtagtcgtgtagctgtcaaaaacttacgggcagaaaaaatcgaacttatccatactcacctgtacgaactgaaagtgatgaaggacttatcccacgataacttagtgaagtttttcggtgcatgtttggacataccaaattttatactgaatgaatattgtgcaagaggaagtttgcaggacattttagaaaatgaagaagttcagctggactggacatttagaatctcgttaataatggacttggtgaggggtatgcactatctacatcgaagtcctattaaataccatggttccttgaagtctaccaattgcttagtagacagcagatttgtactgaaaattgctgattttggtttgtgctttctcagggaatacgccaatgaagatgttattgacaagactaaccattctttctggcaaagacaactgtggacagctcccgaactccttaacctaccagctgttccagacagaggaac

SEQ ID NO: 7653 - DNA, 1376 bp, Diabrotica virgifera
  SmartBlast Evalue=0; Info=Dynein heavy chain n=1 Tax=Tribolium castaneum RepID=D6WRL4_TRICA
atccaaagtgggcactacaacatcaggtgaagcaaccttgtgcgtctcaatctcaatttgtggcactttattggaccacagcgaccattctccctcgatggtgacctcgtagtcgattataggcatgttgttgtctggaggaagcggtaccgttgttacagatctgataaaatctcccagatcagaacgaatcttcagtttggcgtcaccagcgaaactccaaaggatggaatatatcaaacattttggaatatatttgtctaagacatcattggttaatggaaagtcgggatgcatgtggttatattggagaacgtttcttacggcttgatttaacatagagaataacgagctgagtgctctaagacgtgtgaagtccataatatgttcttgttccatcgcatattccagacaacgtacgactagaccatcgggtgataagtatggttgtagtagattgacaacgtcgacttgtagttgaagagtgggagaaagcatatcgtctttgtcgtttttcttgccaaagccgctatcttcgctttcttccagagggatattcctcaaacgaagaatatagttttcgaaaatcatgtcagttgacaagacatcttcagagaaccagaccataccgcaacgagaaaccgtggctagtgtcgcatatttcaagtcttgaacctcgaacataaccctaacgtttggaggtagggaaagacgttcaccgttgggcagagtcaacaatttgttgtcatcaagtactgaattcaagttttctacccactcaggatctacgtcaccgtcgaagatgatccattgacgtttgttaatttctcccctgacgttgtcaataattttccttaatatgtgagtgaagagaccgtccgtccattccctggtattgggatccaaaacaccatacagcgcttctttgctaatagcctttggatcgatgacatgtgcaactccttcaacgccttcgaatctttcaagagctttaaggagaactctccatgccgaactcttaccggaaccgcttggaccgaccatcatcaaaccatgattcaaatttgatatttggtaaagttgaagtaccttctccatccaagctgatcctcgttcgtctccttctccacataccaaatactcttcagaacatacttttctgatttcatccttaagacctttcatttctgctcttgtgtactgaacattagggaatacatcattcaacaaactgaagagaagtggtatatcttcagccaccaacttgggtaccatggtttcgcacactgattggatcaagatttcttgctctggcaaaattctcagcgatgctggcttcatcgatgttggtttcgccacgttgggtcattccttcc

SEQ ID NO: 7654 - DNA, 1376 bp, Diabrotica virgifera
agggagagccacggcccccctgcccatgggtatgagagcccatgaaagtaggggagcattggatgctaaatttgcagatactaaagcgttatggggacctattgcttttgggttgtaaaaattaggtccgaaaaccaaaataaattaagttttccattttaatggggagcttccatttttctatttaattttcaatttccaaaaattgaaaataatttgaaaaaatgtctcaaataaaagttacttatttttacgtaaggaattcaaatctgcaataaaaaaatggtggttcctatttaagatttcaaagtaaccccacccacctccgtgggggtcatgtttggtacccttcgataatttttgaaaaatattaaacacatatttttcagtctttcgatctgatatcgcgaaatatcgcggggttcttatttaaaattttaaattccctatatttttcgatagtactttttccattggatgtgttgttagtgagggcaaactggtccaaaatgacatattttcaaaaacactcccaaaaaactttatttatgtgtctacaaacattcatttaaggccaaaagggttctgtagttcatgtatctttctattaaggagacaaaaatgttgtgttatttattcaactacttcatctttagacgtttattaattattataaattttgattagatacacttttccaagaaattaatacaccaccttaaaaattggttatttttaatgtctgtaatttcctaaacctgttgtccgatttaaatgatttttttaacatgttatgtttaacgtgctttatttttaatatgatttattctttaaacaaaatcgctgtaataatattgttgctagacaggtaaattgtcattgtgtaccgggtgtaccaatcaaactgtgattttttgtcgcgtcactctgtggaatattctagcatttataaatactgaaattaaaatccaactatagcctcatgtttttttaacattctgttttttgattcatttggttatgttggataatacaaaagttaggtacttaaataactagccttgtttttcatcaatacagggtgttttcaaatgtccgatatgctcgctaagagcggttccagacccgtcggctggagaaagaggaggtgggtttagtcggtaggcggctcgtgatatagatagggcgggccgaatccgacacacctgggacaccttcccagacggtcttaagaagatatccacctccaaaaaaaaaaaaacaaaaaagggtgtttttaaataagtatggcagactttaaggggtaattctgcatgaaaaaatatcctagtttgctttataaacgtatgtccgcaaatgcttcgtttccgagatag

SEQ ID NO: 7655 - DNA, 1375 bp, Diabrotica virgifera
  SmartBlast Evalue=1E-127; Info=Serpin peptidase inhibitor 28 n= 1 Tax=Tribolium castaneum RepID=D6WMA4_TRICA
ggccgacgaatttgaccgaacaatcagtctattttactgctgctctatgtattcctacaaagaataccgtgtttgcgttgtgattgtaaataaaatatataaacggtctgttgcattggaacttaacgatctcctccttttctcccaacattctaaatgaaaaaagcgcggtagctgctgcagcttcagcaccgttctcgttaatttctattctcgccttatgtacaccttcgccaagagatactttttttcgggatagtgcactgaagtcagcgtttgttttgaataggctgcccacacccaaagagtttaaaatcggagtcatttccaaagtggtttctaaactgaatttgggaaaggcgagttgaacagttttggacactaaactgtcattttcgacaatattcttaaagtttgccaaagttaatttctttaatgtagcttctatagagttttcagtatttgaaaatggagggagaagaatatacatacttatattatctcccttatacggcatttccaaaatgtgggctcccaaagattcagacacgtcatgtttaaatgttccttcgacatgcatcatatcaaccataatctgctttgtgggactcacataaaacacttcttgtttggtatattctggtggaaacttattctcccacaaccctttgaaatatgctgcatttaccaaaaccaaatttgtagatgagtcaatcgtaccaggaggaatgagatctttaatcatattgtgtgtaacattttctacccagtgatttatttgttgtctagcagcttcgggactacttttaaaatctttcatttccaattcacttggaaaatcatttaatacacattcgcgcactggtacttcgttttctacatatattttgttagcgctggtgaattcataaggtgcacttttggctagaagttgggtcacgaatttatctactttataagcggcgtaaatgtctgctttctcctgagcttgattcagtcgtagaactttctttaaataactttccgtctgtcgacctgataagaaatacgccataagtaaagcatggtacgtagaatacggcgagaagaagagattttcattgggaatcactttgttgacggcgttcagtaaagccaacgaaaagtcctgttgtccagaataaaggtctggggcggctttttgacttggttgattaccagtaaatggagggaagcattgctgtaaggattccttgaataatgccgcaacgagcaaggctatcactaaggttatcttcatgtcgtctatttacttcttgtctaactaatactatagaatcacaaaatataccagaacacttttttccaactatctacctagcacttcataccttta

SEQ ID NO: 7656 - DNA, 1375 bp, Diabrotica virgifera
  SmartBlast Evalue=1E-80; Info=Lethal(2)neighbour of tid protein n=1 Tax=Camponotus floridanus RepID=E2AE79_9HYME
gtgctcataatatcttttattgttttctcagataaaaataaatatctatatatttacaaatttacactgttatttacggcacaatagtttttgtaaatcatattttaaaaatctcaaaaacagccatagaattaaattgtttatatattgataccagggaaaatattttaataacaaatacacattttttaacaacttgacaacactgcaacacaatattatgccataatataaagtataaaaaattgattttgttcatttaccactgatttatttcttcattgtcctgtaaacaccaaataacaagacaacatggcaacaatgtaacaagccactagagaaatttgtacttgggtaaacattccagcaatattcaatcaatgccaagagcaaaaatctgtactgtatcctgtattcagtagagaacaccaaatataacaaactatgaaaataccagctgtaaaactgataatgcagggatctagcacaagcaactcctattaaattggaaacaaagaatggaagtacaaacaattgagctattttagaaagcttgtcttcaaacttagaatcgttctcttcttttacccttccactatcttttagttgactctcgaaagatttgaggaacgctttttggccttttcgacatttttttgttctcttttctttctttttcttcagtctcttgtttttcttttgataaatgcagtctatattcttcagttaccaccttaagtttagcatagcttgttaaatatctcttgaaatgtggcaaaaacaacaacaaaagtagtatgtgtaaaagaagaagacctatatgtagaattcgattttcaaaaatttctctgggtagaaaacgaaagttcactgtccatttatgttcaaatacacgacccaaatcaaagctgcctttaatatatgatataaaattcccgtacaaaaagggaagacctaatacaagttgaattaaaccacaaataaataaattaacaaaagtttctaaatacgttaaatttactaaataagctaagagaaggcatggagcatacagcaaaatattcatcttcacggacactgctagtgagtaaaaaatgctacccaacttccatcgatcatccataaagaggtttaaactaatgtaaaataacagtacagcaataggatcattgaacaatctcaagacaaatatagagtggattcggtatgatgtcaaagttgctataactaaagcatatgggggtattttcatggtttttctaaatatgcgctgaattagatatgtttgtaatagatataaaaatagaaaaatatattgagcgagcaatatgttagttccttttgacgttacatagtagaaaagggctgagactgc

SEQ ID NO: 7657 - DNA, 1373 bp, Diabrotica virgifera
  SmartBlast Evalue=2E-57; Info="Hect E3 ubiquitin ligase, putative n=1 Tax=Pediculus humanus corporis RepID=E0VFB3_PEDHC"
gtcgtcgtcgagttcggcaagtaatgttggcgccctgcaggattccaaaaaagtcttctaaagatacttgttcactatcactactggttgatgttaggctcatcgtaagagcttgactccaaccttgcacagccccagctgtcgttgatataccgccagtagtgttgcctgggttattactggtagatagacttggatagctctgagcagtactaagtaagccactaggaaaattactcgataacgctagacggactagactagatactgaattgggtgcacgtggaaacaaggaactgctgttctggttgttttgagcgttattggcattctgagcattgttgggattggtgttggatgcatttgaagatgttactgaagctagggtgcgtcgtcgagctagagctgcaaacgtttcgagcaggcctgctgttgttgtcggttctatctgactattggactctgtggttaagttcggaacactgacactcatgggattcacgacaatcgtattattactactgtttttagcattattagtatttgtcacagcctcatctttatcactactacaattgccacccttgacagaatcagtttttcgtcttagcggtttttcgtcctcggtttccgaattacccgacacagagatacgcacactcgacaacggatttatctgactgctttgcccgagatttaacgccgactgcagcagttctgcagacaaaaagttattggtattatttctgagcatatcagcaccttcgcggaatttgtccaaagcttcaactgcttctacgaagctttgagctgccgcggcagcttgggaattactaatttttgaagtgcgattggatttgttgatatttaatgtagaattgctgttcgtcgctgacttttgagcatcactcgctgaaactggtccagcgtcgcataaagccaaactttctactattgtcgccaaatcggttgagttatttatggtagagagatcgttatgggggtcccgtaacggatgtaccactacggacagttcactttcattcgaaagagcttgagattcacttgttacagctacaagcgcttcatttcgagcaaccgataacacactctcggcaatagtttccgcagcttgttttgctgctaaattatcggcagaagcagcttgttccgtactagcaactgaagttttagcatctgtagcttccggtaaactaggcgttgaactactttttctgctagtcagcacgctctgtttatctttatcgtttttctgtttattggtggaacattgtttcgatgaagaagccatggctgattccacatcgtatcctggagctagtttcaggtcgtatttaccttcagcacccata

SEQ ID NO: 7658 - DNA, 1369 bp, Diabrotica virgifera
  SmartBlast Evalue=1E-113; Info="NMDA receptor-regulated protein, putative n=1 Tax=Pediculus humanus corporis RepID=E0VDK3_PEDHC"
gtccgggattatttggccagggattgtttgtcctaggttcatcccgttttttgatccgagtaatagtttctggaaaaaatatagttcagatcaaaagtccaaagtgggccgatttctacgcactttagttcataatctgagtccttgagttaaatgaaaattgatttgataaaaaacacgattgattaatgtccacttttattatccgatgcactacggggctttcttctcgtcgcgatgagacgtcatcagttactgtcgtgttcttgcacgtgattggccgattcgatatggaggtccggttccgatgatggcggcttgaacaccgctgtatagggaaatctgacgttacaccttttcgtgtattcttctaattgagcgtcgcagccaccgaagtcgccgttggtaagggatttgaggatatctgtacaaacttcaatatttacatcatcatatttattgtccagactagtagccaaactgatcgcttcgttctgcctcttcttgtccaattcatacataaccttcgcaccttcaagcacagccccgagactattagagttcttctccaaaaattctttatttaaactaacggcatctttaccttctagatagactttggtctcttgagttatcacttgatctacgttgggatcccacgatgttttgtttttttgtacgaactggtagaaacggataagacaactatgcaatttcgggttcttcggatctactttgtaggctcgctttaacgattgtagcattaaaagggatttttgttttctataatatacttcaaatgccattaaatgtgtttctattctgtctttggctaatgtttgtaaaggctgtaggaattttatagcttgttctaatggatcatcaacccttgccaatttgtccggaattaactcatcaagttgtggcgcgtccgcttccacgtcacattgttgccgcgatttgtgatgctgatctctctttacttgtgcttctctcgcttgcgcgctctcctgttccgccttccttctcgcttttcgctgtttgttccttagtttttttaattccgatggcgcaagattttctgtatttaattcctgttccgcactctcgtctttgagcggctcatcgaacagatgaaggtacacttcaatggcacatttggctgctttaaaataaaacggatgaccccgaagcacgtcttctaaccgtaacagacctacgtaagatcttagcgtcatttttcgcatacaatacgtatggaagtcgaattgatcttctatgatttcggaaaaatgcctatctatttcatgacatttctttaacgcatctccgaatttgcctagtctctggtacgccagcgcacactccg

SEQ ID NO: 7659 - DNA, 1371 bp, Diabrotica virgifera
  SmartBlast Evalue=0; Info=U2 small nuclear ribonucleoprotein n= 3 Tax=Culicidae RepID=B0WPC8_CULQU
aaaaagttaggaccattactgcgttgggtatcgctgctcttgcagaagctgctactccctacggtattgaaagcttcgattccgttctcaaacccctgtggaagggtattcgtactcatcgtggtaaaggtttggcagctttccttaaggccatcggttatttgattcctcttatggacgctgaatacgctaactactatacccgagaagtaatgttgatccttatacgagagtttcagtctccagacgaagagatgaagaagatcgtcttgaaggtagtgaaacagtgttgctctacagatggtgtggaagctcagtatatcaaagaagagatattgccgcagttctttaaacatttctggaaccacagaatggctttagacagacgtaactacaggcagctggtagatactaccgtagaaattgcaaacaaggttggagcctctgaaataatcaacaggatcgtggatgatctcaaagacgaaaacgaagcctacagaaagatggtcatggagagtatcgagaagataatgggtaatttaggagccgcagatattgattccagactagaagaacagttgattgatggtattctttatgctttccaagaacaaactacagaagacgtggtcatgttaaatggttttggcacaattgttaaccagctcggcaagcgtgtgaagccgtacttgcctcagatttgcggtaccattctgtggagattgaacaacaagtctgcaaaggttcgtcaacaagcggctgatctcatatcgagaatagctgtggtgatgaaaacatgtctggaagaaaaactgatgggtcatttgggagtcgttctttacgagtacctcggagaagaatacccagaggtattgggatctattcttggagctttgaaggctatcgtgaatgtcataggtatgacgaagatgactcctcctatcaaagatctcctgcctcgtttaacgcccattttgaagaacaggcacgaaaaagttcaggagaattgtatcgatttagtcggtcgtattgccgatagaggaccggaatacgtttcggctagagaatggatgagaatttgtttcgagctgttggaattgctcaaagctcacaaaaaggctatcagaagagctacggtcaacacttttggttacatcgctaaagctatcggtccccatgacgtccttgcaactctcttgaacaacttaaaggtacaggaacgtcaaaaccgtgtctgcaccaccgtagccatcgctatagttgccgaaacttgttcaccgttcacggttctaccagccttgatgaacgaatatcgagtcccagagctcaacgtccaaaacggagtcctcaagtcgctttcatttttgtttg

SEQ ID NO: 7660 - DNA, 1368 bp, Diabrotica virgifera
cacaataagaaacaactctgctaacgagctaacaataaatacactaacaacattttagagtgttatatatcttaggtaagcgatgaaaaattaaacaattccacaattaatgaaatgaaagtactaacatttttccctaagcacattctcatactttcaatatgaacgtatagttttacaatctaagagactcgttaaaattcatttcagcggggtgctattgtttgaaatgtgtacttctaaggaagagctaattccataaagccgagttctcacggaacgtgtcgcgtcgctcttattgacgttagaaagttggttaattcatacaatgataaaaattccaacacgtcgttaggccactccatactaaaattaccacggcactgatcgtaccatcccctagccgcgtcggaaggcatggaggggaagtaccgactgtgtataagcttctgacttagtttgaaccgtgttcatttaccgacaaatgataaaagaacacgcgctgaccataaattgagggatctgtcctagcctacggatcgcaaccacaaattttgagtgaaagaatgttatttcacgttgcgttgattaccgtctttagttttatctttatctatttctcttcgtcaactgtaaactggtaaaaagtgccgcgccacgttccgtgagatcccagcttaaaacaggtagatcccttgtttatgaaatttaacacctcgaacaatagtaccccgctgagctgaatattaatgagttccttagatagattgtagcactataggcgtttaaaacagcaacattatattatgtttgtcaagtaggatgtacccgtgcagatccttattttgttatatgacatgtaatattacgattgcacgtacatattagtacagtatgtgccgtaatttagataatcaacagaaatagtataatttctaataaagcttaagtactcaaatgttgaatggattgcatgcgagagttcattttgaatgaagtaaaaaacatacattcaatcatttattgcaacttccgacgaccggttgcgctctccgaagtatgcagagcgtcctcaggtcaacggccacaagtcaccaaatgccacaaataaaaaccagagttagaacaatgtctggttgtaaaagatgccaaagatccacaagatcaaaccaatattgaccaacatacataaaagcagtcaaaacagcagacaaacacatatgcatgcacactcgggggcggcaacaaacggcccccagctcacaacacatgcagatgtataccgtctgcaatcatgcaacgacaacgtgtcgcacccacattcggctacaaagagccacctcccgagcactcaccaacatgacatcc

SEQ ID NO: 7661 - DNA, 1372 bp, Diabrotica virgifera
  SmartBlast Evalue=1E-23; Info=Reverse transcriptase (Fragment) n=1 Tax=Aedes aegypti RepID=Q4F8Q4_AEDAE
ggatttatctattaccagactacatgaccacttcaactttggtatctaccgtaaaccaacacagacagatcatgttatccattctacttctaatcaccctttatcatataaactctctgcttttcgcagttttatacatagattaaactctattcctttatccgtaactgaattcaacaaagagttgaatattatcaaacagattgcagtcaacaatggttatgacccagacattatcactaaacttcaacaaaaaagagaactcaaattactacaacaatccgctttctctacatcatccacaactactcccatctatgcctccttaccattcaataactccaaattatctgaaagagtcaaacatatcatttcaaattcttgtgacaacataaaaatatctttcaaagttaataacactctcagcaaaagtttaactaataccaaagatcctatccattatatgaaccggagtggggtatacagactctcttgttcagattgtgatgccacctacatcggcagaacttacagatccctttctacccgatctgctgaacacagcaagagagataccacttctgccttttcacaccatttaaaagtcaataaacatgaacttaagattcctgaaggtgtccagttgatacacaatattcaacaaaacaatacactccgtttagacttatacgaagatttggagattggcaaggacatgaagaagagtcccaactgtgtcaatagacaaacatcccttaaccgcaactttgtccccattcaccgccaattattctcataattcctattttttcaacttcctcttttatcctattctttctctttcaacttactctctcttctttttcaaaatttcctctttccttcactgcttccaaactcctttacccgaataacattattaactattgaaccctattaaccatcacctcattaattcaccctactatctttttacttctttttcatttcattacttcgttcagtttaattccacacctcatcttttctttatccctctctttcccttaaaattcttgtctttataccttacaccacagccctctgctttttgtctttgaccttttccaagaaaacttttacctctccaactaacatccattcacttgatttcagttctcacattcagatccattatcattacaattaaattatatctatattctttttcttactttggttttattttattcagtacactttcaatattattttcattttgaatttcatttttgtatcaactggacttaacagctataatcatacattaactttatctctaatttcccataccaacactttgtcacaagaattctctcaaaacttttgaaat

SEQ ID NO: 7662 - DNA, 1363 bp, Diabrotica virgifera
gtaccattagttaaacactgtgtttttaaaacctttttacctctttctattttttcgataaagctctttttatcaagatatggcttctttttaaaatggttcaaaatatacctaaaaatgtaaatcataaataaattttcatattattagtctctacaatcgtacttaaccatatacaaatatgtggtggatttgacaaatattcaaaatatcacgataaaaactgacttcaaaaaagtactaagaggcaaaaaagttttaaaaacactgtgtttaatagtaccacaacaataattcaattgtaacttacacaaaagcttggggggggggggtttaaacgaacaaaacccccataaaatttgtatggggtgtcgggtgtccaaatttcactatacagtggaacctcgattatctgtctctctattaactgtttgttaaccattttgtaagagagactaaaaactttttttacagtcacctcctgttttcatatgatattttttgacatgttttgtagtaaattcaattatctatttactacaaaacatgtcaaaatttacatgtgaaaacagagatgacccaaaaatggtttttcgtctcctacaaaattcatgaaaaagcagataggaggtattgtcacatcaccgacgatatacagaagtatatgtggccatactaaataatacatccttgataaatataaacattttcattggcaaaaaatcttgtcataatcttttttcataatcatcactacgatgatgattcattacaattacattacattacaattacaattacaatctagtcataactgaccaatgagccattttaatttaatctagattttactgttccttaaaaggaagagcttaccccatagcgtctcttatctaatctaacaatatcgtgcattattctaacatacacaggcacacaagcactatgctctgcttttcagtatcacccatcactcaaactagttcaaaaggatttgttctcttcaatcttctagtttgcccagtagtatcgaaacgctggatttcgtgaatattctcgtacttatgaacttatgaagttgttgctcgtgacttcttgccatcttcttgatgattatatctaggttccattcctcactgtttgtcagataccaaggagcatctacaatatttctcagtattttgttctggaatctttgtataatttttatattacttggtctagtacctacacccccatagtgggcatccatacaggtcttaatatttgtttataaagtaataacttattatgcatcgacaatgtggagtttcttccaactagccaatacactttttatattttctattgcctttcataacca

SEQ ID NO: 7663 - DNA, 1372 bp, Diabrotica virgifera
ctctctagctttttgtatcagtccagatatttcatcttttaacatatgcaaaattatgataatgactttccaaaagtgtatggtgttggtgtaaaatgtttcagagtttcattattattcatcttttcacgtagcggtacgatcgcattgaatttaagtatcagtgtagttggtcggcgttcttagtttgtttccaaataatttcatcatttgattgaagtcttcaagaccagaaatatctattgaatggtaatttagtaaaagtgttgtagtggcccgaatatgtgatattgactagtttgtacctaataccggtctttcgttatggatgaaacagccaatggatttatataatagtttttagaagcagtattgacatatcgatagcgacaatcagtcctttgtattcaaccgcaaagatgcaccaaatgactgcagtaattggactatcaaaagagaattcagtggtagagtctacacacagctgctgggtcttataattcgatgttgctctcattaaactccgtatcaagtacctgaaaaaaaaaactaaagatatgatgcaacccagtacttcgacagagtcctgggactttccatggcaaaacaaaatgaggaaaaaaatacctaaaatagtctctccgagagaaagaggcagacatcctggagaagtctgctttttgatgtgttttctacgtcttcttatgttaacttctagtctagtcttaattggtatctcagtatggtctatagtaataaaaataaaacattatcgatacttatttgatataagagtcgatataccttactttagtctaccggcgggtattttgcttctgccaggcgtctggctagcgtcttatatacatagtaatcgaaaaagaagactctatatacttctgctattaggtgtaataactttaaccagtatcttggttatagtcgggtcaaccataggtttcttgtacagcatcgaggatgctaatggagaatggcatgtaactaattctttcgatcttcccgatttgaacaaatcggtgagtcattcattttaccaattcaacagcagtaaaaaccaccagaaggcatggaataacatgcaacaacgtctcgagtgctgtggaatttcaagctacaatgattggacggctatagggttagatattccaagttcttgctgtgataatctcaattgtacatcaaaagcatactttacaagttcctgtttggatttactcagtcgagacctatggtggcacgagaatatcctaaaatctcaatgctatattatggcagtcatagagattggcaaaggagtactaatcctaggagtttatatagctgacaaattatcaatgccacactgaggctt

SEQ ID NO: 7664 - DNA, 1368 bp, Diabrotica virgifera
gtcgggtttaaagtcgtatttggcgtcattaaaaatcgtgacgcaagagcgtcattaaaaaaaagtgacgctagaggttagtttgcgtttaatcataatacaggtacgtatccatatacttatttaaattgaatcaaggaattatattatttattatttggatttaaacaaattttgattttctacaaccactattcaaaatgcacttttctgcatagttttatgttaacaaagttgatatgtattttctcacagtgtaagacatatgacattagtgtgcagaaaagtgacgtttctgtgccggaaagttcgtttctgcacagtaccgttacattccacaataaaatcataaaaaatataattataacatgttttgatgaaatggttttatttaagatattagatttaatagtgctttttaaaaaagaaccgatttaactcatgtccgagaaatctggaaaattcgctactttaatattatttttgaattttacatttggtattttacaaatgactacctctatctgagtaacgttatatattctgtttacatctgtggttaaagtttagacaaatatacaacctataaacaaaattattatacttaattatcgaatagaaatcaaattatggatgttacacctgttttattttacaattttattgttaataaacattttataattaacaagtaaccaataaggatttagcaacctcagaaagatacgtcgaatgaagtaggtttggtggaaatccgtgactgcataaataacgtcaaatgtgacattattttgtagtaattatttaaaatcgtttaaattcaaataaattaaggcagtgcccttaaattttcaactgatttctgtgtaatttgtttaggtataaggattttaatttgattagtattaattaaatacagtttaaactttttaatttattattataataaatcttcgttgagaaattgtgatttttatttttagcaaaaactgtggttgtagaaaaagtagtgtgtaacacgagcagaaaggtaatttctcactcgtttgaattgcagcactctcttgcgctcgtaccgcaacttttcaaactcgtgagaaattagtacctttctgcacgtgttgcacaatatagtcaatatattatatattcaaataataataataataataaattattagaatgtaatgtttgtatgtaacaaaaaatcatacctatacgttgtttacgttcgagtttgacatatacgtcagaggcagacttaattttaatttaattattaataaatataattttgatagtgaatttaattattataaaaaataaataagatgtttaaaatacagttttgagtttgagtatacacag

SEQ ID NO: 7665 - DNA, 1370 bp, Diabrotica virgifera
  SmartBlast Evalue=1E-129; Info="Phosphoserine aminotransferase, putative n=1 Tax=Pediculus humanus corporis RepID=E0VYZ3_PEDHC"
tgtgtgtttaaaaagttcgatcgttaatacgagaaatcagtgtggaaagtgacttagttcactgttgtagaatattagttgtagtttaagtgacaggtttactcagtagtttatttaaaatgggaagtgcacagtcagctttaaattttggtgccgggcccgccaagttacctagagaggtgctagaagaggtccaaaaagaattcctttcctaccaagattcaggaatgagcttgattgaaatgagccacagaggcaaggaatataccaaaatcaataaagattcacaagcggttatcagggagcttcttaatgttccggacaactacaagattctgcttatgcaaggcggtggatgtggagcttttgccgcagttgccatgaatctcttgaatagaaccggaaccgctgattacgccgtgactggtacatggtccgacaaagcagctaaagaggcatccaaatatggaaacgtcaatctagtattcccaaaagccagcaaaccaggcagtgttcctcctcaaaacacgtggaagatgaatccaaatgcttcctacgtatactactgtgataatgaaactgtcgatggtgttgcattccattacattcccgaaaccaatggtgttccactagtcactgacatgtcatccagcataatgaccaagaaactagacatctcaaaattcggctgcatcattgctggtgcccaaaagaatattggacctgcgggagtagtagtggttattgtccgtgaagatcttctaggaaatcccatgaaatgctgtccatctgtaatggacttcactcacatagccaaagaaaactctgtacataacactccagcaacattctctgtctacgtcatggaaaaggtacttcagtggattaaaaagaacggaggtctcgaagccatggaaaaccaagccatagaaaagagcagtttattgtacaacgccatggttgaatctaaaggtttctacacttgcccaattgatgaagacgtcagaagtagaatgaacgtaccattcagagtgggtggaggcaacgaaaaactcgaagaacttttcttagtagaagcagagaaagttaagatgtatcaactaaaagggcacagatctgtaggaggaatcagagctagtttatataatgcagttactttagatgatgttaaattgttagttaaatttatgaaagaattccaagcgcaacatggatcaaagtgatgttattaatttgtgtaaaataaatataattcggaattgtatgtttgtcttttctaattgtaaatttgtttaatatttaagactgctctatttcgggatgtaagatgttatatgtacatattttttaataaatatttattttgtaat

SEQ ID NO: 7666 - DNA, 1369 bp, Diabrotica virgifera
  SmartBlast Evalue=2E-68; Info=Homeotic protein female sterile n= 1 Tax=Camponotus floridanus RepID=E2AA50_9HYME
gcttggccagcgggtatgtgttaggtgagtgagagtggtgtagctccgtatttttcacgattctaatgtggattatcactcaaaagacgcagatccaagctatgatggcttttatctactaagaaaccatttgtaaaatggaatgtgatttgtatcggctgaagattataaccagctgattggtaggcccaggtcattattaaccaaaactatttgcggaggaaaaatggaacgcccaccccgaaacgaacccactgtggacccagtgaatggagtggtccaaccactagtccagccacctccagagagtccgggccgcgtcaccaatcaacttcagtttttacagaaaactgtgttaaaggctgtctggaagcaccaattcgcttggcccttccagcaacccgtcgatgctagaaaactcaacttgcccgactatcataggataattaaacagccaatggacctgggaacaattaagaaaagactagacaacaattactactggtcgggcaaagagtgcatccaagacttcaacacgatgtttacaaactgctatgtctacaacaagcctggagaggatgttgttgtcatggctcaaacgttagaaaaggtatttttgacaaaagtggcggatatgccaaaggaggaatttgttgttgaatcgcccggtaaagcgggagcggcaaaaggaaagaaggggcggaccagtacagcgggcgctgtcagtgcacccccaacaccaactacagccaccgctggttcgggaggcaggggtaggcctcccgccactgtctcttctacaagcgccactccagttgctaccactacaggatcttcagggttacctttaggcactcaagcaccggctacagtacctggcagcaccgcaactaccaccatagcggcggccagcaccaacaacagctctctgtcgaatcagcaactgaactcttcttccagttccattcacggaagcggctccagtttaggaaattccttagattccagcagcgtcatgcctgccaacgttatacctccggcacaaccagccaaggtaaaaaagggcgtgaaaagaaaggccgatactacgacgcctgctacagcctacgattatccgccaactttggagtcgaagtctgcaaagatatcgacgcgccgagagtccggtaggcaaatcaaaaagcccaccaggccagaactggacggtcatccgccacaaccccctccacttaaaccaaaagaaaaactaccagaatcactgaaagcctgcaatgaaatcctcctagaattgttctctaagaaacattctagttacgcctggcctttttatcaacccgtagacgcagaattactcggtctgcacgactac

SEQ ID NO: 7667 - DNA, 1364 bp, Diabrotica virgifera
cacataaaaacgtgaaaaaatttatgtgtccaactgtgtgttactgaacacttagcatagtgtgccattggtgaagatcgatggatttttttaaaacagtgcgacaagcaaaaaacgtgactattcattttactgggtgtgacgttagttttcacttttacatcaatttagcgtacagaaagattccttatttcttataaaatgtatacagaaaaaattatatcgaaaaatgattgttactgataattatcaagaaaaacagtggtcttttaaatgttggccattaataccatttaatttataaaactgaggataggtttcacagaaaattcaaaatttccagcttaatttaattggttttaattaaaaataagttaatttaccaaaacatgtctttaaaaatttgaacggtttgttttaaaaatattcttgtgatgcattagaatagtttatcagaaaaataagaagttatgatctttggatgtttatttttataatacatacactccgaccagaatgtgaatactatgtgagcatactttatctgcctcctttatagtcaaattcttgagctctgtccactatacctagtggataaaggatttgtccataaaggagacatagaaagttatcacacatctattagtattctggtcggattgtacttagagatctttttaacaagaaactaataaagcttttttgtttctttagcatctattggaattgtaatatgttcgttacatctaaatataacagacaataattattggcttgcttgtttaactattaagacttcatttttgtaatattaatgtaaaaattaatttaacctttaaatatattgtaatctattgttttttacatcaataataactttagttgcagaaaagtctactggtttcgataaacctgttaataacatatcaatatttaatattttgaaactgctgatttgaataaaaatagaaggctatcgatctaattataaaaaaatatactcttttttgcaacaaaagctaaagctttttatttgttgtgatatttgaatacagttttctactccagtcaataaatataattagaaaataaaagtaaaagagtttatatttaaaaatttattgaaaaaactctataatttattaaaattccttaaattactgcattaaaatcacagaacgttttggatctaaaaagatcatcatcagtgctgatacaggttaaccacatgccgagccaccaaagatacttgtgtataagccgtttaaatgttttaaaaatgttaaatttacatgattatgtataattacaaacgattgataaaattgtgctagatatgacccttagccatcgcatgactcccc

SEQ ID NO: 7668 - DNA, 1367 bp, Diabrotica virgifera
  SmartBlast Evalue=9E-70; Info=Putative penguin n=1 Tax= Heliconius melpomene RepID=D0AB89_9NEOP
tattgccaaatctttggcgtttttcaatagctcagatactataattttatgcagtaatacagtatcatcaatacagtctatcaaagttatgattgtggcatgtccgtgttcatgtttagataattccaccacgtgttctttaactgctttcattattccctttctgtcttttgttgatccataccaaatacactgcatagctgcttttgctccatctttactattactaataacaacaatatgaggtaccaattgactgatcatttcgctcctatcttcggcagaacattcgctaagatattggtataacactgtttgtactaatccagaatccaaaagtgatttgttcaagattttaattagattggctttggtagcacctaaattggcatcttttaaacctggattatctttatatgtgtcctttaaatgtttgacattgttatccttggtagatctgtaaaggtctccataaaattcttgaaccaaatactgcttttgtagaggagtggcccaagtggaaaaagcatattcaacaaccggagcactaatattgcgtgttgacagtttcacagcatggccaaccatagcatctataacttgagatcttatttcgttcttgccatattttagaagtcgttttacacaatggataccatactttgattgtaacatatttacactgactggaatgagttcttttgatatttgattaatgaccaaatctgatgcatatttcaaaagccactgcacaattcttgcagtatcatgtgcaagaacaaatttcggataatgacctccaccttttaaaagactgtgcagctcatttatcagttgaatccttttttgttctcctccattcagagattttttccttaattcctcaccaattcttttcgcttttactattacatcaaatccatctttgttttgccttcttttgagtttcagttccttctttttctttttaaactcattccagttttcaaatatttctggtttatttttatccttatcaaactttcctgtctttttatctctaaaattattattggagacaaatttagagttcggttttgtaaaatctttttttggtgctggcttgtcggttttactatgctttgtactaccttcgactgatttctttatctttttagacttgtctgttgtcccatcttttttaaatttcttcttaggtggacccactataggttcactgttagcgtttttagttgtcatactgtttaatagtaaatatttctacaaaataattaaaccaaacaacactgaatctaattcaataagtttttacatgttttaaattacacttttataaactatcaacatttaaacacacatgtgattaa

SEQ ID NO: 7669 - DNA, 1360 bp, Diabrotica virgifera
gctctacctaggtataatgaatgaaactactaaatgaatagaaatagaaaagcatacacttgggccaactataattatacggaactaggaagttcgacatccgctgtcgcatgacgtcagatgagaacctcaattcttggggatcaatgctaaacataggaagaattttgttttataattatttttagggcatttttacagcgacaactatttaatataatattcttcgttttctgaaatcctgaagtaatttccgtaagtatctttagtcacgtgccttttgtttatatttttataagtagccacagcacatctcagcatttccccgcaagtgtcgatttatcaatagcctgttaatttactgcattttacaaaatactaaataaaacaaatggtataaaagtgacctagctactcaacgatacaagctaaaaactaacaaaaaatgcaaaaatataccaaatacggggcgtgatcccttgttccacacctggcccacttaataaaatattggcaaatacttcacttttattttcccatctatgttctaagatgtgtacgatagctggacctctgcaaatcactgatttaatggacacaattatttgaacaaattattttaatatgcaatttgcaggttttagaaacagtcgtttgcctatgggagccaaatatggagaaaatggcggatgctcaactaattcgaagcctacttgaattattatagttattgcaatggaagaactaggactgtatgcgttatcctgattgaagattaacaccctaacattacttcttcctaatctgttagacctagttttcagagtacacagcttccctcgtataaactaataattcacctgtaattatggcacccttttttggcaggaactactaaaattatagcgtttgaattccaaaatacagctagcctaatatttcccgctcaagattgcgtcttgaattctttcgggtgtggtaaacttcttcattgttactaatattgcacgaaaattttctttgacttatctaaaacgcattaaaaaataaatgtacatgtcttttcggttggtttggcttttattcatgttatccatcttgctgataatttttttaagttcaatttcaaatgaagataccaattacttcaattatttttctaatagtagttttatacgactgtctataaaataaaatttttgattaagtttgacagtctataactttctcacttgtactccgactttcaagattccttcatcagtcttcaggtacatgtattgatgtcgtttgttattattccggtaacaacaaattttttgcttagatggacattatacgggggtgaattgaatcgttg

SEQ ID NO: 7670 - DNA, 1367 bp, Diabrotica virgifera
attggaactgttttataaaaacaatctgcaattttaggattcgtatgcgtttaagtttatttgatatactatagttattactcatattaatcctaaaattgtagattgcctttctaaaacagttttaattcaatctctctaatgttcgattacaaattcgttttgataaagtcggcatcaccgcggtaaaagctctcataacagctgcattgcctatgttcgctatactgtaaagtcaaggtgggactgactaaagttatttgcaaaatgcaccagaaaaaaatattttaaattctcgcttcaagacctctcagcgacagactgtgtagttggtaacatattcaataagtgaatattcaataatattcaaaaatcatcaagaggattactgctgcctgcataagaaagtttaaaatctttgaaatgccaacacccagctaaaaatacagtatgatttttgaaaatatgaggagtgaaaattttatgtggactgtgcacgagatttggctcaatttttacataaaatgctcagaagcttttataacactttattccgcctacaaaccttttcattttattcctttgtagtttacttataacttaactttgtccccattttaacctttattttagaaacatatttttgtaatttttgatcttttgcaacgactcggaaatttgtctcaatcagagtggtctttaaaataacaatcggatagcccaatggatttgcggctacgttcaacaaaattgcgttgaaaatacatatcggactaccatccactatgtattttccaaggtttgacaagatataatttagttttgtaattaattcgatatgttgaactcctgatcttgtttcgatttgtttttgttgtaggtctcctaattttggccttatttgttacactcttatatctggtaggagacacgaatttcactgagatatttcaatataatgaaaaaaccttgtttatgacatttgtcaattgtaaacagtcttcagacatgtcgaaaatttgcgagtagagggctcaaatggcgttgcagttacagctattagggcgctaagaattatatacgtttgactgtgatatttaccgatctaagtaaatcgataattttcgattatatagttcgaagctgtaacggataaaagagaaatatgagagacgtagataaaagtacagtcacgtgacactaacgcatacgcttatgcgacgaatatatcttagcgtattttatttatacttaaaaaaagagagttaagttttttttatataaaaaaacaaaatagtttgtaaggacgataatttaaatgttagagtgggcacggtcttcctctagggagctactactacctttac

SEQ ID NO: 7671 - DNA, 1359 bp, Diabrotica virgifera
  SmartBlast Evalue=1E-56; Info=10G08 n=1 Tax=Ips pini RepID= Q5FYF7_IPSPI
taaatatctcttcttgttgttatcagtttattacacaacaaatgcgtaccaattgaaggtttcgataacaaatccttttaaaaataaagatgtttcgaaactagtagtaaataaattaattttttttttattttgtgaaagatagtacaatgtccgtgaataacattgaatctctttgttctcaaagagttggatacaataaaaagattattaaaactgatacgagtagtttagtaccagaaggagaaaactatgggggagaaatggtaaaattgaatctggtggtccaggacgaaaacagcaatcagagcgaagaaatacatgtagtggtgaaaaaaattcctccctcggaaatatatcaggaaatatttaatatccaacatacttttagagctgagattaatttctacgagaaacttgtaccgctgtttcaaaatttccagagagaaaataatgtacaggatgttttggattgttttgcaaaattttatggcagcagattgaatttgaatggatcagaagaagttgatttggatgctgctatagtttttgaaaatttgagtattgcaggtttcagaaatattgacagacttactggctttaattttgaagagacccaactactgttaaaatatttggcccagcttcatgctgtaccattagcaattaagatcagaaatcctgaattgtttaagcaagaaataagaccacatttaaataacggtcttcatgggagtggtggttttgaaatggctcttcctataatcgaggcaatacttaatgagtctcaaaaatgtgcacctctagtaccaaagattcaaaaactctggcacaagttttactatgaagagaaagacaacgaagcaaaggaaccattcgctacattcagtcatggtgatccttgggttaataatattatggtcaagtatgcaaacggtgtagcaactgaattaaaatttgtagatttccaggtatatgaatacgcctccccagtagcagattttctatatttcatgtttacgagcgttcaaaataacgttctgaaagaaaatattgatgattttctaaaattctatcatagcagccttttacaaaatttaaaagagctgggatgtgatctggaaccatttggttatgatagatttttaaaagaatttgaagaacatacatacatatcattgatttgggttctaacttttatcccttttgtggtttttggaaaaaaaggtgatgattctacagtacctagttttcaggatattaaattcagtgatagtttaagtgtagaagatgctagaaagagattgcctcaggtagtcaaagacaaaattcactttattgtcgaatattctgcaagaa

SEQ ID NO: 7672 - DNA, 1366 bp, Diabrotica virgifera
  SmartBlast Evalue=1E-112; Info=Ribosome biogenesis protein WDR12 homolog n=2 Tax=Culicini RepID=WDR12_AEDAE
attaaacatgtttattcttaaaaatgtgtacactattatcactaccaccagataccatatacttcctgttggaccaatccacctttaatacctgaccctggtgaccttgaagattgtaaagtggtgccttgggactccgtgtgtcccacatttttacagcagaatcatatccaccagataaaaacaaatgctggtcatagtttgaccatatcactgaactaacccataatgtatgggaggtaaaagtggttttacacagtgatccctctgtcgatcgggggtcatacaaacggatgtgtcgatctgctgaggatgccaaaagtgtgttggataatggtgaccatgatgaactgaggtatgctttctgaccgactatttcgtttttgattccacacaattctgcatcccagaatttaatagtatggtccatagagacagtggaaactacgtaattgtcaatccaattcaccgccgaaattgtttccttgtggcctttcaatgtgttaagaggagttttagtgactaaattattactagatttactccttttttgcaaaggttcacttcgttcttcttcaatggaagttgaccataattttaagtttgtatcccatccacctgtcgctattcttgacgaatttggactaactccaacactgtctatacctctttcgtggccccttagcactgcttggggtactacattatcagtaccaggttcaaaagaccacatcagtcccgttaaatcatgtgatacactgatgaatcctttactaggatctgtcttgtctatccagctaactgccttcactacatttctatgttctttcaaagaggtaattatttttccatgtgttgaccatatatttacagaattgtcatagcatccagtaagtatccattgtctgatgtttcaatcccacaaacccaatcatcatgtaacaatgaatctttaggttcaggagcaggtgtacgttccaaatattcaacatcaacagtggtctctgtagatacattcctttcttgcaaatgatcaataaggggctgtcttataagttctccaatagccaaaaagtcgaaatcttttggcttcagaaaatcggaattgctttctttaagcagttgatttaataattcatttaatgagttcgcgtttattgcttgaggcaccgaaaggggcaagtctgggactgcatatatatcctgtttggttattaatctaatttgtaactgcccttcgctagacccttgcattattaaatattttatttcacaaatacccaaaactaaacaccttgttttgtttagaggttaggaataaaaagttcctgttcttcttcttgtttttggctatgaatttgagctg

SEQ ID NO: 7673 - DNA, 1364 bp, Diabrotica virgifera
  SmartBlast Evalue=1E-112; Info=Ankyrin repeat and MYND domain- containing protein 2 n=1 Tax=Camponotus floridanus RepID=E1ZXA0_ 9HYME
cttgaaaagtggaaataggtgttttacatttaagaaagtgaatgattaaaaaaaaaaaatttaaagggacaacagaaaagttagaatgtctgataataaagaaccggcattgtctgaaacagaccagcaaatttttaaggcaatcgagaataatgacgtagttcttttaaaaacacttcttgcagaaacaaaaaacgtgaatattctcgacgagaattctatgactccccttcaacatgctgcttataagggaaataaagatcttgttcaggttcttctggatcagggagcagatgtgaattactgcgaacaccaacacacatacacagctctgcactttgccggtctctctggaaactcagacgtttgcttggcattgttgttagccggtgcaaaatcaaacatcaccaacacagtcggccgcacaccatcacaaatggcagccttcgtaggacaccacaattgcgtctctgttatcaacagctatattccaaaatctgacatagactattacacaacaggaacagcgaataggggtccatatctcccgccgttcttgtcagaaagtttccataaattcgttatgcaagttaatatacatccaattaaagtagttttgaatgtacagaactttgtaggtttgtctgaacatttgccagaagtgaaaaaagtacttgaattgatgtgtgaacgggagataaaacgaggagccgataaaaacgaggttatgtctttcaagttccattacttagggtatattgtaggagaagtcttaaaagtaaggcagcgacaaactgcgaaaaaggatgaaggcgaggacgataaaaagttggatatgactgaactttttacgaggaaattgctaaaacctggcaaagacggacagttggagttcatggatgcatttttaaaagagtgtatcagagaatttccttacagggattgcacgttatttaggcaaatggttgcaagtctagcaggggatgatccaccaccgtccctcgtagtaattcatcacgctataaacggccaaagaggcttcgaagattgtatatccatctgcaacacatgcggtgaagagaaacctgccaaaaaatgttcaaagtgcaaagttgtacaatattgtgataggaattgccagagactgcactggcattggcataaaaaggcttgtcctaggttaagtcagatgatcgatacagagttacaaaccaagccagatgcttctgagttatcagcagagttgcagaatcttcttgtgaacaattgaagtaaaaaatgtataatgtgaattttatttaatgtttatttgacactgttttatgaacaaaacaaggtatttacttttaagtacactcaagcag

SEQ ID NO: 7674 - DNA, 1364 bp, Diabrotica virgifera
  SmartBlast Evalue=1E-100; Info="Sodium/potassium-transporting ATPase subunit beta-2, putative n=1 Tax=Pediculus humanus corporis RepID=E0W229_PEDHC"
aattctagaaacaaaaattgcaacaatgagatgccaaaaaggataatttcagtaagatttaaaaaagttatataaaatttataaaatgtataaaaatatttggtatggttggttcatattggaatgtacttcttatagcttaacttatgtgatcgatcggctattttataaaaggcccctattttaaggcaacatttctattactatataatatttgaattaaaaagtcctgaaggattcttctattgtccaattgggtaaaataatatttaatcaattagcagctcgaaatgcacagagcccgttctatcggctctgttgtaaagtatgttccttgcccaggctctgcactctacgttaataacgataccagccactggtctttcaaatttaactgctactaaaggacttaggtaaccttcagagttcaagtacggaaaatagtaaccagggaagccctgtacgcttcggggatagtatgtaatggggcccaagtattctacatcagcaggattttctccttgacatgagacccaaacgtttctcaactctctagtattgttgataccccttatatgttgcttcagattatccggcatttcctcaggtaaatcgtatggatcatcgtaatacattggctcccagttatatattttgttcaatttaataaaaatacatggagaattcttgtgataattaaagaattgatccctgttgcattcttcccaatctctgacatcgacttcgcatacttctccactagtaggatagtcgtgatgagagcatgttttaatttggccatttcctttagctattttgctgggaacgtagtacttatccaaaaattttaaaatgttctcgacccagtaagaatagctcgtcttgttggagccctggaaccatattaacgtactttcttcgtttttctcaggcataggacggaaacccaaacccggattggtacctattagtgattcatctagctgccacttcggtattctaggatcaagagtctggaaaaatacccacatgcatactgctaccaaagctgctaacattccatagaagattaagtaaaagagaccaattttggctaattctggaccctttctgcccaatataagtccctgctttttctggtacactctcctaataaatctgttattttcgcgatcgtaatagtcggaaggctgttgcatagtcattttggcagattatttttacactttaagcactaaactaatggacggaataaactatttactataaaatagaacgtaacctaaaactctcacatttctgtttgtaccacgattcaccaggtgaggcaacaaccgctatcgctattcgctactcaagacgct

SEQ ID NO: 7675 - DNA, 1360 bp, Diabrotica virgifera
  SmartBlast Evalue=2E-41; Info=Nucleic-acid-binding protein from transposon X-element n=1 Tax=Drosophila melanogaster RepID= GAGXE_DROME
gtcgctgggccatcgaggtgtaaacatcgttaaagcgctccgaaaaaaccggtgattaagaattctaattatcttatcaacaacaataaaaaaaacccattagcaataagtgagaaaaacaaaacaatatgttcccttcggggaatcttattgggttcagaaatggacaaccagtttatcaacaacaaaacatacagagtgatccaataaatttacaaatgacacaagcaaccaattaaccaactacagtggcagccaacaatgatgaagcaaccagaaaatcaatgaacatgaatatgccaactatgcaacaacagtatcatacaactcctatacagacagtaaataccaaccagttcagctctcaaccagttcagcagcaaatgccgacatcaagtaaaaatagtgcaaatatcgaagacagagaaactcactatatgacatcaaccagcgaagatgaagaagaaaatcagacaaacagtaaaaacgcttggcaagtcatgggaagcaataaaagaaagaaaatacataacaacaaaccaaatccaagcgaaattgaaacaggtaaccgattccaaccgctgtcgaaagaaacagaagaaaatattggaaacgtcgaaaccaacaaaataccaaaacctccaccaatatttgtacacggggtacaggatttcaaagagatgacaaagcaattagaggaaatagccaaaaaagaagaataccagacaaaaagtttaataaacaacgttgtcaaaataaattgtgaaacaccagaaatataccgaaaattggttaaggagttcaaggaaaaaaatatataccatcacacgtaccaactaaaagaagaacgagcctacagaatcgtgatcagatacttacatcactcaaccaatactgatgacataaaaagtgagctatctcagttagggcacaaagtgagaaacatagttaatgtaaaacaacaaaaaaccaaagaaccacttaatctcttctttgtagatttagaacccgcgcaaaacaacaaagatgtctataatataacaggcctacagaacagagtagtacacatagaacctccacgaactcaaaaaaacagtataatacagtgcatgagatgccaacaatatggacattccaaatcatattgtaataaaccatacgtctgtgtaaaatgcggaggctcacacaataccaccacgtgcaaaaagtcaaaggagacgccagccatatgtgcgttatgcaatggaggccacccagccaattacaagggatgtgatcactataagaaacttaccaaaggaagcaataaaaacaatggagagcatcaaaacccatcagcaatctacacaaatgatatata

SEQ ID NO: 7676 - DNA, 1356 bp, Diabrotica virgifera
ttgttgtggcaaactgttgctgcggtatctgttgctgtggcagcttttgctgcgatagctgttgctgcgatagctgtttttgcggcagctgttgctgcggctagctgttgctgcggtagctgttgctgcggtagctgttgctgcgatagctgttgctgcgataactgctgttgaggtagctgttgctgcggtagttggtgctgggaatactgctgttgttgagatatctgttgtaattgaggttgctgttgcaacggttgttgctgtggaggtaaagtcgcttgttgctgttgtggtggcaattgttgtaaggattgctgctgttttaattgcggtaaagattgctgctgttgaggcaactgcggtaaggactgctgctgttggggcaactgcggtaacgactgctgctgttgaggcggttgactcgttggtaattgttgagattgttgcataggagttaaacttggttggtgctgtggtaccgactgttgaggttgcattaaagtttgctgggttggcgtctgctgggataaattctgagaagctgacatttgttgaggtggaggtaacgtctgctgagactgtggcgatgaaatagtaaagttttgttggggagtttgaagagattgttgtgaaggttgtaacgattgttgtggaggttgtaatggttgctgtggaggctgtaattgctgctgtggaggttgtaaaggttgttgcggaggttgtagcggctgctgaggaggttgtagtggctgctgaggaggttgtagcggctgttgcgctgattgtattggctgctgttgggtttgtagcggctgttgcgatggttggctctgagcagtctgtggtataaactgagacggagatgattgcgctgttacagtcgatccctttgcactaacatcgatgtttgaagatatctttttagtttcctttttagtttcagattctacagaatccttcttaggatggctgctgtgctttagattatcgagactaattttcaactgctctaatgtatttatgtgttcaggaccgcacatttgagcggaatcgtcttttactgcactactttcttcttttaaggaacatacgcttatctttggctctgcaggtttctctaactcaagcatatttctagtagtttctagaggagccgagttctttcttaacggttctgtggaagcgattacattactgggaataacagattttacttcagttgcttgatgaattatctctactggcttttctactagtggcacaacatcaggaacattctggggtttgggcgctacctcggtaccaaaatctttatcttttggaagattcaattgtccagacaatacaggactc

SEQ ID NO: 7677 - DNA, 1358 bp, Diabrotica virgifera
  SmartBlast Evalue=2E-34; Info=Endonuclease-reverse transcriptase n=1 Tax=Bombyx mori RepID=D5LB38_BOMMO
atactgttcataaatttctaactccttatttaaacgtggtagcacttcaacattggtaatcctttgaacccactaaattttcaatattcttctgtaacaccacatttcgaaagcttctatttttcttatgtgttgtctcttcaacgtccaagcttccattccgtatagtaatatagaaaacatgtagcatcttagagccctcaatctgagaggcaactgaaggtctttgtttgttagcattgtcttcatttttataaatgcttgacttgcagtttcagttcggactttaatttctttgctttggtcatttttgtcatcaacccaggttcccagatatttatatgtctctacttttttatttgggtttgctctatcattaacctttcatttccatgttgtgtttttgagacaatcataaatttagttttttcttgtttatttttagtccaaatctaatgcaataatcgttaattatatttacacattcttgtagcgattccagggtatctgccattaaaacggtgtcatcagcgaatcttatgttatttactattcttccgtttatagagattccatcacttagttccgctatcgcttcctgaaacttcactgtacacgtcaaacagtattggtggcacaacacagccctgtcttactcctctctttatatcaacattctaggactctttttcttctatctttatattggcctttagattccaatacagattgatgataattcgtaaatctcgtctgtatatatctctgtttttcaataattctattagtttttcatgatggaccctgtcgaatgctttttcgaagtcgatgaaacagcaaccagcccatagaccatattcataatttgtcgacaacgttcgtctacaatttgtatttagaatataggtataacaatcatatactagcaagatcagaaagatctaaaccagcaggcagcaactgaaacacaaagctgggcaaattaaatggcttatttgaagagatatgggagtggaaaattgatataattattgtacaaaaaaatttcacatagcaaagcatctcgcatacttcaatctaattttgttatcaaaataaatgcatcattagaaatatcacacatcaacattatacagttaaagtacatatatacagttaaagtacatatagtcggaaaaattaaggagtgcccatgaacgatcacatcaatcacttgttttgtgtttgctgtctttttctataacaaacgtttgttatttatagaaaaagacagcaaatgcaaattagtgattgatgtgatcgtttatgggtgttctttcatttttccgactgtagttgcgtagttactattctagttt

SEQ ID NO: 7678 - DNA, 1359 bp, Diabrotica virgifera
  SmartBlast Evalue=0; Info=26S protease regulatory subunit 8 n= 45 Tax=Coelomata RepID=PRS8_HUMAN
agtttaccgatttcccgatttcactgtttgcgatttccgaaaataaaaaattgttaaaaactcccggagtgcaaaaaactatcaagaatgacggtaattaacaagatggaggtggacggaggtccgaagggagaaggttttcggtcatattatattacaaagattgaagaattgcagcttatagtggccgaaaagagtcaaaatcttagacgtttgcaagctcagagaaatgaactcaatgccaaagttcgtatgttgagagaagaactgatgttacttcaagagcaaggaagctatgtcggagaagttgtaaagcccatggataagaaaaaagtccttgtgaaagttcatccagaaggaaaatttgtagttgacattgacaaaaacatagacataaatgatgttactccaaattgtcgagtagccctcagaaatgaatcttacacattgcacaaaatacttccaaacaaggttgatcctttagtttccttgatgatggtggagaaagtccctgattcaacttatgaaatggtaggaggacttgacaagcaaattaaagaaatcaaagaagtaattgaacttccagttaaacatccagaactttttgatgctcttggtattgcacaacctaagggtgtgttgttatatggaccaccaggcactggaaaaactcttctggcacgtgctgtagctcatcacacagagtgtacatttattagagtatctggttcagaattggtacagaaattcataggagaaggatcccgtatggtaagagaactcttcgtaatggccagagaacatgctccttcaattattttcatggatgaaattgattccattggatcttcccgtattgaatcaggatctggtggtgattctgaagtccaaagaaccatgttggaacttctaaatcaattggatggttttgaagctaccaaaaacatcaaagtaattatggctaccaacagaattgatattttggatcccgctttactcagaccaggaagaattgacagaaaaattgaattccccccaccgaacgaagaagctagattggacatcttaaagattcactccagaaaaatgaacctcacaagaggaataaatctgagaaaaatagctgagttgatgccaggtgctagtggagctgaagttaagggtgtgtgtacggaagctggtatgtatgcactaagagaacgaagggtgcatgttactcaagaagattttgaaatggccgtcgccaaagttatgcagaaggattctgagaagaatatgtccatcaagaagttgtggaaataagttttttgtactacttaatatgtgattattttttaagaaataaaatatagcgaatag

SEQ ID NO: 7679 - DNA, 1360 bp, Diabrotica virgifera
  SmartBlast Evalue=2E-25; Info=Syndecan n=1 Tax=Tribolium castaneum RepID=D6W7L7_TRICA
aatactgaacctaattacttttatcactgagaatttattaaaatgtgtaaaaagtggggggtttagctgcaaatgtcaaactgtaatttgtggttacaataacaaattgtcataaaaccagctgtactctagttatatgtctttaaataatgtaaagcataaatagttgcattaataagcatagatagcttagttcctagacaattttggaaaatatcaataaaactactcctaaatttattgaatattaggtacttaagtaaatttaagtttatagtacatttaaggtaaagataaattttattaaaatagtcaaaattaaaagaaaaatgtactataaactcaagattataatggacgtacaacatttagttacttttgttacattccatatatgtatatttatgtacatctcccaaacaaacaaaatggcggctcaatgatttagggcagttttccgacaagaaaatatgtaacgaaattgaacaaaaaggtaatttgtaaaactgcattatgtgcgtatgaatgtaatgtcgcgaagcttcaagtggaagatccctttcatatcttttacttgaacttcttgaatgagcaatgtcagatcttccacattattgaaaatttctttagtaggactactttcaggcaaagaattctttatttgttgtagctctgctgtacgagtttgagtttggcgattgcttggggtctcctactgcatatgagccctcatcctttttgcgcattctgtagacgatgaacatcaccactaatattgcacatagtaatccaacaacagcgccaccaaccacagcagccatcatgccgggttgagtaaagaatgaagttgggcgatcatttgaattcattctgacagttggatccaacgtagtgttaggcgaacctttagtttctttgtctttgtctttctcagtttccagttccggtatgtttctagggaaacttggttcttgaggtggacttatttttggttctattattctatcctgcttgtcgttatcatgatcatcttcgtcatctggtccaaaaccagaaccacttgattccaggtcgtgcgtcacctctccattatatccactgccttcaattgcagagtcttcgtctttaaaagtgatatcactgctacttcgttggttattctgtgctgttgatgcaaatccaataaggactgctaaaaataataacctctgtatcctaaaatacatcactaatagtctacagtctttaaatttgtatttgctataacttaaataataataacaataataatatggcacgacaaaaaacacaacccactacaacatgagtatactgatcaatcaacattcgacaatccaat

SEQ ID NO: 7680 - DNA, 1361 bp, Diabrotica virgifera
agaccggttgggaagccatgaaagcgctgggaagacacagtaaacagcgacgcacaagcccttttaggagtccgtatatggagaagagcagccacagacaggcaagggtggaggcaaaaaataaaggaggccaaggctcaatttgggctgtagtgccgtagaagaaaaagaaagaaaatctagtaattaaacataattcttactttattgaaacaaataaaaattcagcaaggttgttatcaaaaaaaaataaagtttcatcaattcgccagaaaacgtaagagttcaacaataaaaaaatagcgcaagtacctttacgacccatttttttgtcacgcacataatgacactcaattttacagaaaagtacaggtattaattatattagagatgaaattccattgttcgtttattgtatgtaacacttacacatatatcatttattattatttttgttattaattaaacttaattgaatgaaacgaaggacttttcgacaaaagaaaactaatagatgtgttcaatccatcactaggaacacaaaatacggtcgagaatttatattctctacgaccacagcagccacttgagcctacttcggctctgaaaaactcaaaggaactgtactaaatacaaacaactaattttctccattgaactattttcaacaattttctccgtcagcaaggcaaggcctgctgacggaaagacacaaacttcttattctagctctctagaactgatcgctcttctcgaatacttagaactcatctcgattatacttccaactcctctaacacccaaaactcactccatctccccatttttctatcctactcccggttttaccaatcaaaaaattcgccaattttcactcttatctcaaaacgaaaagaaaaggtttaagcaaacttcaatcacgccttcaaaggtaataactcattcttccgcaaatatgattcaatctacgaaattctaatgatttgtgtttcagctcaaattctcccaggctttttttgcaacgtacgccatattacacgtgtgaactcgttatattgtataaacacactcagagcctctcatctgcaacggtatgcactatgtaaacaaatcagtccaaagcatcatattttcgacgccaaaaatacattagcaaaaagatttacgagtctcaattctttgacagcaaaattcaacttttgacaaaaacagagatacgaatacgcatgagaatcaagaattaattacgtaatactacaaattcatgagaaatgaaaaataatcacacatttccacgcaacaaacacaatttctgaaacggatttaccatatagggtgaagcaacagtatcaggaattcga

SEQ ID NO: 7681 - DNA, 1360 bp, Diabrotica virgifera
  SmartBlast Evalue=8E-20; Info=Vesicle-associated membrane protein 2 n=1 Tax=Harpegnathos saltator RepID=E2C3F8_9HYME
cgtcaattgagattttacgccattgaaattgaattaatttgacattatggctacttaagtaaagaacaaaagctattttttatgtttattttttgttattataatttacaattaatttccgttgcagtattcaaagttttattaaaacatttatcgtaaatttagtgttattgttcctcaagcagaatttttatagaagaaaacatggaaactcccggcgccagcagagccccttccaaactggagcagacccagcaacaggtgaatgaagttgtgggtattatgagagtaaacgtcgagaaagttctagagagggaccagaaactttcagagctcgatagtcgagctgatgcccttcaagaaggcggcaaaaggttcgagcagcaagcacaaaagttgaaacgaaagtattggtggaaaaatataaagatgatgattattatgggggttataggcctcattattttaattatcattataatttccattgctaatgcagttaagggcgacgacaccacatcctcaagcgtaacgtcggctcctccaaaatgaaattaaatgtttacggatctttctgtatttgattatatattctgtatttgattatatatatttattgttgcattatacttaaaaataagaacaaaatattttacaattctatgtttgctttatgtcattattttaaatatattattccatagaatatggtgtttctgtttaaaaagtgaacacctatcagttgtgtaagtattgagaatttgtttttcattattatgggcataggcgcaaaatgtcgcctgtcaaaatgttcaatgtgttttagatgtattcattttttttttcgaatcctgagaaaactaataaatatttttgaaaaatataaacgcagaatgaaagattacattattactgagggccgaaagtcccttaaaacttctataatgttgattttaataagttacaggggtgaaaataaattagaaaatttagtgtgatttttaattgcaaatatttcattcaaaagaaactttttggttattctaagggactttcggcaataacgtgcgtaatcttttattctgcgattaaatatttattgttttcccaggattcgaaaaaacatgaatgcatttaagacacattgaaaattttgacaggcaacattttacgcctttccacttaaaagtcgtaaaaaaaaattatgtgacaacctagccatcgaaaaaatcgtaattaacttcaaattttcatttaattaacgctggttggaaatttgtccattttaaaaattgcaaatacatatgtcaataacatttatgattggttattatcaatgttaaggttgtttgtaaacaaa

SEQ ID NO: 7682 - DNA, 1357 bp, Diabrotica virgifera
  SmartBlast Evalue=0; Info=DNA methyltransferase 1 (Fragment) n= 2 Tax=Tribolium castaneum RepID=D6W743_TRICA
gatgattagaagtatatttttgtatttagatagaacatatgttctccaaaaccccaatatcgttccaatttgggatatgggcttgaagttatttagtaaatacattgttttaaatagacttattcaaactagattagtagaaggtctgctgatgtttattaagaaagaaagacagggtgatacaggtaacaaaacattactcaaatctctcttaaatatgttaactaatttgcaaatttatgacaatatcttcgaacaaaagtttttgcaatcaactgaacatttttacgcagcagaaggtcaaaagttgatacaagacctagaagtttcaaattacttgacttatgttgataaaagaattaaggaagagaaagaaagagttattaattatttgaattcaagtactgaatttgaactaattcacatagttcaaaaacagttgcttggtgaacatgtgattattatactacaaaaaggtcttgatcaactattaaatgaaaacaaaatacacgatctatctttgttgtaccagttattgggccatgttagtaatggacacgtcgagttgtgcaaccattttaagatttacattaaaaagaaaggaaattctatggttattgacactgaaaaagacaaaaccattgtacaagaattactagattttaaagattccttagacaatgtagtcattgtatgctttgataaaagtgataagtttatgaatgcccttaaggaagcctttgaatattttgttaatcagagaacaaataaactagctgaacttactgcaaaatttgttgattcgaagctacgtgcagggaacaaagctgccacagaagaagaattggaccatcttttagacaaaacaatggttcttttccgttttattcatggcaaagatgtatttgaagccttctacaaaaaagatctggctaaaagacttctcgtaggcaaatcagcaagtgtagatgccgaaaagagtatgcttagtaaattaaagcaggaatgtggtggagcgtttacttcaaaattagaaggtatgtttaaagatatggaacttagcaatgatataaattcttcctttaaattttaccttaaaagcagtgatctacagttagctcccatagatatgacagtgaatattcttactatgggcttctggccaacatatcttactatggatgttatctttccagaacaattcacaaaatttcaagacacatttaataactattatttgagtagatacagtggaagaaaactccaatggcaacctgccttacatcactgcatactgaaagcaacatttaagactggcaaaaaagaattagttgtatcgttgttccaaactttggta

SEQ ID NO: 7683 - DNA, 1362 bp, Diabrotica virgifera
gctgcggctgaaataaaaaggttaaaatggctataataacagcagaattcgacgttcacatgattatagagcaaaaaactttaatcttttcagagatgctcgtcatatgatacgtagtattcaatatattctgttccacatgatactttttgttatggttaaagtataatagtatatttttctttgagtgtcttccgtcgtgtcattttaacagctgttcatataagaataacagcaatagaaagttacatatatcgtcaaagtcaaacgcagattgtgtaattttaaaattgttcttctccagcaagaattttaaattattttttgaagttgtccactgttaaaaacctctgcgcattttgtagtattagctctgagcatcccagcatccgtgttttacacttgatgactggcatattcttcccagttattctgcatatatcactttatggctattttttattttaaggccattttctacaaatactacaagcaaacttgcagggaagaaactagcatatacaagtcaatatattcaattattttatttatcaaaatttctgcatattcataaaaataaatgagaaaataagtatgtaatatcaataatcttttatcagattcaatatttttcgttctaagtctacgtaatactgttctttgcctactttaaggtatttttcttaattacagctaccttctactttggtaaatgtgaacagtaattgcttaatctctgattgaccaaataataagtaatctgttattgtaaatgtgttacatctacctacaaaagaaaaaattaaagaagttccaaaatcacacttgcctcagttgtcctcatacactagtaccaacatcacaatataaacaatatgtttatgcagattgtaaggtgttgtcaatccttcacaacatagtatacagacataactttgagttaaaacgaagcatgatataatctattcgctccgagcgttaacaaactgtcaatgcaaaatcgaccgacctgctcatggtggcggttgcttgaaatgcttgtaaggacgatttagtgtatgtttaaatgggatatttaaaaaaaaagccatatctcgctattttttgtgttgttcactgtaaaaatacatggagaaatagtgatgtgaaatacctttattttcctcgttcccaaaaaacattaagattaaagaattaaattgattaatgctgttagaagaattaaaaggtcaactttttccatatacagtgctagtcaaaagtccgcaccccccctcgcatcttttgaacggttatacctctaatactgaaatttggagggagcaaataaacggacgtaagcctctcaaccagtcatgacaa

SEQ ID NO: 7684 - DNA, 1355 bp, Diabrotica virgifera
  SmartBlast Evalue=2E-40; Info="DNA double-strand break repair Rad50 ATPase, putative n=1 Tax=Pediculus humanus corporis RepID= E0VVJ6_PEDHC"
tgttatcgggagaggaagatcttccagtccctcccacatctccgcatccgcataggtcgtggggcaaaagcgactggctggaaaatctttctgctacatcatacaaaatagatgtggataccatcaaaattgtttgcccgtctgtacagtttttggatgagtctgaagtaaaacttgaagatgtttgtaaagaagcaatcagagctgaagtcgacgtaaagaagaggatcgtgaaaaaagaagaagaaaagagtgacgaagaatctgaaaaggaaaaatctgaagaggaagattctgcggaggaacaaaagaaatcagaaattaccaccaatcccaatataattgctgtgaacagaaagattagcattgtagacgacactgctgcaaaattgcgtccaccacctagccccgctaaaaatccgccttccaatatactatatatcaccaatttagtcaggccgttcactgcaaaacaactacgggaattgttggagaggactggaaagataaaggaaggcagtttttggacagacaggatcaagtcaaaatgttacgttcaatatgaaagtcttgaggaagctgaaactactaggaatgctcttcatggagtgcattggcctatcggcaacggaaaacagctcagtattgattatggtactgaggaagaaatggaaaaagcgaagaatcctataccaacaccgatagtgcttcctgtaaaatcacctgagaaggaaaatagggaacctgaattagacattagacgaagagatcgtgaaagggatagggatcaagaaaaggaggaaaggagaaaggatcattcagagagggaatggattaagaaggaagaaccacgtagacagcgttcaagaagtagaagtagagaaagggttaggaaacatagtcggagatcgtacactccagaaattgacaacagaaagaagcacaagaaaccggaagaaccggtaccacaaaaattaatggatgacctatttttgaaaactaagactacaccgagcatatactggcaacccctttctccacaagagattgcaactaagcaacagcagagactggtgcgtatggaggagcacaagcgaagaatcgaggaaaaccgagggcgtttccgagatagagaaagagacagacgtggcaccttcagacggcgctgacgtttgccttacttttttagatatttcaggaattgatttacgattttttggtgtgaaagataaaaccgtatgcatgttgtatttaattcctttcctagatttagaaatgatttttaaacgatttttcctcgtccttgtgagaatgtggtatgtatgatttcagtaatactgattgttatagggctc

SEQ ID NO: 7685 - DNA, 1354 bp, Diabrotica virgifera
ggctcggtgagaaaaaataaagcaattttaaattaaaatgtggaaatatggcaattcagtcactttgtagtttttttaagtgaagtaaaaccggtaaatgaagctccaaaatggtttgccaaatgaaaatatatatattcgaagaaaacacttcggaaaaagaatcaaagaaaaaactattttcctaggaaaaagctaccaagagaaatataaggaatagttagttcagatttgattaatgtattcatatttaattgtttagttcacaacctcgaccatactaaagcatgtgtctattttgtttatgtacactcgaaaaaatatgttatgtacatagaaaatacctaaaatatcaaaaatatatttctgaaattttgcaaatattggttatttgcatgcacaacaatttctccatccacaatataagtagaacttaagagtttcgaaaaccagcacataaaaatatatttttgacatttttatggttacaattaaatactctagtgatttcctaatgcaaaatatttattaaaaaacgttaaaaagagcccagtaaacttttatatgaaagtattgaacaaaaattgtagttttcagtattacttcagtaggtatcagtacatatatacagggtagacgagaagatgttcaaaattgaacgctcttaaatggatggtccgaattggacaaaaacttatgtcactcataagtcactttgattttttttaaatacaacactgtatattgtatcattatgagaatactcacttcaatacgagttcaaccataacacttggtattttaccttaggtcttaaataatagttaagtaattcaacagtttgacgtttcttgaaaagttttgtaaaacaaattctatttaggtaaagttgacagttgttttacgtgtattttaaaagctctacaataaatatggtttttactgaaaaagagcgaaacactgttttaatgattctcctatctattataggcctgaaccattctcatacccataaggcaacggtacaaaaaattgcaacgtgctttgaggaaactggacgaataaaagatgacactcgaacaggtagcccaataactttagatgtaatcaaattatgtttcgttgaagatccactacatcctcacgcagaggtgcacaaatacatcatgtagatcacctttcagtcttgcgtgtattacataagaattcatttttaaaccctacaaaatccaattgttgtacgaattaaatcaagatgactacgactattcctcaatgatgaataaaattttaaccgaagagaacttcgttagcacaatgtttttacgacgaagcaatgtttaaactgtgtgag

SEQ ID NO: 7686 - DNA, 1357 bp, Diabrotica virgifera
  SmartBlast Evalue=1E-123; Info=Tropomyosin-1 n=4 Tax=Apocrita RepID=E2A6N1_9HYME
gtcagcacattggtttagtaaattccatataaacagtttcaaaaactagagacacgaatctgtacttaccgaaagttagttggtagtttttgtttagttagttcgttagtagttatttctacttttgttgaaaaaattattgtgctatgagtgtttacgaatgagtttatctacgatttatattaacagaggcccttgtcttttgatctagccagtaccaaaaaaacagcgccaccatggacgcgatcaagaagaaaatgcaagcgatgaagcttgaaaaagacaatgcggctgataaagccgatgcgatggaaggtcaatacaaagacgccaacggtcgtgctgaaaaggtcaatgaggaagtacgtgatcttgaaaagaaactctctcaagttgaaaatgacctcaccaccaacaaaaatgccttagaaaatgccaaccaacaacttgaaaacaaagaaaaacaattaactcaggctgaatctgaagtagcctctcttaaccgtaaagtacaacttattgaagaagacttggaaagatccgaggaacgtttgggcacagctaccactaaattggctgaagcttcccaagctgccgatgaaagctcccgtatgtgcaaagtattggaaaaccgttcccaacaagatgaagaacgtatggaccaactcaccaaccaattgaaagaagcccgtctcttggctgaagacgctgacaacaaatctgatgaagtatcccgtaaacttgccttcgttgaagacgaacttgaagtagctgaagaccgtgtaaagggtggagatgccaagatcatggaactcgaagaagaactgaaagtcgtaggtaactctctcaaatctctcgaagtatccgaagaaaaagccaaccagagggtagaagaattcaagaaacaacttaagagtcttaccgtcaagctaaaggaagctgaagcacgtgccgaattcgcagaaaagaccgtcaagaaattgcagaaggaagttgacagacttgaagacgaacttggaatcaacaaggacaggtacaagtcccttgccgacgaaatggactccaccttcgccgaacttgctggatactaagaaaatctcttcgtcttcgttcgccacgatttatcatctagtcatcatggtgtgaagaataattaactaattaatttatatattgtatttcagacattgtgaaaagattcagaaagtgtcacactaatttgtgagctttgatgtgcccttttattctagtctattaagcatctaggaagccgttcagttgatttaaataaaaaatcttgtataatattcagttgctttcgttttatttattgaattaaattattgtttactatttt

SEQ ID NO: 7687 - DNA, 1349 bp, Diabrotica virgifera
  misc_feature (29)..(32): n is a, c, g, or t
  SmartBlast Evalue=1E-113; Info=Galactokinase 1 n=2 Tax=Danio rerio RepID=Q5XJU9_DANRE
tgttttttatttgtcctttatcatattannnnaactaacatagtatatatgatcaggatatcaccgaggcaccagcacttggtttacatacgtagaaggtagcgttgcctttatatttcttctggatgttttctataactttcaacagcatgggagtaaaccaaagtgacagtacatccaccaaatccacctcccgtcatcctacttcctatgactccgtcgacctctagggctagctctacgaggctgtctaattctgggcaagacacttggtagtcgtctctaagcgagacgtgactttgattcatcagttcgccgaataccaagaaattcttctgttttaacatctctgctgcatcagatgttcttttgatttctgttatcacatgcctcgccctcgcaacgatttctttgtttgtatttatcgattctaaatatttaatatcatccaaattggcatcccttaagctaacttttttaagtaaaagagctgcttcctcgcattgttttctcctagtaggatattcactgccagtcagttcgtgttttacattggaatttgtgataaggactactacattctgctctgttaatgggatcagatgagatgttaaatgtctgcagtctattaagagggcatggtcttgtttgcccataaacgatataaattgatccataataccacaaggcataccagcgtaatcgtgctctgctttttgacaagccaaagccttatcagtgagtcctattgctttggttccagttaattggtctaaaaatacgtaagtagcgacttccaaggatgcactactggaaaggccaccgcctattggtacgttagtgtgtactacagcgttaaaagcgggaggaatatcgcctatatagtttacaatcaccccttttatgtacattacccatttgggtcccactggagttatggctctaattggagcacatggactaggcagatcaaatgatgttttttggtcgcaaaatttactagttgtataaacggttactacagatccctcaacttttttgccaaccattacagtcaccaaaggaagtgccataggcataacaaatccatcgttatagtcggtatgttcaccgatcaagttcactctacctggagcaaacacagctatgtctgcttcttcgccaaattgttctttgaaattttttttcgcttctactaccagctgctccacgggtacaaacttagttgccatagccaaatattattattaataccatacacttgaaactacgcacaagagactatacaagagtacatacacactgtatactgagaccacttaagatctatatatcgcggatgctgtttg

SEQ ID NO: 7688 - DNA, 1354 bp, Diabrotica virgifera
gtgccttgttgaattaggttattttgaaaatttgatggagggttaacggtcgtttcttcatccttcattttatttgagtatgtgttggacgcttcataaaaaacctgcttacataagagcctacgggccatagttttgggtccatcgctaaaccaaaatgttgttcaaaaattgagactttaaaggatgaatatatgttgggatgcttagccgttaaggacgtacatatcacttctggaaagtgtttttctaacatcttcttaagattatctgccgttgtatgctggtttaccctagtaacatgaagatgactaaattttgggacaccactgatttcagagttttcattattgccaataacaataggtccattccttcttttatacctaacagttttccattcttgcccattattatttggaactggaaccgaatttttactctcagtatttatcaaattctcatcgtttgttaaattaatgatatctgaacattttgcctccgtttgtattcttaaaatatcagctgataattgtttattattttcgattaaggaaacaacttgtttatttttattggtactatttttaaagagagtttttgttggggaactcctttctttatcaacaactagactttcatttacagcaacattttttgcgggtgtagtgttttcgttttttggatatattttactgctagactgtttcggtcgttcaaaatttgggtctctgtttgaatggttgattgaattcgtattttgttttgtagatggcgactgatcagctatttgcatatatttaaataaatctagttgttccttcaataaatttatcgtaatttgttgatttgatattattgtttcattctgattaataattttctttaagtaccttatttcagtttgtctcggatcctcatcgtcagcctcactatccaaggttttgtttggtggatcacttaacctcacactctcctcacagcatataactgtctcatcatcgatatatttgatcgattttagttgcttcaggcagccactatgggataacgttccacaattcgcacataatagaccactttgtgcaactttataacactttttacaacacttaacttccgagtcgtaaacacgaccgttcttctgaggcgccatgtttcctaatgaacattggagcattccctagtgactcgatctatgaggaattgaagatcttcgatattttcagccattatcgcggtgtcgtctgcatatcccatatgtgacacccagagagatataatatatttcatttgataatacaaggtaaggtagacggaagaagaggtgcaggtcgaagaagaacgtcatggc

SEQ ID NO: 7689 - DNA, 1350 bp, Diabrotica virgifera
  SmartBlast Evalue=4E-82; Info=Synaptic vesicle protein n=1 Tax= Aedes aegypti RepID=Q171X0_AEDAE
acttccaacagctgttccagctgccgataaaatggttacagctagtgaactcctagcaaagtaaatacaaaacatacatgtggcactaatgaatgttaaaataatacacagtctttttactcctacaagtcggactaaagttccggctaccacaaaaactccaactcttgcagatgctacaataaaggtcctaaggtatacggaaaaattatccagatccactgaacattcttgactagaagtaatattttttggtttgctcatctcccctaacattacacacatgctgctactggtaccgttgtggttgttttggtagtcactgatggattggaagattcccggaagccaaaacttcaacgtgtttaaactcattacaacagaaaatgcattaaaagaggccaaaatcatattatttatatgaggcctatgtaaaattgtcttcatttcttcccagccgctttttagagctgtcgccatttcaactctactggaggtgaaattttgttttgcttcgttaaccagttttttcactggaaagtcttcttgaggattgccggtatttttagaataaaccttcctcataactactaatgctgctctgttccttcccatactcataaggtatttcggactttctggtaaaaacatataaaggataccagagattatggtcatagaggcacaaattaacatgaagacgttccatgcgtgaaattcaaaaccaaagattgttatgttaatcttcctcggtagaatggcccacgctaacactggtaaaaaaagatttatcacgctgaagaagattcctcttatcatgtgaacggtccctctgtatttggacgagtggaattcggtgatgtgtgtagtggtagctgagtatggaccattcaaaattagcccagacataaatttggccaccatcaacatgcctttgctggtggacatagctgccattacagagaaaaatccagtcaccaggtaaccgtagacaatgatctttttcctcccaagggcatcgcaaaggtagccccaaaataatccactagaaatcatacctgcaaaagtaactccattcagaagacccttatcttcaatagtaaggtgtaaatcgcactctgcgactggtactatataggtcattcctacggtttcaaccatttgtgtggcacatggaaataagatcactaccaacagtgtgtagttgaacctaccaaatccagtttcggaaatggcttcttcaaaagttttcggaacttcttcatatttatgtaataacttaaactgttccttttcttcatcttccgcgtctttgagagatattttagtttcacctgaatccattttgtg

SEQ ID NO: 7690 - DNA, 1349 bp, Diabrotica virgifera
  SmartBlast Evalue=3E-48; Info="ATP-binding cassette sub-family A member 3, putative (Fragment) n=1 Tax=Aedes aegypti RepID= Q16LB4_AEDAE"
gtgaagtatacgggtgcctttattttatcgggaatagggaattttaaataattgtcttgtaataatttctcaaatttgcgactattttggtttagagatgaaagcttgacttaaacggtctgctgtgttgagaaagtgaatagcaaattcttccaatatttgaagcactgtcaaacacaatcaaaaatacgattttaactgataatggacttaacgttcatttagagcaatatacaactattttcccaaaaatagaaggaaatacaaattctgctgtttctaaattgtagtggtgccatggcggagaacctggacaagtttattcttcttatgtggaagaattggttgcttcagtatagaaaacccgtacaaactgcggtagaaatattggcgccggttatcttttccatcttacttgtagtaataagaagtctatcggatccagttcgtcacgaaactgtagtgtatccgcccttttgtaccattcctatagctctaagagagaacaaaactgggatcacgatttgcccttcttatgatggagtaccttatatggacagaaatcaatcagatggcggaaacagttctaacaatccatttgagaaatttgcacttgtctactcaccgtccaaccctccaatagaccaagtgatgaattattttcgactcgcttttaaaaatgtcgtggccttggagagctctcaggctctggagaaatatttcataacaaattcgtccaacattacattcgctggtatacagttcgatgattcttataagaccttaaaaagtttagacgacgttaagcacctacaagtatcaataagatttccaggagaaaccaggttaaagttagatccttttaattacaataactggagaacgaatctcatttttccaatatatcagcagccaggacctcgactttataacttgattacaggagcagctccaagttattacagggaaggttttttgggcctacaatattacctaacacttagtgttttactggcgaagagcaatgtaacttatgctacagatgattatctggatcttatatcctgggtaatagaaaaccagtttcctttagtcaacatgcgaaggttcccgaatgcaccatggtacgaagatattctgctgacagctttgaagtctctgattggtattataataatgttaagttttgtctacacttgtattaatactgtcaagtcaataaccacggaaaaggaaaagcaacttaaagaatccatgaagataatgggtctccaaactggttgcactggacagcatggtttgtgaaatgcttcatgtttcttttaatatcatcagtattgatggtaata

SEQ ID NO: 7691 - DNA, 1351 bp, Diabrotica virgifera
  SmartBlast Evalue=1E-177; Info=N-acetyltransferase 10 n=1 Tax= Harpegnathos saltator RepID=E2B3F1_9HYME
cggttgtcctcctcctgacagttgtgatctgtactatatcaacagagacactcttttctgttaccacaaagcgtcggaagagtttttgcaaagattggtagcattgtatgttgcttcacattacaagaatactccaaacgatctccaaatgatgtcagacgcaccagctcatcatctcttctgcctcctaggacctgtagatcccaagaaaaggacattaccagaagtattagtcataattcaagtctgtctcgaaggtgaaatatcaaaaaattctatccttgacgggttctcaagaggcaaaagggccgcaggggatttgattccttggacaattggtcagcagtatcaggatgccgattttcctaagctagcaggggctaggatagttcgaattgccacacatcctgattatcaaggtatgggctatggagcaagagctttagacatcctcaaacaatattatgagttcaaaattcccagtttagacgaagattctcaactgccaaaacaggaaattgataatgttgaagactctgaagttggtctattagaggagactgttgagccacgaaattcactgccaccattgctgttcaaattaagcgaaagacctccagagaaattggactatctcggtgtatcgttcggactgacagagcagcttatgaaattttggaaaaaggcagggtatattcctgtctaccttcgacaaactacaaatgatttgacaggggaacattcgtgtataatgttgaacgtgttaaacactgaagaagttaaggagactgactggctagccgcttattggacagatttcaggaggagattcgtcaacttactggcctatcagttctgtaaattttctccaagcttgtctttaggagtgctatcaaataaggcagtcaaattacgaacaaaagatttaactaagacggaactggacattcacttcatgaagtacgacctcaaacgtctggagatgtacagcaataatttggttgactatcatctcatcatggacttgatgcccactctggcgagactctatttcctaaaccagttgggcagtatccaaatgtctgctgttcaatcggcaatcctgctgggtcttggtctccaacacaaaacagtggacgacttagccacagaactagatctaccatccacccaacttctaggactgttcaaccgcttaatcagacggctcagtcagtacctcaacggtgctttggaagaagatatcgagaggaagcttgcgccaaggaaagatgcggaagatctgaagatgacgccgttcccacagagcgtccaggacgaactcgagcaagccgccaaagaattgaagaag

SEQ ID NO: 7692 - DNA, 1344 bp, Diabrotica virgifera
catcaatctgtgaaacacccactctttccaccacgaaccgctgtgaatggccttcttcaactaaatcgataattcttatacggtccaactcagaaattaaagtacgattcatttttaatcacgttttcaaaaatttcaccagaataaatttttcaaatgtttacaccttggcaaaccaggtcaattaaatgggtattaaataaaataaaaagccaagaaaggtatattttttataaaagaggcccattgaatatgtgataaagatgcggatttgtaaaagcgtaaacatcgtgaatgcgaggggtgatgcataacttttgaaactatgtgtattttaatttcaatagtcatgtagacagataaatgttttcagtaatgtaaaatttcatagtttcgttcgtagattaatatcaccaaatgagcgagtcaggttcatgatattttgtaatacaatcatacaagaatactatgcgcaagataactttttattgatcagaaaaatttcacaaaaaaatgtgttataaataactcacaccgcgttttaaacgtctaaaatgatattaacatatgttaaattattgttagtgttcgttagtgtgttcattcaactattgattattgcatgtaattcaaattattgtacttttggagaataaaatatcgaatagtttcttagacgatatttttaatatatttttttataagttctttggacaaatggacaaatttccaatatcatttcaataaaaaatttgcctttggtgacgtcgtgtagatttacacatttaataatagaattttcatatcggtcctttttatcgtttgctggattattcttgttgagtagtgtttattataaactatattcatgaataaatctcaggtaaattattaaatcgtcattttaagttttattttactgatctatgaataggacactgctacttgcgttatcaaaatgtgtagtatttcagtattcagtcgaatgtcgaatgattgtgaaataatgtggatatctcattgaagtaatttatacgtggaaagcttattcgattcggctaaaaattttgggctaggtgtcacagttttgtcattaatcattaatcataaggtggaattaattgtaaatgaattacagcaaattgtgattactaaaaaactatttggtacttacttttattaccatggccatatttactaggaaaaagtaaacatttgattttttttattttctaatattatgttttaggttgagcttttcatacatgcctttacgtttctttaaagaaacagtactgccatattctacatttaaaaatgtgtatttatgtatgattgattatg

SEQ ID NO: 7693 - DNA, 1348 bp, Diabrotica virgifera
  SmartBlast Evalue=2E-78; Info=Dual oxidase maturation factor 1 n=1 Tax=Camponotus floridanus RepID=E2AID8_9HYME
gttgtctcagtggttgggtgtaatttgttacaatggggttttttgagtttgggagagatgagagatttcccactcaatatgatgcaaaacgaactgccgttactgtggatttggtagatgctgggcttgctactgcctgcattatcttaggaatctcgtttttcatttctctgctaacaaggaagcttaaaacgaatgtgattgtttttacacgagtctacgcaactatcttgataggaacactactactaataaacaatttcggacaagaatgggaagtaggcgaaataaagtcggtaatggcttataaagcaggaagtaaacatgaaatcaacgggacggtatcattaaaaatagctttgagaggaattaacgttactttaaaagctgacgttgatccgactggtccattgaaaaatgaaacaatagattataacgaaagattcgaatggatatgggatcagggaagatttggatttggaccatacgccggtttattgcaacgagagttcagagaggcccaatacagaggagcaccactacctatcatttgggttgtagattattttgtaatagatggagaaggtcaacgttttggacgattttatagaacggcaggatggtatacgcaccaattgatgtggacagcttttccttgttggatcttatccacgattttgttcagatcagtcattcgatatggagcatatttccttggattatgcggtggcttgcagttgcttgggaaaccttatttatttagttgtacgtaatcctttcccggttgttataccgtttgaagaagaaaccttaactactcattttggatttaattattggtgtacctttgttctaggtttaatttgtgttatcttggcctgcgttatagtgtatatggatatgtatcatgatgaaattatatacagcttctttggcgttaatcctctcaacagttacgacgaagtagtgtacttaactaaggaagagcggaaagatttgaggcgacatcaaacgattaaacacaacagatctatgacgaaatccggcgacattccattggttgaaatggaagctgctccaccggttgaagctgaggatgatgatgacgatgtggagtatattcctgtatatttgaaaagaaagactgttgtactggcaccaactattaatcgtggtaacaaaccaaacagacatagaatgccattgcctcctccctctaccagcaatgcttcatagttgggataagataaaaattaatcaggacagaatatttaacttctaactcgtaaaatgtgcttaaactttttttcttgtataattcttatattaaatatatacttttcgcttc

SEQ ID NO: 7694 - DNA, 1349 bp, Diabrotica virgifera
cattaatctcaggattgggatctttgaaacaaaaaaatcgtacggcatttgaaaaagtaaggtttcttacgtgacaatttaccaccgttaatgaaaaattccgcaaaaaaagattttaaggaaatttgataattttttgtgaaaaaattgcccgtttttgcacggtactctctaatagttaggttttaagaggtaaaaaattgtactctcgagttaggtattaatatgtaaaaggttttatgtccatttttgataggggtcctgagaagaagaattctcgaaaagaatgattatttttggtcttctaaagtgtactagtaccttaaactaacgtaggtaatttattactcgacttattttattccatggtgtacttgatgtacgttattgatgaatttaaatacgtaaataaacaaagttttcgttatgataatgctcacattttcagcttgttctctgtaatgaggatcgaaattgaaggggtccaaaagaaaagttaaatttggtggcagatacatattatttattttttcataaagcagcttttagttattctactggtttgtgaaagattcaatttttatccatgtttcttatgccgtatcaatgtttaattagagatgcaacttattctgtttatatcagtggcagatctacggggagggaaaaggggaaattcccccacctaacaaggtccaaaattacagaaaaaaattgttgaaaattaaaaatgtattagctgacatgaaacttaaaccacagacagacaaattcaacccaataaacactctagttaagaaaattaagggaacttaatgcataatataagttattatttatgtcttttatgtagtttggttttatcttttttatgtcttttggatggtgtttcattggaagtttcccccctaaggcaaatttcccctcccaagacaagtgtctagacccgccactggtttatatttgtaatttattactctggtaatctattgattactaaaattatggttttacatatttttatcattttacatttatgtttatcacaagactttgtatgtttgtaagatattatttaaagtaaagcatattggtacaaaaattggtcatttgttttttacagaattccggcagctatttttttatgatttttcataatttttcttttgtaaaaaactttttttgtatcatacttaaaaatggagctaactaatttctgtatcaaacattttaagtcttggtgctgttttattcctaaaggcaatctaaatatgtaaacagaagatctaattttttatgaaatcttaattgaaaaagtttaatggcgaaaaattatgttcaatctgttg

SEQ ID NO: 7695 - DNA, 1349 bp, Diabrotica virgifera
atcggcaggaggagctcagaattgcagcccctgctgattctgacgtgacatattatgagcagaaaggccgaaggccaggttcgcccaggatctggtccgtaagataggggtgatacaatggaggccgtagcatccgccgtaggagggctaagtatctgaagggctcataagtgggccctgccccgatgtaccgtaccaaaaaatttttaatagaaatctgatagtcggttaggtgttcgtgtaattgctgaaaatgtgggaattggcaaggaatgcgtaatgacgattttccactacaaggacagttttgagtttatgttttatttgtgttttctagaactcgaaaaacaaaaacaaaactgaaacaaaaccaaaactctcgttttcattaagcgaactacattttgttccagttttgtttttgtcggcccttcctatgtttttcatgaggaagcccaagtattctttttgcttcaataacatatcaacatgtttagagaaggttttttattcttggatgtgtctggtcgatactgaattccttggaaaaagggatttttcttatgcatacaattcattgcattatgaccaaaccacttgggtgtaaaattctgttttgcgccagatttcttaattttttatacttacttcttcaccgttgatattgtgaaataggttttaatttttctttcaatttctatgcagttgttgtcaaacaattggacaatttctttgtaagaatccattttttaaatcttatttttatagttgccgtccttagagtaccacaaatgtctatgtttccggaaggcttctattaaggtacatatctattcagcagtccactgctttttgctactttaccaccttcagaaataatctattaagttccactaaaacgtgtgagtgatgttgagaaaatatccgagccaaaagaactaatttagtacaaaattcgtatacaaactagtaagacgacaataataaacacaacatggccgttttcactacacagactcgagttttaaaacacacctaaaccctttgatgttaccacttacgaacgggatttaaaaacaaaactgtttcaaaacacaccagtctttaaacggtttgcgaaaggttgcagttttgtattattcgacacgagtttgtgtttttttttgttttgtccgtttagtggaaaaccccgcatatttctcatgtttgttttgattttgtatgccaccgaaactgatcgaaattcactgaaaacgatataatgtgagaaaatgttgatttttacttagagttctaaaactaaacgccaatcaatgcaatggaacttgacctacagcgaaatatgttcg

SEQ ID NO: 7696 - DNA, 1346 bp, Diabrotica virgifera
tgatctgtgatttcttatccttcctgttgttggtaaggcaaatttctgtaaaagttgtgatggatgggaggcacaaacagcatctactttgctactttgatagtgtcacctattcgtccaagtacacttgtatcaacaggttctatccaagttaactaggacgctggccaacttccttggatccaagtagtgtcattaaaatggcgtcgttgtgggaaaatcgaaaacgagattaagtacgaaaagaaaatggtctagaaagaagagcgttagattcatggagttatacgacgctgagaaagcattatggattctaattatgaaatccaattacatttggatcgtgccaagcggcttaattaaaatgtgatgcaatgaatgtcgaacacattgtacccctaatctaacaagtattgacgatttggctgccaaatgagataactaacacgtgtttggttgtttggagtccaagaaatataagggtactcatatccaatgtctgccaaatgataaacaaactattttcaggagttaagtgaaatattcatagatgtcacgactggttttaaattcacttgtatcctttggtcacaacattaacatgggtattatctattactgtacttatctccaactcgaccaaaattgcacttataccccttggcttttagacgcctcttatgtaataataaaattgaaaaaatgacgttttttggggaaggaagagagcccgagttttattttatttttaatcacatagaacgcaaaaaaattaaaaaaatgacttttgagggtgaggcattttgcctatcttacataccttttttgtataaatttgaaattagctgctacaaagacgatatataacatggttttaccgtttacatccacaaaaacaaatttggataaagcatacattgatttttttaacatatgtcagaattactataatactaacaaagaaacacatattctgtagtttttcactgaacaaatttttcgtagcaaccatattatgcaaataaactaaaatttatgaaatgtgctatattttattgctatttttcgtgaattaaaatatgtatttcttaacaagtgtcactaatagtttcctttgctagcactaaggaaatgcaacaaattttagatttttctaaatgcattatagtcactttatcatcaacagtacatacataggaaatttacaattttttattatttatttttgttaaatgtatagatatacatataacaaagcagagcaagttgcaaaggatgttgtctctttcaacacatcaaatgttttaatatgttttaggaggaaatttcatcgcgtctagcatatt

SEQ ID NO: 7697 - DNA, 1342 bp, Diabrotica virgifera
  SmartBlast Evalue=6E-62; Info=Probable RNA-directed DNA polymerase from transposon X-element n=1 Tax=Drosophila melanogaster RepID=RTXE_DROME
tccaacaagttcacagagtggtaaaacatataaatgctaattttgaggccaaaggtactgttcagcggcatttcttgacgttaggcatgcatttgacaaggtatgacatgaaggtctcctatacaagctaaaaaggacattaccgcacagcttttacattcttcttgagtcatatttgtcaagtaggtgttattttattaaataccaagatgcaatttccaaattctattctatcaaacctggcgtaccacagggtagcgtgctgggacctaccttgtatctcttgtttaccgtagatatacctccaactcttcaggaaccactagaggagagaccacctacagaagaaatgatgctaggaacatttgccgacgatactgaaatcctagcctcacacactgaccctatttatgcctcgcatctccttcaagcgtatctagacagaatacaagattggtttttggaatgggaaattaaagtcaatgaaggaaaatctattcatattacatttacaacacgaagaggaacttgtcctcctctaactttaaacaatcaccaattaccatcagccaacgaggtaaaatatcttggtattcatttggacagaagtctcacatggaggaaacatatctggaccaagagaaagcaactaggtctccaattcagaaatatgtattggttaatgggccgttcatcaagactatctctggataataaattgctgctctataaggcaatacttatgccaatctggacatatgggttggaactatggggaacagccagtcactccaacatcgaaatcatccaacgcttccaatcaaaaaccctcagaaccatcactaatgcaccttggtacatcaacaacagaattattcatcgagaccttaaaactgatatggtacaagaagtcatcacaaaacgtagcgctgcatacattgccaagttggaggatcatgaaaaccagtttacacttaacctcctagctagacaattcccaagaacagtctaggtttagtggttcaaaccactggacttaccatttagagtaatcttttaaactaattagttagtagttataaaatgtaattattttctatacaactttataaaaattgtactttgattttaccagtgggtaaaatctttcttgtccttagtcaatgtcattacttttgtttattgttgacactcaacagattgcaaaatacttttaaattaaataaaaaaaaaactatttctcgggttatttttagattcagacatttttacaacccacagcggggagtagagcaaatccccctacagaaggtcaaaaattcatgaaacttacaccacagac

SEQ ID NO: 7698 - DNA, 1347 bp, Diabrotica virgifera
  SmartBlast Evalue=1E-134; Info=CG9090 n=3 Tax=Drosophila RepID= Q7JUS9_DROME
caagcaggcagccaccttttgctgtgagtcggccataactatcgaaggaccgaatttccaagaccaaagatgttttccgccttcttcaacaaggcctcttgccaggctttacctgaaaaccaaactttaccacaaccagttgacgactcaccaagggcattagtaaaatcattggtagctggaagacagattgcagcagctgctgctgctgaaggtgacagttgtgaatttggatcagcacactactttgctctttgtggtctaggaggtatcctctcatgtggtatcactcacacagctgtagtaccacttgatttagtaaaatgccgtatccaagtagatcctgctaaatacaagagtgtatttaatggttttaaagtaacccttgctgaagatggtacaagaggtttagctaaaggttgggccccaaccttctttggttattcagctcaaggtctttgcaaattcggtctttatgaagttttcaaagtaatgtatggtgatatgattggcgaggaaaatgcctacctctacagaacttggttgtacttatcagcttcagccactgctgaattctttgctgatattgccttatcacctatggaagctgctaaagtcaaaatccaaaccacacctggattcgccaacaccctccgtgaagcatggcctagaatatacagggaagaaggtcttaatggtttctacaaatcacttgttcctttgtggatgagacaaatcccatacaccatgatgaaattcgcatgctttgagcgtacagtcgaacttctctacaaatatgtagtacctaaaccacgtgctgactgcactaaaggtgaacaattgattgttacatttgctgctggttacattgcaggtgtattctgtgctattgtatcacatcctgctgatactgtcgtcagtaaattgaaccaagaaaagggatcaactgctctcgaggctgctaagaaattgggaatggctggattatggaagggattgactcctaggattgtgatgattggtacattaactgctttgcagtggttcatctatgatgccttcaaggttgccatgagaatgccacgaccaccaccaccagaaatgccagaatcattaaagaagaagttggagggcaaatagagaattaatttattaacactaatatgtaatttatgactttatttccagaaaaacgaaatcgcagtatttccattagttcgttatagttattgattatcatcaactttgcgaattttgatatttttaagttcataccagttatgtccgatattttagattgtaaatagataatcatcaatatacaactggaactccgttaataaaaaa

SEQ ID NO: 7699 - DNA, 1344 bp, Diabrotica virgifera
  SmartBlast Evalue=1E-163; Info="Ribonucleoside-diphosphate reductase large chain, putative n=1 Tax=Pediculus humanus corporis RepID=E0VP30_PEDHC"
agaatataagagctaaaggtacttatatagcgggtactaatggtgtctcaaatggtttagttcctatgttacgagtttttaataacatggcatgctacgtagatcaacttagcaccaataaaccttctgagatagctgtgtatattgaaccttggcatgctgatattctcgaatttttgaacctaagtaaacccggtggtaaagaagaagtgagaacaagagatttatcatatgctttgtgggtaccagatttgtttatgaaaagggtagaatctaacgggaaatggtctctaatgtgcccccatcaatctccaggtcttactgattcttatggagataaatttgaacagttatacgaaaaatatgagaaagaggggaaatatataaaacaaatacaagctcaagaattgtggagggcgattattgttcttcaagcagagacaggtggcccggttatgatgtacaaggatgtatgcaacagaaaaagtaatcaaaaacacataggaacaattaggggtggaagttacagtggtgaagtagttgcatatacatcagatgaagaaatagtagcatgtccccaagcttctatcgctgtaaatatgtttgtcagtcccgacagaaagagtttcgacttccaaaagcttaaagaagttaccaaagttgtaaccaagaatctagacaaaatcattgatgttagcttctatcctgtgcctgaagaaaagaagtcaaacttaaaccatagagccattggcataggtgttcaaggtttggctgatactttcatattgatgcgtatgccctgtgatagtgaagaggcgcgaaaattaaataagcagatattcgaaactttatattatggagctctagaggcaagttctaatttggcagagttgaatggaccttacccaatgtacgagggcagtcctgtcagcaaaggtgttcttcaatatgatttgtgggacgtaaaaccatccgatctatgggattggcaatcacttaaagaaacaatcgctaaaactggtgtgcgtaattccttattaattgcacagatgtcgacaccgattctatccaggttgtttgcaaatagcgaatccaccgacctctacagatcttttctatacaccagacgagtctcctcaggagagtttcctgtagtcaatccttatttactgagagatttaacagaaaaagatatatgggatgacaaggtgaaagaatcaattgtcagtaacgcgggatccattcagaacatcccagaaatcccggatgctttgaaacagatatataaaactacttgggaagtatcacagaaggttgttttgaacatggccatcgatagaggag

SEQ ID NO: 7700 - DNA, 1344 bp, Diabrotica virgifera
cctccccttccgtgcctatactcacactgtatcttagtttctcgatacaatgtgctagaaagagataccgcaaacctgtccatgagatcttgtcgtcaggaagcgcggagggtaggctcactctatgttaatatatacctctatgattattgactgtactacatgacgtttactatgttacgctacgtgtgtactagtttctgtaacatctgcaacaaaattgagcaaatactatggaaaaacaacaatatcacaataaaacaccataaatcttactaattaatagtcttataaatataaaacatacgtaacttggacacatggcttaatgggtacaataatggcaaagagaaaggtgcaaaaggagaagtgggttaacaaacaactaccacaaaacttctctcgatgtttctttatttttttttaccaaaattacatgcttaaatttctttttgcgtgatttttggaaaaccctatacttgctatgtcatacggcgcattctcaccgaggcatttgcaacgtaattgaacagtgtcaacttaaactggttaaaatatatacatatatttaatcattattatatgaataattaaagaatatttcatattgcaacaaatatacaatcgtgaattactcagtaaaaatagctattctgatacattttctaatgtttgacagcacgttacaatagtaaaccagctcttgtagaagacttatctacttgactaaaacttccaattggcaaaggtcgctggcaaataataacgctttgattaaatgactggaaatagtcagtctgaaccttctgttttggctcctcaaatgatcagggtaataattaatccacatattttacccataaagccaacatcgccatgacattggaagcaggcttgcaaattccagcagtcttcttctttccagttggtatttttgagagaagtattagattcattcctccagtgctcaataactacagtagattcacctgactagtcaagtcaattgccaaaaaaacacatcccaagcgtagtgagaccagtgtatatctcaggataaagtgaattcaagaagaaattataagaaaagtatcttgtaaaaacttgttggatatacatggcaagtagactcactatgttctgaacttcagctttgacttcagtcccctcgtgtataaagcacataaggtcctcaatcagatgatgcgtaaaagtagtcccacttccatggctctccgttttagctacctgagccatcaaaaatctgcagacaaaacattatgatgcgggaaatatcctgacgaaaatgactcatgtatctttagcgaacatgaacataatgat

SEQ ID NO: 7701 - DNA, 1343 bp, Diabrotica virgifera
ctgtagctggctgtataccataaatcaaaaaaatactagatttgttaaaactctagtaccttccaaaataagcgcgtgtaatgtgtaattaactattaacagtatagttcagttaaaaatatctcactaaagagatatttgtttcagatcaatatcacccttgacaggatatatcgcggaagagaagagtacctgtctgattagttactaataaattcattcttctttttaacagatgtcaaaagattacaatgaaataagtaggaataccctcatttgtgtggcacccctccattatgaacctggcgtcataagccaagttacttttcaagatagcggctatggtgtcagatgccatgtcaataaatttttattttattatcctatgctattcatatatgaacccacacacccctgcgaagaagaactaagtacccttcggcaagctgccttttattcgtcaatattcattaaatcctatcgcatgatacgtggcaccgtaagtggactttggactgtttcgcgttatcatatgtatagcagtaggtagtcgtatgtagtcaacgaatatctatgttaaagctgtttttcttaagggtacacatagagaaggaatgacttgaccactggtaggtgacgtttcgagacaaatgaaaaagacgacgaacttactggcttaacgtaagacgcattgaatatttgatatttttttgctagatgttaaaagataaaagctgtcatatggtacctcgtacgtctctatcggatcgatatcaacggagatactgaaattcgcacacgaaaaagaagagctatcatcgtcatccttggctctacaacccatggtgtgtcttggcctgtttcagaatcagcttctattccttcgccttggttttttaatttcgtactcttaatacttgtaagtcgtcttcaacctggtccttaaatcgtgctctgggcctgcatcttctcctccttcgagctggtctttggatgcaagaacgatactgtcgcaaaaaactcacagagcaagacgaactgatgaaacagaatgatcatgtgacgatgttcacagcgacgatgatgttgaaaaagaagaccaatggacagatgaaacaacccgacgaatttatagttgacgtgacagctaacgtcatagccgccatcttaaaaagaggtagtggaggggccctcctcaagtgatggtattcttgctgacatatatgaaaatgtatctaattgcgtatcgcacaagtatctattttgtaactggaggaatcgggtaaaatatacaatacaaaatagtcaaatatatgtatatacacctgaaaaacaactacaac

SEQ ID NO: 7702 - DNA, 1347 bp, Diabrotica virgifera
  SmartBlast Evalue=4E-60; Info=Serine protease H18 n=1 Tax= Tribolium castaneum RepID=D6W8K4_TRICA
aaattttgtggtcgtctgagcaacattaaaacatgttcttgaaagttttaattgccttccacgcggcggcagcactggtatcgatgtcgcaggcggtgccctccgacattcccgaaagccctttagcgtctccttgcccggaaacgtttacttatggaacgattgataaaccaggttattggacaggaaacctcatcttaagaccagatcatgacattagcggagtctgggtcaggctgatatttgataaggaagtggagaaagtgacactaaacagcgaagaattcataatcaaactctcggaggacagtaaaatggtcaaacttcaaagccccgatatgttattgaaagccgataatccaaaacttttggaagtcactgtaaactacaaaggatctgccgtccctagtctacaagaatatcgattgaatgcgagaacaatatgcccccagaaaaatcataaccgtcacgatgttttccttggagacgctaacgcagattactttttatcaagtatccaacataagccagaatcgccaaacataccattcgaatgtggtgtttcttatccatcgaaccaatacccttggcaagcatctatccaccttcattttgctaaagagaaaagatatgcttgcgaagctcttctaataagctctgagtatttgttaacaagtgctcactgtgttacttttataaatgatactgagataattccacgagcatttgtaaaagttcaccttggaagtgataaagaatcaaaggatcaacattatatccgggaaatatttgttcacccaggttatagagctggttcaatcatcgatgacattgctgttatcaagctgcttgattacgtcgatgtaaataaagtctacagacctctttgtttggacaatgaaaacgcagatattgacaaattggttattactggtttccagattggaaaagatggagttgttggaaatctcctggaatccaatgttttgagaattgacaataaagaatgtataaaactaacaccctacttaaaagaagtcttggacaacgacaattattgcgtatcttataaatcagatgataaaaactgtgttggagattcaggaagtggtttacttgcattcaagaacaataaggcaacattaaagggactcgttgtcttaggaccaaagctgcaaaataaggaagtttgtgatgcgaagaccaatgtagtaattctcgatatcgcagattatctaccctggatttacaatattgtttttaagaccatttactacaaagcatcttttaatttttgtgtagttgtataacgttataatattatagtttgacaaataaattcatttc

SEQ ID NO: 7703 - DNA, 1346 bp, Diabrotica virgifera
  SmartBlast Evalue=1E-119; Info="Protoheme IX farnesyltransferase, mitochondrial n=4 Tax=melanogaster subgroup RepID=Q9VKZ1_DROME"
gacctaatactttatttgaaataaaatatcactttaactacgcactcactaactctgtcctatttgtttcggttttctgatcgtcaaacaaaaaccacttctttttatttattaaaaataggaccattattaacggcaaatgaattaaagaaaaccggaacagtttccttgaggtagcacttgacgactctttgtaaaatttataagctaaataaataaagtacacatttaatggggtagtctccaataaaaaccaccagttcgtagtgtctaagagaggagcagccacagacatagcctgaatggcaatagtatgtctcaaggcgactctcctacaaagtgctggatcagtcacagccatcatcctataacctgctcttgaataatctggtcgtagattccaagataaagcattaaaatgtggaaattgccaactgtaaaggagggcggccatgagccatgcaccaggtcctaatgaatctgcacaagcagcccaacccattaaaggaggtatggcaccaactatagatccaacccatgtgtttaaaatacttatcctttttaatggtgtataaactgatgtgtatagaattaaatttgttagtcctaaactggcagtgagaccatttaccccataatacaatattcctaacccagtaatacttgtagtagcagcaaacaacattgaatgtgtaagcgttaattttccacaaactaatactctgttttttgttcttgacatctgtgcatcaaatggcacttcatggaattggtttgttgcatttgcagctgcagataataatccagtaccagcagtacacaacaagaatgttgtgatttcaaaaggggctggtgctactgcataaccagccatagatgttatcaccacgagagatgtaagcctgatttttgatagtttcatataatgctttactaagttggaactgtcggtggatggagtaacctgccaagctggggccaccttcggcttgtgaggtaatagctctgacaaaggtaacgcaccattgtctgctatatctacaagaagtggaggtgaagattttgagtttgttttattaacataagtagtgctgggaacaacgaagtttactccacatttgtattgctttagtaaactagtggtatgtgtggttagacttttatgtaacctaatatttaaaattacacctttgtacatattatactttatttggttacattacatcacaaaataaattaaactatttactgttttcgtagcatataagtcagttaagtgttttcaaaatgttttaatgctaacattttgaaatcaaatgccaaaagtagggttaggtcagattcag

SEQ ID NO: 7704 - DNA, 1345 bp, Diabrotica virgifera
  SmartBlast Evalue=3E-72; Info=Uncharacterized conserved protein n=1 Tax=Glossina morsitans morsitans RepID=D3TLN3_GLOMM
gtacagacaggattagtaaaataattacgtttgtgtacaacgactcgagactcgatatctctcttctcgggtttgtgacaccacaccacttttgccatgaaattaattcgtgatcgacgttcatttagcttgatagttgtttaaatcattaatttgcagcaattgtattcatttaaaacttatctgcgtaagcgggaatgttgtagttttgtagttgcttgaattcgcagaaaaataacctaaattccttgaattttccagccatggcattaacatttactagatcctttgttggaaaaggactgaagtgtttgtccaagttacaggagacctcttcaaagaagaaattgacatcagttttaatattttctgcccaaatgaggtttatatcaacgattgaagtatcaaaaaatatatctctcattagcaatgaaaagaaaaattgtaaagtgatcaactttgagctgagtgaaccacaagacaagccacttgtggtgttgatatcttggctactggccaagaagaaatattcatataaatatgcagatatatacttaaaacaaggattcgacgtgcttaacatcaatgtcagtccatggcaattcctctggcccaccaaaggaacacagatggtggccaaagacattgtcaaatttctagacgtaaatgcaagttatagccccctgttactacatggcttttcagttgcagcgtacctctggggtgaagctttggtacttatgtctgccgaaaggcaaaaatacgaccacatcataaacagaatcgtaggacaggtctgggacagtgcagccgatgtcacagaaataccagtgggatttcccaaagcagtctttcctaataattccgtattacaaaacacgctcaagcagtacatattatatcatttaaaaacgtttgataaaactgtaactgttcattatgtacgctcaagccagatgttccacaccaacatagtgagagcacctgctctggtgttcgtcagcaaatcagatcccattggcagtgaaacctcgaatagaagagttacagataactgggaaaatatggggatgcaggttacttttaaaacttgggagaatacaccacacgttggacattatcaggcacaccctaaagaatacttatcggagttgaattctttcttaggatcgctgaatattaaacaaccgtccaaaattgaagagaaggtaaaagcttccgcgaagctttgatgtgatttatatgtatactacatttatataaatttgtgctgtttgatagtttaggtattttttttgactccaagagtatattataataaaatatatacatttttatcctctcg

SEQ ID NO: 7705 - DNA, 1345 bp, Diabrotica virgifera
  SmartBlast Evalue=7E-22; Info="Ras family, putative n=1 Tax= Microcoleus chthonoplastes PCC 7420 RepID=B4VJI8_9CYAN"
gtcgagaaaagtactaatagtgatatctacgtttttcgtttgtttaaaatgtagtgacatttctgttaaagtcttcaaaaacggagacgtagttaatttaaatattaactcaatttctgagttaaagcaaaatgtagtccacagaggtgaactagacgacattgaaattgaggaccaaaatgttccagtagtaccaaacaatttgctgaatggaatcactgccacggaacttcacattattagatcccaagtaagagatgttgaacctggtgcattcgatggagcttctatggttaacctaatgttgtatgaaaaccaaattgcaagaataagaaaaggtatatttaacaaaaactcatttaatatacttgctttgcagaataacgttatatctaatatagaagatgaagcctttgacggtacaaccatcgcgatactggactttggttttaacaagatggaaaaattgacttcaaaaatgttcgctggttcaaatattacaaatcttaacttacaatcgaacctaataagtaacatagaagatggtacctttcagaaaatcgataatttgaataaattagacttaagcggtaaccaattggaagttattggacacgtctttagaaacctgacaaacctaaatgaattgcacttggatggaaaccgaatcaaaacacttgaacctggatgctttggtggttctgggatctactggctttattttgcaggtaaccaactgactcatattgtaaagggagtgttttataaagtaccagtatccttattggatttcactaataacaaaatttcaaaaattgataaaggagccttagctggtctttcaacgctaacatttgttcagttatctaataacaatataggagatttgaagctgtccactcttggcgatctcaatactgctttaaatggtctatctttgagtgataacggcatttcaaatatcgatattggagtgttcaaaaatactaaaatcgatatgttggacttaagcaaaaaccatataaaatcaattaaaaaaggactgttccagaatgttaaaatgtacactattaatttgagtgaaaatgaaattactgaaatagaggaagatgcttttggtgatatcgaggatttaagtcacatagatgtgagcttgaacaaacttacagaagttaagaagagaatgttcagtctaccattggatgaagttaatttggaagataatgtaataactaaaatcgataatgatgccctcaatggtcttccgctgtcacgtcttcagataaaaaataatcctattgctgccaagaacaaagcttaaaatattgtgtatttaataataatg

SEQ ID NO: 7706 - DNA, 1341 bp, Diabrotica virgifera
  SmartBlast Evalue=1E-143; Info=FACT complex subunit Ssrp1 n=1 Tax=Camponotus floridanus RepID=E2AEI3_9HYME
catcatcactactagaatctgaatcatcaatatattccttacttttgatctttccttcagtaggtttaggtgaactggcccttttagcagcaggtttcttatctttctttgctggtgatttcttactttcttttgatgtgtcacctcctgaagctttaaattctttcatttcttgttcgtacctttctttatccttcttggctttttcttcccactctgatttatcttttaattctctccacatttctccacctttctttgcaatttcagttactgagattcctttattttcttccttaatttttctctgctagcatttaaccaaagcataaaagcagtagtggctctctttggtttaccatctgttttttctttcttctcgtgtttccttcttggtttctctgaaattgtctttgttttctttttttccttctttttctttttctcatcactatctccaccacctccaccttcttcatcttcatcttcagaagagctgctatgattactatcatattcttcagcaacatcactttcatcttgacctggattgaaatcttcatctgtactttcatcttcgtcatcatcatcatcatccctttcttggccttcagctttaaccctttccagatatgcatcaggagcagcttcttcatctgagtctccaaagtcatctttatatgaagctttatcattcttgcctctatttttaatgttcaacttctttttggtaataaagtcaaacagcttaccatactcctctttttctatactgctaaaagtgtgaacagtgcctgactttagttcaatttcaaagtcaaaagatcttgtacttccaccacctctagcaaaattgacagaagcaatctcttcaaatctaatatgaataggtggtttatgaacatagatgaagcccctttccaacggatatagcaaaccagctgcagctttaaaggaacaactaattgctggtgttccagaatgacctataaaatcagccggtcctgttagttttctgttgataatatttttcataatgttactcataacttcaaatgtgggtccactatgttccttttgtaacctcccatcaaatttttcctttagttcttcttcagtaaatggaagctcaatagatgtttcttcatcttgattaaagagaaacactaaaaagtggtaacgagtttggccttgtttaattggagggtctaagctaactacaaagaacatctgtctgctatctttatgtggtaacaggaacaatctgagcactgtagttattggaattttataatcaaaagttttaccatgaagttggaaaaatgtattaaaaactttaat

SEQ ID NO: 7707 - DNA, 1344 bp, Diabrotica virgifera
  SmartBlast Evalue=1E-144; Info=Juvenile hormone epoxide hydrolase-like protein 5 n=1 Tax=Tribolium castaneum RepID= D0W015_TRICA
ctttggctaaaacgtcaggaacttcaaacgcagcgaaatggccgccatcacggtgggtgcttatgtggaccatatttacgaatctttcagtgagaacagattctggaaaccacaagatttccttttcaaatctcgaacagccacttggaggttgtacaggaattccttccatatttgtagttaaatgtttcctatttacactttctgcgtacagtctcatagcggtggttgatgatcgagtaatccagtatatcatcacattatctattagttgttccatggtgaattttttagtcagaccaccactgtctaaatctttataggcagcatttgtccatgtggtgaatttttctaacaggtatgcagctagacccactgggctatcacgaagagcaacaccaattgtatcaggttttgtagattggatatgagtgtaaccaaattccaacatcaagaactctattttgtcccaaactggagagaccaagtgctccttaccttcatcaacgaataaatatggtataaaaccgctaagaaagtatttaaaattggacattggagtgttgacaaaacatagattcgaatgtataccaattactttctctggaaataatatagcgagatctgcggctattgcagctccccaatcacctccttgaagatagtactgtttgaaacctagtcggtccataagatttttcattataatggcaatttcggcacaattgaggccaactatttctgctccctctgaaaagccgtagcctggcacacttgggatgattaactcaaaaacaaaatccctttctttttctggtttagtaagcattggaattatttcgtaaaattctctaactgatcctggccatccgtgcaacattaacattggtaacactttcactcctttagtttcactgggtcgtacatgaatgaaatggatatcaagtccctggatgtttgttttaaactgtggatactggttaaagaattcttctcgttttctccaatcatattttgttttccaaaactctaatataggtttgagtgtgttggtatttatgccatagtgttgtttgacatcttcaagaggtgactgcaacgggactgttcggtttagtctgtctttaaggtcttgtaggtcttcttccgaaatttgtattttaaaaggtctaacactagtatcaagttcagccggtttagaggctttccaccacttttcccccaattcaggaattggaggtggagccagaaaagctcgtattccaagaaaaatcgctatcgacgcgactaaaataagcgctgatagtacctgaccgcatgatacagcacccatcgctgtttacc

SEQ ID NO: 7708 - DNA, 1345 bp, Diabrotica virgifera
  SmartBlast Evalue=1E-140; Info=Glycogenin n=1 Tax=Culex quinquefasciatus RepID=B0X3F9_CULQU
aaaaaattacatttttattggaagtatagcagccaggtacacacaaagcttatggatctattccaaaatataataaaattgataaaaaccagtattattgaatttttaacaaaaacatggtaatagatccattatttattatctgctggagtcttgaggcgcagggtttgttcacctgtttcggcagacttctctggttcagcgacagcttccaccggtttttcctcacttgcagctggttcactttctgcatcaggggcaagtgccaatgtttcgcaaattttgctccatatattgtcgaatgagtctcgtcctaggtagtctatatttcctacctcccagccttgcctccttaaatggtcgtctaaggcttgttgttcaggtgttcttggttgacccaaggtcagattggcgaacgcacctgctaagccggccatatcaggagtaagggctggatgaattaggttgcaaaatatgtcccaccagtgttggaggatgatggccaagtgttgcaaaccttcagaaggatgtaccttccttgtttccgtgttgaaatattgtagccacggttttgatgcgccgataaagtgaataatttttgcatttttgccaaattgtttaaatgctggcaaatatgagtaacaggctgtggaagctaggttataaataaaaggcaaatgttttgagatgtccttgtgtgcccagtccgaaaaatataaattaagaagtccttgatctccaccatcaaaacttcccttatctagggcaaattgaattagtttttcgtaagtttcattggacggacggtatacaaaaacaccagaattgaagcagtctggccaaccaatatctggagctgctgataattcttcccgttcaaataattcatcacagttttctaatatcaacgtgtctgcatccaaaaatacacatttttcgaactgcgtgagacgccagcagtggagcttggtaaaggtgattcctagttcaggccttttcaacaaacggagattcgcctcgtcttttgagtctaatatgtttacttcttttactacgttgaatacttcgtttaacttggatctcatggaatttgtaactcctggggtaataagaactgccagttgctgtttggtaccaacttgtttcaaagagtgagctaagacaagggatcccaacgaataggaatcattcgtcgctaacgtcacccaagcatagcctcctcccatgatgaaattttcttccaaaaatacggaattaactgtttcactttactacgataattaaaagcctgtacctactagataaacgcaacgcacaacccaataataaaatcaaaacaagtgca

SEQ ID NO: 7709 - DNA, 1341 bp, Diabrotica virgifera
  SmartBlast Evalue=5E-17; Info=Large proline-rich protein BAT2 n= 1 Tax=Camponotus floridanus RepID=E2AK75_9HYME
cgtgccttgatggctcacctcgtggaacgtaattattatcttttcggtcttgtttatcttgtcgttttcattcccgtatttgtcttgtttgtgttcgcgattgcgttcgtccttttcattttttctcgcaggttttggacttctttgttcgcttaattcgtgtttggttgtatcagcttttctgccgtcgtccgcttttaaattccctgagtggtcttcgagagagccgtcagaatctgctgtgtggtagtcttggttccttcctcctggtttctgaccacgactagaaggccttctcggccagggaggccctcgtgaagaatgattatcgttcgtgttccaacctttcttttgaccatacgatctattacgattttggttatagtcatcggttttatcagatttcttggactgctctggtgacttaatctccacttttgactcagactgtcttttgtcttcggtcattttcgattcagcttcttccagtgcaagaggttgagcatctgcccatgcgctagcaaattccattttcaacggaataacttttgtgggaagttcttttttaatctccgatttcacttctaccacttgaccgcgcttcagctgcgtcaagttccttttttcgtttcgcatatcatcggcttccatgcgatctttagtgataggaccaggaacagaacgtcgttcctctctactgtaatcttttcttttgtcctcgtatggatgttcatacatcgattctgaccatgagcccatgttgtactcgcgtggttcagaatctctagaatgacgcgttgagcgcgaatcgcgtgaatcccggctgtctggcctttggggacgatctctttcacgttctttttcgtatttatcaaccactttttcttcacgaactttctccggtctttcactccagtcttcgttactagaacgatgtgattggtcatcttgttttttgttgtcctgaatattcttttctttgtgccacttatcgtgttcctgttctcttcgggagtactgcatatcataatcctgatgtctactgtccgaattatcagaatggtggtaacgagaatcttgagaatccctttcttgttctgaatgatgtgaactgcggtagctgtcatcagaactttgtcgtttatactcctttctgtctaaatcttctttttcaatctctggactatcttgtcttatattacggttgtgcattgaaccatgggaactgtttgattgcgattttgttctggaattgccggaactccagcggttatcaaaggattgctgatggtattgttggtggttttgcaagtttgagttactgttattgcggaatctagg

SEQ ID NO: 7710 - DNA, 1343 bp, Diabrotica virgifera
  SmartBlast Evalue=6E-92; Info=Isoform E of Titin n=1 Tax= Drosophila melanogaster RepID=Q9I7U4-5
aaccaacttcgccattaactacttggaaaagggacatggttacaactacagaattactgccaggaatgctattggtgtgagcgatccttatcttccatcagaaacgatcattgcaggatccagaatgacaccaccatcacctccaatcaacctcaaggtcaaagatttgaccagcagaagcgcaacgctaacttgggaaccaccagaaaacgatggtggaaccgaaattacgggctacatcgtcgaaaagaaacttgaatacatgcctaaatgggaaaaagtgttcacattggaagccttctccttggaatacaccttcgagaacttgaaagaaaagagtgattatctgttcagggtgttcgcagaaaatagcgttggactcagtccgccagctacttctgagattgtgcaaatgcgaacacatgccactgtaccttctccaccaacaccgccactagaaataagaaccataggacccaacgcaatcgttgtggaatggggaatcccagaatcagacggaggctcaccgcttctaggttacaacattgccatcagagacaccaaaaagaccatgtggatggagatcggaagggtccaaaagggcgtacagaaattcacaatcagagatttacaagaagaccacgagtatatgattaggatatttgccaagaacgaaattggattgagtgatcctttagaatccgatgaaccgtttaaggtccttccatccggagatactgatcaagacgacttcaaagaagcaacagacaaagagccaacgtcttacagtactgaaacctctacatcttggttacgggacaacagcatggacgccgacatccattcctactccaagggaactttactgaagaaagacgaatatttcttccgtatatggtgttacgcgacaaaactatttaagtaaacgagaagaatttcggttcttcttagagatgtacatattcactgattttaggacatttatttttagaattttgatactgatgatgactttttcgattatacatatgtaaaaaaaagagctcacttagatttgtgctgatattactttgtaaattgcgagctaagtaaacctaagacctaagaacgaaactcagcacaaattttaccttgagctacatgaggatactgtgatactgataatgaatctacaaacaacctaagacgactattatttaaaaaattttgaaatacttttgttattttcagtaaaatattttatgggcagttgtttttgtttggttatatatgattaatgtttatattgtttatgctgtgcgctattcagatttaatattttattgttaattataaaaaaaagg

SEQ ID NO: 7711 - DNA, 1326 bp, Diabrotica virgifera
  SmartBlast Evalue=7E-83; Info=Probable RNA-directed DNA polymerase from transposon X-element n=1 Tax=Drosophila melanogaster RepID=RTXE_DROME
taaatatttactctacatgagtattacaattacgtttacaattagtgtttcttaacttaagaatggtaaatctaatggtaatttttccttaaggcgtctaatttgttgactattgttcaataaatttagcgctaacacattttgggtggttttctagtcgctgtaaatatttatcactgtgtgaaactatcacttcactcacagttggcacctgaaggtattgtaggatgtctttgttgcttacaaaccacggcgcatcagttattgctagtaagcaccttgttttgaaaccggtccatgattgctagattgaatttgaagcagtgccccacaactgtattccgtacgtccaaattggcttgagtatggcattgtatgctagtaatttatttctcaacgacaactgggattttcttccgagcaaccaatagtattttctatatatggtatcaagatgttttctttttttccatatatgagtcttccaagtgagtcccttgcccatatgtaggcctaagtactttacagtatctaccgttgaaacgggagcattgttgagtgatatttgaggacaatcgctatgacatttagtgaatactatgtggcttgatttggattcgttaagttttatcttccatttcttagtccatgtctggattttatttaggttttcttggagttggtctgctgcaaaaacgggatctgaatgtactgctagtattgcggtatcgtctgcaaatgtggctgtatatactttattgtccgtaggtaaatcagaggtaaatagtagatacagaatcggcccaagaacgctaccttgaggaacgcctgcctttatgagatgtagaccggttatctcgtcttcatattttacctggaaatacctttcttttaggtatgagtatagtatgtcatacatgttctggtatatgtccctttttagtttatagagtagtccctaatgccacaccttgtcaaaagcttgactcacatcgacgaatgcagttgagcaatattgcttactttcaaaagagtcttggattaattctaccagtcgatggatctgttcaattgttgaatgtttgactctaaatccaaattggtgtatcggtagaagttctttttctgcaataattttcattagtcttttagctagtaatttttccataattttcgacgtgacaggcagtagacttattggtcggtatgaagttgtttcgtgttgaggtttaccaggtttagagattagtattatttgcgctaccttccattgcgcaggaaaatatttgagtcttatgacggcgttagtaaggtaggttaacataa

SEQ ID NO: 7712 - DNA, 1340 bp, Diabrotica virgifera
  SmartBlast Evalue=0; Info=Tat-binding protein-1 n=21 Tax= Endopterygota RepID=Q9XZC3_DROME
atgacagtccgaatttgtaatttcaaagtgttttcatttctcaataaactaaattaaaataaataaatcatggctactcttgaagatgtttctatttgggaagatggagaggaagcattaggtgaagaggttttacgaatgtccactgatgaaatagttagccggacacgtttactagacaatgaaattaaaataatgaagagtgaagttatgagaatcaatcatgaattacaagcccaaaatgagaaaataaaggagaatactgagaaaattaaagtgaacaaaaccttaccgtacttggtgtccaatgtaatagaactgttagatgtggatccccaagaggaagaggaagatggtgcagttgttgatctggactcacaaagaaaaggaaaatgtgctgttgttaaaacttccactaggcaaacctactttttaccagtgataggtctggtggacgaggagaagttaaagccaggtgatttggtaggagtaaacaaagattcataccttattttggaaacattacctgctgaatatgatgccagagttaaagctatggaagtagatgaaagaccaactgaacagtattcagacattggaggtctagataaacaaatccaagaattaattgaagctgttgttttacctatgactcacaaagataaatttgttaatttgggtatacatccaccaaaaggtgtgttgttatatggtccccctggtacaggaaagactcttttggccagagcttgtgctgcacaaaccaaatcaacatttttgaaattggctggtcctcaactcgttcaaatgttcattggagatggtgccaaacttgtcagagatgcttttgctcttgccaaagagaaggcaccagctataatattcattgatgaattagatgctatcggtaccaaaagatttgattctgagaaagctggagacagagaagtccagcgtactatgttagaacttcttaaccagttggatggattcagttcaacagctgatattaaggttatagctgctaccaatcgtgtagatatattggatcctgctctactccgttctggtagattagatcgtaaaatagagttccctcaccccaatgaggaagcgagagctagaatcatgcaaattcattcaagaaaaatgacagtcaatcctgatgtcaactttgaggaattagcaagatcaacagatgacttcaatggagctcaatgtaaagcagtctgtgttgaggcaggtatgatagccctaagaaggagtgctacagctgtaactcatgaagattatatggatgcaattatggaagttcaagctaagaagaaggcaaatcttaa

SEQ ID NO: 7713 - DNA, 1324 bp, Diabrotica virgifera
ataaccctgcggaaaattatgccgtctataatgtaaagaattatagaaaatgtcaattgatctcgacatgtagtttttgatcatttttaaagaagttggaagcaaaaaaatgttaaaaaagcctctacgctagttatttttacaatggaagtacccactactcaccctttaaccattaattttcagttaatggaatatatcgcaccctcagtaatatagaggcacaattcaaaaaaagtgatttttgggaaatcgcgtttaatgattctggtttctaaaattacagctattttttcaaataacatgcttattatttaagttataaacgtgaaatttggcagattgttatttgataattgcactataaatagcgatgagaaaaaattaatataaataaattccattaattacatgtaattgaaaaaatactttcaagttagtcccatatatgtagtactaaaaaaacataacagaaataaggaactatttaagtatgatcccttatattattaatgtcctgtcactgtttatgcaaaataacgatctattatgaattagaccgatttatttattatattttgaataatataacggctcaactaaaagcagtaaaaatttgtagcagtaaaaaccagaggtggcaggggagagtgagagagaggcataaatatatttaccgaaccattcatcttctttttctccctttgtcaacgctaactggtagagaatttcattttgtgtccatatccaaaatcacagttaacacaaattttgagttgagtccttatattactgagcgtgcgaattgaccattgtgtgaaaaattcatactgttagatgggattactgtgagttttgtttgctatttgtatttagaaagaaagatataatttcaaaaagaagataccacccgtgacaaatttcataatttaagatcaaatatacatgaaattaatagtaacatatggcgtagaaacatggatcacgacaggagagacaataaacattatcaatacttctgaaagaaagatattgggaccgatttgtatcaatactaaaagattcctgcaaaccctctatagcaaattatgcaaaaatacaaagattgcgctgggcaggtcaccttataagaacggatagtaacagaacacctagtgggacgtcgaccagtatgaagaccaaggacgaggaggatagacgaagagagaaccgatgataaacagatattgaggatgggtaccggcgctagggtataaggcgcccgcctgcaaaagtaggcataggcgcccttcggtttcttttaaattaggattttgtatagcac

SEQ ID NO: 7714 - DNA, 1338 bp, Diabrotica virgifera
  SmartBlast Evalue=1E-171; Info=Bt n=1 Tax=Drosophila grimshawi RepID=B4JZU2_DROGR
gctttaacacggaagtcatattcatgtccttcttgtaaacccttaacatccatttcagtatcatttggtccagttcttccaactggaacccatctgccagttgctttgtcgtatttctcaacttgatagccggtgatgggtttacctccatcatcctctggtttttcccatttaagtttacatccacctttggtgacatctgtaactttaagaggaccttttggtttggaaggagatgacagtactgtcacttcaacttcagcttcatcaaagccatgttcattcacagctttaattttataaacaccggtgttctttctgatagaattagtaatgttgatcttagtattgtagtcgacatttattatttctatatttccctctgattttacttctttgtcaacatggaaccaagtgcaggttggggcaggttcacctttaacatcaacatcgtacttgattggttttccagcacggaccatgataggtttgagatttgttctatcgatcctaggcttaagtgctctatgtttaataatttgcatttgacttgcatctgatggtgtaccacgaccagccttgttgactggtattacacggaattggtactccccacgctctttgaggtcttcgacgcgagcttctagttgatctgcaggtacttcagtagctttttcccagtcgggtttatatttatctttcttttcaatgatgtatttttcaattggagcaccaccgtcatctttaggaggtgtccatctgaggttaactcctttgttgtcataatcgattatttctggagtacctggttttccagccgcgtcgaatggattcttggctacaactggtctttcagaaaccaaaggttcggaatcaccttcagcattgacagctgtcaccctgaatttgtactcagatccgggtacgagcccagtgacttcgaattctcctttaccgtcaggtgacattctgtcagcaggcaaacgaccaacacgtacccatttgcctgtagccatatccatcttttcaatttcgtattctttgattggagtacctccatcgtcttctggtttcttccagctaactttagctttttctgcagtcacatcagatacaactaaaggtccttcaggggctgctggtttgcccaatacagtcagttcaactgtttcagtatcctttccgttaacgttttcaatagtaagcgtgtattttcctgagtctttacgaacagcgttgaggagtgtgaagtccgtatggtagtcggagttttctatcttgatacgttcactatttgataatggaatgtcatctctccatacccatttgacagatggt

SEQ ID NO: 7715 - DNA, 1340 bp, Diabrotica virgifera
  SmartBlast Evalue=1E-165; Info="Fumarylacetoacetase, putative n= 1 Tax=Pediculus humanus corporis RepID=E0VQ89_PEDHC"
tacattttccagggaacggtaagtccccatcatgaagtgctttttaaaatatcctaaatattgtgatttccccatcgaaaaccttccatatggagtatttaccactccccaagagccttctccaagaattggggtggcaatagctgacctcattttagatttaaatgaggttgctcacttgtttataggtccggagctgaggaatcatcagaatgtatttaaagaagccacattaaacagcttaatggcactaagtccacaggcatggaaagaagcaagggaaacaatacagagccttctctctgaagataatactattttacagaatgatgtggatttacgaaaaagagcatttgtttcacaatctgaagccactatgcacttacctgccagaattggcgactacacagatttctattcttccattcatcatgccactaatgtaggaatcatgtttagaagcagagaaaatgctttaatgcctaattggaaacacctaccagttggttaccatggtagagctagttctgtggtagtttctggtacttcaattcataggccttatggtcaaacgcttgtaatggatggtacagatcccgtgtttggcccttgcaaattaatggactttgaattagaaatggcctttttcgttggtggttccaacaaattgggtgaacctataaaaatggaaaacgctgaagaccatatatttggattcgtaattatgaacgactggagtgcgagggatatccaaaaatgggaatacgttccacttgggcccttcttggctaaaaacttaggcaccacaatttcaccatgggtcgtgactactttggctttggagccttttaagactgacaattttcctcaagatccaaaaccgctaccataccttagacatactgataaatttaattttgatataaatcttcaagtggacttaaccccaaaaggtggaaatgtatcaactactgtgagtcgctcaaattacaaatatttgtactggactcctaaacaacaacttgtccaccacaccataacaggttgcaacgttaatcccggtgatttaatgggtagtggaaccatcagcggagagacatcagattcatttggctcgatgcttgaaataagttggaaaggtacaaagcctgtgagtctactagatggatctcaaagaaagttcttgcaggatggcgacacagttaccatgaaagcagtatgtgaaggacataacttcaatattggtttcggcacgtgtgttggtacactgttacctgcaaaaaatcttacttggtaaaatgttgaattgtatattgtgttaataataataacatttgttc

SEQ ID NO: 7716 - DNA, 1337 bp, Diabrotica virgifera
atttgttaataactaggtttctcgtccaaactgtgacgggcatttttgtatttatgtataatgtattaggtgtataggtgcccaagggagccatttgcaacctggctgctcaagtgtcccgaacatggtatatttttgccttatttccctggtgtaaacagttaaaatacaattttaaatgtttggtatttaataaatgaaatttgagaagccgctttatttaaccctttgccggtaatttaacaatggtattacgtcactactccttgtaaattaacaatttcagaacttaaaagtgtttgtttgaatctgccgatgcacgattacgcattgatactacagtggaataataagcaatgttgccgattttaatgcttccttcaatgaggtatatctaattaataagtaaacgctttgtatctaaaattctgtaaattattccacgataaagaaccgtgggatctttgtgaaacttatctacaaagatgaaatgttttgaaactgatgtaatttttattttcgaagaaatgccaaattcagaacaagtttaccaaaattgttgatcccgacaaaagtgtcaaaacacacaattatactttcttgataagatatcgttatttccaacaagttaattagtgcaattaaataaaagatatttcggttaaacaaaataaacaggaacctgacaaatttacttcagataagaaaaatgttctcacgagtacaaaatcaataagtataggtcattacaaattatttggaaaagtacatatttagtgtgtgcttaaatgtgtatattttgaatgaagtaaacggacagacgtactcacaatcatttgttgttttggtctgacgaccggtttcgctctctaaaatattcagagcatcatcaggtcaacggttacaagtaaactaaatgctacataatataaaaaaccagagttagaacattgtctggttgttatcaaatactataagatcaaccaggggcctgattctaattcatttcgaggtcgcaatttaatttcgactctgccccgccatgacggtcgcaatttatagcgattcgtattcatttcgatattagttctaactggggatattaacgttatcattttgacactgctcagaatttgggttggtcctcctgtttattggatttattggctatgcaaccaccgcaacgtttgttgatagtctgggcaaattatcgaaaaaatgtcatttttgtgaaaagttatttaccgctattttattgcttaaatcgaatcttaagatggtatgaaaagtccgcagaaagtgtgttattttatttgaaaaacaaattagcgctccta

SEQ ID NO: 7717 - DNA, 1333 bp, Diabrotica virgifera
  SmartBlast Evalue=3E-58; Info=CG3008 n=4 Tax=melanogaster subgroup RepID=Q9VR42_DROME
cattgtattctagtcctattggtgtttctgaattttttctcttcctttgtttaactacattgtattctagttctattgggggcttctgaattggatgtggtttccgtttaaatttgagagattcctttttatcaggtagagcaacccggtcattaaaatcgaagcctgttatataactaaacagcccatttggtgtagccacatttggtacatctttcttagaaaaaaatctgtgatattagtacaatctctatataagcataatagtgctttttcatggcttttctctacacattcactgacatcaataagataacattggccttcataccacaagatattatcttcactcagatctgcatgtaccaaatttaacttgttaaagagaatcttcatatatacaatgacctgttcataagcatttttccaatcaatgtctaaccttctcacatcctttaatgttggagcaggtatctggtttttcccaataaactccatcaccaatacatgttttcgaagtgtaactacttttggacaaggtattccagcctcttgcattaacatcagattggtcatttccttctcagcacaaatacttataatgcttgtggaagcttgtcttccttttctgttcataaatctatgatccaattcgccaaatttttcacatcctttgaagtcagataggattgttttatagacttttatagcacattctttaggcaagttaacatccaaaaaggatgagggatctgaattggcatgaaggattattgcttctctaccttcaccgatgataccatgaatgcttttcaaaagttgtttttctatcattttataaagtatcgtatatgtaaacttttcttgacagcattcgatagtttcactaaaacacttatgtggatacactttcaatctacagactctttgtatttcagacatcacttgataatcttctgttaaaatatgtcctttatttttattagggcactgtggatttaaatctaattcaggttctaaattttcaaatctatcccagaattttctttccttggcatctaaaatttcttcttcattatccgaattactgatgaaatcatcttctccacaatcatcaagcaatgtggaagatctattaaattcctcaaccatggcttccccactatcagaaatgttatcaaacacagttttaaagccttcattatttttttgactcagttttttatcttctttaatttgtcagttgtctggccaactcttcagatagaatttcttccagatttactggatgaggctgttgaatttttgcccatggagacgtcatattgctttg

SEQ ID NO: 7718 - DNA, 1341 bp, Diabrotica virgifera
  SmartBlast Evalue=1E-19; Info=Nuclear autoantigenic sperm protein n=1 Tax=Harpegnathos saltator RepID=E2C4L8_9HYME
cttagcaactgtagatttagcggtactcttccttaattttgcaaaaattccgcttttcacattgttttttatctgtgttaatatatttgaagtgttgaattttattcctactattaaagatggctgatgtcgtagtagacgctgagagcaaaaattcaaaagaattatacggccaaggtgtacgagccttcattctaagagacttctcgacggctgtctcggctttaggtaaagccagccaacttctggcagatgaacatggagacgatttgcacgaatcgctcggtgaagtatatctatattatggtaaatcgctccttggattatcgcgggaagaatctgaagctcttggtgacgccgtgcctagaaatgaagaatcgtcagaagaagataacgctgatgaaactgaagagaacgacgaggaaggtgaaaatagtaccgaaccacaagagaataatgaaaatgaggctaaagaagctgagaagtccgatgatgctaaaaaaacagatgatgctaaacaatcagatggcgaaaaacaaaatggtacaacagtcgcaaacggttccggcgaaggtacatcaaacggaatcacgaaagaagatggagctgatgaagacaccgcagctgaaactgaggacgaaccaacagatcttcaagtcgcctgggaggttcttgagctggccaagaaaatcttccaaaaacagggtaccgccgccaaaaagaaccttgccgaaacactgatagttttaggcgaagtttcattggaaagcgaaaatttcgaatcggccgtcaacgacatcacggaaggtttaaaaatacaaaaagacatattcgcaaaagattccagaacggtagcagaaacgtattacaagttaggagtagcttactctacgaacacccaaatagacgaagctataaacagtttcaacagttccttagaataccttaacaacagaatcgcccatttggaaagtgtcgaagacaaaaaagacgaggtcgatgaagaaattaaggaaatcaagagtctcataccggatatacaggaaaaagttaccgacatgaaaacttacaaagatgaggcaatgaaaaatatagtatcggccatgacggaaggaataaaatcagacaaaccagctccatctaccagttcctcaaagcctgctactgacatttcacatctggtcaagaggaaaagaaaagcggatgagatagacgacaaagacgcagcacaagagagcaatccgtcaaaaaaagtcaatcaataaacgtattactgtgttttttatttttaccttcaaactcttgccacatttatcatagactattaagaacaattgcgag

SEQ ID NO: 7719 - DNA, 1338 bp, Diabrotica virgifera
  SmartBlast Evalue=0; Info=Cathepsin B-like proteinase n=1 Tax= Diabrotica virgifera virgifera RepID=Q70EX1_DIAVI
gtttcaaagccggctgttgtttttgtttggtttcatgtttcatattcatattgtttttgttgttacgagtgattaatagaattgtgacagtttaaattgttgcttcagaatagagagaaaaatgattccgctgttacttctgttgataccgtattgttctggtctaagaatggatatagttacacattcatctgatgaagtcactaactctaaagagcttcatccactatctgatgaattcattaactccatcaatgcagcaaaatccacatggactgcaggaagaaattttgctcaggacaaatcaatggactatatcattaaattgatgggggtattacctgaccataagaactatatgcctcctgtattgacacataaactagaagctctagaaattccagccgatttcgatgctcgtcagcaatggccacattgcccaacaattcgggagataagagatcagggatcatgcgggtcatgttgggcttttggagcagtggaagctatgtcagacagagtgtgcattcattctaacggtgaatctaacttccatttctcatcagatgatttggtttcttgctgttggacatgtggaatgggatgtaatggtggatatcctggtgcagcttggcattattgggtcagaaaaggtcttgtctctggtggtcaatatggtacaaaacagggttgccggccatacgaaattcctccttgtgaacaccacacaaacggatcacgtccagcctgcgatgcttcagaaggtaacacgccaaagtgtgcaaaatcatgcgaaagtaactacaagatcaattacagtaatgacttgcactttggctctaaagcatactccattagtagtgacgtcaaacaaatacaggctgaaatattacaaaatggacccgtagaaggagcatttagcgtttatgctgatttcgtgaactataaaactggggtttaccaacacataaaaggacaattcttgggaggtcatgctatccgtattttcggttggggtgtagaaaacaataccccatattggctgattgctaattcctggaacaccgactggggtgactctggtaccttcaaaatccttagaggcagcgaccattgcggcattgaaagcggaatagtagctggattgcccaaatagaataggactagacgaatatcaataattaacatatttctttagtttgttgttttgctgtttttcttacataattaataattaacgttttttacgtttatttagataaagataccaaatatttgtgattgttaagagttactcagttagtttgtattgtgacttgaataaataaattagtttga

SEQ ID NO: 7720 - DNA, 1332 bp, Diabrotica virgifera
  SmartBlast Evalue=3E-90; Info=Lysosomal aspartic protease n=2 Tax=Culicini RepID=ASPP_AEDAE
aaaagaatcgtgacgtaaaacaatggtgtcctttggttagaaaacaataagatacttcaagtaccttaagtacttcaagaagcgattcgacactgtatataaagacgaaaaaataaaaaatgaagcattcatcaagatgtacgcaaagattttagttcttttggtgatagctgctcttgctagcagtgaacttatcagaattcctttgaagaaggtacctgctaatggacaaaaaagattgcgtaatgtagccgctaaaggattacgcagtagatttggaggcaatggagtagtacctttagtcaacgaatatgaccttgattattatggagaaatcagtattggaacacctccacaaacattcaaagtcatttttgacaccggatctgccgatctttgggttccttcagcccaatgcgaaaacaacactagaacaccaaatggttgccaaaaccatactaaatatgatgctgacaaatcttcaacataccaggaaaatggccactccttctatattgaatacggatccggatctttgagtggtttcttatctgaagacagcgtaaatgttgctggagttgctgtggagaagcaaacatttgctgaagccacttacgagaccgctccagctttcgtggatagcacattcgacggtatcttgggattgggttatccagagctgtcatcacaaagtgttactccagttttcacaaacatgatcaaccaaggagttcttgacgcaccagtattttccttttatctgagccaaacagccaatggcgatcaaggagaactagtgattggtggatcagatccaagtaaatacagaggagacttcacctacacagaagtatcaaaaaaactgtattggcaaactaagctacaaggtgtttccgtagggaaacaaagtttatgtaggaatggatgtcgatctgtaatagatactggtacttctctcatctacggaccaaacgatgatgttgaagctatcaatgacgcaattggtgccttctatgactacgatcttggtatttacaccattgaatgcgatgccgatttgactaagcttcctaatgtaacatttactttcggaggcaagaaatttgacatttctccttcagcctacgtcatcagagattcaggtatttgcgtatcaagctttgtcgccggagactttttcctcgctggatttgaatggttggttggagattcattcctgaaaacagtctacagcgaattcgattttggcaacaaccgtattggatttgcagaattggcataaatagttgtaactttataattatttatttattaaatattgctttataaaaa

SEQ ID NO: 7721 - DNA, 1335 bp, Diabrotica virgifera
  SmartBlast Evalue=1E-132; Info=Protein-tyrosine phosphatase n9 n=1 Tax=Aedes aegypti RepID=Q179W1_AEDAE
tttacacctatatttctcttcgctcaaagacagcgactcttcaatcagaatcttcttccacggcctgatcaaacccggtaagatcggcggtttgcagatggctcttcattagggcatattctataagagccaaatgacaaaatatgtactgatcaggcatttggatggaatacgctcgttgtgatctaatccgctcaactgtacctcgaatatcggccgtgcccacgtcttctagtctggagatgcatatatccagtgtgcagaaagtacctgttctaccgatgccagcactgcaatgcacaactatcggtggtcccctagggtgaccagcccatgtatcacctaattcaactaccatactggcttgtttcctcctaactctttcaagaaattctaacatggcttttgcagaatgaggaactccataatccggccacgaggtgaattgccaatgagagacttcgcgagtttcttcagttttgttattcgttaaactaatagtagtaactgtataatccttatcagtttctatagactccgtcttaacgccaaactgaccatacgttgtttcccaaccaacttcaggttcccagtattggtggcattttggtcttcctcgttccatagctctagttgtcataacaattactaatgtgtgttgttcccaaatcatccgccagaaatctggcgttgtctttgagaggggtccttgtgtattaataaaagcattcttttgcttatacccatccacgaaatttgcgtgaatgtaatcactatctttgtcattgtccagttcagtaagaatcacgcgactatggtcgtagcacagcacatcggtatacctatttttgggaaggttactttttgatttggctatgttaaatgtaccatcaggaggtctcgacctaatttcagcatactcttgcattaaaccagatcttcctctatccctaacataatctactaattgcatagcagtcaaagcagcaccatctccgtgaagagaatcatcatcggagaagccgcttgaagcgctacttggaggatttaaattcgcctcctccgcccaactatctacgccgtttcctgaaccggagatgtcgatgtcgcttggagccgaggtacgcttttggggcgacggcgtcttaccatctgtaagataaaacaacggtatgctcaaaacgtgaaacaccatcctcaagtttgccgtcactaattgcaaaccaacatcgattatgttcaatatttttaagccgatcacgaataacttcataaaatttatagttagataccatacaaataattttcagctaacgactaactaataacgacaac

SEQ ID NO: 7722 - DNA, 1333 bp, Diabrotica virgifera
aggatttcgacatcccgtatctcgaaaatgaagcatatgcggacatgtgtttgttaaccaaactgtgattatttttccatgcagaattgcctcttgaagtttgtcacttctttagaacaccctgtaatgatgaagaacgtggctagttgttagggtgcctaatttttttattatccaatataagcgaatgaatcgaaaaacataatgataaatgataagaaaatatgaggctatagttgggttttggtttcagtgttttgtaaatgctggaatattccacagggtattccgaacttcgaggaaaaaacacagtattattgttacacctggtatacaatgacaatttgcctgtctagcagcagtactattacaacgatattgttaaagtttgcttagcaataaatggttgacttcaattaatgcggtcgtaaatattaaatttatctgacttggcccattgttaagactggtccggagcgataagcaaaccaggtagacagagttggtcttttgacaattaacactgactagacggtactcctgtaataaagcaaaggatccacaaaatttacaataattacgacgacaaaaacaaaaaacggatgtaaaatatattgctttgccttatatacccgaaattaatgttttcaaatgagttttaaagtaaattaaatctacttttaattgttaagattatagaaaaaccaacattcaaacatatttaaattttacctgaaaccgggccttttatactattgaagtaccagtacaagtattgaccattgaagtcaaccatttactgctaaacaaactttaaagaataaggctagaacatatttaaaaaaaatcgcttaaatcggacaacaggtttatggaattcgagacatcaagaatgaccctttttgggtggggcggtaatttctgggagtagtgtataaatattacagagacaaattgtgcattctcttataagttttaaagtatacacagtgaacaaaaacctgccatgattgcatatttgccaaatttttaaatagttctcaatagatatactcaataaaataggaatagcatctcatgtatgttatgtgatactttatttgaaaacgcataattcagtgattttgaaaatcggtaaccaagtgaatgatttgtttgaagtatatgaatatagtttatttttaatgtacacacatactgatactgtgattaaattttatctctggcatttctgtgtatttatccgagatctaatagaaaagaaatcacaataacacaggcactaaagaaaggcaagaaataataccagtaatattgtccttatttacagtaa

SEQ ID NO: 7723 - DNA, 1332 bp, Diabrotica virgifera
taatgtatgcagtgctaatataggtgctaggaacattgatactatatcaagacaatgtcatttgagtaacaagtatgaagaagtactgataaaataattgtaaaagatagagctcattgtaaaaatgttagttaaatcttttgatatccaaagtcttaagactacaattgaatcgtttattgttgaagggaggtaagtgccatttttactttttgagttttagtaaaaaaaaaccatcctctctttctatatccacctcaaagcaaacataggcattgtatggatatagtttatattctgtgaaactacatttaacaccagaagatgcggatatagagagaagatatttttactataactcgaaaagtagaaagtggagcttgccccctttcaacaatgaacgattcaattgaataattgaagattgggaaagtgatgttaaatagagagtaatagtagaattttgtatcattgtaccattgctgttatttcaattgctgtattatttcacatatagtcccatgacacttcaagaatattgtttttctattctgccctactaagagagaaccctgtatctccacgatagcgagttttgagaaaaatacgattaaagatttttatttaatccattgtgcttttggtacaataataatataaaattatttagggtagagtgtgtagcgtcatagttaacttaaaaaaaaaattgcaaaattataatatggacaatagttatgcaacatatggtctaagaatacaaagaattatgtcaattttacttagctaaaaccacgtataatccaaatttgtcttaagcttggttttaacaatgtaattattataaaatttatataactgccttgagaggcaacacatttaaatatttgaataatattttctatgaatatttgttgaataaaacaagtatttatgaaaaattttaatttttaatcagaagttggtaattcatactaaaattgatggcggttctccggtttttattttttggtcctttctactccgagcaatcccagaaggtgtcgtcacaggtgtggggtcctttatcccagatttaacactctgctctgcaaaaagtcaacctctgttccttagaaaaaacctcgcatatcgtacattatcctacgttaaaaacctgtatctgctgagcatataccaggtttttactatgaagcattaattgccaagtttatactaagcataatagtcatttttggcatctacggggaaactattttctttcataaaatatttagaaatgtaaaatactggtttcctctatgtgaatatattatataaatcataattatt

SEQ ID NO: 7724 - DNA, 1320 bp, Diabrotica virgifera
gtttctgctacgccgccacgtgcacgccgcttgaaaacaagtcaggcggtttggcagtctgtgctgggcaatcatttagtacgcgttgaccgcgcgatcgatttcaacgtagacacagagctgtttatttatggagtgtattgacgcagagaaaccgatcaaatgtgtattgacggaaacttggcttgaaaacaagcagcgtgcacgcaacttgaaaacacgcaagtgtgcattgagctttaccgtttactgtaccttgctgaatttcagttctacctatattttttccgcgccggaatttaaaatctgatatatgaatataaaaaaatagatgaaacaatagaagatgtaaggtcataatatagagatgcaaaagctaacacacaccacattttagtaattagaccagactgtatcgtcgcccccgttaggtaaattattcctattcgttttttttacacaaacttactcaaaaagagccttataacaaatccacagggtgcaggtaggtgccgcggtcgggaaattgtttaaacaattcttttaagcaaattaaaaaaatcaatattttaactttttttttacaatttttcttatttttttattttttggattattctgagaaaaaaagtctcttgtgatttttctccaaaattgatagctgtagaattatatgcaatttaaaattttaaaaacgcgaaaatggtcatttcaagtcaaggagaatatttggaggaaagagaacagaggaagggtatataagaaggacaaatgaggaactttataatatttgcaaagaaacacaaatagatagcgtactaaaaccaagaaggttgcagaggctggccatatacatatatagaaagaatgaacgaagaaagagtggtcaataaaatagcatggagagtaccagattataaaagaaaaaggaagactacgaaagcgatgaagagaggcggtagtagaaaacctaaaagaaaagggaataacagactgacaaataacagaaacctatggaaaagaacaacaaagctctgggcctaaaaggcctgtaaaaaagctacctatatatgagtccactagatgcaaaactctgtatttgcaaaaattgagtttcagctgacagttatttgttacatgttgtagctatctgctgatgtagacattcacctgcaaagtaaggtatttgctaagaaataatcattagaaatcttgagtcagatgaaaaactctgtatttgtgagcctatgccatttgcataactgtgtaattgcaattgccaatcgcttacattgtttgagtcacatgacatgtcacatg

SEQ ID NO: 7725 - DNA, 1336 bp, Diabrotica virgifera
  SmartBlast Evalue=8E-63; Info=CG2909 n=1 Tax=Drosophila melanogaster RepID=Q9W2W5_DROME
cttaccggttgtagttgtagacttagcggctcgtatttccctgtgaattaatacaataaataataccagagaatatggccttacccgattggtcctttaaacatccagaatggtcaaacgaaacattcgccttattaatagccaaaactacagaagatttgagcaaagtttctttagataattttatcacgaggagcaataattttagcgtcaaatttcctgtcgacagtggaagatgcaaatctttaaaagctagtgttcctccggagatacttgaacgaaatatatattccgtatattgtctgcttcatgagaatgtattagaactgtacagtaaatttatattacttaaaagaaaatatggatctaaggtcgaacagaatttttataaagatataggtctatatgaatttattgataggcttttaaagaatagagcagtcatgtttatgggaaaattggataagtacgtccttctggatggaaagaaaggacaaaatgattgggtaacaattggatccgtaaacgaacgtccacctcttgttctgaaaaattacatctcttacgatgaaataaaattatcagccttgctatcagtaagttcttattcatactttgtaaaccaaggcgacagaaaaaatatggcaaaattttccaccgatcgtacatctatcgctgatgaaggaattatagtaggagtaataggaccaagaatgaagaaaaataatgtaatggaataccaagaaattgtggctaccagaacacaaaacacaaaagataatggttatggcactaacgttcaaaatagtgtccataaactcttttcagatttctacgaagaagattgcttagattttgaagaaacactaaaatatatcaaagatctaaaagataaaggaaaaagatatgtgacattaaaaccagatggtatattcgataatcagtattactataaaagactggcagtttcgatagatacgttattgttagaagcaaactttagagccaaggaagcaggaaagactggattcgtgcatgttgtcggtttgggattgggagtttggaagatttcacctcaccaagaaaaagtgtatatggatgcatttgccagtagaatttcaatccttggaaaccaactaaatcacataagcgacatttgttttgcctggataaatcaagaaaaatgcggcaattataaagatggagaacagttttccattccaaaccatccattaggcggtattaccatactaattaataaaaggaatcctcatgaaaaactcgaacaagataaactgctggtggtatcatacgcttgggatggaaatgctttgcc

SEQ ID NO: 7726 - DNA, 1329 bp, Diabrotica virgifera
  SmartBlast Evalue=0; Info="Dynamin-like 120 kDa protein, mitochondrial n=1 Tax=Camponotus floridanus RepID=E2AJU3_9HYME"
ccaggaataatttactaacaccaaaacgacagacatggctgctgatactagagaaagtattaaacaaatgactcaagcttatatgaataatcctaatgctattattttatgtatacaggatggtgctgtagatgcagaacgaagtaacgttacagatcttgtggcatcgtgtgatcctagcggcaaaagaacgatatttgttttaaccaaagttgatatggccgaagaaaatttagctgatcctaacaggataagaaagatattatcgggtaaattatttcctatgaaggctctcggatattttgctgttgttacaggaagaggacgaaaagatgattctatacaaacaattaaagattatgaggaaaattttttcaggggttcaaaattatttaaagatggagtagtaaagtcaacacaagtgacgacgagaaatttaagtcttgccgttgctgattgtttctggaagatggtgaaggagacggttgaacagcaagcagacgcatttaaggcaaggcgatttaatttagaaacagagtggaaaaataatttcccaagacttcgtgaacaagacagggacgagctttttgaaagagctagaaccgaaattctagatgaaattgttaatttatctcaagttagtccgaagcattgggaagagactttgttacaaaatatttgggaaaaagtgtctcctcatgtttttgaaaatatttattttccagctgcccaaacaggatcagcagagacttttaatactgctgttgatattaaactcagacaatgggcagatacggcattaccgacacaatcggtacagtcaggttgggagactctccgaactgaatttgaaaggtttttgcaaaaagcagctgaagcacctgatcatgatgatatatttgatctacttaaacaagcagttgttaatgaggcaatggttagacatgtgtgggaaagtaaagcttccgaaatgcttagagtgattcaactcaatacattagaggataggacgataggtgataaaagggattgggatcaagcagttaagttccttgaatcaagtgttaaagaaaaacttcgggaaagcgaaataaatctaaaacaattattagggccatccgccaaagaaagatggctttattggaaatatcaatcggagctagaaagcaaaagcagaagtgttaagaatgaactcgataaaattttgtatgctaatgaaaaacatccaccaggattaagttacgatgaattaactacaataagaaacaatcttcaacgttctagtattgaagtcgataatgaatttataagggtaagtttggaatgctg

SEQ ID NO: 7727 - DNA, 1334 bp, Diabrotica virgifera
  SmartBlast Evalue=1E-151; Info=Transcription initiation factor IIB n=7 Tax=Neoptera RepID=E2C0J3_9HYME
tatcataagaaaaaaaatgtgataaccacatctcttgtctttataaccgacaaaataccataaatatttgtttaaaaataaaaacttaaagctctacttgcccttaataaaaaataacatcaaataaaaactacaatcaagtcattaattacagaattactcaataacctataaaacaattatttctttacgaatgcaagcaggagtcgttaaaaattttgaaattagcctgaattataaaaaagtttgtaaaagaattttgatcatgaatgatacataaaataagttttaggataaaattacgaatactgcagcctttttgacttgtttgatgctttttgaaaccttcaacttagataatatgttgtctttcctgaatgcttacatctgaggtaattgctcgataggagtagcaaacttgaaatcttgtgggaagagattgactgcatgtggatacattagtttgtatgattgcctaattgttacatcagccacaccagctatgtcgcctatttctttttgacttctcttatcctcagaagcctgtgaagccatataaatcgctgcagcagctacagagattggtgatcttccaggtacaatatccatctccactgcccttctagcaatgtgtgtagcagccctttgcaccatatttggtaaacataaattagaacagaatcttgacataaaatctccagtggttataagatctactgatgtttctagagccttcagtataagtttaaagcaccgccctatttctcttttacttatcttacttactgcacagatttctttgaatgttcgaggcactccctcctgacgacaggcaatatataggcaagcagatgctattgcatcatttgaacgacctttaaggtttctaccatcatgtacttgtttaaagagattattggctctgtccacaatagttctaggtaaattgatacgatcagccatagcgtttatttctttgaaagcattaatcaatgccctatcagaactgttcattgtcctacgattttgatacctagatacaccaaaagtatcgaaacttgcatcacctctacctggtcctataatggtggtcaagtcagatccacccaaaagcggattttcggggccaccaacacgagaaggatctgttccatttttatcattactgaatgttctccattccgaacccacatctattaccctgtcaccaacaactaggccacattctgaacaaatttggtctcccgccctgtagtcttcaattaatggggcatctggatgggaactacagcaaactttatttgcatcgtatcttgatgtgcttgccatcatca

SEQ ID NO: 7728 - DNA, 1332 bp, Diabrotica virgifera
tttattttatgtaagcttatatttcaatatgagaccaataatttttggaccattggattgttatattttatatactcactgaagagggtagcgcattaaactgctatcggtgcatggcccagcttggaactggatctagctgcgaaagtgggaaggatatggatcctgaatttaatcgtacttgctattcccctccagacagcaacgtgacacttgcttgtttagctggtgtaataaatgataccttcaacagagattgcgaatccgccactagatgcgatgagctaatatcagaaccaggatatggtgtaaaatggtgtacaacttgttttaccgacttatgtaacactcagacttcttcggtctctactattgcaccaactttattatctccaatcattatttttacagcagtactaagttacttttaattataatttttaaaacacatttttaaaagttgttcaattaaaaataaaaacatttttgaagttatacttctttaggcgcgattgaaactgaattttgattatcccacgcgcctgcgcacaccggcaacatggagttagttgctaaatctttcaatttatgtatgtgtcagcacaaatttaataaggtgcgaaaagaatatgtattagtgtttttagtaaatgcatttattataatttttgtgtctttggatttgtcttgctcgggagtaagataataagtattattaaattatttttttttatgcatcacttgaagggtgaaggaaaaaaacaggaaatgctacactttataagaaattgagatcgtgacactatctaacagatattttatgtatttactatttacaatagactggtaaattaaagtcaaaaaaatcaggcggccattgcattagactaccaaaaaaatattgcattgccttttgttataatttttattgccctttttgttgccataattttgttttcagtctttctatcagctggttcaactaatgtttgtaacgtaaagtaatattgtacctaatgtaaaatacaacgtgacgtttggacacaggagcgtcatttgaaattttgtttgggggggggggggcaagcactatatatattatacattatatatgatgttatgataaatattgatgtattttttgtcatttcagtcatttatgataaatttcagtcattttttaggaccagggggggcaaatgcccccctggacgcccaaatgacgcccattttcattttttatttgtagttaggtacttttttaatttttttatctctgttctttaaaaaatttggttaaattgtgtttatgtattaaatacaatgtacttt

SEQ ID NO: 7729 - DNA, 1332 bp, Diabrotica virgifera
  SmartBlast Evalue=3E-40; Info="Solute carrier family 2, facilitated glucose transporter member 8 n=1 Tax=Zea mays RepID= B6U615_MAIZE"
ctgttactgcagacactgcagaccattgctatgaagtaaaataccgaatggcaaaaggtggcagtttagcagcaacatgacgaaaggcaccatgaagacttgtgaaaaaccaaagaacaatgagactgagtccgaagtgggatgtgtttggccgcagattgtagcaattttggcagcctgcttgggtgccttcaacgacggagtactgtatgcctggacatcacctttcctagtaaaattagtaaacgacaaagaacactacgacatttctgaaagtgaggcaaacaatatgacaattgtacagcccttggccatggtacttactggttacttcttttccaaattgactaatctaataggaagaaaaaagactatgctgctggtaggcgtacctcaagtattatcgttgttaatttgcgcattcgccagaagtatatatgtgttctatgtcggaagagtctttgctggtatagggagtgcgataatttggtcagccctgccggcttatgttggagaagtggcttcaccagatgttagaggagtatggggcaattccctcacttccgtaatttatgctggacagttctttatcaacgttgctggaagttactgtgatatattaacagcttcttgtatatttagttctgtttcagttttattttctgtagttttttactttatgccagagtcacctttctttttcattatgaaaggagatgatgagtctgctaagaagtctttgaggtttttgaccaggaaaaccaacgttgataaggatttttcgatgcttaaaaatgatgttgatagacagatgtcagagactggtaattggaaagatctgatttgtattaaaagcaacagaaaggctctaacaattgctctatttttaagaataacccagacatttagtggaaatgcaatactgactcaatacaatcaatacattatacaaaaagctggaggaaatgtaagcccggaaactgcatccattattttagtggtctttgtatagtttttaacattttcgtaatcagtttcatagttgacaggtttagtaggaaagtcttgtattcatcctcattagtcctttgcagcatggccatattggcattggctgcttatctatacttcgatgaatttgtccctaacgcggatctggactctgtggcttggttgccattaacttgtctcattacattccagataggatggtcctatggcttggcagtcattccaactctaatgatgggagaactgttctcagttagtataaagtcaaaggctatgcttattatgatggttgccttgggaggaggaatatcttttgtaaat

SEQ ID NO: 7730 - DNA, 1333 bp, Diabrotica virgifera
  SmartBlast Evalue=6E-26; Info="Zinc finger protein, putative n= 1 Tax=Ixodes scapularis RepID=B7P6R9_IXOSC"
gggatcaatattacaattcttcaagatatccatttcctcttgaagaaaattgataacaacgtgcggaggcttagtcattatcaaatgttcaacggttttaatattaagagttttgttacaatctggatatttaaacggattttcgaaattaagtctcatttgaaaataatttctttacaaggaatatttgaaggttgatttgaaacgctaattgtaacattcggagaagtacaattattaattattgattgattgggtaccgtcaatggcaaactcaataacgaaggtattttggaatgttcgatattctcattgctggtagattgctcgcggacattagtagattgatttccagaatctgaagatgtagctggaatattttgatgacgttcttcaggtggtatacttttgttgtgttctaaaatgtcttcataactcattatgtagggtgaagttgtggggaaacttctgatattttgattgcattcgtgttctaaatgaccttgtcctgcgcaaccagaacaccagtgctcatttcggggtcttcttggtagacgtgatatcaccatgggtacttcattggttgttaaataatatcttctccacaaatcaggacaaactttttcagggtgtcccttcattttacatagtttgcacattatttctcggtgtttaaaacatcctctgcaatagactgatgtgctgcactgtttatttccacactgaaggcacatttgatttggacatcgggtttcttgatgatcgggttctccacataatatacaaggtggaggacctggtttatctggacatttatcacctgtgtgaccgaaatgcctgcatcggtaacacctttttcctcctaccttcttttggttataataagcaaatttatcctttgccaaaatcatccacttctgaggatcatctgactgtttactttgaatagaagccacagaataattttcataatcttgtaaaggcaaccgagcttctcgaagaattctatcataagcactatcttcatcaatattcgaacttccttcattgctgttttctttactaatatttaacgataaatcatgttcactatcatcaagaacctgaaaatcatagtcactatcagaagaaactgtttccacaatactatctccagaatcatcagaatcaatacatataatgctctcatccctacccagagatagtttttcaggtaaaatttgctcactgtcactagattcttcaagctcgttagttaatataattaaatcacattgattagggacgttagaagtgcttggtgtatgacttagttcaattggttgtgtgttgg

SEQ ID NO: 7731 - DNA, 1333 bp, Diabrotica virgifera
cacaggtacatatcgggaggcagcttcagcttgacgtattgttgatcgaataaaaatttcatcactagtatactttattaatgcatttttatcttctgtaaacgaagaacagctgtaaaatgtttttaaaattgtaccaagtttctccttatcttcttcggctacattaaggaattgtgatacgaggtttgctgaacactcatcgagaaatttggccctttcttcaacgagtgtattattagttatttctaagaacatcagagattcttcagaattgaaaccgattaaaataggaactaaattgaaatgaccttccaatacagcattatgcatggtttcggtaataaaagcatcatcattgtcatcctcgataacaggtttaaacgtcaaggcatccataaatcctactcctcttccagaagtaaacttattatttagagccattaattctgagtacgaagcttgttgtaataattctaacaaatcacttgatttggttgatgtgaatgatttatttaacgattttccaaattcaaatgccagttctctgtcgtttgttggatgcagaacactggataatggtgacccactttgttgaataatgccagtaattaagcctctagctgctttactaagcaaatgaaatccagcagacatacttccagcactttctccacccactgttattttcttaggatctcccccaaatcgagtaatatgatcatatgtccatttaagagccaaaagttggtctttgagtcccaaattgccgggtatattttcatcaagcgttgttaaaaatccaaatagtcctagtcgatagtttattgttactattattatatcgtaatctatcaaaaactttgggttgaaagagtgtattgaaccattaccattaacgaatgctccaccatgaatccaaaagaatactggcaatgatataactggactcgctcttactggcgtatatacattcaaaaccaagcagtcctcaactgaatttgggtcgtttacttgtacgcaggtttttttattttctgtgacattcagtactccttcccacgcaccatgcggtttggggggcctaaatctgttaggtcctataggaggttctgcatagggaatatcctgaaaagcgtagaaattttttccttcggcactttgcagaatatgtccacggatgttgcctaaattttccaattctactattaactcatcttgttcagctggttctccagcttcagaagatgaaaagacccccttgtttctgtttccagcatacagcaacaaacagacaataattatcaatctcaaattcaaattcatgactttg

SEQ ID NO: 7732 - DNA, 1332 bp, Diabrotica virgifera
  SmartBlast Evalue=6E-23; Info=F-spondin n=1 Tax=Culex quinquefasciatus RepID=B0WNK9_CULQU
aaccacgagtgtcacatttactccatatagaccagttcgcgttttgcagtttacaacacgaccgtctggaccttgctcaacgatcagactttctcctagtttcatattatcattacaaggaatgtgacattttacaatttcagaagtagaacaactatcttcttcatcttcgcctttctcgtcattgtctttgtcgttttcagatggtaatcgaagtcttcgcttcactccctttccacaagatacactacagctagaccatggtccccaattcgtatttgtgcatttagactcactctcttcactgcattttccgttttcacctcgacatcttcggttatcttgaagttctatatcacaatcgtcttcgttctgagcatggagaaattttctgtctctggtttttgtaccgtaaccacaagaaacactgcaactagaccactcagaccaacccgtgactgaacagtcaacgtcgtcttcttcagaacctttagacttgtcttcctcttcatcagatttggacttttcttccgacttctcttcgttggaatcttctttatcattagatttatcttcttcgtctttcgaatcttttcatcactgtcaccttcttcctctcccgatttttttcttcgtctgaatctttctgcttcttagatttgttctccttttcttcgtcttcctcatctttactatctttttcatcatttgaattatcatcaccttccgatttattttcatcatcttccttactatctttttcttctttggactccccttcttcatcagaatcctttgcttcttcatcggaacctttttcttcttcttcagaacctttatcttctttagtttcctcctcatcctttgatttagactcttccttggatttaccttcttcttcttccgtagctttgctattttcttcttcttcgtctgattttatacgatttttgagacgatttcgtctattacttttccttgaactgattttacagtattttgctgtaccttggcatgtctggtgttgaactagttgaacataacaattctgcgatttcctaatatctacgtaacttctcattctggttttctttccgagaccacagggtactgaacagggtgtccaatctccccacttagtagtagcgcaggcatcctctcccgaagattcttcttgttcgttagaatcgcaaggtttttcgtaaacgcgctgtctagtaaaatgcagtttggctattggattcatgggtgtaccatcttcatcgtaaaatggtgatcttggatcattgggattgttaggagttattggcatgataagttttcgtgagaatc

SEQ ID NO: 7733 - DNA, 1331 bp, Diabrotica virgifera
  SmartBlast Evalue=1E-100; Info=Serologically defined colon cancer antigen 1 n=1 Tax=Culex quinquefasciatus RepID=B0X1V4_ CULQU
ctcgaaagacttactggtttgaaaaattcttctggttcatcagttctgaaaattacctcgttatcggtggaagggatcaacaacaaaatgaacttatagtaaaaagatatatgaagccaacagacgcttatgttcacgctgacattcatggtgccagtagcgttatcataaagaatccaactggcaacccgatacctccaaaaactttaaatgaagcgggaataatggctatatgttacagtgttgcctgggaagcaaaagtagttacaaatgcatactgggtgtggggcgatcaagtaagcaagacagcaccaactggtgaatacctaaccactggtagtttcatgataagaggaaaaaagaactttttaccgcctgctcatcttattcttggattgagttttctgtttcgcttagaagatggaagtatcgaaagacacaaaggagagaggaaagtgctgactgcaaatgaagaggatgcactcagtgtagcagatagtgagatgagcaaagatgaagtcgaggtggaaatattagatgaaagtgatgaagatgaattacttagagattcaaagcaggaagagattcaaatatcggaagaatcaaaagaaatagatgttgaaaaatccgacaaggtatcacccgattcagatgatgaagaaagctccatatttcccgatactcagatcaaaattcaacattcttcgggaaacaagaatctggtcacacagacatccagaaatatggaggaagagcgaaacgaagagaatattgtgtacttgggtgataaccaaccagttgtgataaaacaaaaccaaacaagaaataggggtaatagcgaatcaaaaaataaaaaaccgcaaaaggaggaaaaagttgatacgaaagcagatagtaaacaacaagttaagagaggtcaaaagggaaagttaaagaaaatcaaggaaaaatataaagatcaagacgacgaagaacgaaagctgagaatggaaattttgcagtcttcaggtatgggtaaagagattaaagaaacaaagaaaacgaagaaaaataaagaagctatagaaaagattaagaaacaagctcaaagaggacccaaaaacttcacacccaaggaacccaacgaagatatagacgacgacgaaacggtagttcaagctgacacagatatgatcgatgctctaaccggagtacctgttgcggaggatgaattattatttgcagttcctgtcatagcaccttataatactctatcaaattataagttcaaagtcaaattaacaccaggtacggcgaaacgaggaaaagctgctcgtacagctgtagccatg

SEQ ID NO: 7734 - DNA, 1331 bp, Diabrotica virgifera
  SmartBlast Evalue=1E-38; Info=Interleukin-16 n=1 Tax=Camponotus floridanus RepID=E2ARU6_9HYME
tgtagtgcttcaaaaaccaccaattcctgctactactgttgatagtattcgtgcaccaaaagaaatatctcaagaatttgtaaaaacgagtgaaacgagttcacagaaaacaacgaacgagcccgtgagactacagagagaacaattggataaacgaaataacggcacgacaactaaagtagcatcaacaaacatattcctagctctgaattcttcaagccttaaccacgtacaaacgaaattaccagaagaaacgagaaacggcaaatccaaagactaccttagtactaactcgaattcaaggaaaccaggacctattaatgtaaaagcactaaagaaaaactttgaaaatatgaattcttctccccctgtatcaccacaaaaagttcctttttttaaatctgcagagtctagaagcaatagcaaagtgaatgacattatagaaggcaagacaacgttgcctattagaaacggtataggtaaaagtgttgaaaaattagacgtctccttgccaccaaagtctcaagaaaagaaatcttcagaagtcgaaacaaagactattacgctcaaaactgatccatttggaactagtctgggtattactttggccggtggagttgacgaaaataaagatataacggtacaccgtataaagtattctagtatagcatatattgatgggcagcttaagaaaggagacaagattctttccattaatggaaagtccactagtgatttaacgtatctgcaagctgttgaactgcttaaggaacctgttactgaatttaatattgtgattgaggaaggagaaaatctagtgccatcccctgttagtagtagtagtagtttgttacaaagaagatcatcttcaatgtcttctgtgctctcaaggactaaatctccttcattagaagtattagaagaaaaagaggcaaacaatgtaataagtttaataaaggatggagccggtttaggatttagtattgaaggtggaagagattcgccacaaggaaatgtgccattattggttaagaagatatttacaggaggagcagctgaaaaagcaggtaaactaaacgtgggtgatgaaattatacaaatcaatgatatcaagttcacattactaacaagaatcgaagcttggaacattatgaagaagattccagacggcaaagttgatatacatattttcagataaatttcatattttcagataatcatttattataaactgttagtgttttgatagtgttctacggaaatgcataattaaattaactttctccttttaacaggatcaattatatacgggggtcggcacaagtcaggca

SEQ ID NO: 7735 - DNA, 1332 bp, Diabrotica virgifera
  SmartBlast Evalue=1E-128; Info=Chitinase n=1 Tax=Monochamus alternatus RepID=A4PID4_MONAT
tttattaatgttattttttattattgttattttgttttttatggttttactaaatggctagtttacataagtatcatgacattttgctggaataacttacttcataaaatcaaatttataaattcaaaactgatcatgaattttgtttatagcctttaataaaatatatttttctccacaagttcctctaaaatcgtcgtaatccaatgaccacaccatcattcctcctaattcattatcccgagcgtagttgactttttctgttatagatctttcgtcttcaaatccaacccattgatcgtcccaatatctgtgaggtactttctgctgatcatcccagacatacgtagaatttaaataaaattcgcatatttcattatatcctaaatatccagattgtgcagaatatggccctgtattaccaccaccggtaacatttgcataaagagaagtattggttttatcagctaaggtataggttcttccataggtgacaatgccgaggtttatttttgcgggatctgcaccactcaatatccagtgttggattcctgtgtctacattgtatgtactattagcttcatattcgtaatcaacttgagctgggaacaatggtgaaacgtgtcctacaaaattctcaaatgctccatgaaaatcaaaaaccataacgttaatcatatccaccaactcatttataactgagacgtcaaatccaacgtcgattttttcaacggcgcctgcagtggctacactgagtaagtatcctttgggctcaaggacgtcactaagagctttcaaaagttcgacataattctctttatcaatagtttcgtttcctcctcgtaatcctggatattcccaatccaaatcaaaaccatcgaagccccaattttcgataaaagctaaaacctcatctgcaagttttactctttttgctggatctgatgctactgctgaatactgcttggaaccttcgttccaaccgcccatacttacacataccttaaggtcaggattggtctttttaagctctacgagatgtttaaaaccctcatgaccaccagcatcacttgactcccaggaatccaaaatgtgaatagaaccatcttcattaagaccaaggaaagcaaaattaatgtgtgtacacagcgatggatctatattactgacatcgaaagcaccttttcctgctctataaatggtccaactggcgaaataacaaacgacccgtttttccgcacctgatgtttggcaaacaagaaatgcagatagtaccgagagtaacactagcaccttcatgttgagcacttactggtattaagactacataac

SEQ ID NO: 7736 - DNA, 1332 bp, Diabrotica virgifera
  SmartBlast Evalue=1E-139; Info=Minor histocompatibility antigen H13 n=2 Tax=Formicidae RepID=E2AW41_9HYME
tttctaaacattttaatagaaaacataaaataatttaaaaacaacgtaaattgcactagatcaaagatgttttaaacaaatttttaatgtgcagagaaacaattataaaaaatatggaagaatgtgtctggtaacacattgattgtaacatcaatttgtagaactattttacttttttcacttcttgtttattttctgttccttttttcttttctcctgcttttttctcttctggggcgtcctcatatttaaacatagcagtcaaatctcctttaattaaagctaatccaagaggggttcctatacatgctggaactaagtacagtaaagctggttgtgcatgtttgaatacatgcataactaacatcgtcgctgtcagtccaagaaaatatgcgataacggaggcattgaaatacgttctagtttggcgtttcaaactgttatcaaatctcaataataaagctatgaatataccaggaatgataatatctcctaaacctaacatggcaaaattgttagccgcaaatccgttttggagtagatcttgtggaaagacaagtttaattggagcctcaaagctcttggcgacagtaaccataacgtctgtaccaaatacccaaaatatatcatagacaaacagtcctccgagtagaatacaaccagtagcaacattattgagatgcagcagttcaacgccatgaattgcaaacgccagtccaaacaaattattagccacccaatgcttctggaccaagtaccaggctcctactaatgaacatgctatcaatgctacaatgtcgtatgtggaaaacctatagtctattaagtactccgtattgtcaccctctccttgtgtaaacattatatgaaatggaatgtttggtattgctgctggcactaatttacttacaacagggcttaataaatgagttagagctaagacacccaagaaaaagaaatatcctgttaacaaaagatttatatattcttttgaaaataatttaaatactatgtagagtccaaaaagggaacatgaagctacaattggaaatactgctgcatctcttttggtcattttttctactttattatccttatggtaggacacagatctaaaagaaccaaagaatattggaagtaaggccattacaactaaactaatatatgcaacggccgttccttctggtgtactaggagtcttttgagtagcatttttggcattttctgttaaattttcggacgcttgagcaacaataacgttaaagagattggccatgttttcaaatgaaggaccagacacgacaaatgtttagaaattaaaaggttaaacgt

SEQ ID NO: 7737 - DNA, 1330 bp, Diabrotica virgifera
  SmartBlast Evalue=7E-74; Info="Tripeptidyl-peptidase, putative n=1 Tax=Pediculus humanus corporis RepID=E0VUT8_PEDHC"
ctccattcagaaaaatattcttgtaaaaagtcaaccactaaaactcaaattaggtgtctgtttttatttttcatgatttatgcttgctaataggttcgctcaaaggaattgtcaagaaacgtaaaatgaagacgaagaagaagaaaacgaagaatttcttgtggtatttttaaagtttaaaatggtttgtatgcagaagggaactttgacggtaaagttcttttcaaatatttaacaacgtgtgaccacttcagttcttcgcaaaactcaataattttcttttccacttcttcggttggtttgtcttcttgcattttcaataaatgtttcaataatctaccgtattgattgtataaaaatgcatgccagattgcaaaatattggacgtggcttgttaatacctttgcatcagtaggatcaacaaatttaactaaagttttccatacttcagctagttcttccctgttggcttcagctgtttcagtctcgcacaaaatgagtcgacacaaagctatccctttccgtgctatacattctagataaatatttttctgttgttccatggtatttttaatttttgccgcatctggcctcaaatcagtcttcatagccataaaagctaaaatattattggcatccatgccggataaagccgtattacacacagttattactttatcaagatctttaacagaactagtcgtcttctggctcaaactaggcattactcttttgtctaagggatctataacttgtaagtatacggaatttatgagaacgtggtccggatatctccgcaagagatctgtatatattggctcagcggaagcggcatccaatttagacagccactgagttttggtgtctctcattacttccttaaattcttcaagcttagttttatcagaaccattcccattgcttgagcttgattttttggaattgttttcagtcaaaatgtacttaaagggataaacatcagctttctttcccaattcgtctttagcatacgttattgttccagtcaaatagtgagccgcattatttgattttgaggaatacttatcaggtgataaaggagctatatacagaggaataggaatatatggattagagttatttgtaacaccggccttctttccgcaaagtaaagcttgtgtatacgataagtaaacgtccattccaatttggctgcttaatttttgcacaagcagcacgggagcgtcatttaatttctctaaataatctcttttatcatgtctaacttgcagtcttatagtatagtcacctttttctagcttaacagagtatttgtcagggtaggcatcac

SEQ ID NO: 7738 - DNA, 1330 bp, Diabrotica virgifera
  SmartBlast Evalue=0; Info=26S proteasome regulatory complex subunit p42D n=9 Tax=Neoptera RepID=Q9U7A2_DROME
ttacaaaatacctctttattcacacagacattttgttaaatggttttatagtagcaaaagaaaaacttaaaactatgttaaagatacaactgggtttatacaggtttataatctaatttactttcaagtttcttgttatcagccacttttctcacggctttcataaagtcttcttggattacatactctcgttcagctcttatagcaaaaagtccagcttctgtgcatacatttcttaaatcagctccattaaatgtgtcagataattttacgatagcttcataatcaatttctccatgtttagcgatcgggagggcatggatcttcaaaatttcaagacgggcctgctcgtttggaagaggtatctcgatttttctgtccaaacgacctggacggagcagagcaggatctagagtatcgggtctgttggttgccataatcatttttacctgccctaatgaatcaaaaccatccatctggttaagcagttccataagagtcctttggatttctctatcagctgaagtaccttcagaaaatcttctaccaccaatagcatcaatttcatccatgaaaataatacaaggttgatggtctttagcataattaaacatttctctgatcagtcttgcagattctccaatatatttatcaacaatagcactggaaacgactttgaggaaatttgcatccaactgagacgccacagctctagctagtagagttttgccagtacctggaggaccatacaacaaacaacctttaggtggagtgattccaactctcataaacaattctggattcaacaaaggcagttcaataacctctcgaagttctctaatctgttcagataaaccaccaatagcagaataagtaacatctccgggatcttcgtgactcatattatacaccaatgggtccacttctcttggcaaatatctcataatagttaatgtagtcatatccaatgctactctagttcctgcttttaactttgccttgtctagttgacgacgacatcctaccacataacggggaccattggtagctttaactataaatttttcttcagtgagttgtttgagtacttctccaactatttggcccatgctctgtaaagccttaagatcattttctgatttatcatattgttttgtaagatcttttagctgctctcgcatctcttttaatctagattcaacttctttgtgttctaataattttttcctgtactcttgaaggcttttttcacgttcggggtccatttgggtcatttttagttatatttatgtggacgtaaagaaatgaaaataatttgaagaaattgaat

SEQ ID NO: 7739 - DNA, 1332 bp, Diabrotica virgifera
gttaaaagcgaagatctgaaacaaaatttaatgttgaatagtatttaaaatttagttcgtactgtgataaactaaggataggctaatcaatagtggtatatgacaaattgacatctcatatactgaaggagttgcctaactccgtgaatgaagtatgatctcttatgagtttcattcctttaagccttgtagaacttataatttttgaaatagcgaactctcaaaataatcttttattatttgactgcataccgagacgtagttaaaatccctgggatttacccagcctggattaaattttgaaacctattataaagtatagtaatccatattaacagtatgacactacagtcataaattacatctatttgtggcaaataagtctaagttgtgtttattttgtcttatctaaaacagagtgacgatcttgtcatcgattataaatacgtatttacagtaaatatttgattagctaaagtaaatgtattatgttttattgcaatttatttaaataattattttttattcgtgtttaatattatactgaacttgtgtaaaaaaagcattctattggaatcactaaagatttttagtttaattaaataatatgattgataaaattaataaaaattttctctgaaaaatagtttgaacggcttttattttttatttatttatatataaatttgtgcagttgtggaagctgcaaatatttctcgcaatttttttgttatctcttcatttttgagttccagttcttcaaatttttttttgaagagctttttgaagatttcctcttttgcaactgaatcttcacatacgttaatataagttaacaacgaactaattttttcttcgtattctgtccctgtaattctgttagtttctcatttccaatagcactttaaccgtcaaattccttcaaagagccctttacataaaaaataaaactgaattgtatatcgagtgtttaattattagttaatttagtttctatttatgatgaatatacatacatagttttttttttctatttaagtatggtaataatgaaatttgatcgtcactctgttttatttttgttttggtgttggtgattacgaatttttttcttgctttttggagcttctacttggtccaaaggtgtgaaagtcgaatgggatttatgttttttttttgtaggtaatacattagtgatttgtacattttgctcatttgtttagaatattttcattaaaaaattatatataccatgtttctgtttatgtcaagcaaattttcgaatactaaggatatattttacgtacacgaaataaaaagttgacgaatttt

SEQ ID NO: 7740 - DNA, 1322 bp, Diabrotica virgifera
ctcgagtttataaattttactaaaaaaattaattatttagtcgatagtgcctaattattgctcaaagctaataagaaattaatagttcctctacattccaaaatcaaagcaaaaatacagaggacgaactttaataaaattctaatattataggtaccgacaataatgttatcgcttgggaaaaacatgtgatattttgtgattcaacaattattattctctgtgattcgtatttataaaaaaaattaagagacagtaatatcaaacacaaaattggtaagatggaagacagtcttaatatagttgttccactttatctttgcctaaacgtcatgattcattttcaaacaagctaaatcaaaacattaattgaaacataaatcgatgtgtatcatggatacatactctcaatttaataattaggaaatggctattatcagtggacgtattttattaagttatattgtacatttttattttactatgttatagtatatttaatacaagataactttataaaataaacacaatataagttacaaattccaataaacacaacaaatgcgctaatgtcactgtcattgaaaattataaacgtcaaaattcataaacaaggtatcaagacatgcctttggcatgtcggacatggtatttttatccttgtttaacttgttgtggtttctatgacaagctgcttaattttgcgatactagtttctgtgagtaaaaaaaaagagatctagtataaaaagtaatagtaaaattataaaagaaaggaaatatatgtagtaacgtccatttgaagacaaactaacccacaaacttatactcttgccttggtatcgaaactattatggaacatatttgggtctacgagatgtcaaaacaagaaattatgctaaacttatgtcatcatcttgattcttcttcaaatgccatctcctcgaaggaggtcagcaatcatcatagctattcggaatttagaagacggctgatctgaaatatacctttgatctacatccataccattctctcaggttgcgcagccacgatatttaatgtcttcctatgcttctttttccttgaatatatccctgcataatcaattggagtgagttgtatctatcttgagtacatccctattcgcacaaatctatagatgaatggacaaaagctatttttcttttgatgaaaaacttatttaccgactcaaaactttttcaaatttagttactactattaaaatgttctcaaaacttattacactaagtcaccaatgttaaatgtcaactgatacaaaaaaatactgtagaaaaaatcata

SEQ ID NO: 7741 - DNA, 1329 bp, Diabrotica virgifera
  SmartBlast Evalue=2E-58; Info="Deoxyribonuclease I, putative n= 1 Tax=Aedes aegypti RepID=Q16XJ1_AEDAE"
tttgggtgtatgatgtagaatctaaaaatgtttgacttgtttttgcgtttaccaagttatccagataaaattcatcggaaatgcggtgattatcagcgaacaccttaaccgctgaacacaaatgtctattttttaataatatagtggtaaccatgggaagatataggtgtgttttttcttggttaattttaggtgcttgttcccagtttgggtacagtgcttccagagcaggatgtacctttaacgtctacaacaatgcgaatgaaaaatacatgcctgtaatgctaactaaccactcatcaaaatatgaattaattgttcctgaacagggtcaaattcatttgagatccggcgaaggtataacatttgtgtgcccggaaaagaattatttagttctcactaactctaattttacttatgctacctgtattcaaggaacaaatttaaagctttttcgaaatacatacaattttgacagttttcctatgtagtaaatctataaggggccaagttcaaaaaaccaaagaaaaatgtggaaaccgaaatggagaaataataaacatcgggtataaagtaacaaaacgatacttcaaacccttaatttccgtttgctatgacgagaaaaatggaaaagccttatacagccagcatgttatccatggagaagaggtcgcatatacttcgaggttcaaagagcgtccaaacttttctacagatggtctagccaaagacgtatcagcaaatctagcatacaaacgagcttaccaaaaatccacgtttagcagtctattaggtagctctagagaggcagaacaatatataaacactaaatcatatttatcacgtggccatctttctcccgatgcagattttctttttgcaagttctcaattgacaagttatttttatatcaacacctgtccacagtggcaaagcatcaatggaggtaactgggtcagagtagagtcagctgtaagaagggtagctgacaaataccacactacctttttaataataactggcactcatgatgtactggaccttcccgatgtacatgacaatccaatagaaatgtatctagtttcaaaacgtaaactaccagtgcccaagtttgtctggaaaatcatgctcgacgaaaattctggaaaagcaatagcctttgttagtttaaacaatccgtttgtccaagaaatcacagaggatgaacagttgtgttcagatatttgtgagcaatatggttggggatcaaaatattatagtgatttctctaaaggttatatttattgctgtgatgttaatgaattaagagaaactgttgacacaattcct

SEQ ID NO: 7742 - DNA, 1329 bp, Diabrotica virgifera
  SmartBlast Evalue=6E-68; Info=Merlin n=1 Tax=Harpegnathos saltator RepID=E2BV71_9HYME
cagaaataggagagactgtattggatccgttgtaggtcgtcgtacgatttaggaagtctaaaagtttttctttagcttgtttttccgctgctctggccttcagcagctcgtctttgagtctattcgcttcggctgccctcttctcagattcttcaacgagtcgagccgttagcatttccgcttcccttgtctttcttccaaagaaaccttttcttcatctttcctcatcgctgtcagtcttaatcttatgatttcttgttcagcttcagcggccttttggctcaagagtctcgcttcttcctcagctactcgacttttctctgctagaagatccgcactttcttcggattttcgcagagcctcgttagctaaccgtatctcttcttgatactgaagcaacctctgctccatgctcgccctttcacgttcggcttcttcccgtaactgttttttctcttgctagtctatttctttgcacctgccgtctttgtttttcctctttagccgccgctttcatctgttgcagttccatagagtctggttttcgtcgtcgcataaacagatcgtgattgcccatacataagtctaatatcaatttgttcatcctaaccttttgactaaagaatacgaaatttggggcgtttttatccactggtttaataataaacttcttgtcgtcaaagctgatgtgcctaatctctgaccatgtgaatgttgttttcggttgaagtttattctctttttcgtatatattcaaacccagcgccgtgacgccaagccatagttcagtctctttcttattcttagcttgcactgcataactagctaataatactgaagcttccggcggacagtacacatccattgacaatatggcctgtttaacttgtaagaaaaacaaatgttgagtcacttcctgcaccaattcctctgccacttcctcggggtaaaattttgctaggaacataaaagaagcagtctgatgattcttttgtatgctttgatcttgaacttttttgtccaattttaaccatgatataaaccctttagaatcctcatactgtaaaccaaaataccaagtttctcttaaacctatcgtcctgcaaactaattcgaaaaggtcccttccagtcgccctccattctaaattgaactccaattcagcatccaaagtgcatactttaacaggaaagctcttcccggatttttttcttcgaaatggaggcatactgctctacattatccagttaaaatgattaaaatatttttacattttaaattaaaaagtatggtttatcaacaataataaaatatttcttatatcacttc

SEQ ID NO: 7743 - DNA, 1327 bp, Diabrotica virgifera
  SmartBlast Evalue=2E-90; Info=D-arabinose 1-dehydrogenase n=1 Tax=Culex quinquefasciatus RepID=B0WG15_CULQU
accgtgtgtaaaacgatactcaacattattattattatattttattactctcagattcaacaatttttataagaatttgatttattgatcgtagtggatactgtctactgtaaaatatggctcttcctgaaacctttgtaccgggttttcatgatgaagcagcggtgaggaaaatgcaatatactaaacttggaaacactgatatgcacgtttcgaaactgtcattgggtaccggcggattttcttatttttatggtgattacgatattgaagaatgtaagaaaactgtccatgaagctataaaaagaggtattaattacatcgatacaggtccgtggtacggacatggaacatcagaaacgatattaggaaaatgtttggaaggaattccgaggaaagcttactacctagcaacaaaaattggacgttatgagcaggatccaaagttaatgttcaatttttctgcccaaaaaactcgagaaagtataaatacatctttgaaaaggctgaaagtagactatgttgatgttttacaggtacatgatgtagaattctctcctagtatggacaccattctaaacgagaccttaccaacattagaagaacttaagaaggaaggaaaaactagatatatcggtataacaggttatcctgtctctaccttagtagaagtaatagaaaaaagcaaaatcagtattaacatgatattgagttactgtagactgaccatgattgacgataccttaagatcatttattccaacgttacaatcaaaacatgttggaattgtaaacgctgcagcgaactctatgggactcttgagcaactttggtcctcaaaattggcatccagcatccgaacacataaaagacatctgcacagaggctcgaaatttatgcaaggaaaatgatgtggaattgggaaagctagcaatatactatagtctgcaggagaaaggtactgaaactgtaatggtaggaatgaacactccaaaacttgtagacatcaatctggaagtcatctacagtggtttaactccaaaagagcaagaaatttatcaacaggttttaaaaatctttgaaaagcttactgagagacattgggaaaatgtcgaacttcaaaattattggaaaataatgaaaggagaaggatctgccgggttctttacaacaaagtaactatatttgtaaatatattagccttcatatctgcaattgtttgcactacaataaatatactctgtactgtaaattgtaaatttaaaaatcaatttgttaattttttaaaacgtataaacagttaaataaacagcaaaagtagaaaactt

SEQ ID NO: 7744 - DNA, 1327 bp, Diabrotica virgifera
  SmartBlast Evalue=8E-28; Info=Neurotrypsin n=1 Tax=Harpegnathos saltator RepID=E2B4Q6_9HYME
gaagttctttagtaaacatgcgtgacaaagaccgtttcaggacttttttcctgtttttcggggttatatggacctcccaaatttgcacagggataatcatccccacgcaagaacaaccccgtccccagtattcatcaggaataaaaactacgtttagaaaaaataccaacccgtacatgcttcagaactacagcagagttgtagtacataatagaccagatattccaggagcccaatatgtccttactcacaccgaggacatacaacatgtctatcctgtatataatatccaaggaaacaaccagaggcaacagcgtcagaatattttacaaacacaatcccataccaaaattgatgccggacaatttaacacaccaaacagaacgattattaagaggaaaattgagtccaaagctttggaaatatataccaagtgcccacctggagtaactgggcagttcatctattcagcttcttgcaatcagttcttgaactgttggaaaggaagaggcaccgtccaaaactgtgcgccgggaacactgttcaatcccaaatcgttggaatgtgattttccagagaaggtggaatgtgtaacaggtcctagctcaaataccatagaaaacgtaagagtgcagaaatccgtgctgcaagcttcctgtcctgctggtttttccggtattataccggactatttcgactgttcaaaatttatcaattgtgataacggtcaagaaaataaaatgtcctgtgcacccggtactttgtttgacatggagaaaaatatgtgtgattatccgcaaagtacgacttgtttcaatggagataattcccttgaactaaatgtagctggtgctcaacaacagtatcaatggtcgcatggtttgactgatggtcgtaatctgtgtacatcccagaattgtcaatctggtaactatcatgaaagtcattctgtaggtcaagaaacagtaccttcatacacttattgtaacccaaagactcaaaactgtggacatagtacatcttacgacttgcgtggaagccagtcaggatctaaatctactacacattcgcaaaccactgatagagaagataattaccaatatggcactgacaattcaggatatggtcataacacgggcgaagcaaggtacgattcaaatagaggacaaaatagttatgggtgtagaccaagagaaaattgtgaaagaccaacgcaagagtaccaataccaaaataattatcggtgttcgggccaaaactgtgtaagaccgacgcaaaacgttgtatcatctggaaacactcaataccaaacctcaagctacggaca

SEQ ID NO: 7745 - DNA, 1327 bp, Diabrotica virgifera
  SmartBlast Evalue=1E-161; Info=Innexin 3 n=1 Tax=Bombyx mori RepID=B7U9X6_BOMMO
cttgtacttaactatttctggatacattggactcagttctaacgtgctgggagcagacggtaagttgctgttactaccgaaattcagtcttcttacgaattcgtccaaaatttcgccaaataccaattggtttgtgttttgtcccagtaagtgaatcaaaaggaaatcaccaacctgtgtttttctgacaatagtctcaacagcattgggtaccttgaatctgaatctcctcttcaaaatcgtttctcttgtactaggtagtaatacaacagctgccgaatacacaatagccaaaccggacagtatagctaaaataataaaccagaaccataggaaaatgtaaatcttctcgttgagaatgttcaaggctaacacgcagagggcgtcatgcttctgaattgatcctgaaggaccgaatttgtggaatgtacattttgttacccttggaaagatggctaccatgggatccgtgcgattttcttgattcatgttcgaaaaggaaactacgtcagtgccgtaggttaggaacgctccaccgaggaatttgtcagtcatgaatatgtttaccatcacattaacgaagtttagagcttcacaaataaagtatccgaatgcataggaagtgtgcatgtgcatcgtttcgataagatattgtacgagtctattctgtctatgttctctctctgccttttccccaactccgaccatcgatcctctcataccttcggtgatcatacgaatttttccttgttcccaatttttccacaaccaatgagggatgtaaaagaggacgccctggaagaataaaacgaatggaacccattggtagtagctgtggtatctcttatcctgattttcgttaccaagaccaggatgagcaacttctgtcccgacgcgttttccttgttcatgtggtaacgtaaaagtatgcgttatccagcaaaacgtatttattacatgacctggaacacccctgtcgttgatgcactgaatggggtcaccaattagattattcgcagtaacgatgatacagcataaaaacaatatggccgacgtgactctatagtgggctctaaacaccatattgtcgattagagctttatcaaccaagtagcggactttgacaaagcccgctacggctgataccattcccaatacggacatcttgtgttagtaagtagtagtgccttttattaaacaagtgcagttaatctgtttcaggtatatatcctatatttgacacatttattcacaaatatacaccggttttattcacacaaaaaacctgtttaaaggcttcactaataaaacattctgcactcctctg

SEQ ID NO: 7746 - DNA, 1326 bp, Diabrotica virgifera
  SmartBlast Evalue=1E-121; Info=26S proteasome non-ATPase regulatory subunit 4 n=1 Tax=Camponotus floridanus RepID=E2A9Z3_ 9HYME
gttagttgtgttgaaagtgctagtcattttaatatctatagaaaaaaaaaaagattttgttgaatttttgtatgaagcagctctgaaaacactaaaaatggtgttagaaagtactatgatttgtgtcgataatagcgactatatgagaaatggagatttcctacccagcagacttcaagctcaacaagatgcagtaaatttagtatgtcattctaaaacaagatcaaacccagagaataatgttggtttgttaacgttggcaaaggtagaagtcctagcaacactgaccagtgatgtgggccgtattttatctaaattacatcaagttcaaccaaatggggaaataaacttgcatactggtatcagaatagctcacctagctctaaagcatcgccagggaaagaatcacaaaatgcgtattgtagctttcgtcggaagtcctgtagctagtgaagaaaaggagttagttaaattagcaaagaagctgaagaaagaaaaggttaacgtagatcttgtcagttttggagaagactcaatcaattccgaggttttgacaacattcgtaaatactctaaatggtaaagatggcactagcagccatttagttacagttcccccaggccctcatctgtccgatgctttgatttcttctccaattatacaaggtgaggatggtacaggtgcaactggcttgggaggatctggctttgaatttggtgtcgatcctaatgaagatccagaattggctttggctcttcgtgtgtctatggaagaacaacgccagagacaagaagatgaagctagaagggctaaagatgtctctagcactgaaactggaccaaaaactgagggaaatacagttctaaaagaagaacctagtgaggaagctttattggaaagagccctggctatgtcaatggaacaaggggatgaacaaaatgtaacagtagctagagctcctgttgattttgctaacatgactgaagaagaacagattgcttttgctatgcaaatgtccatgcaagatgcccaggagagttctgctggtgcttcagcttccaagttggagcctatggaagttgagggagatgaagactattcggaagtcatgaatgacccagctttccttcagagtgtcctagagaacctacctggtgtagatccccaatcggaagctatccgtcaagcagtaggaagtctcaaagataagaaaaaggatgaaaagtctgaagacaaacaaaagaagtagtaggaccattcatagtagttttttcatttacatatttacgtacatttatatttaatttcaattaataaaatattggt

SEQ ID NO: 7747 - DNA, 1326 bp, Diabrotica virgifera
  SmartBlast Evalue=1E-46; Info=Makorin-1 n=1 Tax=Camponotus floridanus RepID=E2A422_9HYME
aatattaacaaatgaaagttcagtaatcaaaagagatatcatcatcgtcgtcatcaccatcatcatccgttccgtaatcattcatcagttggtccatggcaaggtagtattcaaaatcgcccttatcataatattggatggctatatacggatcattcaaatctaaatcaaacagaccattggtaagatcatcatcatcatcattcatccataacaatatttgttctaatacttctctctggtctatgtcttctctatcaccccccacacctcttcgtcttctagctttgggtgggcctacatctacaactgttccattagataaggcatgtaaatataagcaagtatttccaaacggacactttcctgcaccttggcggaaatatttacagtcttgttttttcattttatgtctttggccatctatgaagtttaatttttcttcttttgtttcgatccacattcttgaaggatagacaaaatctgatgtaattctacattctggacaagcttttgacacttcaaattcaaattctttactttgtctccactttcttatacacgtaaaacagaagcagtgattacaattaggaaggataccaaatgtttgctgagaccttgatttttttaaaactatatcaaaacaaataccacagactttttcttcagattctgataccttcttaaccaaatttatagcagtttctgttgtagatgtaccaggtccataattcttaggtgacagttctgtttctttaataagaggaagagcacaagctccgtcttcttcatttggctcatatttttctataatcttgtgagggctcttttcaggaatctcatgtacgttccaacatcttgtgccaaatctgcacattcctttgaggttaaatttacatattgttctatttccattaattccaatattcattgttcaagcagtatcttaactagtttaatatcaaatacttctaaaatattaggatactaatacacgattaaggaaataacttctgacagaagggatgggactaatttgacatcaaaaatttcattgacatctaattctaagttcctagaaacaaccttattaactaaaaaatatatataaaagttatatctatatatcttggaaaaaagtaatggcacactagaaaactaaaataataaacttaaattatatgtttgctacaagcatagattgctgttgaaagcaatcgtatgctattttcaacaatgtgataaacaacaggagttagtgaacagatgttacatttaccaaccaagacttccaccgttttcttttagttttgatgtagaaaatgg

SEQ ID NO: 7748 - DNA, 1311 bp, Diabrotica virgifera
ggccgccactgagtttattcgccgaaaagctcgaaatgcgctatctacagcaagcctgcagtctttctcatagcacttctacacgccaagtccactgccgccagtcgtgatagctcaaaccgcgttccaaccttgttatcaacaaactattgcaaaaacaacggttcatagcacgttcactcacggttctgctctaaattttaaaaaaccacggattgacatgaaatttgacatacacgtagtaaacatgtcaaacaaaacaagtggtatgtgcggatgtctgcttctgccctgggggtggaaaaagaaacctttaaagtaagtccggaagtggataaaccgattaattccaagcaactcttgttctatacgctgtgagctcgtacgtagaggggatatttacaaattcgcgaacgccagtagtgacaagtttgtaaaagtttaccggaaatttgatataaatgtcaaagtgattaatttaaaattaaaattaaaaacattaattataaacaatattagttggtcaaagctgtggtatatatttttaccttgaatatacttacgttttaaatactgaatttaagtttttttaatgttccgtaatatgtaattataaataatctattataatcttagcgccatctacacgattattgtcaaagtattcgaagtaagaaattgatattttatcaatacaacgtcaaaatgattagaaaaatcttaaaaaaatcgattacaatttaattacttttttgcgttgcaaatattaagcgataacaattaaataataaatttaaaaattaccggtaaaagttgaattagtaaccgctaggagcgacaccagcgaagctcagagtgtatacagttttttcgctaagtcaatacttttcgagttatttgtttttttttttgttgaaaaatgaacatattcactcgcaaataactcgaaaagtattgacagtgaaaaaactgtatagaacaaacgttgcttagaattaattagtttatccaattccggacttattccaaaggtttcttctttcacccccgaaacggggtgaaactcaccccccagggtaaaagcagacatcggcacaatatcacttgttttgcttgacatgtcagccacgtgtatgccaaatttcatgtcaaaagtggtttcaaaatttagagcaaaaaccgtgagtaaacgcaccataaaccgttattcccgcaataatttattaataacaaagtcggaacgtggtccaagctatcacgactagtgacaatcgatttagcgcataaaaatactatgaaaaagactacaaa

SEQ ID NO: 7749 - DNA, 1326 bp, Diabrotica virgifera
  SmartBlast Evalue=1E-116; Info="Peptidyl-prolyl cis-trans isomerase, mitochondrial n=1 Tax=Camponotus floridanus RepID= E2ALF8_9HYME"
ttgttttcttgataaatattcttcggagtgggaatgacgagatgagggggagggttgtggggaagataattgatcgggggaatcgagttgtggttgtggtagtccaaagagccgttgacgttttgcttggacaacatatgacgagagtacagttgagacatacagtaattggctaggaatagtatggggttttgttgagaggcaggtagtatccgagagtttcctggatacactgtctcgccgttgtgaatgttgcccaacgcttgctttagcaactgaaagtcgaatatcacacttgaattccggataagatcgtcgagttggcattgcaggtacatttcctggtaacgcagttgcaaacgttgcttttccatatttacgctcgagtacaaattatggacgtccgacagagtctctgccatcgataaattgagacgaagtttcgctaacgtgtctctcgtgtctgttaattcgaaatgagaagcgttattggtcagttcggcttcaacgtacgtctttaacgtgacacaagcctcaagtatcttaagtaaaaactctcgctgctgcattattagtctttgtatctcggataacattttgttcatcgacgctaagtcgatttgcagttcggccaccaattggtctttagcttcgttttgcgatttgatttggtgggatgcgtgatcggtggtggtcgcacaagcccggcataccggcaggcagcacgtgtgacaccacaacgccaacggcatagcgtgagtgtgacagttctccgaaatcacctttttatccggagctttcactcccaacttcatttgagaaaaattcttggtcagacacaagacggggttgtacgtcgggagggactccggtcccaggtccccgatctcggttctcttccaacaatatacacaatagagttcctggccttttgtgaggtttgtacgcatgcattgcagacaaaaataatgcttgcatgacagcagtttgggactttggtccgtttcgttgaacttttgcttacaatatccgcataacattaactcctcgaattctggtactacggattccatttcgttttatattttacgatgtgtaacacagccttaagtaaatccgattaaacgatacgtgttttggtcgtgaattaaaaactttttttacgggtttttcgcggttttgtactatttgcgtgttttcggtacggcagacgattatttatcttgcgattttttaatattacataattatatcgtgccgagaaaatcggcagaattacgaaaaaacttaaaattactgtggccgctttacgatgtgccacatcat

SEQ ID NO: 7750 - DNA, 1323 bp, Diabrotica virgifera
  SmartBlast Evalue=1E-17; Info=Alpha-endosulfine n=1 Tax=Culex quinquefasciatus RepID=B0WLG4_CULQU
gtggaagacgacctgaaaaccatgaacaaagcaaatggagaagaagggcacaagagagatccgagtggaagggcatagccagacaggcagacccaaccagggttatgatgccaaaagaagaagaagaattagaaggcatccatgagtattagaatattctacaatgccggttaggatttagagataaaaatggattctcgtctattggtatcaataccaagtttaactttataataacctgttcaaaaatatcaaaaccgattttcttcagcatcttacgtatattaactattaatgtttcttttttaagattaagagatttattatttaataaaacatacattgtattttttaactttcaaattgctttcttgattaactagtgtagaatccagattttaaataacagctaaaaccaagctatctcttaaattattatattttgatgaaccaccaaaatataacaaatacatttttctgaataaacataatataagacatagttaatctgttaaatataaaagactattgatataatacagttattttttattaggtatatcttttctaacacattactactgaaatggtcatcacgatttgtaaaattagtcacaagattttaaaaataaacttacgtaatatattccatgaatataacaaaacaaattagttctagctattatctaaaatttgaatgttaacaaatatttcattattacaaataaagcagcacgttttagtttaattattgtataaaatgactgttcattggggcaacaaaattattcttataatacataaccaactttaaaggctacagatatacagcatcagtctattctaactaatattagtaaattttgaaggttgaactatggaagtttttcttataggaactgtttcaggagtcgggatggcatcacctgtgcctacaaacgatatagggccgggcaactgaagtcctgctttgttagaaatattgccaaacttttgttttgccatttgataatctccagaatcaaaaaatttctgtccctttgacagacgcttttgtaagaaggctgagtgtccacttgcttttaaacctggtcctccacctgaaggaatgttgaatttggctttaagttttgcctcctcttgtttctctaattcttgaggagttaattgattgggttgggtagattcaacaggggactgctcttggtcactcattgtttctaattttcatgcactttttatcctaataataaataaaatctagaaaatcgtttgcaactgataaaggacttaaaaaaatctttaaaatttagtaaaccaaac

SEQ ID NO: 7751 - DNA, 1321 bp, Diabrotica virgifera
tttaatatccaccaaaggtgaatatagtgaataataaaagtgaataatcaaatctaaacgatcttttctttaagttaaaatggaagatttttgacacatgtatccttcctgtcatgacttatggaatggagaccatgacacttactaaccaatatcttaatagacttagaacaattcaatgaagagaatcatggtaaatataaacttaagagatcatgttaaaaacaaacaatttaagaaggaaatccaaagtagatattgtcgaagctatcgcaaaatttgagtgggaatgggcagggcatatgacaagagagatcgaagagaagtgaagagcacataaaggatgcataggaagaccaacaaaaaagatggatcgacgtcgaaggtctatgataagtgcacgaatttgtgagatttaggagacttaaatgggatgaagatgtatatgtcaagaaaatgacggacatattagataataaaaaatgatttgcttcgaggagtaatatttttttacccataaaactacattgaagcctactacgtaaaaatattaggtgtttataaaacataattcaaaattatttaaaaatcttttctaatgttcgttcgttacttaaaacatgtcttcttcagtttcgaccccgttatttatagcttatatacataaaaaattatttacattttcttattaaacataaaacagcaccaaaagcagagtataataatcataattaatataatatttgtgctctctgaaaatgttgataaaatatacgaaataaaaaaacgaaaaatgataaaagtgatgattggtttcttaagtacgagtacatatgaacagatcaaaacaaaatcacaataaattgcggatatttttatacattattggatctagaagtaatcagtaaaaagtttgataatgatcactagtataatctcattatccgattggaaacaatgttcactgtatcaccatttttggcaacaccaatcaagttgtgattacgctgtttaccaaattaaatcgaggctgtagttaacttctggctaaaatttcataaatgtttctaaaatcgactgttccggaccagaaaacatctaaattatgcgtgaattgatgacaaaatagacgtggaatgagacagggattcgtattatcgccaaaccttataaatgtctagtcagaagaggccctgaaaaaactgtaaagggtgaaacacctcaaataaaggtaaatgaagttcccactaacaacactagatatgcggatgacactgtcatcttagccgacaatattagtccaagaggcagcgctgaaaaa

SEQ ID NO: 7752 - DNA, 1322 bp, Diabrotica virgifera
gaacattttgatagacgatagtatactcctgcaataacaaggctgtattcccctcagttccagtgtagttcttgtatctgttgtatattttcaaataggttgttgtgcctgattatgtttgaggtatgaattgattgctggccaatccaactgtctaagatccattttagtcaggtattcttgaacaactctccctacgttagcgtgaaaaccataacacaatgtcttagaacccctaaaaggccagggaagtactgtgtataaaaattatcttacgcttatttctgaagacatttctatctaattcgacaaacaacggcagttgtcttcattgaatatcattgtccatactatataggaagtgcatgacgttgtgtgattatatgaaaacttatttctatagaactgtacataacttaggtttatctggatgcatctgtttttctactgaagccatttattttttctatctttagtttttataggttgtgatttttaataattttaatattaatattcccctaattccagtattattaacggtggggtgtcatgtgtactagaatatatttaaaattggaaatagttttcactttttatgacaaaatataactctacataaggaacctgtgttgatttaataattattaacaagtaaatacttttttattgaggcaatggtgaattgcttagtttgcagtctaaaacactcttaaactaagtatatgacgcatttatgcgtcacgatgtatgtgacgcataagttcgtcttcgtcataagatcgcatagtccctactacagcgttgatcgatcatttgaattacctatatttaacggtcatggcgcataagtgcgtcacatgttttaataacgctgcgattaccgtactggtgacctaatagaccaaatttaacaagaaatgtaacagcagatataaggaaatggtatttatttaagttttgattttctagccaattacgccttccagtaggaatcagtgagtgagcaatgacctggatttgagaccgtagtcccttaccccaatctaatccactgtttgcctgtcactgctcttatgtcatctagcaatctattggtctccattctatgtgaccggcccagcgctatttcatttctgtaatttcttccctgatcttcgttctacgtcttatctacgttttgataacgcgtgttaagcgcttgtcatgtgaacgtacccttagtcttaaatcatagaattatagaaagtgaaaaacatttctaataaaaaattgtctataatttagttgtatgtatatgacgttattgtttctttcttgtt

SEQ ID NO: 7753 - DNA, 1318 bp, Diabrotica virgifera
  SmartBlast Evalue=2E-48; Info="Juvenile hormone-inducible protein, putative n=1 Tax=Aedes aegypti RepID=Q17DF4_AEDAE"
gaaaattataacattttatttaaaagtaacaaattaaattaaaatttagaaagtattcatatgtagttattatctcttaaaaataaaataatatttttgactctccttccatattcgtccatattttttacgttgaaactcatgccctttacaagatcaccgttttgttctgaaatttccacaaaatctggtgcttcttcagattccgaaaccatcactttaacgatcataaagctcatgtagagaccaaacggaaacagaacttttaagtgttcttctaacaacgagtatgggaatagtttttctggatcacaaccgaagttgagcagttgtgtcgaaagagtatcatggtaaagttttaggtatgttttgtaatcgtcaaatacttcttttgaactgttagctagtaagaaataacttacatcatatgctggtgtagacaatgatgatatttgccaatccaatattcgaagactggatggtttttcgatattctcaggatcctcatacttaaataaaaaattattacaccagcaatctccatgcgtcaagaccaacttatatttttctttcttgaattcctttgacattaaatcaaacattttaccttcaacatttttcaaacattctgtcagttctatatcgccagatacagcttggtatccattactcatcactgaagttataaattgatgtaacttttcttcatcgctgacagctggattgtcttcaaaaacgttatcgtaaactttagcagccattttattaaatttttcaggacatttgtctttcatggccaaggaaactgcatggaatttagcatattcttttagaacttcttttacatgtccaggattcatgggaattttcttgttccaaagtttgtagccttctgtttttagattctccattaggagggcttccttaccgacttctgaagagcatagatatgccttgggtatactgacaaattgatttataatattgtgtttatcttgaaactttttgaactccccaaaaacttgttcgtacaaatatatttctcgtgtaaaaatattgtgaatgggagcagcatttcgaaaagcttcatttgtatgggcagattttaaaatcaaattcaaggttttttcactgtttttaactataatagaattgattattcccaaaaaattgtcacctttaactgatcctgcatttgaaatgacttcataatcaccaaaaccgttttcttttgcaactttgtcaattaattctttttgttctttacttaattccattgttgctatacactcgtcacatctacaactactttgtaaaa

SEQ ID NO: 7754 - DNA, 1322 bp, Diabrotica virgifera
  SmartBlast Evalue=1E-119; Info=Sodium-dependent phosphate transporter n=1 Tax=Aedes aegypti RepID=Q17KJ1_AEDAE
gagaattatctttatttaagtattagctaggtaataataaattgaagatgaaaatttctatattattaaaccttataccccagaggtacgttttaggacttatgggattctttgccacatttaccaattacaccatcatggtggtactgaatattgcgataacacagatggtaccgtcactacagactcaaggtgatcctaatacatgtgctacaataaaagtgaacaatacccttctgggtcagttagaacataaaaaagaaacatacgattggaacgaaagtaccaaaggtatcattctcagcgcttacttttggggttacatatttacccacataccaggaggaatgctagcagaacgatttggagggaagcatactcttctatttggaattttagtggcttcaataatcacatttatcaccccttggttgactgttacatccaatggagactggagagttgtgacagctttgagatttttgattggattttcacagggtccaagccatccggcaattaattcacttctgtcaaaatgggtaccattgtcagaaagagcaaaattagggactttggtgttttctggatctttaattggaacaataataaccaatgtagtcagtggtgctttaatgaaagcaacagggaactggagctcttgtttttacttctttggtaccgcaggggtgatatggtgtattttatggcaacttctgtgctattcacaaccaagcacgcatccatttataactgaaaaagaactcgaatatttaaaaaccaaaatagattcagtctcaaaaaagagacaacctactccatggaaggctatctggacctctccacccatatgggccttggtggcagcacaattaggccacgactggggatttttcacgttgctcactgatctacctacttacatgagtgacgtcttaaaattcagtattgtggataacggaatctggaattcgattccctatctggtaatgtggatctgttcaatgttctcaggatggttgtgtgactttcttattactaggaaatacctgaaaatcacattcgcgaggaaattgtttactataatctcttctatggggccatcagtattttcaatggctgcctcctactctggatgtgacaaaaatctaactgttaccatgtttacgttagccatggctttcaaagcacccttttattgtggttttaaagtaaacgccttagatcttgcgccaaactatgcaggaattgttatggcagttgtcaacggcatgggagctatagcaggaggaatagcaccgtttttggcaggggctctcaca

SEQ ID NO: 7755 - DNA, 1319 bp, Diabrotica virgifera
actgagatcacagtaaaggatgcactggaggtaaacaaaccaagacaccagttgaatgttacgaggagcactcctgaatcatgatttacaatgtataaactttgtaaatcatgatttgggatttataatgtattatacgttgtaaatatgatttgggagtgctattcgtaacattcaaggtgtcttgatttgtttatttctagtgcatctttactgtgattgtagtatagaaataatatgaaaataatattctataatcttacttaaccatatacaaattctggacctcggaggtaaactacattatgtggacatggtgttgttttgaatcagttttttaatacacttattttattagttggattatacaatttggttgtatattaccattaaaatgtggtcgcattatccttggaacagttacgggatacataagatatttttatagaatatatcagatttttaggacattcaaagtgctctacttcacagttgttctaaataacatagtgtagcttatctccgagggccataaatatatggtagatattttggacaaatgttcaaaatatctcaataaaaactggcttactgaggaactacaaagaggcaaaaaagtttttaaaaacattgtgtttaactcatggtgccacaataataatttaactgaaacatacataaatttgaggggggccttaagccccaactctagctaattcccattttttacgttaaatcactgtgatcatctcaacgaacatcgtctctgcatgttgtactaggtataataatgtttatgggcaaaatttgttgtttacaaatctttaaaaaaatcatgtaattcaacctccaacttttaaatttttatctttgcaaacaaaaactcatgactggaaagattaagagaacaaaaccttcataaaattgtgtggtgcacaaatttcaccagttttttaaagatgttcctgccataacaatgcctcatgtcccttttcaataaaaaagtctctaatagctttcaattactggaaagggtcgattttggttttgtaacttcaaagagctgtaatttttttatgtgcacatttgtactggtgaagttgggtgcaatggtactttttttgattccagaacatgtgatttcatttatgaccttgctttttgttacttcctgcatatacatgtatgtatatgtaactataagctcatactgtatatattataataattttatcaaagatctgtgtttgtaacataggaactttttcaatcaaaaaggtgatgagtgcttggtgatgtctgcatgttataacaaataa

SEQ ID NO: 7756 - DNA, 1321 bp, Diabrotica virgifera
  SmartBlast Evalue=1E-147; Info=Serine-threonine kinase receptor- associated protein n=3 Tax=Aculeata RepID=E2C4H2_9HYME
cgatatccattgacagaacaactcgatgggtagtcgtctgtttttgcatgaaagttcgattttattttaatttttttgacaacatggcaaatttaagacaaactcctttaacttgtagtggacatacgagacccgtggttcatctagattttagtgaagttacagacagcggatattatttaatttcggcgtgtaaagatggcaaacctatgttacgtcaaggcgataccggtgactggattggtacatttgagggtcataaaggagctgtttggggagtagccttaaacagtgaagctacaagggctgctagtggtgctgcagatttcacgggaaaagtttgggacgcaatttctggggaggagctacactctttccagcacaatcatattgtgaagagtgtagatttttctagggattcaagctgtatggttacaggaagtaatgaaaaacttgtgcgaatttttgatctcaataaaccagaagctagtcccgaagttttcagtggtcacacagcaggtataaggcatgtgcagttttttagaaatgatactcatcttatttcttgtgctgatgataaaacgttgagagtatggaatcgaggaacgggaacggaagttcaaaaagttgattttagttctactcctaatagtcttgaagtgtcaaaagatggaagtgttttaacagtatcttattcaaaccgtgtgattttcctagacgctgaaactttaacaaaaattagagaattttcgataccatccactgtaaattctgcttcccttcatcccgacaaaagcatttttgttgccggaggtgatgatttgaaagtatacaaatttgactacactactggaactgaaatagaatctttcaaaggtcattttggacccgttcactgtgttaaattctctcccgatggcgagttatatgcatctggatcagaagacggtacattgaggttgtggcagactactgttggcaaaacttacggcttatggaaatgcgttgatgggcaaatgaacaacgatcctctttctccaccaaaagaggtgcaagcaaactaaagaaacaggcgactatttattaatttttatttttgtttaaaataaggaaattaaaaatattttatatttggatactgcatctttttatgaatttaaagattttggtatgaagtcagcaaaaatttcaaccatcggtattttgctgtacatttttaaattaagaacaaaacttttaacaagttaagacatgtaaaagagaattgaaatttttttgtaaatatctcttgacttttgcgtatgttattaaaatacttatt

SEQ ID NO: 7757 - DNA, 1321 bp, Diabrotica virgifera
  SmartBlast Evalue=4E-13; Info=Bmp-2 n=2 Tax=Bombyx mori RepID= Q1G0N2_BOMMO
gtcgcaagaactgaagctgaagagaaggacgctgtcggttttcttttctgtgcatgtttcaccatttttaataatttaaaaacccgctattcgtaattttgttggttgtctttacggattacttacaattttggaaataaaatgactcccggccgatcatcaacgactacaaaagtgtttgtaggaagtttgcctccagacgctaccccagaggatttgaagaaacttttcgagccctacgggaacattgcagaatgcgacatcgcgaacaaatgtggattcctccacttggaggatggcgaattggcaatgaaggccattgacgagctaaatggtatggaatttatgggttccaaaatttcagtggaaaaggggcgagttaagccgcgaaggagtggcggtggacccagaggtggaagagaacgaggaggcccgtattcaagaggaggaggtgacttcagaggcagaaatggaggttttggtgggggacgtgatggcggaccatacagaggtggtggtggctttgacaggagtggtagaggtggctacggaggtggagatagaggttatgatgatagacgtggtggcagaccagcatatgatgatagaagtactggaggatttgatggttatgatgatagacgcggaggatatgacagggatccttatgctgctggtggttatggcggtggctacgaaagacaaggaggctatgacagcagaggaggttatgaagacagacgtggggcagctggtgcatacgatcaaagagcagctgcaccagatggtctctacagtcgcagagatatggcacctaaacagagttatggtggatccaacggatacggcgcttctgccggctacggtcgcgacgccggtggctacggcgccgcctatggagatcgcgcagccgccgatccctacgctgcagctgatccatacagaggggcttcggccggtggtggctatcaggatagaggtgatagaggatacggtgggcgacctgctgagggttatggaaactcatacgctgctgcatctggcggagctaccgctgcaagaagtggctacgactcggcatatcctcctctaccacagcaaagaggcatgtactaaacacgcattgtcgaatactcgcttccacatgcgcccagaatcgtttgacggacaattaagagaaaaaaatcaaaactcgcagacataatagcggaagcccctattctggataatgtaagattgtttaattttagcgcatcaaacctaagtttatgtcatgtagtgtttagatatcttcattttgataatataatgttttaaggat

SEQ ID NO: 7758 - DNA, 1320 bp, Diabrotica virgifera
  SmartBlast Evalue=1E-123; Info=Mitochondrial cytochrome c1 n=2 Tax=Tribolium castaneum RepID=D6WGE2_TRICA
ctaacttcagactggtattacgtaaagtgtcaaaaaattgtatattttttcttagtagcttcctaaaagtgcttaaattctatcaaactagctttctatcacctaaatacttcatgttactctaatctaagggtacgaggggtacaaaataaatttcacataacctatctgcatagtttttgacatcaccctttaggcaacatggctgcaacaataggacgaatttgtggagctggtcttttaaaaccaacaaacttatcctctgtgggccagttaagttcgtattccacaacaaaagaatggacccgtggaagaaaagcacttttgggaagcttagggcttattgctggtggtactggtgccttgctgtttgctttggaccaatcagttaaagcatctgatcttgaattgcatcctccaaagaatgtttggagtcattctggaactttcaattccttggatcatgctagtgtaagaagaggttatgaagtatacaaacaagtgtgtgctgcctgccactcaatgcgcttcattgcttaccgtaacttaattggagtttcccacactgaagcagaagccaaagctgaagctgaagaacaaatgattgaagatggtcccgatgacacgggtaactttttcaaaagaccaggaaagttatctgactacttccccagtccataccccaatgaagaagcagctcgtgctgccaacaatggttcctaccctccagatttgagctatattgtatctgccagacatggaggcgaagattacatatttgcccttttgacgggttactgcgacgcgccagcgggcgtggtcctcagagacggacaatacttcaacccctatttccccggtggtgccatttcgatggcacaagccctatataatgaaaccatagaatacagtgacggaacaccagcaactgccagtcaactcgccaaagacgtcgctgtgttcctaaaatggacgtcagagccagagcatgatgacagaaagaaaatgttaatcaaagtgatcggcatcttttctcttcttattggtatcacttactatgctaagaaactcaaattctcttcactgaaatcgagaaagattgaatttaggcccaagagtaaataaataagtattgtagatgaattttaaacaaggtttagcgtgactaccatagttattattatcttaaggtctaattttattgtacatatttacagactttccaactgactggggtttgcatttgccaccttggtttatttattttttccaggctttattattattgtgtcacgttatgtttcaataaaaaaacaataa

SEQ ID NO: 7759 - DNA, 1320 bp, Diabrotica virgifera
  SmartBlast Evalue=1E-113; Info=Aldose reductase n=1 Tax= Camponotus floridanus RepID=E2AB23_9HYME
agtgaggtgcaacattttcatcaaacacaacttttaagtctgctgacatcattcgatgacatattaatcctgtaaactaaatcttgttatagatatcgtgggaggtaaatagaatctgcaagcactagtgatttagccagcctgagagacttgctcacccattgataatggcattagggtgatacaattcattcgggcaaagaggattagctcatgtaaccttgaataagaaattcaagtgggagatgttttagaagtgttttataaaatttagttaattcttaaagtcggtgacgaaattacataatttggttcccgctatggcaagtaaagtaccctcggtaaaacttaacaatggacgagaaattccagcttttggtttaggaacgtggaagtctaaaccaggtgaagtaacacaggcagtaaaagatgccattgacgctggatacagacacattgattgtgcatatttctacgaaaacgaagctgaagtaggagctgctttaaaggataaaattgacagcggagcagtaaaaagggaagatcttttcattaccagcaaactctgggtcacgtttatgaaacccgaactggtggaaccaacattccagaagactctccaaaacttaggtctcgattatctagatttatatctagtccactggccagctgctcttaaggaaggaggtgctttgttgcctaagcgtccagaccatgaaactcttggtatcttcagcgacgtagattatctagacacgtggaaagaagttgaaaaactcgccaaaaaaggtttagccaaatccataggtgtctcaaatttcaataaaagacaactagagagaattcttgaaaacgctaccattaaaccagtcaataatcagatcgaatgtcacccataccttaaccagaagaaacttatcgccttctgcaaatcaaaaggtatttccgtaactgcctacagtcctttgggttccccagacagaccatgggctaaacctggtgatccaattctcactgaagatcctaaaataaagaagattgcagagaaatacaagaaatctagtgcacaagtaattctaagatatcttttacaatctggagtaattccaattccaaaatcagtcaacaagaataggttacgagaaaacataaatatttttgacttcgaactctctgcagatgatgtagctgttatggatacctttgattgtaacggaagggtatgctggtatgtcgaggccattggacatccacactatccgtttaatgatgagtactaaactaaatgtatataatatataatcaataaaaaaagtcacc

SEQ ID NO: 7760 - DNA, 1316 bp, Diabrotica virgifera
  SmartBlast Evalue=2E-81; Info=Trithorax group protein osa n=1 Tax=Harpegnathos saltator RepID=E2BBR6_9HYME
agaagtaatttaccaataagtgctaagaattggccgcttctggcaaactctagttcgttaccaggaataaatgtaagactcctaagaatatttgagagacagagacaccgtttgccaatattgtcttgactctcggtaaggagcactaaactagcttcatctctagtgtaagcttcatcttcatagtcagaaattcgcctacgttttaaggtacttgatggatcccgcacagctggttccttcgtatcaccgcactcgccatttacactaatattcagatctatacttggactttcctcacagttcgcttcctcactcactacctcagtctttattttgtctgttgtttctaacgtgagcatgtcgcttgcttcagaatctttcttaattcgagatatcacatcacttaatgtctttgtccttcgtctcttttcacaagctttagcaggtggtggagcttcgtcaggaggcgtttcatcgggtggaggggttttgattttcctttctaaaggttcccttttatcctcctccgattttactactacaatatgatccaaactcatatggaatggaatacgtccaaactcagcttggaaagtaggtaaaatatgatctgcactggtataccaaggatcagttggaatttcagctaaaatattagcacgatttggatctccctttgtatcccaatctttcacgtgatcttgaacgaatatatcttcatccctatccactaatttcactggatgccctttgcgagataaaaaggaataattaggagtttcagttaaaatggttgtttttaaattaggatctatgggctttgaaacaccaccaagatcaatttcctcttctacagactgttcttcacgtggaaagggcccgtcaaacatatccgaaagactacgtttgaaatgttccatcaacagatcaagtaaaccaggccattgatacaatccgaaatatcctatagtcaagtcgtcaaataaaagaatgttaagcatatcgatagcataagtagtttcagaaagaagtccagatcttaggcacattataatgcgccaagcatcaacttgatttacgtcatttttacatattcgtcttctacgataaatcagtggaacagtagcttctacactgtctggcggaaaaataatctctcgtttaggcatctgactatgactataagtattgctggctgagggtggcgcttgatttccttttccaccacccgatgtcatgatgtttgaaaaaggtttcccaggcctatgaactggcggtctcacatttgcattttgtcctgttggttgtgcgat

SEQ ID NO: 7761 - DNA, 1319 bp, Diabrotica virgifera
  SmartBlast Evalue=1E-174; Info=CG6418 n=5 Tax=melanogaster subgroup RepID=Q9VTC1_DROME
agacataaatgagcttactgacgaacaagtaaaagagttaagaaaagttttggacatttctgtaacaggtagtaatgcacccaaacctgtatcgtcttttgctcacttcggctttgaggaaaaacttatgaaagctataattaaggctgaatattcgacacctacacctattcaagctcaggctgtgccttgtgcattactaggacgagacgtcctaggtatagctcagacaggtagtggtaaaactgcagcatttttgtggcccatgatgaagcatatagcggtccagaaacccgtcgaggaaggggaaggtcccatagctatgattttggccccaaccagagaattggctcttcagatctacaatgacgccaagaaattcgcaaaagtatatgacctgagagtaatatgtgcgtatggtggtggctcgaaatgggaacaaagtttggcattaaaaactggagcagaaatcgtagtggccacacctggtcgtattatcgaccacgtaaaaagcggctcaaccaacctccaaagagtcacatttttagtcctggacgaagctgatagaatgtttgagctcgggttcgagccacaggtccgttcagtctgcaatcacgttcgacctgatcgtcagactctcctcttttcggcgactttcagaaaaagaatcgaaaaattggccaaagacgctctgtccaacccagtgaagatttcccaaggaaccacaggacaagctaacgaggacgtaacgcagcacgtgttgcttttacccaaccaggaagctaagaggaagtggttgtttggtaagctcgtggaattgctttctgccgggtcggttttggtatttgttacaaaaatattggatgctgaaatggtatccaaagatataaaagttaaagaattcgactgtttgttattacacggtgacatggaacaagcagatcgtaataaagtgataacagcctttaaaaagaacgaatgctcattactggtagccacagatgtcgctgctagaggtctggacataccgcacgttagaaccgtagtaaattatgatttagcgcgagatatcgatactcacactcacagaatcggtcgaacaggtcgtgctggtatgcaaggaaccgcctatacactactgactgccggcgataaggaatttgctggacatatagtgaagaatttagaatcggcgcatcagaaagtgccgcaggaggtgttggagttggctatgcagagttcatggtttaaaaaacaaaggcttaggaataaaaaggattacaatcccaatgtcggtggcataggtttgggatttaaag

SEQ ID NO: 7762 - DNA, 1319 bp, Diabrotica virgifera
  SmartBlast Evalue=0; Info=Shaggy n=1 Tax=Tribolium castaneum RepID=D2A009_TRICA
cagacagacctcaggaggtatcatacactgacaccaaagttatcggcaatggcagcttcggtgtggtctatcaggcgaaattgtgcgaaacttcagaattggtagcgattaagaaagtactgcaggacaaacggtttaagaatcgggagttacaaatcatgcgaaaattagaacattgtaatatagtgaaacttaaatatttcttttactctagtggagataagaaagacgaggtgtacctgaatttggttttggaatacatccctgagacggtatataaagttgcacgacactacagcaaatcgaagcaaactataccaattagcttcatcaagttatacatgtaccagttgtttcggtcactagcatacattcactctttagggatatgccatagggacataaaaccgcaaaacttgttgttagatccagagactggagttttaaaattatgtgattttggaagtgcaaaacatctcgtcaaaggcgaaccgaacgtttcatacatttgcagtcgatattacagagcaccagagttaatattcggagcgatcgactacacgacaaaaatcgacgtatggagcgctgggtgcgttttggccgagctccttcttggtcagccgatattcccgggagattcgggcgtagaccaattggtagaaattattaaggtgttgggcacacctaccaaagagcagattaaagagatgaatcccaactacacggaattcaagtttcctcaaatcaagtcacatccttggcaacaggtatttagagcacgaactccaccagaagctattgagctggtatcaaagctgctagaatacacaccctcatcacgaattactccacttcaggcttgtgcacataatttcttcaacgaattgagagaaccaaatactcgcctgcctaacggaaatgagctaccccctttgtttaattttactgaacacgaattaaatatccaaccatcactgaacagtacgcttttgcctcgaggagctcagaccggccagagtggacaagagtcggaaaacaatgcgccagatcacgcgtcttcatctactgccaaccagcaaatggccgacactgcgtcgactcccatccaagcagcggcggcgtccagtatagcttagatgggtgacaccgtcatcaagtgctgttttgatgtttgttgtaatgcatagataaactaaatcagcaatacactaagccaggcgtctagtagtgttaaaaatattattaaaaaaaaacgttagataatcttcagaaagctaacattcgtgtcgatctttttattattggtgtcttattagggg

SEQ ID NO: 7763 - DNA, 1308 bp, Diabrotica virgifera
  SmartBlast Evalue=1E-109; Info=Dynactin n=1 Tax=Aedes aegypti RepID=Q177H6_AEDAE
gacccgtgtgcttaatttttctttagttttacccaattccgtgatttcagatttcttctgatcgatatccttcaatagcttctgatactcatgtttttcgtgggcagaaagatctcttaacctcaccaccgtttctcttaacctagcattctgctgatgaagttgcttcagctcgtaggccgacaactgctcttgggctgaagtaatacttgttcccttttcctgcatctcggccttcaaaatttctaaatccaatgtaacttcttcgagtttttctctgcatacatctagttctaactgcaaagtttctgctttctcttcggccatttctttgtccaaagttgccatttctacagcttctgcaagatcggccacttcttctgcgtgcgtttctttcgcttcgattgcttctttggcatcctgtttggctttttgtagctcacgctgcaacatagcttggctgctcatgatcttggacttaaactccaccagttgctcaagctgtatagttaatttctcatagttcttgagtctctctttatcctcttgcctcttgatctttaatgtgtctaatttctctcctaaatcaactatttgttgacttctattttctaactcttgctggagctgaaggttgcttattttctcatccattgatgtcactggagtaggagctgtagtcattgcctgcccgggtgtaaactgcggttttaacgtttccacaaaaccagtctcgacaaacgacgcccttttcggaacttgactttgagattcattcgggtctggctgtttatcaactgtcggtgattccaagtgcgtcctactaccgctcaaagactgccgactaccagacaatgactgccggcttcctgctaaggaatgcctactgcttgccaatgacattcttgaaatgctttgtctacttctagcaattttagatggtggaggctctcttgcaggcacaggttttccatgttgatccaatgctaccacttgattttctttaacaaacattccgtaattttcttcacacttaaaatattcttgtcctttcacagatccattattttttcctttcggttcatccagtaccaaaccaatccatgatccttgggcaaatcctgttttgccgatgaaggcaactgtaccctgtaccccttttgcagagacttctaccctttgaccgatttttagaggttcagccattgttcttaaagttaatttgtgaatgaattatttaacttcacaaaaaccgatacatttataatgtgttaaacaaattttactaaaaaaatcaacacagaaaag

SEQ ID NO: 7764 - DNA, 1316 bp, Diabrotica virgifera
  SmartBlast Evalue=8E-17; Info=Meiotic recombination 11 n=1 Tax= Tribolium castaneum RepID=D6WQZ5_TRICA
aaatatgcagaaatgaatctaagtaatgaagagctattggttattgacaaaaaatcattgagtgaacaagctatgcaagttgtaggtgccaaagtagacgaaatgatacaagaagctaagaacttaaagcatactaaaaaagttagcgaaaagccgttgatcagattaattgtcaaatacaaagatgaggatgttgtcttcaattctatcagatttggacagatgtatgcagatagagtagcaaattcagataatatgatcaaattccagttaattaaagaatgttctacacgaaggagactcaatcaaaatcaaggagccgatgagattttggaagggccagtattagtcgatcgagttgaagatatggtttcggactattttacggaacataaagttctaggtttatttccgttaaatatattaaatgaaggtgtaaagagatttatagactcgaatgatactaacgcaatagccgacttaaaagacaatgttattaaagagatgatgacaaaactcgaactggatcttcctgaagttgaagacactctggctgccatcgcagcgataagggatagtatggaagcagactctcttgcttttgtaaatagagttttgggtgacccaaaaagaaagaagaagaagaaggctagtgaggataatgatgatgaggatgatggctctatcgaagatgataacagtgataacgaagtcgccacaaataaaaaacagactacaaaagcaagaggtggtccgagagggcgacgaggtagaggagcagggccgtctcgagataatgacgcccagataactgaagacagtaataatgacaatttcagtaacagtgataacgaagtcgccacaaataaaaaacagcctacaaaaaaacagcctacgaaagcaagaggtggtgctccgagaggacgaagaggtagaggagcaggatcgtctggagataatgacgcccaggtaactggagacaacagtaatagtaataaatatggtttatttggaggcggcgggagaggacgcaaaggcaaaaggtaaaggagctacttttaggggggcacggagaggagctaataaaaattaatacattaataattatttataagaccctttgttactgttacgtttctgttagagtcactttttgtacagttacatttctgttattgtttaagagctacttctgagctaagaaaaactaatatgttcatggtttttaagacctttggttactgttacgtttttgttagattcacgttttttagaattacgtttaatattttgtttttgagaagattttgttttac

SEQ ID NO: 7765 - DNA, 1314 bp, Diabrotica virgifera
gggcgctagagcgggccccacgggccctggttccacggaatccgcggaaccatgctcagttcgccactgatgtacaaatatgtgccacattttatttaaaaataccttcccttcttggttgtggtacttcattttgatgatcgaccaatcctttaacaactactctatcgaactaatctgttttatacaatttttattcattttcatgttttaattaaccagacaatttaaacagtaaaatagttacaaacattaaaataacgtaaattacatcaataatttcatgttaatcagagcaacattgtatttaaatgccttaatagcagtaatattaatagcagtaaatcttaatagcagtaattaccataacagtatttacaacaaaaaaatcattaatacataaactacacagaactataaataaattgtgatatttttgtatttaaaactagagatggaattcctaaggagaagttgcagagtaacattaagagatagaataaataacagagatcaagagaagaataagaattaactcagatataatagactacataaacttacgtgcataggtgtatggtcatttttgatgtctcatatttcctaaacctgttggccgatttaagtgattttttgaacatgttatagcctgattctttaacatcactgcaataatattgttactaaacaggtaaattttcattgtataccaggtgtaccaatcaaactgtgtttttttctcaaagttcgcatcaacctgtggaatattctagcatttataaaatactgaaattaaaaccgaactatagcctcagcttttcttaacattctgttttttgactcattcgtttatgttggataataaaaaagttaggtactttaacaactagacatgttcttcatcaatacactgtgtttctaaataagtgcgacaaactttaaggggtaattctgcatgaaaaaataatgacagttgctttataaactatgtccgcaaatgtttcgtttgcggattttttgacataaaattaagaattttataattatatctctcaatatcttcctctacatcacttctatcattcgcatgatgattcgttttgatagttttgacaatgtctgcatcattaaaaagtctacagacttcaaaattgcgtagttctgttagttttgtgtaatgtaagatgtaaaaatttatgtcctcatcaattcaatatgttgaaaaaaagtgtgataatggagggccactaatatctctttcttataagacagttacaaaaattccgtgatatctagaaacgtgaaatttgttta

SEQ ID NO: 7766 - DNA, 1308 bp, Diabrotica virgifera
taggtttacagtttacaaaagtagatgacaaaaaatttgggcattaaaatttttggtttggtttattactgatttttaattgaccgagttccaaaaaaacttgcatacaatttaagacgacggtattttctatattgtttatgatgtcggaattctatcacgtcttacttcctatacttttaggtctctttttcagttgttcaatttgagcttgtgaagcgtgaattagagtaagaagtggaggtacctaatggatatttaacggttttacgtcatacaacaatctagtatcaaataattttgagaaactgaggatatcagttcagtttggttagtttcttgtttttgacaaaattggttaaaaaatgtagtatgcatccaaatttccaaaaatttgcaatattgccagaaactttaattaatccaagtatattgagtagcatttaaattttccgaagtattaacagtcttcgaacttttgttagcgtcgtaccaaaccacattattttcaatttcatatcattaaagtctaattagaaaagtgagtaatattttgtcttttagccactttctttaagtggaaaaccgtcgtataatataaacacaagatcaaatcacgactaggactgttcctcagcactcaattcttagtttggccccatcagttataaataatcgaacactctgatttcatttcatttctgtttgttgtcacaatggacgctgaagtaaatttataatttgtttgagtatcgttcagtaatgaaaaacctacgaatgaagtaagttattcaacacgcatactcatcgttatttcgtacaagtttgcactttacgaaaatttaaacgttacaggtggaaatcacaaatgattttctatgcttcgttttccattgctatcgtaaatatgttgatcatatttccatcgtgacgtccatatgtataaaataaaaaagaacaaaactgtaaaaactaatttttgattacaaaatatatcaaaacagattaattaatcaatagtatcacgacaattttcgagaccatgctttgtaacattaaagttgcactattgctaaaaaaatttaaaatacacaaacacagaagatatataccccaaaaactaataaccaatatttccaattttcaaattaaatggtacgtccactattacattataatttaaggttagttaacatttttactttattgtgtttgagggttatattaaatcaacactttttttccccgaaaatttagatgtttttggtatgtagttatatcttcaaatcttctctatttgtgctgggt

SEQ ID NO: 7767 - DNA, 1312 bp, Diabrotica virgifera
  SmartBlast Evalue=1E-144; Info="Ras GTP exchange factor, son of sevenless, putative n=1 Tax=Pediculus humanus corporis RepID= E0VPV8_PEDHC"
ctcctgtacgtcgtcagaaaagtcctgacgaattttggatcagcataaatatggtaagtcagtctttcaacgagtttatatatagttgcgcctttaattagaggaactccgccattttctctctgttcgagaatgatgttatctttagaatcaggttcggcgaacttatatagttcaggaggaggaagtttcagcgggtgcttcctctcgatgtcggacaggatactatctaatactctctccaacatagacctgttattcagcatcaccaaatcagccatccaagaattcttgtcctcatttgatttggcacatagaatcacagaaggagtctgcctcggagatatttcgaaagcatgttttaattcttccgtatcttgatgatctatgatttccactttcctaatgaagaacctctccttgagcttgcattcgggatgactcggatggtgcactgaactctgcctccttgaatttggtttacagagtatcatcagaccatcgaaaaggaacacccgtctgtcggtcagtcttttattgttgccaactttgatcaaagtatcttctctaacgaattcgttacagcactgccctagatcctttgaatcccagttctctacgatcctttccagttcgtggatctttataagtgctgcttgtcgtctcgctctcgcctgcggaagcggagctgaactcctgggtaatgtttgagtgggaacacaacttcctaacgtaatttgtaatggcttcaacaatccttcgacttgtgccaaagtctctctatcctcggtggaaggcgtcaaaccctttaatatcgttatataatccaaatacgaaaaacaatgccatataggtcccatgagcaatgctggtaagtagtaacgaagagcgagcggcatcccttgccctgcagtgttgagtgagctttgaacttcgggcctagtcaacaaagtgttcaaagtttctctacaactcggtgatgtgacgtctctagcgtatttgatgtatacatcaaattctgctgcttctgcaagttcttcaaaacagctaccaatataaggcatcttctcttgggccatctccctaacatcttctaaactacccgatagcgtgtaagtcaattcatagatatccataatatttgaaaatatcttctctatatcctgtggacctggattcaatttaataatttcctctctaaatacttttatcaacatgtgcaattccttcagataagcttttttcagaagcgatgagttctctgacagtttcttcataagtaagactggtcctaggcgctgttgacagcatc

SEQ ID NO: 7768 - DNA, 1308 bp, Diabrotica virgifera
  SmartBlast Evalue=5E-61; Info=DnaJ-4 n=1 Tax=Bombyx mori RepID= C7AQZ2_BOMMO
tttttagaagtaaactgtgtcagtgctttagtttttgtttcctggtgcccatacaatggaagtctgaaaaaattatcaatcaggttaaagtgctatagatttatcaatatacttcgtgtttcgttttaaggcgtattttaaaaactggggcataaagacacttgtggcaccaacatggtggactactacagagtccttgaggtgccaaaaaccgctactaactcggaaatcaaaaaagcatacagaaaattggcattaaaatggcatcccgacaaaaacccagacaacatggacgaagcaacaaaaaaattcaaagaaatatcagaagcatacgaagttttatcagacgagaaaaagagacgtgtttatgatgaatatggcaaagacggtttactgaatggcaacagtcgcagcagaagtagacacgaagacgattttgactttggtggatttggattctttaccttcagagacccagaagatgttttcagagaatttttcggtgccacagttttcgatcttctagatccacacgccagagatagaagacgtcatcatcaccacaacaggcactcacacccgcagaatgctctgagcagcacgtcccttttcagtcctttcggtctacaaatcggcggtaacttcatggacgatttctttgcaccggggccgcattcaggcggctttacttcttttagttcaataaatacctcgttcgctggtgctcctagtaatgcaaacgtcaagaggacctccacttctacaaggttcgccaatggaaagaagattactacgaaaaagattttgaaaacggaaaagaaactgtgctgtcttacgaaaacgatgtgctaaaatcaaagactgtgaacggggtctcacaaagtataacctacagttaaattatcaatttgaataatgattttttccactttagctaattgtagtacttacacattttttcaatagaatacaatgtggtccacttggtataattgcccattgaagctcaacgctagtatcttcgtttaagcgacaaacgtatttctgatgtcccagggatgatgattaaactatttttgcgataaaaaaagataattgctcaattcttgcataggcacgaggtatagaaggaaccatatttgtttatatgatcaggagcggttagtgatcgagtcaaaggctctttttagcttaataaatcaattttagcttaataaaaatatcttactcgattattaatcacaatttgatgagaagtgttaggacaaacagtatttaaaagactaattgcttcgttttagttataca

SEQ ID NO: 7769 - DNA, 1312 bp, Diabrotica virgifera
  SmartBlast Evalue=1E-116; Info=Stromalin n=2 Tax=Tribolium castaneum RepID=D6WLF4_TRICA
ggaagaggcgttcattcaaaaattcacctgctgcctgcgcaacagctctgtgggatgagtagaccaattcgtagacgtgctcacaatctttatcagtcaatatttcatggtggtgtttcaaaatggagatcactaatttgacagcttgaactgcaacttcatattctttgtcgagagtcatggcgacgatacgatctttaaatttgtttgtgaaaagttccagctttcctttcagttcttcgcttgcatataaaggttgtaaagcttgcaaacatcttaaacgtacttcaccgaccttatcgtgcaaagtccaaccgatatattttaagtaagagtcatccaaaaagttagcatggaatttgtgcatccaaactccaatctctgtcatagcaatggctctaatttctggcaacgtgtccctatatctatgcacgaaaacagatttgaacatgtaagtcaacatattctttatttcgtccatattttcttctaactcctgtctttttgccatcaaactcccaatgcggatgaagtgtttaacgtaatcagttctttgaaaaaactttcgatgttctatgcttgtcataatttgaacagctggggcttatggaataccatgtttcaggatgtacaagattctgagactaacttaccaccagaagcacttaagtattgtttaagttcctgctattatttcttgctatggggtcttagagacttggaggtagctgccgaaggaggtggtctaacgcactctggaattcaagacatgagggataaactggacgattttattgaagcttcacagatgctgattaagtcttcaccacatattttaatcaaggaggaagcatatgttggcctatgcgatcttctgatagttttcagtgaacagttgcacggaagttcaacatctttgagtgaattaatctgtcgaccggacgtgaatcttcaggcattgttaaacgaatttgttcaaacgtacgtatttgttcctgtacaagactcagaacacgacgaactccgcatagaaggcctccacaaacggcgtaacttcttagccgcgtactgcaagctgattgtctacaacataatgccgacaaaagcgggtgctggcgtcttcaaacactacgttaaatattataacgaatacggagatataataaaagcgacattaagtaaagctagagagattaacaaagtaaactgcgctctaaccatgtgcttgagcttaaatatgatgtttaatgaggtgcaaaaattaagctcgggaaaaatacgagacaacatgaagaattcttcgctttgaagg

SEQ ID NO: 7770 - DNA, 1311 bp, Diabrotica virgifera
  SmartBlast Evalue=2E-96; Info=autophagy-related protein 9 n=1 Tax=Nasonia vitripennis RepID=UPI0001E18E29
gggcaataaataatatttatttacgaaaatttcatatgtacaatgcttaaattactcatcgactagggcgcctaacgtttgacaacaaaggtgtagtttcttccaaagatcttacatttcttgaccgtcgcgaatgcagagctatggcacttttcctcatattaatagaagccgccaagtcagggccttctaaccaagttacagattttcgtaaactcggagcagcattggtatcactgtcgaaccataccacagacttttctggtcgacttttgatactatcacttgcttgataagtcacatctgtagtgctagccacttctctatcccctcggaatagagatctagttcgcattacggactttctaggtaactgatcgtcgaaatgtacttgtgtcggatagaagtccaagtcggaatcgaacagattgggaccagcctcttcttgaacagaatcgataaagtcttgtgcatctggcggaggaacccatgcgggattagtcgtagtgaaatggattagcgatagttcgactttgccatcctctccttgcaaatattgatcgccgtctatactacctgatgtaggatagaaatgaggatcgacttgccattgtggattgccgtgtttcttaacatccatctcggcaaaactacaaacatctccaacaccaaccacagatactgtaaaatttctaaaaaagtccacaaactccaaagatcgtggatacatccaagtcatcagtattaaaggtgtcattatgggtgatataagattttcaaatatcgcaacgacactcatttgaaatagttcctgaaaactttttcttacccgcgatgtgtgagcctgccctttccaatctgatggtaaataatgcgtatgaaccactacgcattccaatagttgttcagggcaccaaactatcgtttcatcaggaaccaaagatctgcagatagccgtaagacctcccaatcctgtcattacagataaaacatgttctacagcaagtacatcttcatcgtacagtgctagtgctattaaaacaataaataatgaaccgcaaataaatcctacatatctagcaattatcgaggtgatagggctactgaaagcctccagatatttcgaagctggacggtacgatctggtcaatctggcatgaagctcatgatctagttcattaaagtgcctaaaatacaatttggaatagagtgaccaatttctcatacccatccgaccaggttcacgttttattagttctccgtagctgtagaaagtgtatagaaccagccacaaaaacacaactggtgcga

SEQ ID NO: 7771 - DNA, 1311 bp, Diabrotica virgifera
  SmartBlast Evalue=4E-70; Info=Glycerate kinase n=3 Tax= Cetartiodactyla RepID=GLCTK_BOVIN
ggcatctgtcggaccatctataccatctgttccgcaacttagaaatgaaatatcagccccttttatatccagcttattaacttccatcgagaaggccagggctaattgttggtttcttcctccttttcccgttccctttactacgactgtcggctctcctgcaaacacaaaacaaactcctttggtataatccatatccagaacttcctggatgaatccctcttcagcacgcaaaccctttgaaaaagttcgtagaaaaacttggagattgtccttgttcccgagatcgctaattacggaagcgatgttgcgtgcaaactcggcataaatcttgctaatttggcccacatctccctcgatttgtgtcgaaatgatggctgattgaaagcccttgtttattgcttcatgtttcgcggcttcggctgctattttgttattacctatcacgtacgtcttgacgtgctcgtattccccatttgttaccggacatcttttctcgtctcttttctcggttgtttcgatcacactttttatcgacgttggaatttcgccatctagccggtatttcttgagaatggtggcagccatctctgacggatccgtgttcggcattgttgggccgctggctataaaatctaatgggtccccaataatatcggatagcacgaaacaaataatgcgacatggataggccaattccgccaagcctcctcctttcacaatagagatttttttgcggacgcagttcagttcgttgatatcggctcctcttttcgccaagtccttaactagattttgtttttgtttcagagttattggaggaacaggaagaggcagaagagcagaaccgccacctgatacgagtacaatcaataaatcatcttcgttcaacttctcggccaattccttaatcatctcggcgccctttaaggccatttcgtcaggtagattattcttggcaccctcaacatattcaatcttccaccctattgctctttcatatttttcaaatatgcctactggcacattcacaacccccctctgtaggttacttcccaaaatgcgctccaattcagaagccattccatacacagctttaccgaatcctaccacatagcaggctcgttttaaattataactttcacctctcaccgttagagtgcgctgatgcacatttacttcattttgtatcaaatattccggttgtactgattgcacggatttaataaagatatcacgaagaactgcatcgttggacataactctattaaacactttcactatatttgtgtttgaactcgagcacgtgct

SEQ ID NO: 7772 - DNA, 1304 bp, Diabrotica virgifera
  SmartBlast Evalue=5E-85; Info=Protein SDA1 homolog n=8 Tax= Sophophora RepID=SDA1_DROME
caatgtcgctgagcttcactatttccgaaggattgccaacaggtgtctcttctattctttcgttttactccttttttcgctataactacctgtttccttagatttgctgcatcaatctttttaaaatcttcatctgtcaagattttctctaaactgactttttgagcttgttccttctttaactttattgcttctgctttattcttcgatttttccgcttgcttctcaactttggacttcttcttttctttcacttgaccatcatcttcattaacatcatcttcttgcccctcgtcatcatcgtcatcatcttcctcatcctcgtcttcaccttcactacctaaattattatcgtcatcagaatgttggatatcaatccattcttcatcatcagatgctgattcggaatctgaatttacttctatgtgggttttttctgttgaaagcaacacctctgcgcctggtataaagtcatgagctttaacctttccataatcaagctggtccatttcttctgttgcctctgtaggtcgacctctatcttttttatgtaaaagttcagagcgtatatttctgaagagttgaattaaagatcttgatgccatcataacagatctatccctataagttttatattgagccaagtcttggaccaaatcctcatccatagccaagggacacctagcacaaatctctttgacagcatttaaaccaatagcgataacatcagatgaatttctttcagttatgaagttattggccagagttttcagcacaggctgtagcacatctggtggcaccagctcatggctagcttgtgctgcaaattgtaagatcctggtgacttcacgctgatgtggctgcataaatctctgaatgtatggatagaagttgaatagaaagaggtcgtgtaagcctataagcctcgatatgacatccaatgtgagaagcttgacttcgaatctcttgttggtggtttccagttgtttaaaaagtctttcagccataccttgaggatcgtaagtagatgaactgcagaaaagttaaaagctgggccttgtgatttcttcttttgttgcttcttagctaatttttttactttgtccagttgcttctccctttttcttgttttcttattgaatttgttagccatcattacttcttttggatcaacttcattgtcagaatctgaatcatccgagtctttttcatccggatctttccccaggaagaatttcaagcaagtaaccattaccttagttattttagtagaaacatccagtggcaatcacattctacagtct

SEQ ID NO: 7773 - DNA, 1311 bp, Diabrotica virgifera
  SmartBlast Evalue=1E-148; Info=Cationic amino acid transporter n=1 Tax=Culex quinquefasciatus RepID=B0X5U9_CULQU
taggaatgcaaaagcgacagttggaatcaaaattgtaaccttgttcgacgaaccattttcgtgtgtccaaattatgtcatttagatgttagtagcatgtctgattccaaaattaccgaacaaaatgagaaggttcaactcaaacgagaactgggcttgttctcggcaatcaacttcatcttggccatcatgataggatctgggatcttcgtatcccctgcatcggctttgaaatactcaggttcagttggaatgtgtatggtggtttgggtgtcatgtggaataatctcattattaggtgctttatcttattcagaattaggtaccctcgtacctagatccggatcagaatatgcatacttcatcgactcatttggtcctctacacaagttttggggacatttgccagcgtttatttattcgtggattatgattttagtcattagacctgctgaaattgcgattttggttttaaccttttcacaatatttgtgtcaaccgatcatcgaatccttatgttttgtaaataaagaagaaatgagcgacaatgtatataagatcgttgccctggttgccttaggaatgactacttacataaacgtaagtagtgtgaaactgtacgtaacgatacaaaatatctttggctcctgcaaagttatcgcttgccttattgtgatatgttgcggaatttatcaaatatttttaggaaacataaataatttatctaagggttttgaaggaacaacaacatcaccgaaagactttgctttggcattctacagtggtttatgggcctatgatgggtggtcatcagttacagttattacagaagaactgaagaaacctgaagtcaatattccaagaagcatttatatagctgttcctttggtaacaattttgtacgtttttatgaatatttcttatatgactgtgttaactcctagtgagatgataaacgcgcaagcagttgctgtaacattcggcgaaagaattcttggaaagttttccattatcataccaataggtgttgctctcagtacgtttggatgtgcccttagtttacaatttggagtaacaagattatgctacgtatccggacaagatggatttatgctcgagagtttatcatacgttcactacaaaagactaacacctgcaccagctgttgttctacaaggttttatatcatttttatttatttccactggcgaaattttagagttgatcgaattcgccagttttttgatatggttcttttacggagtggctatggtatcactaatcgttatgaggacaaccatgaaggatgctc

SEQ ID NO: 7774 - DNA, 1309 bp, Diabrotica virgifera
  SmartBlast Evalue=1E-129; Info=Chitinase n=1 Tax=Monochamus alternatus RepID=A4PID4_MONAT
actaaacaagttatcataatgaagatacttatagtgctttgtttagtagcaatcttttgcactgctactaccttgggttcaggaaagaacatcgtatgttattttgccagctggacagtttatagaccgggagatggatctttcgatgtgcgtaacatagacccatcgctatgtactcacatcaattttgctttcattggccttaacgaagatgcctccattaaaattttagatccatgggagtcaaatgatccctcaggttacggtggctttaaaaatctggtagctctaaaaaaatcaaatccagatcttaaaatatctgtaagtatgggtggttggaatgaagggtcagagatatattcaaaagttgcttcagatgcaatgaagagaaaactctttgccaaccatgttttacgatttataaaagagtgggactttgatggatttgatctagattgggaatatcctggattgagaggaggagattcaaccatcgacaaggacgattttactgcacttctcaaagaacttagtaatgttctcaagcctaaagggtatttattatccatagcgggagcaggagcaattgaaaaaattgatgaagcatatgatattccagcaattacaaagttaatagacatgatcaatgttatggtttttgatttccacggtgcttttgacgattatgtaggacatgtctcaccactttatcccgctaaagttgactacgattactatgataatagcacatacaatgtagatgtaggaatccaacattggttggaaagtggtgcagatcctgcaaagataaacttgggtgttatcttgtatggaagaagctttactttggctgatagagataataccaccctttatgctcctgttaaaggtggaggtagagttggcccttatacacaacaatctggatatttaggatataatgagatctgcaaatactatactgactcaacttacgtatgggatgaagaacagagagttcctcacagatactggggtgaccaatgggtaggatttgaagatgagaaatctttaaccgaaaaagtaaactatgctcttgaaaataacttgggaggtatcatggtgtggtcacttgattatgacgattttagaggagcatgcggtgacaaatatcctctattaaaaactataaacaaaattaacaattagtgtaatatttattatttaaaatttatttatttatttattctagtaacatgtgttttttattgtttaaaatctagtaatttattattgtacataggattctaatattaaaaagtgaaaacgt

SEQ ID NO: 7775 - DNA, 1301 bp, Diabrotica virgifera
gtaaatattgataaaaataggttgtaggcaaaggctgtatatgaaggaaaattaaaatattacatataaaactagaagattgcaaaagcagcagcttttctagcttttggtgatcttgcggcagccttagcggtctttggcaaagatgcctttgattttttcgtaagaattcctttattcaatttcttcgctttggtttatgtttttactttggcctttgcgtaaatccgaactacagatgaagatatcgcagttttatcggccttttctcttactttaatgaggtttttttaatactttacacattttgatagtttttttggtttaagtggttctatagctttctttttttttcttgaactaatttttgcagattgttacattggcgtccaacgtggagctcgaatccacgggcctgagattaagagtctcatgctctacgatgaaagatgaaaccgttgatcctatccatgaacaaagatctccttctccacagagaggcacttccttacttcctaagaggatacatcctaagaggatgatcttccttttatagcctttttgatatcctttttgaaaacagtccagggggacgcacctgcctatcctacctcaggcaactcatcagacaaggagtttaagttcttcgcatggtttcgcactgttttcacttacacaccaaattatcttttgatcaaagaaaaacaaaaaacaccaaagccaaattcacaagcagccaggaaagctgtaagcagaaaagtgttaaaaaaagaaagaaaataggagatttgatgaagatttttcaaagaaaaatgttctgctataagtaccccacttactggttgattaaattgaacttgagtatttcgtttattgttatttttggtctaaaaaatgttgagcaactatttgccccactctcccctaaacaaaaaattaacaggatagtatgtgtggtatgttaagtaaaaatgtatccacttttaaaacttaaaatatttatatttatacaaagagtttgttatcattttaaaaggaatttaaaaaaataataaattttatcttggtcaaaaatacggttaatatagtagataaaaaattatcatcttgaaccttttgtttttcgtatgaatacctctatataagattactatattcactttcagtcactttagtacatttttttgtggttcttttttcattttatgatatgtaaatattaatataaaatttttgaacactaaaatactttcttagttaagtttaagtttagaacactatttctagtacgaaaacacaaa

SEQ ID NO: 7776 - DNA, 1308 bp, Diabrotica virgifera
atgtaatataccttcagtttattttgacatcaacagcatagattgtacaagctttaaacaagaagatgtcctcgttatataaattaacaactacaatttacaaatctgacattgtcaatacagttctgtctgtgaatacaagtcacaaattgtttaaactcatggttataagttaaatctaaaaaattaagactgattttcctataatataaatacatcaattaaaatgaataatccatagaccaaaaatatttcaaaatcacccaactacaaacgtacaataaagaaattaaaaagacaaatgttacacaactaaataccttgtaatcgcccaatctcatcacctaaatgagactacattcatacaataaaacgttgtatgattttgaaataatttttagaaatatttagttcggtgatgttaattcgaattatacatttaatgcagaatctcctgttacataaataaagtcctttgcttctgtctaaacagaatgcagataaagaaaattacgaatatattgaaacaacaaaaaacaatttaaaacaaagtaatactgcatacaacacagattattttttagtacatatacgatcacgtttactactttataagaacaaatttatcccaacaaaaattttagtacgtaactaaaagtttgttgctcttttttttcttccaaatttgggtttaaaatacagattaattactgctatccaaagtgtaaccttgctacacttaatctgattatctgagctaatatatgttacatttataggacaagattaaatttatattttaaataaattatctctatattttactctatttgtagcgcaaacgccaataattatggtgaagtttcgtggcgtaccctgttgaaaatacgctactgaatgaatgccgagtttcctatagtttcactgactccatgcgaaatatttcctgataaaattggtacaaggaggagtcatgcattcaaataaatattgtttctataaaacatatctggcataatcttttaaatataagtcatatgggatttaaaacactggaagacatttgatttttatttaatttatttaataatatttaatttttgcactacttgctaatttatttcagataataaagaagttctttgtaagggttgttttgtttcaatacggaacaaaaacaagagatgaaagtataagttaataagtgtaatgaaggacttctcttcaaacatgcatgtaaagtttgtattttagtatgaaaatcacctctgaaacaagcacttcagtagaatggtaaacagacatttc

SEQ ID NO: 7777 - DNA, 1309 bp, Diabrotica virgifera
  SmartBlast Evalue=5E-53; Info=Acid phosphatase-1 n=1 Tax=Aedes aegypti RepID=Q17E63_AEDAE
gggttgtctggtttattataattttgatatagaattttaaaaattttggtttattataatgaagtttgggtattttaagaaggtgtgcagatttcgttccatttcttataatctaccacaatgtcttttaaaagtaatttaaactgatcgagtgggcaatttacattacagttttttactttgatttgcattatatcagaactatctctgctgaatacattaacataaaaattgcccgacatttctttaagctccatccatatagaacttgcaaatgttggtacgtaaggggtatcaaaagctccaaaacaatttaaaattgaagctatgttctcatcgtgtgcactatatgttataatcttgggcgtcgatagtgtgttagaagccattgcatcaaaatacgtaataatttggtttaagagtcttccggcacctagctgttttagtaacgtagttccagtaaaagatttgtagcttagtgcatttagataagtcaaaggttccggataaatcgtatttgcccactccggtagctgcaatccaagtttatgttcagtgtccaggcagtcaaacacattccatgtggaaagtgcgtcagttatattttctccagaatgcttagaaatatattcatacgtggatttgtatttttgattaacagctgcgtattcttcggtcttccatacttcatccacaagttgtacataattggcgcattgataaggttcagagtacaaaatattcggatctgcaagttgcaaaggaattggttgccatgataagttttccttccaaatctggtcattttttgctgggaataatccatatagattgcattgacctgacatgtgggttctgtcggagtctgttgtatatgcggttattacatctttgtcgtacctctccggtaaaaagtctgcataccgctgtcttgtaaattgaccaagcgaatagtgctgacgttttccttcattcataagttgtttggcaccaagtccctcccatattgataagttaaaatgaggatcatttttgtaaaatgaatatggagttcgtattccgtgacgataaatctgaacaacagctacaagaatattagagcctccatcatcaaattgatttacttcttgtatgctatcacttccgtccaacttaattagtagaatacaagtaatcacaatagctttgactagacacatgactctagacatttcagtttcagtcaagagatatttttaaaatggcattatctcaaaacaaacaactgattggtagatggcagatatgaaatttattaattgtatgaagg

SEQ ID NO: 7778 - DNA, 1303 bp, Diabrotica virgifera
  SmartBlast Evalue=9E-74; Info=Serine protease P8 n=1 Tax= Tribolium castaneum RepID=D6W9Z5_TRICA
ggtagaagtgctatatgttgttcgcctgtgtcctttatttggaataattaaaatagttgatgctcaacgtggaagcacatgtactacgcccaatggagaattagcaacatgtgcatcaatttatgactgtagtcattttgtgaaagcaataagaaatcgcattccatcacaattaaactttgtgaaaaagtcacaatgcggttacgacacggcacctttggtttgctgtggttctgctatcgaattttcaactactagaaatccaccttcagatccagtgggaaattcaaatccagtgggaagagtacttccagccgcttttactagaagttcagctcttcctgacagaagtacttgtggttttcagaaatctgatgagaacgaaaaggtagaaggacttatttatggaggagtagagaccgagttgaaagatttcccttggatggccttattaggttacagaacgagatacggaacaacaaagtgggcttgtggaggtacactaattagtcacagatatatcttgacagctgcgcattgtgttacaggcgaggtttcaacctctgttggacaacttacgtacgtcaaattgggtgaacacgacaagactaaagaaatagactgtgataagaatggaaattgtaacgagaaacctgtaattactgggattgagagagtcatgttccatgaaaagtatgacgctactgacagaactagtcccaatgacattgctgtcttacgcctaaatcaaaggattacatatacagacttcattagaccaatttgtcttcctgagccaaacgaaggttccactagagatgactatctaacaactgcaggatggggtttaacagaacatgatgcaacaaatgtcaagctcaaggttgagattcctttccgcacgagagacgattgcatgacggcctttagatcagccagacttaggctaactgaggcccaaatatgcgctggaggagaagatggaaaggattcttgtaaaggtgacagtggaggtcccttgatgaaaagatcaaatgaaaattatctccagtggtaccaagagggaatcgtttcatttggaaatgaagattgtggtacagcaggattaccgggaatctacacgaaggtttcaaaattcttatcatggattcatagccgagttaaagagtagtgactgtaaaatgttccatctaaataaaacaaatgtatgcttaagaatggttgggccttaataatgtttatcattaggagttaactattttttaaaataatgttttgtatatttattttgaataaaaagtct

SEQ ID NO: 7779 - DNA, 1301 bp, Diabrotica virgifera
  SmartBlast Evalue=1E-58; Info=Pol-like protein n=1 Tax= Biomphalaria glabrata RepID=A3FMR3_BIOGL
tcatttttgaatataaatctactatattttagagttttctttttgtatccaatattttttctgtcaagtctgctaaaaaacagttgatgtattttggaaattaaacttgcctttttttcatacaatctaactaaaaggttgatgccaagtttttttcgtcttatatccatcggcatttcacagcattcaacttgtagattatttatcggtgtacttcttagggctcctatacacaatctaagggatttattaatgattttgtctattttatttaaatgacactgtgatgcgtcactgtataatattgatccgtagtcgaatatagctcttatattatttttaaataacaacaaagaaatatttggatctgctccccaacgtaagtgtgatacgaatcgaagaaggtttattcctttttctgtttttttaactatatggtctatatgttctttccagagaagctgtctatccagagtaatacccaaatatttaacataactttgtacaggataggatatattgtttattaagatgtgattgggtatttcttttcgttttcttgtaaaaatacataatttggttttggaatcagatatatttagtccatgtaattcactccatattttaatatgtttgtctccttcttcaatggatttgactgcattttctattttaatgttttcttgataaataactatatcatctgcaaattgtaaaatttttgttgagtttaaatttttttctatatcagaagtgtaaattaaatataacaaagggcttaatattcctccttgaggtaaaccacccatcgctactcttggaccaaatgtgttattatttaccgatatataaatttttctacagtcatacaattttattattttttgacagaagcattctggcagacctatttgtatcattttgttatatagtatatttaaattaacgttgtcgtatgctgcttcaacatctaataaaagagcgattactgaagaatttttcgtaaacgctaaatttatatctgttaccaaatgactcacagcttccacagtagaatgattttttcgaaatccaaattgtgtttgtgataatttattgtttttttctagccaactttcgagcctaagttttatcattctttccagtgtttttgttatgcaggagctcaatgaaatacctctataagattctgctgaatcaggattccgatttgttttgagaataggaatcacccggtactctctccagttatctggaatatcttctgataaccatatttgattaaaaaaatttaatagtgt

SEQ ID NO: 7780 - DNA, 1307 bp, Diabrotica virgifera
  SmartBlast Evalue=1E-125; Info=Chitinase n=1 Tax=Monochamus alternatus RepID=A4PID4_MONAT
gtaagttatcataatgaaactgtttataacgttttgtttagtagcaatattttgcactgctcctacctttggttcaggaaaaaatatcgtatgctatttctcgagctggacagtttatagacacggaggagacggagctggatctttcgacgtacgtaacatagacccatcgttatgtacccatatcaattttgctttcattggtcttaacacggatgcctccattcacattttagatccgtgggaatccaatgatgccggaggtcctgagggttttaaaaatctggtagctctaaaagaatcaaatccaaatcttaaaataattgtaagtatgggtggctggaacgaaggatccgaggtatactcagaagtagctgcaaatgcaatgttgagaaaaattttggccaacaacgttgcatattttctaaaagagtggaactttgatggatttgatctagattgggaatatcctggattgagaggaggagaaacaactattgacaaagacgattttacggcacttctgaaagaacttagcaatgttttaaagcctaagggatacttattaagtgcagcagtagcgggagcacatgagaaaattaatgaagcttacgacattccagcgattacaaagttactagatatgctcaatgttatggtttttgattaccatggtgcttttgacgattatgtaggacatgtctcaccactttatccctctaaagttgattacgattattatgataatagcacatacaatgcagatgcaggaattcaatattggctgaatggtggtgcagaccctgcaaaaataaacatgggtgttgtcttgtatggaagatcctttactttggctgataaaaataataccgccctttatgctcctgtcctaggtggcggtgaagagggaccttatacacaacaatcaggatatttgggatataatgaaatctgcaaatactatacagactcaacttatgtatgggatgaagaacagagagttcctcacagatattgggatgaccaatgggtaggatttgaagatgagaagtctttaaccgaaaaagtaaactatgctcttgaaaataacttaggaggtatgatggtgtggtcacttgattatgacgattttagaggagcatgtggagaagcatatccattattaaaaactgtaaataaaataaatggttagtgtagtttttattatttaaaatctagtaacatttgttttgtatattgtttaaaatctagtaatttattattacatatacataattcccttaattaacattaaaaagtgaaaatgt

SEQ ID NO: 7781 - DNA, 1285 bp, Diabrotica virgifera
aacgataaaatgattagccctcgagatacttgaaattaaaaaatgaagcgacacaatacattaatcaaaatgtgttgtttcatttttaacttcaaagatctcgaaaactaatgaccccatcgccacgaatgaagagtatattattttcatagaaagtattggagaatccaaaaattgaactaaaacagcaattccgccagtggcgcagaatcttgaaagggtcaaccattcactctcccccgtcgtacgcctctggtaatagccagaaacgtccgtttaacacaatttaatagcttgtacagcacctatacttcctgccagtatgaaaaggatacattgaatagttttaaaatgctgagcaaaaatagtttttaaatttttagataaaacaccctgcaactaaggaaccacattttattaagtgttctaggtcaaatcttcgtaccctgcgccaaggcctctccagccactatatggacaattatcaatgaaacaccctgtagatgtatcgggtaactgttttttctttttttattatttgaatattgagatcacaataactagagaaactgtagaaggaatcaagcaagaaccatttcaattgcacaaagattgtaacaagtggtattttcaatttattattgcatgcaagatacgggataagtaaaatcaggatacaaaggacgatctacgataacagaagttgagttacttcaccgactaaggccatgatgtagctttgatcacaagaacgagcaacagcttactgagactatttaaaccaattgattattacttaaagataatataaactctaaacatgaaaagatatagataatggaagcagagtatttactgctttgttgaagtggaagaatgcaagtatctaggtataactggtcaattaaaggaccattatgactgactagaatatattaggtaaataactgaaataggaagatggacggttatctacactgcgcgtcataggacaccctaaaaaatgggtaatttttgaggtcgcgtgtctcccaaacctgttgtccgatttaagtgattttttgaaatgttatagccccattctttgtcaaatcagtgtaacaacacttttgccaaacaggcaaattctcattgtataccgggtgtacgactcaaactgtgtttttttctcaaagttcgcaaccacctgtggaatatcccagcatttatcaaaaactgaaactaaaacccaactacagcctcaggtcttattaacattctgtttcttttattcattcgcttacgc

SEQ ID NO: 7782 - DNA, 1300 bp, Diabrotica virgifera
  SmartBlast Evalue=2E-80; Info=CG5976 n=6 Tax=melanogaster subgroup RepID=Q0GT88_DROME
gaagtaaattcaaatagtgtgtgtagttcctgaaatgggggtttttaggtactggtggggctagggattaccgtttataataatttttgctttttagcttttagttgtcattagacatcagtaggtaaagtgtttatttgttttagaggacaacttttatttttaagattatgatttccacaatattaaagtccctgattgtggcaacagtttttttttgaaggaaactgcaatcagttgaaaaaaattcaaatgagccaccaatctactcagctttctgaaaatgccatgaggtacttatcaaaactatcaaatgttaagtacactaatgaagttctagataatattttaatacctcgtgttgttggaacatcagggcataagaaagtctttgagtatataaagaaagagcttaaaaacctggactggaacgtagaggttgatgagtttgaagatgatactccaaagggtcgtctgatatttaaaaacattatagccacattgaatccaaatgctgataggtatctagtattgtcttgtcactatgatagcaagtattttgaggatattgtttttgtaggggctatcgactcagcagtcccttgcgcgatgatgttaaatttaatcaaagtaatggacaaagaattaaatcagtacaatcaaactctttaagtttaaaacttatattctttgatggagaagaagctttcgttgaatggggacccaaagactctatatacggtgctaggcatttagcacaagtgtaccaaaacaaaatagaaacaagtcgtgtatctggtgaaaggatcaatgaaaatcagaaaatagatatgttgattttgttggatttgattggacataaagctacaagattcttaagtacatcacgagaaacggaaaattggtatttacgccttgccaacattgagactcgtttaggaaacttgagcttactagaaggttcacaaacacgttttgtaaaaaggcgtcaatatggaggtgtagaagatgatcacataccatttttacaaagaaacgtaccgattctccacttaatatcaatacctttcggatcaatttggcacacggaatacgacaatcgagatgcaatagaaatgagtgtagtggagaatatcaacaaagtgttgaggatcttcgtggcagagtacttaaacataaatgttgaagaagacgaaagcgaaaccatccccgataaagagctgtgattcgaattcaagaaatagttcagtgaccgtccaagaagactggcttttttatttctatgtaattactgtataat

SEQ ID NO: 7783 - DNA, 1301 bp, Diabrotica virgifera
  SmartBlast Evalue=4E-53; Info=Acid phosphatase-1 n=1 Tax=Aedes aegypti RepID=Q17E64_AEDAE
ggtaagtgaacatgaaaaagaattacctaagaaatttaaagttctagtcataaaaaagttataaatcaagttctaggtaaattaatataaaacacgtaggtaattttcaaattttaagtgttcatcatgacgatgccaacaaatattattttgttgctgtgtttaatatttgcagtcattgaaaatgacgcagttaatgattgtaatagtgaactagtggctcttgtacagatatttaggcatggggagagatcacccatcacattttactcaactgatccatatgcaaatgcagcttactgggaagatcttggcggtgagctaactaaccgaggaaagcgtcaacatgaagctcttggtcaacacacgcgaaatgtatattctgattttcttcctacaagattcaattccaatgtattatacgctactacaaccgacgtacacagaactcacatgtctggccagtgcaatctttatggtatgtttccagcagtaggtaacaacatctggaaggaaaaccttaactggcagccgattccgcttcatcaagcagatccatatatatttaatggaaatccagttgactgtccaaactatgacctagtgtatgctgacttatggctgcgaaaaccatatgcagcgcttttaaacaaatatcaaagtgtgtttgaatatctaactgaacatactggtgacaatgtaacagattttttaagcgctcttacagttcatgattgcttgctgatcgaagatggtgttggttatgaactgcctgaatgggctagtgaagtctatcctgaacccttagcaacaatggcagggattggctataagtctttgactgatacacttgaactacaacaattttattgtggaacactcgtcaacgacatcgtagaataccttgatgctaagatctcgaacccgctggatgtagagcaatatcgaatatacagcggacatgactccaatattgcagcgctcctaaatactttcggagcatttgatgaaccctattccccagcttttgcaagtaccatttacattgaattaagacagcgcgaatccgacgacctctttgtgaatgtatatagcaagaataacgatgatattaagaagatatcagttcggaactgcgcttctgattgtccttttgctcaatttaaggagcagttatcaaatgttgtactagatgtcggtacttttaaagaaatgttcaaagtctccgacacaaatattgtaataactgagcagcaccaaaaaattattgacagttatagaaaagtaaaaaagttattctc

SEQ ID NO: 7784 - DNA, 1304 bp, Diabrotica virgifera
cacaggtgactacacgttgtgacatttttgaggttagatctcgattggttactttcatagatatataatacctagactgcgcgctgttatcttaaaatgggtgaatattgcgacagagacaaattagcataaattagagataaatacatatcggaggagttcatccactcgacgatagtggaaaagtgacatgatcgacaaacccaacgtcattggataaaccccatcgattagaaagagacttcccacctaatagactcatttatctctgtcgcaatcgtcacccatttcaagatagcagcgcgcaatttatggtattttggacctaacctcaaaaaatgacagaacgacatcaccagtgacatactgtatccttttagattgtctaagttggtttatttttacttgtggtattgctgcctaagtattcaatcgctattcccgttcaacagacaatcaatagcaatcatttttcgtttaggactaaaacttataaaaataaacaataacttgcaacataatgcatacttttatttgcaatgcttgtaccaaacatttgtatacaaccttctcgaaggtcatctataatgtttgcgacgattcttagcataggttcagaattgtttcctgtatactcttttttatttgtaattttcatatacacgaactgttctagaattggaacggtttattgttgaggctaaatggtaaggaaaatgtacatactaaacaattcttttgggaaaagaatagagatggaaaataatggtatttttgaagatccaaaagacgggactggaacagttgacttatgccagttggaacacggtctttactaatggaataaaatacaagctaaattgtgaatgaagaaatacattgtgaagttattgactcaaaccaaataacagaaatgactcgaaatattagtggtcacattatggttgactaactggaaacagtttgcaattcacgtgacttggtgtcctaccagaaattacgaattagtgtaccaatatgggtgtttgaatgagctgtctcaattcgaagaataatgtcgcgcatatcagatataagtagagaacatggatttgatctcaatacggaaacaacaaaagtacagggtagtcagtaagcgcgaaatattaaatacatggcttttggttaaccaacaagaaattgacaggaaggacagctgcacatatcttagtacgaacgaaaacagccaatggcaccacccgattgaaatataacaacctataggaaaagaaagatcagcgtttctttaacaattgtaagttctt

SEQ ID NO: 7785 - DNA, 1304 bp, Diabrotica virgifera
aatacaaatatagcctatattctattaatattataaattttcctaaacatccgagttttagtaaaaaatagtacaattttcgggaaccgtatcttgtaggtcagatttttgaaatccatcatcgtctacacaataatagtaatccgtatcatcttgtataatactttgatatgatctgtaattccccgaacccaaacatcgtagcccatgtttgtaaagaacgtagtcgcgtgcacatcgacaatttaaactggcaaaatcatcttcagaattactttgatatgcactaatttttgacccatctctccacgtgcaataagcaataccatcactaacgttatacactccataagcaccatctccatcacacacacgtactcccaggttaatatacgtaacaccatggtttttaagagcatgtgtagttttagccatagcatctgcaatgctgtcacactgtctcaaatattgactgcctgtagttgcaacctcatagcagggtaacttgttcatagctttttctggtactatagttgaaaccaaatctcctgttttttcttccgcgcaccaacacaaaccactgtcacattgtaatttttcataatttcccaaactattacagtgcaaagctacatagtctcttccactttctaataattcagcttttctcctactacaagcacaagtcatatctgcggatttagaatgtctagcttcaccaaataacctttttccgtgtttatcgaaacacatacaccttccactgacgccacctttgcattgctttgctttccagtatccgtcaacttgacaagcgggcttaaattttatggcagtgaatttgttgtagcggaaatctgaagtgtttgcatgataagccatgcaactattaagatcaggaacacaagtattttgacatcttgaccacgggaatgctttgcagtctgcgtcaactttacatgttactttaacagccgcattacttgccgaacatcgtttcgcacacatatatcctggaggacagtccgggggacaattttttcttaaatatccagcgtcagcatacagctgacatcctggaagacaggtctttgtatctactgtgtaaaaatatgagcttgttagcgtttgttggtggatgcaatcgtcaatagaaaagtccgtaactaaaatgtcgttacaggtgtctgtacattcttgtctacagaaaaggaaaacaagcataaacaaaagaatcttcattttgattcacttctagcactaactaagattattttgatagatttaactgactgatggaaata

SEQ ID NO: 7786 - DNA, 1255 bp, Diabrotica virgifera
aggcaaggaacaaagatgcagcagtgtacgcatccgaagtagaggaattagcggaacagttgaaggtagcatacatagcggaaggaatgccattggagctagcgaaaaaatacacaacggaaacagttgtagcaacaatgaagcgaaacgttaatacggatagagctaagttaatactggaggcaggtaatttcacaacaccgcaggaagtagtatctaaatttttatcgattgatacgacagaggagaacacacagggaagagtgttcaattataggacgaattatgaaaataggagaggacaacagcaataccgaagaggataccataacaaatacgacagaggaagaagaaataacttcggacaacggaacgaaggagaagaaacaggaaaccaacggaattattccaacagaggatatagacaattcaacaaccaaacgtacagaggaaccagagaggaggacgaaacagaaacgtaaggctacttgagttagaagacagccaagaggaaacagaaaaccagcagttggggttttgaatgaacgaaacaaggaaagtacacagtcagaagtggaatataacatttacaacttcgactaaacctaacgaattttgtacgaatgaaaacaggaattctagaaaacacaaaccttttatcatagacacaggagctgatatttcaatactaaaatgttcacaagattttatgaaggaacatgtgaaaccaaacacaaaggcgaaaatgaaaaggagtcactaaaggagagttgcaaacaatgggagaagttgagacaacactagaagtaaaaggatctcgattcaaacacatctttcaattggtagaagctagctttccattccaacagacggaatcattgggagagactttatttctaactttcaatgtatactagactacgcaaaccttaaaatgcacattaaagaggacaacgattgttacattagtacgaaaattctggataatatagacaacgacaccataataataccgcctagatgtgaaatttacagaatcgtcaaaaatttttcaaacgttaaagaaagacaggatagtggaacagcaagaaatacaaccaggaatattcatagcaagagcaattatttcaagtaataatccatacatcaaaattttgaacacaacgtacgaaacagtaaatgtagacgcaagtacaatcaggacgttggatattaaactattcagtatatataggctagtcaacgacagcaagga

SEQ ID NO: 7787 - DNA, 1304 bp, Diabrotica virgifera
ggcctttgagttttctctctgcggagtggatggtgttggtgcattggaagatcatttggtcgttcttaagaactctgtagccagtaacatcgtgctcgtccagatagtaaacttgggaatagaccaaatacagtccagagtctttaatagtaagatatccgttgtttaaggtgaagtgagagtccattcccaaagaatgtacccaattagctgccttccagtctatgaatcgactctgaggatgtcttagatgaccatttcccaaataattagaatgttgaccatacacatagcttgaagtatcgccgttaaaatggacagatgctaaaggtttgaggggtcgtcttcttttagtgaagcctgtgtctctaacaattgtaaagtctgggctagatgtggatgattcttcatatgagtccagataagatcccatttgcttcaagttcgataccttcacgaccctcttgaaagggcggttgccatcctcatggtgttttacccttgaccgtcttgagaatacattgggagttttcgttgtccgtttggtattagatctgctggctttattataggaaggcgttgaagcataaggatacggatacacaggccaaggagaccctatggatgatggtctggcaggatattgtgtaactgatcctcctttaagtgtatatcttgaactcagattctttgctctcctttcagcataagactcactgtttataataacaccatcatcagtagctgctataacacttcttttagatctctgcggtgatgatgcatcttttgtcagattggcagcggactggtacttgtcatcgctgggaactgtccaattaagtttttgcatcaattttgcaaagtaattttatgggctatgatggtgtcgttgtcgggaataaagtcgttaatgtcgtattggacgatcggatccgaatcgtattcgtagggcactactacttgaggctcgtcttcaatgtcgtattcttcaaaatcttcttcatcctcaaacccaatcaaatccttcatcagattatcatcgaacagtttcacgctataaagggtttgtttgagagtttccacttcgttttccaacacttttaccttagttatgataagaaagttaaaaacgaacaaaacgaccactagcacgtacaaaaaggagacggcaaaaatggaaaataagcttttcctttgaccgccgaaagatccataatcggaaatgactctcgctttatcaattaacattttagaaagaggtgcgtgcgctattcacattaaacggaactctgatcttttcg

SEQ ID NO: 7788 - DNA, 1297 bp, Diabrotica virgifera
gtttcttggaggcgacagaacgggcgcggagagactaatgtgtacaagtctacacaaatatctgaaaccgccacggtcagacagatcgaaaacgtggttacgcgacgttgtcagatcaatcatgcttcaaaggtttctcggttttaatttgttacctgtttcacagtaaaattttctctgcgtaaattttaaacattgtgtataatttcacgggattgtggacttagtgtcctatatttcacggcacttcttatattcatgtttattaaaaaaacattaaatatattctaaataaacaactattagacgattttacccggcaatatcgcaaaaccgctggcttcgtgcacaatgcattttaaaaatgtttactctttgcaccaacgcgttcaattgaagtcctctctccttgattttctacctgtgtgaccttcgtggtttcagatatttctgtacagttgtaatgggtgccagctctgaccactgccattagcgcctccccctccaattctgaaattagtataaagagggaatgagaaagaaaaagttccttaaatattagagtagtaactcataaaattgtctgcctttgtaacgaatttgcattttaaatgtatttcaacccccatctggaccaacccggcgccgagacccgtgatagaagctctcgggtgaccaatctaaataagaactgcttatgtcaaaattatattgcctgatgtaagcgaaccttttaatatatatgatattttttgctacttaaaagagatttttaataatactttaaatgtcctaaattggtgggtaatgaacactatttattttcactataaatgtcataagttttatacatgtttataaacatatatctatatatactatatattttgtgatgtatgtaatgagttgtatatacaggctgccccaaaattaatttgacaaaagctaagggattacatctagcatcaaaatgtcaattattttctcaaaattgctcgtttttgttaaaaatatgcacttattgcgtattagctaagatttgaaggccttaaggttatacttttgcaaatttaattggaaaaaatcgtacagataccaaatacacaaaatagcttttgtcgaattaattgtggaacacactgtatatgtgttaccaatggtggcccttgacctacttgtattacttttggttttgctgcttcacagttgtttattatatctccaaaggccactactgttgacacagcagccaattgtattgtcatactcacgtctactaccgatcgtctttcacttg

SEQ ID NO: 7789 - DNA, 1296 bp, Diabrotica virgifera
aattaaatagttctaattaaatatcaataaaaaaaatcaaactactaaaaaattttaatattttaaatgcgctgtaaaacagtaaaattcgtataaataaagaacttatgttccattatttacctgctccaaaaaacgatgtggttttaactgattattttgataataaagacagttgatcaattaaaaggctgaaaaattgtataaaacatgtttatcctaacacaaagttcacttcattttaaggaagttgattattatatagaggtttcgtcatttgagatggcactaatttgcatattcttgcacggtatagaagtcaaaatttaaagtttcttcctaagcagccttagcaacagataattttaatactcaatagcaaaattcaatgtcagtaaacattcaccaactttaaagacggttcttagaccatgccttccccaataacgggccctctactgccaggtaattttatttaaccctttcgttcacagtgtcctcaattgaggacaacctattctatattttttgtattcagctccatttgtttttacccttgtaacacattgtccccgattatggacagctattccgtccaatgagtacttgtgctgccatctaacggcttttgaacaaaatatttaatttgttgaaatataggcctctatacttatgactgttatgactggtgtatacggcgctaattcatttgtttctttttcgttataatgtgaacaattgaatgtgtctcatggtgttcataaatagtagaatttgacaaaaaactattgcaaatagcggttttgcttaaaaattgctatcacggattttctgaaaagagtgtacataaatatgtactcgtttgtgacgttgtgagtcaatggaaaaattaatttttgaaggacaaatcacgaatgacatgtgacaaatacaatgttcatctctgtataagaaaaaaaattttttgtaagataccatgcattacttatcgaacaaaatacttgtcagtattcaaaaaatatatatatatatttatctttactccattgtctcacaatgtcctcaaatgagcacatcttctagtgaccaaactgtgccttttgaaaatgtaaaactaatatcaaaaattcgcaaaaaatcattcttgttaggttgccaatttcagatttttatcttaaagaaatttaattcgtgaaagaaaaggttaaggttaatttatgtgctcttcatctttttccacagcacatgatttagaccaaataaaaagtcacttcactaaagatatcaaataaaaat

SEQ ID NO: 7790 - DNA, 1301 bp, Diabrotica virgifera
  SmartBlast Evalue=1E-116; Info=alpha glucosidase II alpha subunit-like n=1 Tax=Nasonia vitripennis RepID=UPI0001A46D45
tatccaaccacatataatcaagaggcatgtcattttcatcaaaatttttaacaactgtgataacatcatcttcatcgttatagttccaacgggattggtgatatgccaaagtgtagtactgaggtaatggatgtaccccagtgagggagccatattgtttgacagcatctttaggtgtaggacccaacaaaatgaaaatatcaactataccggattcactcatgaagtggacatctacattattttcagatttacttcctgatactaagtttactattgaagacataacatttcggtccttactgttgttgatatcaacccatgtttcggcagcattaagccagaaggcgccaattgttcgtttaggagaatgagcatagacaactggaattgatccataaatggccattgttgaatctaattcatattcaaagacatccaagttgtatagacgatatggatctactcctccaggtccagttgttcttaaagaaactctatcagcatgctctggcaatccataagcccttagggcacctggaaaactgatatccaatccaacagctgaaggaccttttggtttgctgtcatgatgacttttaaagttttcttcccaacttcctggatcttcagctacttcttgtcttacttcattattctcttctgatttcttcctgtattgttcaaatttaaacagacctcttccattaacaacactgataagttcatctttgtcaaagaattcaattttgaatggtctagcatgtagtatgaccttattgttgttatattcaattgaaacatattctttgttcctttcaagtagtttaaatttggctacttgaggctcaccatttaaagcgaattgaggtctatatctcggatacaaaggagaagcctcatcaacttgcagtctaaagatgtttccattaatggcagttaatgaaaacttaaaaataattccagtttcagtgtttaaaagttttgaccccaaagaattatcggtgacttctaatgatcctagatctaattcatacttgctttcgcctggtttaacgcttcttaatcgtctgcaaaaactgctttgttcgcaagttttaaaattacttttatctactgctgatacataaagcagtattgacagtattaaaacgtacattaatttctgtcgcatgttggcaaaccggtatattttttcaaaaagcaaatcactccatataattctgctgtaactaaataactatcaatgcaagtatactgcaaatttattgatttctgcaatgcattattattgcatattg

SEQ ID NO: 7791 - DNA, 1297 bp, Diabrotica virgifera
  SmartBlast Evalue=1E-133; Info="Succinyl-CoA ligase subunit alpha , putative n=1 Tax=Pediculus humanus corporis RepID= E0VG44_PEDHC"
acgttatgtgaggtgtggactataatctgtccaggttccaatggtttaagttgtggtatctgccaaacctgcatatgacaaaattgtgccgatctcctgattattgaactcttcgaaaagaaatatattgatatattactattatcaatacaattagtataatggctacacctacaagaatattaagccgtctattggctgacggtatcaaagtgaaacagcctattagatttaatagttacgaaagcacgagaccaaatttaaaattatcggctcaaaccaaagttatatgccaaggcttcactgggaaacagggaacctttcatagtaaacaagctattgaatatggaacacgaatggttggtggagtgtctcctggaaaaggtggaaaaactcatcttgatttaccggttttcaactccgtaaaagaggcacgcgaagccaccggagctgatgcaactgtaatatacgtgccaccgccaggagcagctgctgccatcatagaagccattgatgcagaagttccccttgtcgtatgtatcactgaaggtataccacaacatgacatggtacgagttaagcacaaattgttacgccaaaataaaactagactgattggacctaactgcccaggtataatagctccagaacaatgtaaaataggaatcatgcctggccatatccatcaaaaaggtgttgttggtgttgtatcaagatcaggaacactaacttatgaagcagtccatcagactacccaggtcggtctaggtcaaacacattgtgttggtattggtggggatcctttcaatggaaccgatttcatcgattgtttagaagtattcctgaaagatccagaaaccaaaggaataatactcattggtgaaattggaggtgttgctgaagaacaggctgctgattatctgataaagcacaactctggttcaaatgctaaaccagttgtgtcctttattgctggtctgtctgcgccacctggacgtcgtatgggtcacgcaggtgctatcatttctggaggaaaaggaggtgctcaagacaaaatcaacgcattggaaaaggcaggcgtaatagttacgaaatctcctgcacagatgggcaacgaattgttgaaggaaatgcgtcgtttgggattagcctaagtatgtttgactgtatgatataaggctccttattgttcggttaattattaactgcatagcctctattcgttatttttctcacctgttcttattgtgtatattccaaaattcacgtgtaataaataaatatatatgtatatatt

SEQ ID NO: 7792 - DNA, 1302 bp, Diabrotica virgifera
  SmartBlast Evalue=1E-140; Info=Branched-chain alpha-keto acid dehydrogenase E1-alpha subunit (Fragment) n=1 Tax=Gallus gallus RepID=Q98UJ8_CHICK
ctcaggtgctgttccatttcagtcttttgtttctttaagtggtcgggaatatatttgtacacttcagtgaacataacatcccacttgggcttcattttctgctctccaaccttaaaagcctccataacactctttctagctgcctctaaccattctttatcctgcttatcatcccacagtcctttcttatttaagtaatacttcagtttgtctgtagggtagtcatttttggcccacagctctacttctttgggatctctatatttagtactgtcatcggaagtggtgtggtgacctaccctgtaggtcatagcttctacaagaacgggtttgctttcttttagagcatactccttcgccatcttggtcacgttgtacatagccaaaacgtcgttaccatccactcttagtgtattaattccatatcctggacctctagctgcaattccatctccttggtactgttcctcaactggagttgagatagcgtagccattgtttctgcaaataaatatgacagggcagtttagagtagcagcgaaattaaaggccgcatgcgcgtctccttctgatgctccaccatcaccgaagtagcatgctacaactctgttttttcctctaagagcgtacgcagaacctgcagcttgtgggatttgggtactcaaaggactggaaattgttacaaaattcagctctttgcttccataatgtacaggcatctgctttccctgtccaggatcatcgatattaccataacactgatctacgaactgttgcagagaataccctctccacatcaacactcccacttctctgtattgtccataaactacgtcactggtgtctaaagctgcagcgctgccaacctgagttgcttcttccccgtaattggtcaggtagaaggatatccgtccttgtctttgggcttcgtataatactttgtccaatgcacctagtagcgtcatatctttgtacatctttaccagaatgttgtcgggcaactttggatcattttcggggttaataacattcccctgtctatccagtactctgtaaactggaatgggtttgtaggaatgagatccagtgaactccagattttccgtccatgttgttttggccccgggaaaaagaggcccttcagtagagtattgtctcccaattacatccactttgtgttgaaatcttctcaccacggttttcccgaacaataagaaactcctattcacaaccattttcttaaacacaatgtagtttttgtttatcacgaacttagataagaaattatgtatataatatgtt

SEQ ID NO: 7793 - DNA, 1301 bp, Diabrotica virgifera
  SmartBlast Evalue=2E-50; Info=Heterochromatin protein 1beta- like protein n=1 Tax=Bombyx mori RepID=C8KIP4_BOMMO
gtataaatcttcttcattgtcaatccaaaatacaaaaaatagtggcgtctattaggaaaaacattttattatattatagagtgtttgttttaaggctcagtatctctaaatagaaataataaggtaatcatgagtaaaagaaacagtcctgttccggaagaagaaccaccagccccagaagagtatgttgtagaaaaaattcttgatagtcgtattaatgatcatggtattaaagagtacttcttaaaatggataggctatgaagaaaaagacaacacctgggaaccagaaggtaacttagattgtcctggactaattgaagcttttgaaaaggaaaaggctaggaaagacaaagaaaatgagagaaaacgcagaccaagcactttaacagaacaaagatcagtgaagaaaaaaactgacgacaaaaaatcattaggcttcgatagggggttagagccagagaagataattggtgctactgatagtccgggacaattaatgttcctaatcaaatggaatggaaccgatgaagcagatctcgtacccgctaaacaggctaatataaggtgtccacaggttgtcataaaattctatgaagaaaggcttaaatggcatgcgccctcgctagaagattcaaaaggcgagtagatgtaatgtttagattatattttaggtttttaatcatgaaattgtgagaagttttaaccagtggcggtttaacctaacttcgggccctgggcactagagatttagggggccccttcattgctattcgttgtcaatttttttaacaaaaaacacatgaattaacctgctttattgtaactataaacgtttattgtaaaacccatacatttttaaaaataaaaaaaagatttttaaaacaaacgagaaaaatagcaaacgtaaaaatattctaaaaaatacatttaaaaatattaaaaagaacagaaagttctacagaacaacacatgacaaacaaaaaatcatattctaaaaaatatataagacaaaatttgctcactttttttcttgactaggcattagcaaactgccatattaatactatcaaaattcagttgctccacttcttcattttttataatacggtagtgattatgcgtctaggttttcttgacattcttaccttcaatatatgtatctttattctttttaaagccaaaaaagaccgctcgctgacgcattagaaattggtatcgtcaaataaacttgcagtgaagctaaaaattggcaaaagttgcctttatatcctggatgacaccaaattttcaaatgtattc

SEQ ID NO: 7794 - DNA, 1292 bp, Diabrotica virgifera
taatggcttgattacacgtaacgagtacagtggcgagacagcaaactgttactaggccgagacagtggtgagggcgagagatagtttacacgtatttggcaattttttaatttggaggcgagtcagttcagtttcgattcacaaaaacaaggagtagtgtacttatggatcataaagctaacattaaaaatgtaccaaacgacttacaccactgcttatacaagaattgacggatatattatgagaaagagataagcttctttggactatagactatcgacaattaattttaagaaaaccaatctcgctgctcccgatttcttcgatttattgatttttgaagttatacttctttacgcgcgatatgagggtgaatttttatatgttaaaacctacgatccgggcgcatgcgcattataactttgttctgattggatgttcaaatgacatgtcaaaaattatccaatatggcagctgtagcgcagctgtggtttggacggttgacggtttggttatgtatggttgttgcgttttaaaatttgtgggaagagaaacaacaaaggttagttaatagttatactgcctttttaaatagttttcatattatatttttgaagttatacttcaaaatgttttaatttatgtatgtatcagtccagaaaaggtgtggaaagaatatattagtgtttttaaatatatttttctacaaacgtgttaaaaatgcaatttttaggactccataggagcgttaaaaatgctactttaaggcactagtgctttaaaaattttaaggcactgcagttaaaagtgaattgtcaaattgtgaaacgtcaaaatatttatatttcatttattaacattaatattaataatacaacttgcgcaatttgaaaaaggtggtttaaaaggttttttattataattttgtgtctttggatttgtcttccttgggcgtaaaataataaaacatctatttttatatttcacttgtcaccgtgatgtataattatgtatatctgaaaggtaagtagcatgcagcttgatggccttgttggtagagcattggaccagagatcaaaaaatcgcgagattgcgggttcaaatcccggacgattcatacttttttctttttttttaatatttggcattgttaagttttggttcatttttggtaattattgttaattttttgtattgtaactgttaagtaggtatatttatttcgttgaaattatattataatagaagtataacttcttacgtgcgtacaaagtacacacacattctttttt

SEQ ID NO: 7795 - DNA, 1300 bp, Diabrotica virgifera
tgtattatttaggagtaatacaatatcaactacaaactgttttttataaaaacttctattcaaagttgaccatcttcgtaatggcaactgaaggattggcgacaatttctttccaaaagctactattcctgtcaatttctatttttcctaataaggttttctttcctacaatatttcttgacataagtcttatgaggatcttcatgtcttccaaattgtatttgtctactgtggctcttaaggtggacgtgttggcctctagctttaaactgatggtaggctcaaacttgtcgctcttcattttttgaacgaggtcctcgtcttcaaaagctgtgattttgatatacagttggcctccaattttctcatgaagctgcattgtttgtaaactgcatctaaatttggtaactgtaacttcgactacatcgttggttccatcttcacttacgccatattgtaaagtcagttctatgctaccttttggtccatccctcggttgcgtttgtattccactagtaatctcggtaatatttctccaaatatctggcgtgctaatctcgcctgtcctaagtttctgagtaaataatttcctatctaaattgtaagtcacagctcctacagtccttctgttgctcaaactattattataactacttcttctctgagagccagatcttctaaaactattgttccttaacgatataatttcttcgccatcactaaacgaaaagtaccgttttaatatacttttaggcttttccttctgcctttgctcctcttcttcttttccgagagtggcgtatacagtaaaggaaataaactggcccttaaagaagtcgtcgattctttttactggtaggagtatacaggaaaattcttcgtttatcgttggccatgagtctttcgctgtttttgtttcgaatttttgtttacttgggtagaaggttaccttgactaagtacccttgtggtttaacattcccgtagtcagtaggcagttgcctagcacctataactttcactttaagttccttagtactttcacaaaacgaaatccggaacccaatctgtggcactccgccaaacctttgaacaaactcggaatcgttagatttttttttgaaatagtttttaatattatttagccgatcttccatgtcgatgtatgttgttctctaacacatgactgaccaatcaaaggcaatttaacccaattgttggaattgaaaaggacaacaatacgcttgtttgttaagccgagttttttttcgtgtcgacgttcgatggtacttgcgtgtgat

SEQ ID NO: 7796 - DNA, 1299 bp, Diabrotica virgifera
  SmartBlast Evalue=1E-11; Info=BEL12_AG transposon polyprotein n= 1 Tax=Anopheles gambiae RepID=Q4JS97_ANOGA
gtgaactttcaaggttattccataaattggcagcgattaccctaacattattaaacctttcacaaagcagatcataggcaattggataattgtttgctgtgatgtcaatatgatccacagcatcgcgcgctgcaccctttaaacacgatagtaacaaattaaatttgtcaattggttgtaagtaagtaagagtatgaacgcgagcatcaaactgatctataaaacttctaaattcagttatttttccactgaaagatggcaattccggtttcggtaaattaaaataatttataggtaaaggattttgagactgtgaagttgatgtagtttgctgacttgatgttgaagattttctaaaggcttgcacgtatgttaatttaattttataatataatttgtcaaaattactacggcaatcatcttcgactttaaatagcgcgtcctcattatcttgctcagaaactaacataattattttattatgaagatcataaaaattgtcacgaattttttccaatccttcatacataacttccaaaaccgggtaaaaattcttatcgtcagcagctacctttaaagcaacagcatgaatttcagtcatttgttgcacttcaacttgtcttaaagattgatattttttaattttatctgccattttgtaaatttaaatgtagaattaataaatttagaaaaatatgaaattagcgttaggaaataaaataggttcaccacacgaaaattaataaaatacaaccgaactttgtgctaataaaatagaaactatgtcctctgctatttgaatatttatagacaaaaaataattataaaacataaaccctttaaataaaaattactgtgtaaaataaacacacagtttcatctataatagagtcaacctgtataataattattataacaaaatttgtctattggccgacgttgacaatttaataataattacttttacattaatgtgttccttttttacttaaaaaacaacattaactgaggtataggtaccactaacgatcggcacaaacaaaaaaccaatgtactaattgatacgtgattttaattttgtaaagaatattttatcgccttatgttaaagaataacaaaaaataaagtcaaaggaaatgcggttaaataacctgaatttgattctgatctttgtaaattagcaaagtatgacaataaaatcaaacaattcaggtttaaaagaaactttccccgactatattaccctcttagaaaaatgaaaaatgcaagaaaaaaatatagaaaatggatctatccggc

SEQ ID NO: 7797 - DNA, 1296 bp, Diabrotica virgifera
  SmartBlast Evalue=0; Info=cyclin-dependent kinase 10 isoform 1 n=3 Tax=Apocrita RepID=UPI0001A57A17
aaatctgatatagctggtaaattattagtttgatcaccagctcctgtattggtggcttcaggtgctgctggtttggttcccttaatatttctgtgttgtgggaagctcggcataagttttggatcacaaggttgtggtggctctttgaaataactactctgcagacattcttctgctgtggctctcttctttggatcatacatgaacaagaaattaagcaaacgaagaccagctgctgatagccaaggaaacctttgcttcaaattattgtacggttgctgttttaaggtgtagttttgaagagctggcaattgactaaatcctggccaaattgcatcagatggtgtacctagcaaatctacaatgagctctaactgttgaatttctgatcgtcctggcaatagaggtttatgtcctagcaactctcccaagatacaaccagctgcccacatatcaacactggtagtttgtgttggagcttggagcaatagttctggtgctctgtaccacagagtaacaacatggggagtcattggctttaaaggcactccaaaccatcttgcaagaccaaaatcagctattttaacacagcccttgtctgtcataagcaaattggaaacctttaaatctctatggaccacaaaattatggtgtaaatactttaatccccgtaatacttgcagcataatacattttacttgagattcagtaaatggagtctgcatgttgtctaataatgaagccaaatcttgttcgcagtattccataaccaaaaaaatgctttctaaactgcgtcctacaactacttccttaagatgaacaatattttcatgctggcagttcaacaacacttgtatttcccttaaactactgattggaataccatctctctctaggtccattctcaccttcttaagagcaacaattttgtcagatgattggtcctttgctctataaacgattccgtaagttccttccccaattctatttaatttatcaaattctgaaacgaatctgcaacgccccaacaagtcggcctcaggaatgttcatttgtttaccagtcagaaatgaggtgagaataccctttttcgtaataggagcaaaaggttcggctccattttccggctccttggatttttggggtgattttcttaaaacttctgtggccatatttacacagattatttcaaaaaactatataatcttcatgcaataaaattaatgcttttatttcctttaaaatatattttaaggttaataataattaataatcaagaaaaagaaaccaagtttt

SEQ ID NO: 7798 - DNA, 1296 bp, Diabrotica virgifera
  SmartBlast Evalue=1E-173; Info="ATP-binding cassette sub-family B member 6, mitochondrial n=1 Tax=Harpegnathos saltator RepID= E2BRY8_9HYME"
tttcctcgctccacgatgcttccttcttgtaaaactaatatctcatctgcgtggataatggtagataacctgtgtgctactatgattgtagttttatttgtacacattctattcagagattcctgtatatttctttcagtttgtgtatctaaggcacttgtagcttcgtctaataagattatatttggtgcttttaataatgttcttgctatggctactctctgtttttcaccgccactaagtctaagtcctctctctccaacatttgtttcatatgattctgggaacgtgagaattttatcgtgtatgtcagcgcctctagcggcttcgattacatcggcatcggacgctgttagtcgtccgtactgtatattgtattttatagtattattaaatagtactgtgtcctgtggtaccacaccgatagaccttcttaatgactcttgagtaacagtattaatatgctgtccgtctattactattagtcctgactctacatcatagaatctgaacagaagtcttataattgtactcttaccacttcctgatggacccaccaatgctaccgttttgccagatgggacagaaaacgaaatattttttaaaaccactttttcagggagatatctgaaggtaacgtctttaaattcaacaccacctcttgaaacaactatatcattagcgtctggaggatcaacaacttcctgttcttgtctaagaaggtcgaacatattttccatgttcacaaaattcctttgaatcatactgtagtaattaccaaacatgttaagaggtatgtaaagttgaactatataggttgcaaataatacgtaatctccgggttgtagagtgtgaggttccactatcatgtatacacacaataaacttcctgccaacagtccactgcatactataatgttctgtacagtacttaaaatatttgatgtaacgtttgacttaaactcttctacttgaaatttgagaacggcttctctaaacgcttgtacctcaaatttttctgtaccgtaatatttaacagtttcaaaattaagcaaagagtcaacacttctcgttctagtttcattttctgccgtgatcatgcgacgtcgatactttgttctccattcagtaattataattgtaagtacaatgtataataccatcgtagtaaaaacgattagcccgaaccatacgttgaaggctgacacaaagtaaatgacagctatcgttatatctactatagtcggcaaaatggagaatatgagaaagtttaataagttgttaatactgtctgtt

SEQ ID NO: 7799 - DNA, 1291 bp, Diabrotica virgifera
  SmartBlast Evalue=5E-93; Info=Endonuclease-reverse transcriptase n=1 Tax=Bombyx mori RepID=D7F170_BOMMO
tccgaaaattgttctaagtatttttcgttcaaaaatgtctgagcttttcttcgtttgatttggtcatggtccacgtttcgcatccatatgttagtacaggtctgacgatggatttatagattttgatcttggaacttcttgtaagattttttgattttataagcttatccagtgcgaatagacagcgatttgctgattggattctgtcttttatttcttcagtaacatcgttgtcagctgtgattacggcccccagatacttaaaacgttgtactctttcgaaattgaaggtgttgaccgtcacattttgtcctatcctgtctcttcgtgtcgttctatttatacacatatatttcgtcttctcttcattaatcctcagccctacttcgcttgttgctccttccaccttgttgaaaatggcttttgtggataggatggagtctccaacgagatcaatgtcatctgcgtatgctagtaataacttgggaccttgaaccgatagcagttctgtttttatttcggccgacctcatggctttctctaatacaaggttaaaaagtagtggagataacgcatcaccctgtttgagtccactgttgatttcaaagctgtcagacagtttattatttacacgtacttttgatattccaccctccatacagactttagtcatccgaatgagtttctttggtattgagaactccgccatggcattccatacttggcttctttctacgctatcatatgcctgtcgaaagtctatgaagagattgtgtatgggtctgttatactcccatccctcttctagaagctgtctcagcgtgaatagttgatctattgtggatctgtttgccctaaaaccggcttgatattctcctaggacattttcagcataggggttagtctactaagaatgatgtttgagaggattttatatgccgtgtttaggagtgaaattcctctataattcgcgcattttgtttgtccccttttttgtagatgggcactatgatgttttccttccatcttgctggtatcctttcttctaaccatatctgtgttattaattggtgaatttggcgatgtagtgtttctccaccatacttcagaaattctgctggtatctcgtccgtacccggcgctttgtgatttttcagcttatttaaggcctttcgggtttcttcaaaagagggattttcgacgggcatgtctgctgttatatagatctcttctttgtgctgttcttcctgtatgatatttagaaggtccctgaaatatctttccattcttc

SEQ ID NO: 7800 - DNA, 1287 bp, Diabrotica virgifera
caataataacgttttatttttaataaattgtaataagatccagccaataagtgtataatttactacctaaattgtaattttaaagccagtcactctcaaaataaattatttacagggcataacgcatttactacagagcgttttgctcatttctcgagaatattgtgttttgcacttgtggcactgttgaactaggtgtgcgaattgttttagtttctatatggacggaataacaaaatttatgtacatctgaccaattttttctcattttaattatttattgacgatttaaatgaaaaatagccgattttaagaattttcgtctataagttacaatattttaccaaaaaactgaaaaaataaccgattagtttattgaaatagccttaaaatgagttgaagtcaaatagaattggagctttgtttatcaataaacattaatgaaaagtatacatttgcgacaggctctgtgttggcttaatccgttactttcaaatttatttcttacgttttaagctaactacctgaggtacccctaaacctaaaaatgtcatcaaaacgacgattttgaagctcttccgactggattaaagaagctattatcgattcaaacaaaagttgtgtatttttaattctaaatttcaactatttaattaaaaataaagtgtttcagttgaaaattcaaagttgctacacccaccgctttcgcaggcagaataagaaccctgctattgcataagtatatagattttgaaaaaccattcaaaaagcattccaaagttttttcgatatgccgtctagttctcgagatatttgacaatcgcctttctggacagagccctttaataatgtaaatattcttattcaagctacataagccgagtgagagagctgaccgtgaaattcatttgcgatgtttccaaatttatcggatctcgatttgtctacaaaatgtatatatagcatatacacaacggatcgcgcgcgctgccctctacagcggatttagtggaaccactgcaatataaaattcaccaaaaggagtgcaaaatgaggtccagacaaaaatcgatttccctgtaccctaccattgttacatcgagatgtcactatatacacgtgaatacaaggtgagatccaaaatcggatctcgccttgcaaaacggatctcatcttgtatagcttatgatacaaacggatctcgccttgatatgaagacatatatatatatatacacatatatacatatatatacatatacacatatatatatacatacatatatat

SEQ ID NO: 7801 - DNA, 1297 bp, Diabrotica virgifera
  SmartBlast Evalue=1E-126; Info=Sideroflexin-2 n=1 Tax= Camponotus floridanus RepID=E2AMC1_9HYME
ggggactacggaggaaatgaaaatatgtcctgaacgatacgccaatgaggggaaggatttagagacctttgttgaagtagagcctttctgggactttatctccgcagttttgtttaatttttcgtaatgctccggttccaaccaagctatcgttgaagttttgattgaacatttttgtgggaagagggcacaagctgctggtaccatgaaggttaagaaacaaccaacgcccataacttgaatgggtccgtgcaggaacgtaatcctctgcataaatctgtacttctctgctcgttccatgataatggggagaatgcacatgccaggtgcgcacatgactatcctagagaagactacttgcgagatgcctttcgctgccgctaccttggattggccgacgattttgccgttttcgtcggagcagtcgatgccgtagatgatctcgttttgcctcatgagaggaatattgacgcaattggcagctgccactgcagcaaagggtacatacctctgtataaaaggattagccatcttgccccaatatgtcttgcatcccaaggctgtgatcatagctgatgaagttgctgaagcatatgcaactactagttgcgttgtggtagtaggagatttggcattccggtttgtgtagttgactagagcgttgaaggactggttgacccattgccagaagaccacagcaaacggagttctgtaccactgtaacatagctcccgtgattgccatgcctccaggtacctggaaacacatcctgccgaagacattctgcaattcaccactgtctggatggaaagcactctcatacaacttcttcgcatagatgatttgttccttggtcgttcccggaggttccagacctttcctgtatttctccaccagcaatttagcgttgtccaaagattcttcgctctcgatgcacgttcgggggtctgtaacccacaagaagtgcttgaaacgtcctacgaaggtgttttgatcccataaaggctcgtcgattttgattctttcggtcattttgatgtaaatgctgtatcggaattcagcgtatctgttaaccacaaaccacaaattaagaaaaaattttccaacgggtcgtacaaagtgcactcactaaaccccgcaagatttttaatacattttgataaaattaaactcacgaaaatatttactaaaatatgttgaggataaacattttaatgactgattttaccggtgctcgatggatagtagttagtttaaaaggtttcttgtgtatttatgtattaaacttataattata

SEQ ID NO: 7802 - DNA, 1292 bp, Diabrotica virgifera
cttgattataaaaatgccacaagaaaatagcttcttcagaacaacaataaaaatatatagggtgttccattgaaaatggagcttatggactgtgctggacttgcgtgaatcaccctgtacaatcaaatttaggtttaaaagcgtatatttatatttaaaaatggacgggtcttagcgttttttaaaattctttaaaacaaggacagaaataattttattccataagtgccttccaccctatatatgtcccatctgtcaatgtcaaatctaagaaaaaaatcgtatgaaaacctgtttgcgtaacctaattacatacaaaaaagctcagaaattactatttcaactccgtttatttaagtaacagaagtggggctgaaagggttaaccaaagcatttttcggttaattgtttgaatttaacatttagagtgaaaagttataatcttttacttaatgtaacaggcactgaatgagaggttaaaatcaaaatattccaaaagttgtaaaaactcgaggctataccaaagcagtatgctacactaagctcatttttccattccctgtggcatattctatgttggtggttttttgtatcactagcaaagtctaacaagctatcctagagactcattaatattcaacggaatgctattgtttgacaacaaggaatcatttcataaaacaggtagaccccttgtttatggaatttcacacctcaaacaatagcaccctgctcagctgaatattaaagattatactttttctgggtactctttctggtgcggtagattgtcttttagttttgcatataagcataaaaacaaagaatatatagacttaaagtactttgtaacgctgtcgttgtatttgatgctcaaacgttgtcttatttcgttaataaaatatatttataacctacgtatcgaacattatgtggtacatgaatgaatactaccgacgatcgcgtggattaggaattacatttattaatatgaaacggacatataaggataggatatctcgctcagctcgccagcggaaaagacatgtaggggtacgatcaccctcgtataagaataggtaaaaggaaaaaccgtcggattcgttcagcgcaccaagacgacggcggaaaatggtcgggataactcgcctcttatcaactataccatatatcaacctctataatcaactaggcttttcgttccgacttttatatcgtccgagtcggtacaaaaacacgttttacttcattcattggcgtactctagacgataaaattatattatcgtcaca

SEQ ID NO: 7803 - DNA, 1296 bp, Diabrotica virgifera
  SmartBlast Evalue=5E-53; Info=Female neotenic-specific protein 1 n=1 Tax=Cryptotermes secundus RepID=A6Y7R8_9NEOP
tataggcgtcttatttcttcagatactttagctcgttttgagtgaactacatcaagttcaacatgtgcaatatcctcaatgttgttatctagattttctgccaatttattaaaggcttcccaagtcgggactttaaaagcaatggttgtcaaggatggcggtgaaaaatacagcatctcctcggaacaaaaaccagttaaaagagggactcgattaaaatctcccttaataaaggcttcgtgcataggcttagagagaaaaggttctgcagtgcaactgttttccattgttggagcccaaaccagatcgctgactagcattccacccgttgccacagcgggaacctttaatgatgctgctactagatcgccaatttctgctttcttgagaaaatccaatagtactgatgtatttgttgtttgtggattaattgaattatctataacttgagccaatttatacgcataaacactagggctgggtacaaagttaaaatagtttatagcgcttccgctttcttgaatagctcctctaaataaacctgtgctcattttgcttaaaatatggtcagcaactgcacttgaaccagcactctcaccaccgatagtaactttggaggaatcgccaccaaatagatgaatattttctgatacccattttagtaaaaaattttgatctttaaggcctaagttaccaggtattacacaatcatctgtggccagaaatcctaaagcacccagtctatagttaaaagtaacgataacgatgttatgatctataagatatgatgggttgtacctttgaaatccaccatcccaaactgcatatccaccaccgtgaatccatacatatacaggtagtaagatattagaaccaggttttacaggagtataaacattagcgaaaagacaatcttcatcttggtccaggtaagtggattgaggctgagggcatacttttgtattgtttgtgcaatttagtactccggtccatcctggatgactctgaggtaactgataccgaaggtctcctactggaggagcagcgtacggaatttcttggaaagcataatattcgttaccattataactttgaagtgtgtgacctgaaatttgtcctttcggagttaccaaatccacaattagttcattggcagaatcggtcagtaccccacaaacagtaaaactgagcactagaaaaactagcaaaccacagtaaataaacaatttcatttgggtcggttgtgaaaatcacgacaatgaaatgttaaatttcagctttttacagttaactgtt

SEQ ID NO: 7804 - DNA, 1295 bp, Diabrotica virgifera
  SmartBlast Evalue=1E-104; Info=Gh regulated tbc protein-1 n=2 Tax=Culicini RepID=B0WWQ2_CULQU
gcggccgctttggcattagcttcttcaattcttaatcgctttgtttgtttttggtgctgctcttggaagtctctttcagttatatccagtctattaatattataaattaaattttcttctgctaaaatactttctggggatttcgtatcctagctaacgtttcacatagtccaggacattgtctcctacttttcggtgtacctaaacacccaatgagtatgactaacgaggttttaaatagcactttaactccttcgcacagaaaaacatcccagacccttaaaagtgtatcccacggtaacgtcctagtaaacgcacataaaaaccattcggtgcaataaaacatcggctctgcgttaactttttttaaatgcctgtacactggaggacatactttcttcaaaagaccttctagaatgagtccgtcccttttcacgacatccatggaaggcgagtagtaatcctcgaggtatttgttagatatcgacactagacaccaaaacgcttggattgaaggcatgtgcatcaacagaaaagctgccacgggcgcctgcgcttggcagtagcctatgtcggggaaatggactgtgtatgccttcagaacgttaaacaattcttgctgacctggtttatcttcagaagaaaacatctcatgtaaggggaactgtctgtgtatatccttctttatgtcgtctatacatttaggatccgcttcggctcgtaagcattcttcgtatttatcgggttgcttttctaataatacttttcctccgcacagataaagccatgctctaggcctcatcgattgagggattcctttcctgcagcgttccttcaccttcctataattcgaatccatataaaaactccattgagataacatcttaagccattttctctctcgtcttagcaccgtttcggcgggagggccgttcctgggttcgggggagtactgcgcgcctcccaggaacccgtgccgatcgggtaccgtcgaaatgacgctgccatctatgagcgtcgacgcttctgagcagacggaaatcgtatcggccgacgtcatgttggcgggaaaggctatcatcggtcgagatacattttcgacaccaataaaattttcgactggaaaagacagacttttcaaacgttaacagccttttttacaccaataagagaaaatttcaccacttttaaataacaacaaagatattgttccacttcaactaactaaattgtacaaatattatttttttaacaaattgctgccagaactaatagaggcgaggcttccacttctg

SEQ ID NO: 7805 - DNA, 1295 bp, Diabrotica virgifera
  SmartBlast Evalue=4E-26; Info="Ankyrin repeat protein, putative n=1 Tax=Trichomonas vaginalis RepID=A2DRU3_TRIVA"
gaaatgaataaaataatataccacgttgaaactagattaaaaaacagtgtaaatgaattaaaagtagaatatcactatttttagtaatagacaaatgacaaattataggccgtcctacaaacaaaaactttttgtcataatactgaattgaaaatcacaaaatacccatttaaattttaaagaaatttacacctaattacatagtcgagacgtaatggatctaagcgacatggatgaagattttgatcttgcagatatttctcctgagagaaactctgaatctgatgaggaattatttgataatatacaaacaagacctgacgaagtgttactttatgatgatccttgcttagttagtggtatactgagggctgtagtggatgacagtttggaggaagtaataatgttaattaacgctggaaaaagtgttaatattaatgacaataatggaaacacaccccttcatattgctgtaattaaaaacaatttgtcaattttaaagtatctggtccgccaggaaagtattagaataaacaccaggaattttatgggacaaacgcctctctatatagctgcaaaacacgggttcattgaagctgcaagtattctagtaaaacatggcgccaatgtcaatcttccggataacgaggatgtgacgccattacatcgagctgtatcggttccaaaactggcacatttattacttactaatggcgcaaatgttaatgccatagattatagcgaggatacacctctccatgatgcaatagccgacaagtgcgtagaaactgtgtacatgcttctatattatggtgcagatgcaaaccgtgtaggtgggaatggtctggttccttttatgagagcaattatagcagaaaactcggaaattcaagatgccttgtttgaatatgtttcagattttcattccaaaactaaggatggatatagtattttaacgttgagtttgattaatgatactcgatatgttgaaaagattatcgagaaaggagttaaagtggatgtctctgcatttacagcttgtgttgatattccaaacatcgacaactttcgattagtttggaagaatttggatcccgaggatgttaaagacccggccgtaaatttacaaattttgaattacgaattagacccagaagattttggacagtatattgatgttattatggaatactcaagtagcgaagtgttagaaatattagcatccaagttcaactcggtcgatataggagctttagttcaaaaatgttgtgagggaaatggtttaacacatgacc

SEQ ID NO: 7806 - DNA, 1288 bp, Diabrotica virgifera
  SmartBlast Evalue=0; Info=DNA replication licensing factor MCM4 n=1 Tax=Culex quinquefasciatus RepID=B0WVG5_CULQU
atgaggaagaagatgggaaagatcgccgttttacaccggaaagagttgaacttttaaatcttttgtcgcaaaaagctgatatatatgaaagactttcaagagctattgctccttctatttacgaaaaccaagatgtaaagaagggcattcttctgcaattatttggaggtacaaagaaaacctttgttacatcaggcagaaccaatttcagagctgagattaatattttactatgtggtgatccaggtacatcaaaatctcaactccttcaatatgtctataatttggtaccaagaagccagtatacttcgggcaagggctcttcagctgtaggtttaacagcttatgtcaccaaagatacagagacaaaacaacttgtactacaaactggtgcgctagtattggccgataatggaatttgttgcatagacgaatttgacaagatgagtgactcagccagaagtgtacttcatgaagtaatggaacaacaaactcttagtattgcaaaagcaggtattatttgccagttgaatgcaagaacttcaattttagctggtgccaatccaagtgaatctcaatggaacaaacataagacaataattgaaaatgttcaattgccacatactctcttatctagattcgatttaatatttttgattctggatccacaaaatgagattttcgatagacgattggctcggcatttagtttcactttactacaaaaccagagatcaggaggacgatgaaattttggacatgtcaattttaagagattacatatcttatgctaaagaacatataaatcccaaattaagcgatgaagcctcccagaagttgattcagtgctacgtagacatgaggaaaattggttctggaagaggccagatatcggcatatcccagacaattggaatcgttgatccgcctttcagaagctcacgccaaggtcagattttctgaaaaagtagaagtggaagatgttgaagaagctgacaggttacatcgtgaagctcttaaacaatccgcaacagatcctctctcaggtaaaatcgatgttggtattcttacaactggtttaagcagtgctgctagaaaacgcagacttgaattagcacagacggttaaggaactcattgaaagtaaagggcaggtacctacatacagttatcctaagctgttttcagaattaaaagagaattctactttgatgataaccagagaacagtatgaagatgcccttagagaccttcaagatgatggattgattgttgtcatgggaagaacatt

SEQ ID NO: 7807 - DNA, 1286 bp, Diabrotica virgifera
tgctctgagatgaatgccttggtcggttccatgagtacgtgagttggagtctttcccttacttttctttggttttttagctggagcaacattaggtttaacaaatggttcaagactttggttttctgaattatcatcttgcgctagaggaggtgtaacaatgtcatccaaactgcgttttgagctattttgtgtggactgggttgtatctatattgataattggttgtgaggttggagtttttgaggggttggttgaaagtatttcggaaggtatgggttgcgaagatgattgggagtgggggtttggttataattttcagaaactgattcttggattgttttgcaatttgctgcagtgtggcctggccttttacatgaaaaacagatcaaggaatcttgtgcaaaataaattctatagttggtgttatcataattcattaatatggattcaggtattggggcaagcggtggtgtgataaagatttgtcgtctaaaactataaatgtggttgaattccggcaaaccggcgcttatcttgagaaatgacatgggagacatgggttgaaggcccaatttttcaatttcttgaattaatacagcatgcggtatggagggacaagcgtttgacagaattagcctttgtgatggagtgattagtttgcgtgcttggactttttggttattaatttctatggatcctccataagttattcatgaaattttcaacaacatttttgtttgcaaggtacatacacactctgttgttagaaagccttgaggaaaataggatatttttgggctcgatcaactttcctagtgaaatcagataatcttgaagtttaaggttttcaatggatgggaatacaatggcttgttcttttgttggaaattgttgttcaatcaaagcagtagaataagttttagtagtgttttccatttgggcgctcctgtagtcagaagtcccggcagtcggatttgacatattttatttattattcaaaactaagtaaatcctgaaatacggacctgtcttacaacaggtgattttatcatgtcgttatagataacgaataaacgtgtttagggtttttgtatcaaaccgacttctgataaataataaattccagtgaaataacttggctttatataattttaaagagtacttacgtacaataattgaacgcactataatacacttatatatgcgaaaataaaaattttttactcgttagatactatctaaatgactgttttgtttggagctgacaagtacgcactaactagt

SEQ ID NO: 7808 - DNA, 1288 bp, Diabrotica virgifera
  SmartBlast Evalue=1E-141; Info="Serine/threonine-protein kinase prp4, putative n=1 Tax=Pediculus humanus corporis RepID=E0W0T4_ PEDHC"
gatgaagagactattattgagagaaggaggaagcagagggaagaattactcaagcgtcttggagccgacgatccaagctcagccatgtcaagatctcaatctcctgaagtccaaatcgttgaacaaaatcaagctgccgttccagaggttcctaaaacagaaacgacacaggagcaaataccagacacacccaaactgcaatcagaagttgaaaaagaagatgaagaatcgctgactccaccacttctgcctaacatgaaaacagttgctctaactgttgataaaaaggttgacaaaaagagagccgattgggatatgttcgcagaacaggacatatttaaagtcaacactgcctcaccaagcacaattactactaagggctcggctgccgaaaatccagctcttacagacaattgggacgatgcagaagggtattatagagttcgcattggagaaatattagactccagatacatggtgtacgggtatacaggccaaggtgtattcagtaatgttgttagagcacgagatcaagctcgtggtaatcaggatgtagctgtgaagattattcgaaacaatgaaataatgcacaaaaccggcttaaaggagttggaaatactgaaaaagctcaatgacgccgatccagaagacaaacttcactgtcttcgacttatacgacattttttccacaagcagcatctgtgtatggttttcgaacctttggcgatgaatcttcgagaggttttgaagaaatatggaaaagatgtgggtctgcacgtgaaggcagttcgaagttatactcaacagttgttgcttgcgttgaaattactgaaaaagtctggcatattacacgcagatatcaaacccgataacattctcgtcaacgaaagtaaacaccttcttaaactctgcgattttggttcggggtcaaagataaacgaaaacgaaataaccccctatttggtgtcgagattttaccgagcccccgaaatcatcctcggcatgacgtacgactacggcatcgacatgtggtccgcggcctgcaccatctacgaattatatacggggcgaataatgttttccggcaagtctaacaaccagatgctgaagtttttcatggacgttaaagggaaatttccgaataaggtgatacgaaaaggggcatttaaggatcaacatttcgattcgaattataattttttgtatcaagagatcgataaggtcactgaacgggaaaaggtcgtagttatgtctgtggtaaaagtgtcacgtgacttacattcggaac

SEQ ID NO: 7809 - DNA, 1293 bp, Diabrotica virgifera
cacagcgtggttgcgtattggtagtggtagattaaaattagcgaatagagtgtgccaatcgagccgaaaatacgatggagtctcccatagtcacggtgaccgaaggtcaagttagaggatgccaaagagtaaatttggatggtgaatctttttattcgtttttgggaataccgtttgctaaaccgcctcttggagatttgagatttaagtcaccgcaaccagtagaaacatggaatggtgttagagatgccacgaaagatggacagcctagttaccaatgggatgacaaaaacaataaacctgttggttctgaagactgtctacacctaggtattcacacaaaaaaacttccatccaaagaaccttcccttaaaccagtaatggtgtggatacacggcggaggattcatttttggttcaaacagttcgactgactatggaccagaatacctgatgcttgaagacatagtattagtgtctgttaattatcgtctcggattcttaggatgtctacagtttgaagatacttccttgaatgtgcccggaaatgcatcccttaaagaccaactgctagctttgaaatggatccaacagaatattcaccattttaacggtgatcctaaaaacgtaaccatttttggagaaagcgccgggggtgctagtattcattatcttatgcttagtccatcatccaaaggtttgtttcacagagccattctacagagcggatgcactttttgtccttggtctagaatgacagaacaaaacgttggacttgagtttgcacaaattgttaatcaaaatattaaaacggaaaaagaggcactagaagtactacgaaagttgcctgctaatgaattactagaggcacaacaaaagtttaatgtaaaatatgaactacaccttaaagtagcccctacaatagagaagccaaatgaaacagccgttttaacatctttaccacaagatttaatagctaagggtcattatcacaagattccattaatgattggttacactaatatggagggcatattacacgaaatatatcaacaaaaggaaacgaaacaaggattaaaaccagattatttcaatctctacaagtttgttcacccgcatatggcgatagaaaataaagaccctaagaaggagttgattaaagagaaactcaagaagttctacttcaccgaaaatgcagatgaaatggccaagtatgtgatggcaactgatggtacctacactgcaccagtggttggaactgctaagcttcatgcaaaagcccaaactgaacctg

SEQ ID NO: 7810 - DNA, 1289 bp, Diabrotica virgifera
  SmartBlast Evalue=1E-92; Info=Eukaryotic translation initiation factor 2 subunit 2 n=2 Tax=Formicidae RepID=E2AAQ4_9HYME
tgacaacctggctgatgcaatagatttggtaaaagggttttctacctataaatttacaatatattattataaatagactaaactcatcaataaaaaagtttaagcaaatagccatatagctacaatggccgaagacgatgcaatctttgatccaaccctcaaaaaaaaagaaaaagaagaagaagaccactttcgacattgatgctgctctagctgaaggtaacattgaaaatgattcagggaatgccccagctgcagaagctgataatattgaatcaaaacctgacgatgatcaggatgatggaaatgtggacattgatttagatttcactaaaaagaaaaagaagaagaaaaagcctttctcagctgatgatttagattcttccccagctgataataaagctgaaactactcaagatggagctggggacaatgatgggggtatggatgataactttgatttagatatggactttagtaaaaagaagaagaagaaaaccaagaaacctaagaatttagacgaacttattgcagaaactgaggagaaggatgatgatcaggagaatgtagatgaaaattcaacacaatgggtcaattccgatcgggactacacatatgacgaattactaaaccgtgcctttgaaataatgagagataaaaatccagatatggctgccggtaagaaacagaagttcgtcatgagacctcctcaagtagtcaaaatcggcgccaaaaagacgtcatttgcgaatttcacagagatatgcaaaatgcttcatcgtcaacccaagcatcttttagattttttactagctgaattgggtaccagcgggtctgtggacggtaataatcagctcatcattaaaggaaggtttcaacagaaacaaattgaaaatgtactcaggagatacatcaaggaatacgtcacttgtcatacatgtagatccccagatacaattcttcaaaaagacactagattgttcttcttacaatgtgaaacgtgtggttctaggtgttctgttgctagtattaaatcaggtttccaggctgtcacttccaaacgtgctgcaattcgagccaagacagcataggaaccttagatattgcaatacaataataaataggcactgttacagaagaaatttcaaagtgctaaagaataggtgttgtatgtgttatataatttgtactataaatctagctgaattgttaaatggaattaacaatcatattaatatcaacaattttaattatataactttttattgattattaaattttaataaaca

SEQ ID NO: 7811 - DNA, 1293 bp, Diabrotica virgifera
  SmartBlast Evalue=0; Info=26S protease regulatory subunit n=6 Tax=Coelomata RepID=Q16KL0_AEDAE
actttcctccttgctcttatagcgaacataccagcttcggtacaaacacttctgatttcagctccagtggaatttggacacaacctagccaaaagttcaaaacgaatatctctttcaacagacatggacctagcatgaattttgaaaatatgagttcttccttcaaggtctggaagtccaaattcaactttacgatccaaacgaccaggtctcataagggcaggatctagagtatctggacgatttgtagccataagtactttaatgttacctctaggatcaaaaccatccaactgattgataagttctaacatagtacgttgtacctcgttatcacctccagcgccatcatcaaatctggctccaccaatggcatcaatttcatcaaagaatatcaagcaggccttcttagacctagccatttcgaaaagttctctaaccattcttgctccctctcctacgtacttctgaaccagttcagaaccaattacacgaataaagcaggcatctgttctattggctactgctctagcacaaagagttttaccagttccaggggggccaaaaaggagaacgccttttggtggttcaataccaagttttacaaatttttcaggatggagtaaaggtgtttcaacaacttctctcaacttttcaatttgttccttgcagccaccaacatcactgtatgtaacatcaggcttctcctcaacttgcatcatagtcacagtgggatcaatttttggaggtagaggaatatgaatttgatacttatttcggtcgactccaactctcatgccttcttctatgtctgtaggggccacagagtctgccaaatctactacgaatttggcaaactgtttaacgtttataatgtatttgggatcatctgtatcagcgttgataattttcgtacaacgggccacttgtaagggttgctcattttgtaaggtttgtttgtcagctgccaaatcccataaagctggtggagctaaaccagtatcagattcttttataccagttaattcatttactcttttgattatcgtttggatatcttcttcacatgttttaattgtctttgtgtattgcccttgtccataggttttaagaagtgctatatcaccttcatccagggctttaatttccttttcgggctcctctttctgttcttttatttttcgcatatcatctcctaaatggtccggcatcttaattgtctttatttaaaactaaatctatgaaaaatattgttcttaaaatatttttgtgcaagattacaagcaaattttt

SEQ ID NO: 7812 - DNA, 1291 bp, Diabrotica virgifera
  SmartBlast Evalue=4E-48; Info=Interferon regulatory factor 2- binding protein 2-A (Fragment) n=1 Tax=Harpegnathos saltator RepID=E2C353_9HYME
tgccttgatccagacgagcgtctaccactagaagaacctgctgttgaattaggcgaatgttgagatcctcttgatgcagaccgaggggcaacgtttgtaggcggacttcctccagttgatcgaggacttccgggtggtagattgtctgctactgatatcaaagctgccatgggactttggccagaaccggtagtaggttgagcctggggtgtcgcaccagccatgttagcttctggcggggaaccggttctattatttaatggagaattcgaagaggtcccattcgcacttgctattgatacaggagcattaggtttaaatgcagtccctgcgtcaaaggaagctgttcgaatggggtgtttctcttgtttaaaagttctttccgtcgaaataacaaaaggctgtgcaagtgaaacagcaggaagggagtctcccctagttaatgggggcctgacggcattaccgtgctcgtcaactgaaagcattcttttagccccgccgatatctccgttggaatgatgatgaccatggtgatcatcgtcatctgtcgaagctaacccccttttaattccctgttggggtatcgtaccgggcctgctattgttagaatgatgatgagtttgcaactggtgatgagcagccaaatgggctgccgttggcaatctcactgaggttcgtgcaacaatttcgtgttcttgtgtagcttctagctgtgttctccctctgggaggcacaggagcttgttgttgagcagcttgatactctgccaatatattcgacctcgaatggtgaagtccgtaagtggtagtatgatgaggagcactttgttgtctgctggacgaggctaccacttcaccgttttggtgttctaaggaagtggtacttctgtgggtctttgcattatgagcggatcgctgctcctgaaatccgtgagctcgtttcatttgtctagcagtttctataactatttcgattctgtcagcaccttcatagttaacacatcctctacatactgcttcagaaaaatcgtgtaccattgcccatggcattctcggaaggtcacaaagataacactgttgccttttggcctgctgaatttgcattaccgacatcttcaccattaatattcaatctctttacacacttaaacaatatcgtcactaaatttcgcgttttgaaacactacgccataacggaactcacactaaacaaagcgttatacctaactgaattgaatcctcacctcactctgctagttctcgcgttatgcactggcctggcctcatccaac

SEQ ID NO: 7813 - DNA, 1290 bp, Diabrotica virgifera
  SmartBlast Evalue=0.000000002; Info="Oxidoreductase, putative n= 1 Tax=Ricinus communis RepID=B9SNI2_RICCO"
gagagagagagagagagagagagggggagagaaaaagaggtagagaggagaggagggggtatagtagttagattatattatcatttacctatatataatttgtacaatgtgtacaaattgaaagagagagaaagagagagagagagactagttagcttatgttatcatttacctatatataatttgtacaatttgtgttttgttgttaagttttattttacatactgaatcttcttccgttaaacacctggatcagaaatagcctttgtcttatcgcaggtaaacgaaacagtgatagcaaatcgcataccttcttctaccctctcgacaaagtggggattttctgagcccgaagtaaacatagacaccctacccttacgcggttcaaccgttacgtttttggtaggttttgcaatgttatcctggaaaataaatctgcctcctttgaagtctttcccatagtcgtttaagtagagtagtgatgtataatggaatgattcgtaggtacgcttgtcaatatgttcatgccagtactcgtcatgtctagtttttgggtcaacattggtaagtctagagaaaaatgtgggataggttaaatataaactatcggcttgaataccaaaattctgagcgatcgcttcttgaattttgcttcttactaaatggtaaattgtcctttcagattctgtcaaaatatttttgctgccactctgttcatagatatttataaacctgtctttgtaggatagggctcctgtgtgtaaatcaattatggatgctccacctgaagatccaccttgtgccattattctaacagctaatctcaataaaatgtctgcctcctggtcagtaacgattttgtcactcacaaaccttccacacttttctggaatacaggatttatactgttttatatcttctacaaattcagggccacactccacgacttgggatcgtctattgtagacagtattttgttttgctagaactgtttcattggtactttttgagaaataccaaagataaacaagaacacctataatcatcacacctctgctccacaccctttgtgaagggaatctaggtaaaggtccatatttaaaatcttttggctggctttctttgtctttcttatctgtaatttcatctttggcttttcctttccaattttcttgtgaggtagcttttgcactgtttttttctctgtgccgtttagttacagttgttgatgtcatcttttaatactggtaaagtaaaatgtgaataaaatatgagctgataagcacctac

SEQ ID NO: 7814 - DNA, 1292 bp, Diabrotica virgifera
  SmartBlast Evalue=3E-20; Info=Novel protein (2310061I04Rik) n=4 Tax=Mus musculus RepID=B8JJ69_MOUSE
gtttcccgtatgtgctcttttttataaaatcgaattcgcatgtagaagttgctgtaaaaatgtacgatttgtttaatatttacacgcccgaataatattaagaaaagcactcaacacaatggcgattgggtttagacagttgatcaaatttgccaacttttcaagcttggtagcttctagaagcagtgcttttaaatttgagaaagcctcacaagttcaaattacacaaacaaatcatcagtatttaccaaaggttgtaaagaagtttaatcatgaagaaggtcttcaaagtcaggaagtagataatcgagaaagtgataatgacttagttataaaagaacacgtttttattgtagacaaccctgtagtaaaagacttaaatagactaaggtgtgtaaattattcagatgtatcaagtaattcagccgccactggcagccagtttagtgtacctaatccacagcagtttagtagtcagaatcaagacgagaagtctaacaaaccaagcttagaaaaattgacacatgtgtatgatgtattggcagaaacattgcccaaaatatttattcaatccttagattataagatttaccacaaagacattgtatttgaggataatattagaaatatcagaacagtaggtttatacaactatgtaaaacaagtagcactgctaaggactatagggcatttaaaatttgcttatgtcaaattcgaaatattaaaaatcacaaaacaccccgaggattcttcagtcaaagttaggtggcagatcagaggcatttcagcattgagagtaatgctaacattttggaaaatcaagttgtggaatttcaaagagatatttgaaaggactgacagttggtatgatggtttctcaacattctatgtgaattctgaaggacaagttatcaaacatgtagctgaaaagatgatgccagattcagatcacgtgccagtgtccagtccaaagccgatagtcggcgcaagcgcagcggccaaattggcgttggtagtaggcataattccgaaatgttcgtttttcaactcccttctgtaaattcgcgactaggctctaatattggggtcctatagcgcagattgagtcaaggaacaaagtattggaacgtttccacaacaattttggtttgattggccataattttcacaaataactgtttcattgtggttgttatgtagacatcgacgtaaagaaacgtctgcttttgttataacgattggaaaaatgtttattagatcatttgttttttatgtggttaaaatatattgac

SEQ ID NO: 7815 - DNA, 1292 bp, Diabrotica virgifera
  SmartBlast Evalue=2E-88; Info=CG8931 n=1 Tax=Drosophila melanogaster RepID=Q9VXK8_DROME
tcaacgtcagaaaatgtatataaacaaggagagttgacagtttatagaacagttgtatttgaagactacagttgtcattgttattgttgtcatgttatagttgtaaaagttataaaatacatgatggtcacatgacatgacagacataaaagtcacaagagagaacgggcaggattagcccataagcctagcaattacatacggacccgtgtgtctataagcggggcgcttactgtatatgaataaatgaatatgaatgtggaaccttctatcacaatgtttaaaaaaaggaaactttggaagaagaaagaaaattaactacacgtattgaaaacaaaaaatacgttcataaaccttaccaacttttctatgagaataaatgttccatggacttcaaggaagtagatatgacctacgtgaaacagtcaaattggaaatggcaggaggagaaattttcgctggtactttaggttgggatttaggactttgtactactaaatttccaacttgcgttaggatccaatgtgacatttttataagagctacatgaatagtatactgcagaataagagctccaaatcctttataaagaccaccgacgccttcatttgccaaacaactttcataacaatcaatagcgcccgaatagtttgttaaaatgggtagcacagaccttcctgtatctaaattatcaatgattgtacgggtaccttgtagatggattctgtgaattactgtttcaaatggataaaaaagaatatcggtggtaatcaaaccaactaaggaagctgtcagttgaatgtcctgcatttcagtattatatgggtcttttggtagtgcaccgttttcttcatatcttgctcttgatttaactgccagaattctaatagttatacctttaactaacatagagaacatatacttagctaaacctaatgtaatagtaggtacaataagagcccatattggtaacattctaccatttgctggagaaccccaatgtaacaacctcatgattccttccttgaacacatctaaaataccaggtttttcactagctatttcactttgaacagtctctacaaaagaagctgaataaaatggagtaactgtagctaaactaagacattttagtaaagtatgttgacaaaattgtttaaggctgctatgccaagatatatcttttggccacggcgttactttagaaatcatatcatctacacctaaggacattcctttaactaataaaactgaacctatgcctttccaaaggcttgttataccttggtgtt

SEQ ID NO: 7816 - DNA, 1282 bp, Diabrotica virgifera
  SmartBlast Evalue=5E-96; Info=Spermatogenesis-associated protein 13 n=1 Tax=Camponotus floridanus RepID=E2AG12_9HYME
cagcctacatgcctcgaagaacttgctatagttttggaactgatagagttcttgcagagtcgcggttgccatgggatgactgttgcaataatctgagtacattttgaatccagaacgatgtttaagaaagcacgaccccacacaacttttataaggtgcttcccactctatacaagcttccaagtctttaaaaccctaactgaaaagtcaaaatgtcttctaaattcataaatatcgcgtctaggtgttccttggtaaacatatcggtccttttttgacattccgcaatatatccctccactacgtcctgtaacactttaacgaagtcccgctcggtatgcaccaactcgcgcaccacactcgtcctgacttggtcgttcgacaaaagggagatactggttctacgtcgtatctgagatggcatccgctcaccagaagccatcgctgctaggcagtcttctacggtgtcttcctggctcaccctcaagcgcacgaattgagcggggaaccatcctgattttcctttggttgaaccccaccaccagtctctattagctgtttctagaacctcgatgacatccccagcacggaaggccagttcttcagattcgatggccacgtgatacaaaaacagcttcagctaagataaccatttcctcgtcgatggccatgtctagggatttttttctttcgactagtgatgctagcgacgattccgagtcggacatcatctcgtcgtcagatgttccttgacgatcgtaatcgctggccatatggaatccgcttagttttatacctccacttttagccctcatcaaggcgacaacttatcgatgtctaacggttggctcaaagatctccttaaagttcctcgtctccctaacggtccccttcctcgcatcacaactccatctggcggagtatcgggtggtttttttctgggactctgcgaccggctttgaagacctggaggaccagtagatgagaacattctgccgaacgaacggtcccaattcaaaatgcgacgacctcccaagtcagaacgggttctgcgaacttgctggtgcttgtcgtgggcgcgttgttttaaatcagccaataataaatcataatgtatctatatagaagattgaatccaaacaacgcataggattaacatggatacatcttgacactacactaccgaaaatgacgaactttccaagtaacaattacttaaaaacctaattaatgtatctattatttatgtagtatgtactaaacaaacgtgttttgaaaaacg

SEQ ID NO: 7817 - DNA, 1282 bp, Diabrotica virgifera
  SmartBlast Evalue=3E-80; Info="Probable dolichyl-P- Man:Man(7)GlcNAc(2)-PP-dolichyl-alpha-1, 6-mannosyltransferase n=1 Tax=Harpegnathos saltator RepID=E2CAG0_9HYME"
gacttgatcatcttctgtttggtatacttcttgattctccttgatatctttttgcttatggattttctcgtcggtttttgagtcttttttctttagtctttcaaaattagtctccttatttacgttcttacctgcagaggtatcatcaatgttaccaacattttgaacgttctcatatttaagaattccctctcacttttatttgttttttctactattgcttttgctgttacagtttgtaccaaactgcttacttcttcatgactttctattttattagcctccaagttatttgcacttacagcttgttctgtcgacttttcttcagatttagtgagttcttcacttccattatcatcattattttcttcatcattttggttatcgcgttcactttcagtatcttctgttacttgagtttcctcagatatattttccgattgattgttctcttcgtccccttcatctataccgtcaccaaggtcttgatattcgcgatcaccttgatccaaactatcatcttctaccctcaaaatgtccttatagttccgtcttcttcttagaaggaacagcaccggtttggtgactattttaatcggtggaatggtgaggtagttaaaagatatcttatgaaaggcatcaacagaatctatgatgtcgtgagtcgctgaataaggtttgagactttgtgagaatttacttttaccttccactatgagatgtgtgaatcgatatagttcgtaatcgcctggtttaagaccttcctttttgctgtacgtccaattagggttgatttgggtaaagcgtgataccccactttgagcagctaagtttgatatgtgtactctcacgttcggttcatctttggctagtcgatgaagtcgagatatggcaacacctccaggataatttgtattagaaacgcttaataaaaatagggtgaaggcgaggttgactgctaaatgtccaaccactcccatagagagtaaatggtaaattggtgatttatttcgattctcccatattctgtggcaagcagttgctgcacctgcattcaagataggaaacacgtagattataaatcgtaactccttatgcggcaaaaatgaataaagcactacgaataccaatgctggaatcaccattttgctactctctgatataaaataatacctacaggtaacaaaaatactgatgtcgccatacctctcggaattgctgagtagaagtaccataaaaatggagaagtgccccagttcgagcttttattcagtactgtatt

SEQ ID NO: 7818 - DNA, 1290 bp, Diabrotica virgifera
caagctaattccctgattttggcaaagttggtgtacacagtgttataggtatggttaaatattttttatggggaaaatttagagaattaattttatgtcaaagaccacgagatcgtaaattttcatggccctgtatatagtcaatttgtaaataaaaatagagtaggtaagagtaaaatttactggtaaagtttctacgaactatttatacatttcaaaaataatgaaatacgaacgcttgtttagaaagttaatgtatccgcggttggagtaaacaatggacaaagattctaagtgttttcgcagaaagaaacggatcgtaaacaattttgtttagttagaatagagggtttttctagattgtaagtaagtttaattttaatatctgctggaaattgacgagacagaaatgttgtctacaatactatttgttcttaagaaaaaaaggagggatatgatgtgtggagattgcttgtgattggagaggagaccggtggaaggggaatagagtggcgagtctcagattgatgagggaaaaagatttactgtgtaattaacatcaagagcagggagtccagtttttgaaagtagtatttttgtgtaaagtgtgttaatttggtggtcgtggaagcagattcgtgttgagatgaaatcgtgatcaagtcgagaagtacaaactccttgtgtccgaatagatttcagtttctgtctggaacaagtagccgttttatataaactttgcacgagataccgagctgagagaaaaatcttggaattctaaaaatgatattgtttcagagatttaattaaggagagaattcgtgcgagtgctgttttttaaaccgtttgaagaaggacagttgcagcatccgaggagcacgttgtgggagaactgaggacaacacaatccaggagaagaaataaggacgataggaaaagttagtcagagttgttttgtattacataccatatttttttgtcaacttaacagtttcacagcaaaaattattcattcataaattcatagaagatataactaatctatttaaaaaagtgaaaataaaattttgtttttttttataataataagaacagtctaccgattcatttgaatgaattttggttcaaaaaggagattaacaaggagaaaatatagatcataatagtatattacataaaatatgtttacaacccattatttgtttagttagacagtcagtattttgaattcgcaggttaaaatccttactattcttgttcaattgaaactcatttttggtcaggttagcc

SEQ ID NO: 7819 - DNA, 1283 bp, Diabrotica virgifera
ttcaccagtgtccaatttgttataaagaaatgacgagttttctgatggttcgacacttgcattccaaccataaggatgcaatattgcgttgtcctgggtttgtttttaacttgaagcattatttaaaaagacctagtacttatatatatcaagatgaagataatttatttttctatatattagttatagcaaatcagaaaatacaataaaattagaattggtttatatgggaagtaataaatagcttcaaacatatatcaccagtttaccgtaactagcgaaaacaaagaattttttattaactttagctcaaaaccttcatgtgctaatgagttttcccttggggatacatcaaatatgtcaggtttaatatatattaaatttaagataatttatcaaaacttaaagttttgcactataactgaaaatgagaattcatcgtcatccagcatcaataattctttaaaaaaattgaaagtcaataaggaggaaacaaaccaaattattgaattttccccagaatgtaatccacaatgttttatatgtaaagaaatttgcatcttttccttttatgacacccgtaccatagactattattacagtcctatatatcacgattttatttgtttttattgctttcagtggttaacctgtaaagataaaattaaagagtttcatttttacgtgaaacattcgattccatcaacttttcgatcacgtttttgcaaatgggattgtggtaaagatttcaagttttcagaaatagtaccacatgaaatattctgtgaaaagagaactcagtattatgattgtcctgtccaaaattgccaatttcaaagttttgcttcaccactatcgaatcatttgaaaacagatcatgattataaggtatatgcttctttctttcaaatcaccaagctgccaataaagtgtttcctcttcgtagaagatcagattatacattttcagctaacggctcaaaatgagtataatatggaatgcaatatagtatcaaacgatcataaaataaaatcagaatggaaaccacatgtgctcttttttaacggacagaaacttacaccactagtaaaccttcccaatacttccagtactaatctctcctttagcgctacaccactagtaaaccatcctaatacttctactactaaacagtccctaagcgctacacctatagcaaaccatcctaatacttccagtgctaaactctcctctctcgttacagcaacagtaaactttcctaaatcttccaataataatcccac

SEQ ID NO: 7820 - DNA, 1279 bp, Diabrotica virgifera
  SmartBlast Evalue=4E-82; Info=F-box only protein 9 n=1 Tax= Harpegnathos saltator RepID=E2BX07_9HYME
tgaaaaatgaattccgaattatcttaaaacgtaaataaaaatatggaagtgcttatattataaaaaaattgtgattatggagatatggatcctgtgcaaaaaatgaaaaagtcacataatttgcaaaatgagactggtgaacgggatgtttcgagggaggaagacctctcttcatttagagagcagtggcagaacgaaatccgttcaacaaaacaaagccagactgatgaacagttgaagaaggtgctgaagcctacatcgtcagaaaatgttgcaagacacaatgctgatgtccagggcccaactcaagatgaggatattaatgaaagagctacgaaattatttcttaaaggtgtagaaatggagaattctggaaagttgtatgaagccattcagtactataaacaagctgttcagatcgtacctgatattgaatttataatgcataagaagactaagcctaaagtgaaacaggagaatgaggaagaggaactgaaagagaacattgaaactgaagatacatcaacagatgatgatgatgatgaggacaatgaagaagatattttccttaagattcagagaaaggcttcaaagaagatttctttgtgcactccgaaacactcaaagaatggtttgcacattggtcaaatgccagtggaattaattttgtatatattgaaatgggttgtatccgatcagttagatatgaggtcattggaaatgttttctagtgtttgcagagggttttacctttgtgctagaaatgaaggcatatggaaagttgcttgtttgagagtttggggtgtaaattgtggctctactactggagattacaaatcttggcgtcatatgttcattgaaagaccaagagtaaacttcaatggttgttacatcagcaagacaacatatatcagaaacggagaaaacagtttccaagaccagttctatagaccatggtatttggtggcatattaccgatttttgagattttatcccgatggtacagtattgatgctaacatcagcagaggaaccagtgcagggcatccacctgctgaaatcaagaaatgctaagtatccagttttcactggctattacagactaaaagatgacagagtaattttagtagtgcaaagacaacagaaaaacgcacctactgaatttaaaaagagttacaagaagcaggataattctaagaaggaaatggtgtataatatggaatttcagataaagggtaagaggaaaaagcacgagcaattgcactggactcattattcga

SEQ ID NO: 7821 - DNA, 1291 bp, Diabrotica virgifera
  SmartBlast Evalue=1E-174; Info=Brahma n=2 Tax=Tribolium castaneum RepID=D6X4G8_TRICA
tagcttacgccttctcgtagaactgctggtgtcatcgtcagaatcgtcacgcttccttctcttcctacccctcttcttttgtactttttcttcctcttcttcttcatcgtagtctccgtcttcatcgatagcctttaaccattccttttctgttaaactatcagcataatcaacttcctttcgctgcctggttcctctgcccaatagcgcttcagtataatcatcaccccagccatcatcttcatctggctttgtcagccaatccggaagttcacattcttgaaccaatcgcgactttttatgctgaccaagtttttcattctcctcttttctttccgtatccattttttggaagagctgaaactcatcctctgtcctagctatcatttggttgacggtttcgtcatcaggcacttcattttcctcttcttcatcactaccatcattgtgtaaaatactctgaagaaactgctgcctttcagatcccgtagacttctgatcgaacataccagcttgaatgaccttttcgtccatagtaagcttgtatttagctgcagctaaaattcgttcctcaacagagttaacagtcatcaaacgcaaaactcggacctcattttgctgtccaatacgatgagctcgatcctgagcttgtaaatcctgatgaggattccaatcggaatcgaagataatcacagtatcagctgtctgcaaattaagtcccagacctccagcccgtgtagatagcaaaaacaaaaaatattcactatttttatcattaaatttcgataataggtccccgcgatcttctgatttgattgtaccatcaagacgaagatatttgaatcctctccaatttagataatcttccatgatggtcattaattgagtcatttgacagaaaagaagaatcctatggttagttgctttcattttgggcaatattctgtccaagagctcaaacttaccagataccctataagtgtcgggtccagaaaccactccaccagcaataccaacatgatcacaatatttctcttcgatattttggaacataaacggatgattgcacagtttcctcagctgcataatggtgttcatcagtgccttagatccccttcctttactgcccttctcggaaccatcggtaagtaacacacccttgctctgcatgtgtgcatagagaaccttttgtaggcccgacatgtcacactttatgatatattccactttgtctggaagctgagattcgacttctttcttgagacgtctcaggagaaacggcctgagtact

SEQ ID NO: 7822 - DNA, 1287 bp, Diabrotica virgifera
  SmartBlast Evalue=8E-62; Info=Pheromone-degrading enzyme n=1 Tax=Popillia japonica RepID=Q2TIL3_POPJA
ataaaattgtacagcatgtccaatgccatttataaatgaaccattagtgtatactttccttatatcatcccctatctcttgtttcttagttacattggatatgtgcatattgttattgaccaataagctaagattactgtctaatgaactagcagtctgcttgaagacatcgagatctaaagcattccagatcatttcttcagaacaaatacctattattagtggaactctttgcatttctccgtttattagagcatcgtacatttttttggttatgaaagcatcgtcgtgattaggctcaatgactggagtgaactggaacccttggactatttgattgttataatacgtttccgacatcaatgctacggctgcatcattcagttctttggcagttttgttttgcaaaagctctaacacttcttgtgaagtagcgtttggactgaaggcaggatcgagcgcaatagacaaatcgtaagctatttgacgatgatctctttggaaagtccacggactaagaatagatccactttgggagattgcagctctgaaaagtcccttagatttctcactcataagttgataggttacagatgctccccctgcactttgaccaaaaatagtaactttggttttgtcccctccaaaatgttcaatattttcttgaacccacttcaaagctagtagctgatcttttaatccattgttaccagggataactgtatctccagtcgaaagaaaaccaaagggacctacgcgataattcgcactgacaataatgacaccgtgttccattaaataatggggtccatggaaatcaatgtgattggctccggttacaaatcctcctccatagatatataccataacaggaagagaataattccttgatggatccactggagtatatacgtttaaatatagacaatcttccttttgaggtatctctgtcccaggaaatggatatttttgttgaaagcagaccctgtcattcttggtagcatttagaaccccgctccatggttccgctggtataggggctttaaatcgcaaggatcctacgggtggcttggcaaaaggtatttgttgaaaagcgaaaaatgatattcccctttgagaatattcttgtcttccacgaatttttccatttggagttgttacaattatctcagcgttaatgcaaaataacagcgagaaaagtcctagaaagtaaaataaacgcatcttacttattataaataactggaaatgcaactcatctgcaaatatactaattaatactattac

SEQ ID NO: 7823 - DNA, 1286 bp, Diabrotica virgifera
  SmartBlast Evalue=1E-145; Info= "Phosphoribosylformylglycinamidine synthase, putative n=1 Tax= Pediculus humanus corporis RepID=E0V9E3_PEDHC"
gacggttttgttgaatagaatactggccgcccagcctttagcagaacccaggacatctgcataactgaaacctccagggaatatcacgcccctaaacctatccaaagtggccacaccgctcaacagatcttgcatagtaatatcccacactttgaacccggctcttatcaacgcagcagccatttccctatctccgtttgttccttcttctcttatcacagctacgggaactaattcgtcttttacagtctgatcgtgatcagggtcgaatgtaagtgtgtatttgggtccagttcggcttggaagactatggaattccgaatcggcacaggatttaatagtctgatgtagttctaacctataactagtctcttcccaaagcttcatcaaaggtagaattgtactttctaggcaagcatggttggctatgattccaaatttagatttaattccatatccaacagtctttcctattttgaatactgggacgttgtgattcgaaaacacattcaggcagtgagcaacatcttcatccaaaacttccagtacccatccaacttcttcagcaaacaaaatattaagtggtttgccttgtctatgttgaacatcaacttccataccacatattcctgcgaagcacatttctaataggcatacgattaagccaccatcgctgatatcgtgtcctgccaaaattgaatcatcttttattaactgttgtgttgcattaaatgcatttactaattcttcagcgctatgaagatcgggagattcctctccaagttgaccaaatgcttgagctaatgccgaaccaccaagtctactgtcacttcgggaaagatctacgaacagaatggttcctgtttttcccatagaaggcgctttgaaatcaggggtcacaacttttctaatatcaggacaaggagcataagtagaaactactaaggttcctggagctttgacagtgtcttttccaactctagctgccatactcaaagaatcctttccaccatcgatggcgattcctaactcgctcatgaggtcacacatagctttgcatgcgtcatacagagctgctccttcgccagggagcttggcagcccacatccagttaccactgcatttgacgtcgcgtaaactggtgataccggcgaatacgaggttgcttaaagcttcgactaccgtcattctagcaccggctgcagtgttcactaaacctttgataggttgctctccaatagatgacgctataccttcatgtccaaaatgagaaagagccgtaacag

SEQ ID NO: 7824 - DNA, 1282 bp, Diabrotica virgifera
  SmartBlast Evalue=2E-89; Info=Splicing factor 3B subunit 2 n=1 Tax=Culex quinquefasciatus RepID=B0WT71_CULQU
gttagctgatatgcaagattcacctcaaaatgaaaatattacttcagaatctaatttagacccaccaggaacacaagaatgggcaaatgatgacttcgattctgaagaccctgtcccttcagcacaactgccatctcttctatcactaaaagttattccaccagaacaaataaatacacaagaatcatctgaagtagttcttccacaagctttagaagaagttctcgctttaaaaagtcagaggcaattggagcttggtaatgaaatagatgctgcgaatacagaaaatcaacaaaatcaaaagagttctgagaaggaacctctttgggagaaggatgataatgtggatgttgttcctgatgcagtggtaacctcatataaagttccaaaagagaaggaggtaaaagacaaatatagtaaaaataagaagaagaaaaacaagaaaaagaacaggagacttaaagccaatgaggaaaaagaggacaataaaaagaatggagaaaaagaagtaaacttagtaaatgaactagaaaatgtcgaaatagaatatgttcaagaaactattggactacatgaactggctccacaatacaggcagttttacagtatttttgaatcatttaaaatatcagatcaaaaggcagatattgctccgcccactttagctttgcccacatccttgtcaagtaaaacagtcgctgtagctgaagatgttgatgatatggatgatatggaagagaaaaaattggaagataagtccaaattatcaaaaagaaagatgaagaagctgactagattgagtgttgcagaattaaaacaattggttcaaagaccagacgttgttgaaatgcatgatgttaccgcaagagatcctaaattattagtacagcttaaagctcatagaaatacagttcaggttccgaggcattggtgttttaaacgtaaatatctacaaggaaagcgtggtattgaaaagcctccatttaatcttccagattttataaaaaagactggtattatggaaatgagagcatctcttcaagataaagacgaagctaaaactttaaaggcaaaaatgcgagagagggctagaccaaagcttggaaaaatcgatattgactaccaaaaactacacgatgcattctttaaatggcaaacaaagccaaagatgactattcatggagacctctattatgaaggaaaagaatttgagacaagattgaaagaaaaaaagcctggtgatctcagtgaggaattaagaactgctcttggtatgccagtc

SEQ ID NO: 7825 - DNA, 1284 bp, Diabrotica virgifera
ttgtttttaatattttcatatcggagattttaaatattccttgacaaacaaatctatatcgcacctccgctcagtgtcacaaataaaacaaatttaaaaacttttattgcaccaacagtttactaaaactaccaatgtctatctcagaaggttccgtctatggttcaagtatttgtcgttagatgacactaacgtcattatatcgcacacctagtcaaaaaacacggaaaactgttttcggtgtccatgtgcactgcgggagtgttttgtttttatggtttgctttatttatacaccagaatttaatgttgaatacacattttaaggctaaaaatcgattaattttgaattattttccttttgcttattaatgtatttatatttgttatactaacttgagttaagcctgtgttggtgaattaagtttgtagttgcctctcttttgaagacgcattgttttcttcgaatatgctgttttatcgctttattgctcaaatcaagagtttatttgaaaaattccttgcatatttgtattttggatccattaatctcaaagtaaaagggattgttgagagctctaaaattgtgtgtacttaagtaccgatatttagactttatttgttgcgagtggcttactaagaatattcatcaaagtcctgttgtctttgacatcttgtccactttatatttgcattttaggcgacatttgtctccacagggtggtccaaccattcttgctagaattagtgttttagattttgacagggtagtttatctatctcaatctcagtagcagtttctggaaccataacaccttctgggccaactttgtcactatcatcttcggtatccgatggactggagctgctgctgctggaccaagttaccgatgatgatgaaggtacgaccttagatgggtgcgcattttagtttaacaattgcaaattaggatctttatcttagttgtcaatatcactttcatcgctccaaataagtgaaatataatagtccggggctgccgtttagatgtgctagggatagatgtattaaccggtgtcaaaacaacatgactttctttggatggaactttatcacttgatgacatcttcaagttatcttccacggttgcatgttgactagaagttataggagtgatattttatttatactgttcttctaccatacttactaataatcgccggtgattcatagtttttctgaaatatacaatgtttattttactaacttacagagtcatgtgccacgaatcaatttagaacgccc

SEQ ID NO: 7826 - DNA, 1287 bp, Diabrotica virgifera
  SmartBlast Evalue=3E-33; Info=Anionic trypsin-2 n=1 Tax=Culex quinquefasciatus RepID=B0XAK2_CULQU
gtacagtatgatgcaaaatgtttttgcatcatactgtacaaatgtgataatccgtctggttttaccaataacctcggtcacaacaacacgagagaagctggtcttcataaatacaaagttaaaaaaatcattctgattagtataaccaaggtcgacgaggagattgaagttagtgctagttaaaatggttcagcaatatattattgcgggttttgcgttgttttttgtgtttgtttgttgtgtgcatgcagattacagaattgactgtatatccccaaataaagaaaacacaaaatgtgagtcaatatataagtgcaaaacatttacagatgctcttaaaggcactgtaacgcaatctcaaaaagatttcatgaaagaatccttatgtggatattatgataatatacctatagtgtgttgcggaactaagtctgactatacttcaaaacgaactagaaggagcacagagtccaaaacaaattccgtaattgcggacactcaatgtggagtactggtgaatgatcatcttacaagtggaaaaccccaagattatccatgggctgtaaaacttatctataaccaaactttacaccgttgtgaggggacattaattcataaaagatacatcttaacatccgctcagtgtgtcaacaaatttattgccaactaccacggaaagttagctaaagctacactaggtctttcaagttgttcggagggaaaatcttgtgtaaaatctgccctcgacgttggcattgagagcgttaccatacataaggactacggtacattgcgaggtgcaccgcacgataatattgcattaattcgactagatcaggatatctcctttaatgaaaacattctcccagtctgtttaccccaacaagaagaagagcctgaagttggtgataaggtaattgcagttggatggtataaaaggagttcaacaaaactgaatgcggaacttacaatagttgacaataaagtatgtcaggaacattacaaaaaagcaaattatgatcaaacagtagtcactgagagaaatatatgcgcagcgggatacgcgtccaaaatttgtgctggcgtaagtggaagttcgctagttagactaactgccaaaaacacctacgttttggaaggataagatcttttgggccagtaaagtgtggagatactgttcctacagtatataccaaagtacagcaatatctccagtggatacatgataatattaagaactaattacgttgctctatatgaaacgattttaaattatattttattttt

SEQ ID NO: 7827 - DNA, 1285 bp, Diabrotica virgifera
  SmartBlast Evalue=1E-11; Info="cAMP-dependent protein kinase catalytic subunit, putative n=1 Tax=Pediculus humanus corporis RepID=E0VQ90_PEDHC"
tttcatggatttgtgccttcaagttgatgtcgataaaagagcttgtgctaaggagttgctgcagcatcctttcctagaagaaaggatggaattgaggactctgacaccgcttattaaagccgcgaagaagatgttacacaagacttaagttcactctcgtccactccgatacttctcaacagtttgtgacagaaatatacacgatacgttctttttagacggtcaatacttagatcaaaacatgtaatcatttatatatctctttttctagcgcctaaacaagttacaattcatcagatactataaatattactgtctggcaattgtgatgtgtttatgtttataaaataattttgggtatccgtctagaaagaattcctacagaattacatgaattttgtgaacgtttgtagatgtttatccatccaggctaaggactatttatttgatttttatgcgtttgatgtttgtagccaaagaatcaactcatattttaccagggaaggtctacgttctctttgtcttctgtagctgtcttctttcacgtctcctttggcgatccgtactatttgtctgcacgttgaatctatccatgtatgtcttgatttattatatgtcaacagtagtcaaaagcgggtttgccattctgtgaattatcataaataaatcatcctttagtattccacagcagttaacagcgataatcctctacaagtacctgcctaatactacttttcatggcctctgtcgtgaagagtggcaacgttgtcagaaaattctcatttagttggcatggggctatccttgtacactgaatagcatgtttggaatacgctatagatgtacagtaactggagacacagtttaagcataatagcaagccagattcaacaggtacaggaaggccagattcaatatagcctcgggtcgcattctacaggaactggaggactataatcactatactgtatacagggtatggatataacacacaatttagaccaaaaaaagtcctataacatttttttttttaaagttaaccgtttccaaaaaaaattacattgttgtccatataggtgaatttttattttcataaatttgaatgacatggcaacgtagcctagaagaacttgatgtgactgtggaaatttaacctaataaccccttgtttatttactttgaggtgtgatttttggggttcttggcatcgtaggtacctacctgcaaaataatggatatgggtttggttgatatttacattattttacctaccagatgcaactga

SEQ ID NO: 7828 - DNA, 1283 bp, Diabrotica virgifera
  SmartBlast Evalue=1E-87; Info=Collagen alpha-1(IV) chain n=1 Tax=Harpegnathos saltator RepID=E2BTW9_9HYME
ggtaaagtacattggtgacaaaatatatctgggaaacacgccgcagaaaatcaaaatcctgcacggtacaatatattacaatggcagtgctgaatgaaaacaattagttacaataacatcgggtttttctgcgcagttgactagagcgtatctctcaactgaccacattcagtcaacgaaaatgtcagtaacagaacagtgaggccaaaaaacagtttctgcgttctttgaagcacgacattattttgaaagtaattttaagtaatgtagcaccaaattttatcttttaaagataggtaatgttttattttatacttatatgaattacttcgtttcgtttggtaaatgtttcatatacgtacaacttacaatctattatctatacaaaaaatctttacatgctatattgttacacaagatggcacggcagtattaaaggaaaattataaaagcttactatacaagtttgacagattggtacttggcgatcaaattgaaggtatcacgagggatggctaagtaccgaactgacaggaacacaaagatgatgtctctcttacaagatgtttgaaaactccatttatttctctaaaaaaatatatataattttgtgtctttaaatattaaagcatatatattaatgtaatcggtctttggatatttccaaatgatctagataacagagacatcgctaaatattgatttcctatggcgagcaagaaccaaactatgtgtttcttatgcaaacttggcatctactgattctgtctctgacatttcctgctttgagtgtctgtttctgaggtttctggaattgttggttgttgtcgatggtcgcgagccagaaactaagggtgttggcgaaatagtgacatgatccttgagcaccgttacattcgatgaacggtgtggccctgaagtcctctaaacatgaaccgggactggaaagagattgacctccaccttcggctccggctgcagtgtgcattacaaaactgtagccgatccataaggaactccatccgtatgggcattctggaagtgctagagattgactgtgcatggcaatgacactggcaggtgcttcacatacgacacatcttgaaatatactcctcaatctgcgattcctctacgggcatcattggtatagctgcactggtggagagccagtaggatttatcgtttctacttgcgtagttacagacgttattaacatcacagaacacaaatggcatcgttgagaacttccttatacaggagccagcgtaacctaagtcttga

SEQ ID NO: 7829 - DNA, 1285 bp, Diabrotica virgifera
  SmartBlast Evalue=2E-30; Info=Extramacrochaetae protein n=1 Tax= Bombyx mori RepID=Q2F6A3_BOMMO
ctcgactttcgtctgtatcagtttgttatcgtgtttcatcagttcgtgttaacagttcagtgaagatgaaggccgtagtcagtgcattgtgtaccgaaaacgggatttccgccatcagcggaaaaatcaccaaacgcaaggatatcgagaacgaggagattcagatgtacctctccaaactcaaggatctcgttccgttcatgcccaagaacaagaaactatcaaaattggaagttattcaatacgttattgactatatttgtgatttacaaagtgctctggaaacgcatcctgccgtcaatgcttttgatgcagctgctgccttaggacagaagaagtcacaagcagcagtcagccccaggcagcctctaggagtcaggccgagccccaacaccatcctggcaccttgcgaagctcctgttcttcaaaatgtcacgagttccgaagccttaacgccatcagataggctaagttcctgttaagaaacatattgatctccatcaccgtgatcattttcatctcattccatttccctggaagaagaaaaaccaatgaagatagaagcactgtttggatataaaatctttgaaaaagaatccggggagccgactgattatcatcttaatttatatacttcgggtgattgtaaacttttttgtgcgaatggaggatgttgacgatgttgtagctgcatatggtgttattgacgcacccagagaaatctacgatttgtggaggccccttaactggatgcgccagtgcatttgacgtacctgttatgttgcaatttgtttattagattttattttattgttttgtacataaaaaagagaataggcgggtttacaacaatttaaaagcagctttttaataagtaatcatattttttttatataatgttcgctagtttaacagtcacagattcatttttcatttgtttcatccccaagagcgtcgcagagaaaaaaattagggatctcgatctccaaaaaattcgttcttggttcatttattctaatagttcgtgagtgttttattctgtgattttttagtatgtaatcgtgtacaaaatagtgtcctccgaggaggtttttgtaagttgacgtagctatctctcgaagcctatatgatgggtttcgaaagatggcgaacccaacaattaatgtacatttttgttctagaaaaacttttgtaaatagttacctatatagcaacttgatgttgttgaaattttattattatatgaagatatttgaattaaataaatgactaatgattttacata

SEQ ID NO: 7830 - DNA, 1285 bp, Diabrotica virgifera
  SmartBlast Evalue=3E-97; Info=Eukaryotic initiation factor 4E n= 1 Tax=Tribolium castaneum RepID=D6WJL4_TRICA
ctgtaaaattcgttttacaggattataattttgcttccgaaatgtctacaaattctctagaaaatgagatcgacaaaaacgaacagaaaaacgacaacgatttagaaatacccatggacttttctataaaacatcccttacaaaatgcttggactctatggtattatgaaaatgatagaacccaggcatgggagaaaaaccaaaaagaaattgccactttccaaactgtggaggacttctggagcctttacaaccacatcaaaccttcaagtgaattaaggcaaggaactgattattccttattcaagaaaggaattagacccatgtgggaagatgatgccaataaacgaggaggcaggtggctgctcagcttagaaaagaaacaaagaaacaatgatctagatagatactggttagatattatattatgccttattggtgaagcttttgaaaattctgaagaaatatgtggagcagttgttaatataaggcaaaagggcgacaaaatagctgtttggaccgctgatgcccagaacagtcacgcagttctagagattggaagtaaattaaaggaaaggcttcatataccttctagagttacattgggttaccagttacataaagatacgattcagaagactggatccgtctcaaaatattcatatactgtataatactgcagggaattttagatatcacggataagcaatagaaaattcagatgcaaccaatctaatggcacatacttttattgttatacatctaacgtttttaaacttaacttatatatcatacaacaaatcacattcttgattcaaaggtggtataaattgcattatcattgcatgcttaacttttacttaaaaatagtaacacattgattgttgttagaaagctacaaaagtagttccagtatttatttttttttgccataacagacaacataatataaacatttatatcactttttgttttctcttttgctggttgatccatgggaatttgcttattactaacgttgcatctggacgattttttggaaatctgtgttgtcaacttaattaatcagttaatgttaacattcatagttaatttgaaattgtatcttctagtactcaataataatttttagtttgaatgacttttttattgttacagaaatttagatttttttttggtatgaatgaaattctacatatttgtttaggttattttttttgttattttttttaactagcaaaaaggtacatatttatgcttttctgtatttatatgaataaaaccg

SEQ ID NO: 7831 - DNA, 1285 bp, Diabrotica virgifera
  SmartBlast Evalue=1E-101; Info=Dimethyladenosine transferase n= 1 Tax=Aedes aegypti RepID=Q16VK0_AEDAE
gctctagaatcataattctcaagtcctggattttcttcacacagtaagttgtaagcataaaatatcctaacgaattcctcattgcttatctgaaaaggtctggttgttggatccacttcggctaattgtaaaagtttattacccaattcattccttttgtcttcaggaaataacctctcgacacctcttatgcaatacttctgtctcatattaaatatatttctaagcactttctcgaccattttaaaaggaagtttcaccaaaggatattttaaaggcactagagtcataacagctacatccacgtcaggcttcggtacaaaggctttaccagggatggtaaatttatactgaacgtcacaccacatctgacatatgacagataggcggcatctttgtttgtccatgattggagctaccattctttctcccacttctttttgaaatgttagggtcatcgatgacctaccatagtgccaagccgatgttttttctgatattgactgtaagtatttgataattaagttggtggaaacgctaaaagggaggttacctattaaatgaacaggaggaggagcatgctgccattccatttcaggtgctccttgaaaacactgcttaagatcatatgttcttatatcagcaatctcgattttcatatcagtaacatccttgcaacaaagctgcaataactctagagttggaagaaatctgggatctttttcaacgacaataagttttcttgggttctttttgattatggatctggtgatacctccaggtcctgggccaatttcgcaaacatagtgattttttaaaggaccagcagcccgtacgattttatcagtgattctttcatccattaaaaaattttgagatagttgtctaagagctcgaaggcgatataacttaactaaatctctaatagtaggtaaagggggtaaacgaacatgttgtacatttgcagccattattgagtggtcttagccggttcatcaaagtcgtctaggaaactctcttgtctcacagcatacatggaatacccataaataccaagaataccagcagttaaaaacccagcagtaagtaaattggtccttctaagcttttttagtttcagcaccctctcttgatttcgtttttctatttcctttatgaagtctaaatcggtctttttgattttgcttaaatcaatttttggcatgcgatcggacatagtttattgtcttattttgtagtgttgtgtttacataaaatgataaatggaatttttcagcccctaaag

SEQ ID NO: 7832 - DNA, 1284 bp, Diabrotica virgifera
  SmartBlast Evalue=2E-38; Info=10G08 n=1 Tax=Ips pini RepID= Q5FYF7_IPSPI
caaactcagacgctttgttacgttgatttcaatggagaagattaaaaattttgaagaactaatcagcgactatattggtcccaacaaaattgtggtggatacaaaagtcagcaacttagcggcacctggagaaaattatttgagtgagatcattagaattgatgttgttgtacaagacaaagatgcaaatcaccaggaacatttatcattagtagcaaaattatgtgttgaacatgagttttttggccccacatacaatttgaccaaaaatgaaataattttttatgaaaatattgttcctgctataaaaaatttccataaaagacatggtttgccgccaccctcgttttatccagattatgcaggaggtaggttcaatttggcagtagaagatgacaagcctgatatgaatgctgttcttatcctggaaaatttagcaccaaaagggtacaaaaacctggacagacatgttggattcgatttgactgcagctaaacttattttaaaagatctggcaacgttccatgctgtccctatggcaatgaggcttaaagattgtgaagaatttgccactctaattaaaaggttatctgttcaatttccacacaaaggaaaacaagactcaccgccaaagatatttgaaatattgaaagaagtactaaacaagaagcagaaatacaaagcagctgagaaatttacgaagatgctcgatgatttttttaagtacatgagtaaacatcccgataggttatttaataataaacctattaaaagattttcgacaatagtgcatcatgatatgtggctcaataacacaatgcaagttatcgaaaatggcaaagcaattaaaaacaaatttgttgacttccagatgtgtcaaattgggtcacctaccatcgatctggtttttcttctctttagcagtgttgaactaagctgtcttcaaactaatctagacaacctgattcaacattattataacgaattcgtggatatactaaaaaagctggatttatacacggacgaatactcatatgagaaatttttagaagaatttaaagcgggagggccagaggggataattcagtgcatttttatgctaccaacagttatttttggagaaaaaggaaaagtagctgatcctggagacagtagtctaactgtcgaaaatgtacctgagatagcgcttaaaaagcttatacttttatgtgaagaaggtgctgaaagaggttggatttaatgttatttttattatttttttttagaaataaaatgatataatat

SEQ ID NO: 7833 - DNA, 1281 bp, Diabrotica virgifera
  SmartBlast Evalue=1E-66; Info=Centaurin-delta-1 n=1 Tax= Camponotus floridanus RepID=E2AZR0_9HYME
gaaaatcttgccagtatttggggacctactttgttacattatgaggaccccgaaggtgatataaatgtaaaccatagtcatcaacttgatacagaagtggtagctcaattgataaaatactatcgttatatttttcccgaagatccaggagacttggaaaaggagaaacacatgttacgagtcctggaaaagtattcaaaagcccaacagagtaaagtatcagaaaaatcagcaggtgatttaaggatatgggtatatcttcacaacaaagagggacaatcttttaatgtctcgattggtcctaataagacagcctatgatttgtgcaaagaattgtgccagcaaatgagacttcttgtgcatgaactggtagttgaagaaattattttaaatgataaactggttaggccagttcatcatcaagaaaagctattggacgttgtcttaaaatggggctactgggatgagcaagatcgaaaagacaattacctgacagtagctccactgtcaaaatactgggaatacattgtagacaaacgatatccagtctccggtgagatgagatttgcagatagcaaaacaagactgtgtaaaatgttaacgttccaattttctcaaggaaaattaacatgctttaaagataaatcgggagaagtcattctacattcttggaacatagaggatatagtctggtatctaggacacgaatcaaaacgaagcacacaatccagatggactatcacatttatcgacgtcaatgtgcaaccagtaagaacgaagaactctactttcttcggatccgtcatagtttggaacgacgccgcaactagagctaattggctcagtgctatgttgaacgcgaggtatccaaataatgtgacacctcctccaagtttggtgtccattgagtaagagacgggaaaagctttaagaagacgggaaacacgtgatgtttggagaatggtactgaaattaaaccaaaaatatcgaacaaaattagtaaattttctttttaattatgaatgatgaagttgcaattatatttctaattaatcgttcagcgttgtgtagtcagttattaatattaattaaaactaaaccattaattaattgaaaaagactgtacgacttttaaaatacacacttctaaaatatgttctatgcacatatgtgtatgttctcaaaaacttagtagtgtgtaaatttgtattagaatcagcaaagtactttcagcatgtcacatgccatcttcagagcttcctaataaagaacaataattta

SEQ ID NO: 7834 - DNA, 1284 bp, Diabrotica virgifera
  SmartBlast Evalue=8E-91; Info=Enoyl-CoA hydratase ECHA12 n=1 Tax=Culex quinquefasciatus RepID=B0W6D4_CULQU
actgtatatatattgggaattttattctcttcacccttggttacaattattttatatatttttcatacaaatcttattaaaatattatacatatataattattgtatttttctttgaccagcatctcttcggactttgattaggcagtttgtttccttcaattatagtttggaaaacactacattaggatcttttgttaactgagcagtagctgctttgacgatgtcctcgctttggagatttaattgattgaggaattttatatgatcaagaccttcttgtacactgtgatccctagaaaatatcaaactctgttttgttgcttgcacagcaactgggctcttctttgcaatatcttcagctacgtcaatagcaccttgtattaattctccttgattaccgaatactctggaaactaagccacaagtaagagcttcatcagcatgcatttttcttgctgtatagcatagttctcttgttaaactatcagagccaattactttcggtaatctttggagagaaccaacgtcagctgccaaacccacttcgacttccttaacttgaaaatatgcatcttttgtgcaataccgaatatcagctgcagtaattaagtctacaccagctcctatacaggcagaatgaatagccgctaatacaggtttcttgcacagttctaaagaactcatactttcttgatacagctgtatgatcttgaagagtactttggctttgcgaactggatcctcgtgtagtccagcttcagctccctgttccataaaactacttaaatcaatcccagcagtaaacaattttccttctccagacagaacaacagccctgcaattttcatcatcacttatttttttaaaacagtctttgatgtctagccacatttgatgattaaatgcatttctcttctctggcctatttaacttaacatggtatacaaattctttgggtacacttacagctaatgttttaaaagccagtgaagacattttagaagtacctataagattaattaaagttgatgatttggtcaacactccatgcatagcgttaatatgagatttttaaacactggcggtaaacacaaaaatgaaacagtaaacttgtaacttgttgattctaaggttgattcaatttggattcattattcattctttccattccaaactccaaacccaagttcaagtaggtactttagtttgtttatagatcaaaaatcacaatcaaagtccaaactactcagtcagatgaactaaaactacaactacaacagca

SEQ ID NO: 7835 - DNA, 1281 bp, Diabrotica virgifera
  SmartBlast Evalue=1E-154; Info="Succinyl-CoA ligase [ADP- forming] subunit beta, mitochondrial n=2 Tax=Aculeata RepID= E2BV22_9HYME"
ctattaatacttttgcgtcgtcgacgttggttccttgaagtcggcagatgatgggcatcttgaggctcaattccttggcggcggcaatgataccttcggctatgacgtcacacctcatgatacctccaaaaatattaacgagtatagcatgcactttgggatcggcagtgatgattttgaaagcttcctttacagcttgtgcggtggcgccacctccgacgtccaagaagttggcaggggaaccgccgtgaagcgaaatgatgtccatggtggccatggcgagaccagcgccgttgaccatgcatccgatgttgccgtccaaagcgatgtagttcaagtcgaacttggcggcggccacttccttctcgtcttcttgggtccaatcgcggagggcgaatagctccttttggcggaattgggcgttgtcgtcgaatcggaattttgcatccagagagaaatatttttcaccagcatcctcagcgtatggattgatctcgattagaagtgcatctttcttggtaaagagatcgtacattctcaaaagcatatcagtcggtttttctttctgagattcgaggccgactttgactgctactttttcggcttgttctttggttaggcctttcacaacatcaatgggttcgtagaggatggcgtctgggttttctgcggctacttcttcgatatttacacctccttgagaagaagctatgatgactggaccattaaaggcacgttccatcatgactgcaaataaaactcttttcttggaaacttcctctctgttaccatgactgcattacatattctacctttttcccctgtttgtttggttactaaatattgtcccagcatcttaccactaatctcttctgcttcttcagggctgtataccattctgactccacccttaagcccatttttaaagctacccttgcctcggcctccagctaacacctgtgcctttagtactagctctttggtgttgagtttttctgcgatttgtctggcttcctgtttagttttggctacgccgaaatttggaactgtgataccaccatcttttagcaatgtgtagctgatgtgttcgtgaacatttaaatttctggtttgtgtctgctgtggctgccatcgtccgtttgaaacgggtccaagaaccttggaaccgtttttaaagacgttttccactaaaatcgcagatctcaacatttttacactaggtcactgagtgatcactgattaattaaactttttctccttccttggtattttggctttggc

SEQ ID NO: 7836 - DNA, 1284 bp, Diabrotica virgifera
  SmartBlast Evalue=2E-45; Info=ELL-associated factor 1 n=1 Tax= Camponotus floridanus RepID=E2AAK0_9HYME
cagacttttttgcgatttaaataattttcgaccatgtaagcgaggtgctgtagggatttttaaataatcgacgtcaaatgaactaacctagtgtaggaaatatttaatttttttattcaagaacctacctaccataggatggtttaaacagtgaaatatggctgaaaagttaggattaggcactgagattagagaattaaagattggacaaagttttgttaatccgaaatcgaaagcatttcacacaatgaaatatgatttcaaaccagcttcagttgatactaataaaaaggccactgtagaagttcctggagttaatcaagttactgttacagttcctcatttagatggagcaggtattccacaaacagtgtttaaaggctctcaaaaaccatatactaaagaatgtgtactcataatagacagggttactggagaaatcactttagaaaaattaagttgtaatattcaagtcaagaaaactaggagtgaatataacaaacctcatatgtcaaaagctgataggttaagtcaacaaagcaatgacagatctggtggtagtagtatgccttcgaacagctcctcaaaacaacaacagagtctcccaatgcgatctcaaacacctccaggaggtacaaactcctcggcgagcgccgtccacgggggcgtaggtcatcgggtttcgaacaagacgaaagtcgccagcggcagccgtcgaggagccgatagacaaattacacatttggtgccaaaacattcgccgctgcatgcgagtcccagttacccctctcccggacatccagtcaagagtccaaagagagatttgcacaatatcgctaacgaatcacataatcatagtactcttgccagccttccgatgataggcatagacgacttttcggatcttaggcctccttctagaaatgctcacagctcgtctggtatgcacaattccagatcatctcaaaattcgagcaaccagcgaccacctacggaaaaacggccaaatcctactccagtgcccactgtaaagatcgacaacggcgttggagtgatgagcgactcttcgtcatcgagtagcggcagcgattcggatagtgacgaaccctccacagtagtcaatccaacaatgtttaataacgctccagctggcaaaacgaacggctacagcaacggtagcaacaacgctcctatgaaaattgacacgaggttgctcaatgacgatttgtgcctgtctgaaagtgggtccgattcagactgatacgttatagaggcttttatgat

SEQ ID NO: 7837 - DNA, 1283 bp, Diabrotica virgifera
  SmartBlast Evalue=1E-102; Info=Farnesoic acid o- methyltransferase-like protein n=1 Tax=Aedes aegypti RepID= Q1HQW1_AEDAE
aatatcttaataaaatgtattacaataaaaatgaaacagacttacaaaagtagtgcatgagtgtacactaaaataatagcagagattcacaagtaaataaataaaaactccttataacaaatattaaatgaattatgtccttctaaaaatacatatccctaagggtaataaaggcacctagaagccatataaatcttcatgtagcttttacttgctattatttttttatatatatgtaaatatattttgtggattaatatcctaggcagcacatccaaagcttaaacaatttagttctgtttattgtaccaaaatttcgtagtctgggaaagacatctcttgaccaccgtatgggatgtaacagactccatggctttgttgtacctttccaacggtcaatgctccgtcatgtacgacacgtcctacgtagagaggttcaccgtcttcgctctgtccagctgttaaagcgtttggtgggatgtttcctcttgaagtggcaacccattgtccggggaaatcgcacaatacttcgtattcatggacggcgttttcttggccaccccatgcaacgtaaccgactccatggcttggaacgagtttgcctggaaggagacctccgttgaactgggacctgatgacgtagaggggttcgccgttgtcttcacctccggcgaaggctctaggtggtacctgaccagatctgcctggagcccagcagactgaggagaagttggaacgtggagctgtgtagttttggggggcaccatagccaccaccaccaccgccagattgtgggggttcaactacccatgaaccatttgctccccaaccggtgcagacacctacgtattcaatgttgtgaatgggttcataatcgttccaagacaagaaaggagcttgttcgttttctctgccgacggcaatgttaccattttgccatctgatccagaatccacggaattcattggggtgcaaaattcctggagttggtacttcggctacgtctggtttgcttctgtttttacggatgatggattttgagttgccccatcctccgatgaagatttcgtacatgggttcgcattctgctgcctgggtggtaagggctagatgtgcatcgttagctgctctgacacggaattggacgaatccagaggaattggggaagaaactgtattctagtttgtcttcggtgtctaattggattacactcatgttgaaagtttgaattaaaaatccagccggacactaaacagaacacttcgtaatatcggaattcaaac

SEQ ID NO: 7838 - DNA, 1283 bp, Diabrotica virgifera
tatctcttacttaactcaaagtaggaaataattgccatggaaatcatttaaagttcaaaaacaattttttgagagcggcctgaaatattcttgagataaaccagttattttgctgcctatacaagatattgaactgccaacgtgaaatctttggtttcaggtatctccgcagatctaaaagtaatctgatagatatgtttcgtatatatttctttgaagaatgccgttgtcgtgtaaaagtggtggaggattgtacaaaatctatgtcaagtgatcttcttcttctaaaaatttaaaagattgctcctatataatatcgtgtttgttctacgcaattttggacgaagatatctcatctctttcctacgcggcctctttgaagtgatattctaattcacctcctttcagctgatgactcctcttttctggttctctccttgttgatggtttgattgtttcatcacgttttcctctggatgcagttacattctctgtcaatgatttcgtctgcttgcttttaattatttccattggttcaaatattctttcatttactgttctgttttctatatccgtttatctcggataattttttccaggttttccaggcgtgtgtcataatcttgatgcatttttattagttattcatcgtcgccatttttctcgtcctcttgacatatgacggacaatatataaacgtcatacgtcattggtatatacctaccaaagacgtatgacgtacatttattgtatgtcatatgtcaagtgtcaagtgtacgagaaaaatggcggagataaatagccctattatagtatttgatttttgtctgacctgccattttcgtgttttcttcgttggctccatgtcacctttcaatataacttgactgaccttgacacatttgacagcataattaagtacttactgtactaataatactgtatgcaaacatattatacaggaccgagttataggtttagtaagaaagatgagaagtgagacgatttattcaaagatcaatctactcataccttatacctgataaacaattttgatcagtaatttaaaatttttgtttatatctcataacaaaaatggcgtcaaggtacagtagaaacctttttctgaaaattcaaaaaaatcagtgaacgttgctaatatttcaaatatttcaagcacttcaccacgaacataaaatacaacaatgataagcgacaaacctgacaccaaacggtctcaggttacctgacaccaagcagttaggttacattacataacctaa

SEQ ID NO: 7839 - DNA, 1281 bp, Diabrotica virgifera
  SmartBlast Evalue=1E-103; Info="ATP-binding cassette sub-family A member 3, putative (Fragment) n=1 Tax=Aedes aegypti RepID= Q16LB4_AEDAE"
tcacaccaaacggaggtactgcaaagattagcgggtatgatattaggaccgatatggaaggcgtaaggaaaagcttaggactttgtccgcagcacaatattatcttcgatgagctcactgtggctgagcatatttacttctttagtaagctcaaaggaatgagaaagggtgaaattaagtctgagatagcaaaatatgtagatcttctcgaattacaagaaaagagaaactccaaagcatcgactctctcaggcggtatgaaaagaaaactctgcgtgggtgtagcactttgtggtaattctaaagttgttatgcttgatgagccaactgctggtatggatcctgctgcaagaagagctctctggaatttgctagaaacacagaaagatggacgtactatacttcttacaactcattttatggacgaagctgacatccttggtgatcgtattgcaattatggctggtggacagctgcaatgttgtggatcaagttttttcctcaagaaaaaatatggtgctggttacagtcttattatggacaagtcacaagaatgtgaccctagacgagttacacagctgttgaaaagtatataccagacattgagataaatagtaacgtaggttcagaattgacgtatctgctggtagatgatcatgtccatgtatttgaacctatgcttagagaacttgaaactgaatccgagatgttgggaattagaagctatggtatttcgctgacgacactagaagaagtatttatgaaagttggagcagaccatggtcaagaggaaatgtacaatcatgaacatggcaacattgttcagaatgggactgcacaaaatggatttaccaatgggataaacgggacacacaaaactaacaatggtactcacaccatggttccgacatattcaaacggattctctctattactgaaccagattatagccatgttattgaaaaagttcgtttcaactgtccgctcgtggatcttactgggcatacaagtaatgatgcctactctgtttcttatcattgcctttgttgtagcccgcaaaaacaaaatgacaggaaatcttcctgccatgcctttaagcttaagtaaatttgagaaccctgtgactttagtggaaaatgggacgtcggattatttgccttactacatgaaagttttagaggattatggataccctgcaaccatcgtagataatattacttcagtattattggataagacagaacatcacccaattctcgttactagaagataccaagcagc

SEQ ID NO: 7840 - DNA, 1278 bp, Diabrotica virgifera
  SmartBlast Evalue=1E-104; Info=Gonadotropin inducible transcription factor n=1 Tax=Culex quinquefasciatus RepID= B0WJF8_CULQU
cgatgaatgttcatgtgaattttcaggggatgatttaactgcaaaacctttgttgcaaacttcgcacaggaatggtcgttccccgctatgggacaacatatgcctagctacgtcttcttttctaaagaaggtcttatcgcattttgaacaagggagtggttccgctccttcgtgcataaacttgatgtgcgtggtcaatcgcaggtttctattgaaggctcttccacaatactggcacgtgtaggcattttctccggtatggtggaatatatgtgctcgcaactgcgaaggctgaatgaaagattttccgcagaatttgcacttatgtggtttctcgccagtgtgggtacgataatgacgattaagagtctctttggcagcaaatgttctatcacactcaaaacaacggtacggtttttcaccagtatgcattcttctatgtttcttcatggctccggtagagggaaaagattttggacataaatcacattgatatggcttttcccctgtatgagtcctaacatgaatgttaagcaaatttacgccctggaattccttattgcaatagtcacaagtgaatttctttttctttttagattgtccagcatgatttcttaaatgttctgctaaattatctcttctggtaaaacatcgtttacagaccctgcattcaaacacttttctaggttgtcccatacaacccgtttggccaatatgtctatccagatgatattttcttgtaaactccttattacactctttacatttaacggacttgatcggatggaatcgcaaatgatctataagcaattcctttgtggctaaatcacatttacattcgatgcaaacatatttgtcatcttttggatgttctatgcttaagtggcgtttaaggaagttgctctgggtaaagagtttttcacaaaagttacatttatagtcaccggcctgatgtgccgtatcgtacggctctccacaacatgggcacaacttcaaagttaatggatcatcactttctgcttcatcgcgtttttcgtggttcaccgtgatgtgtcgtttcaacccagcagacgtccggaaggacttattgcacatatcacattccatcggacattccaatttaatgttttcgtcgatattatagtctccttctgttgtgtttcgtacttgcagaggcacaccgtttatattcattatctcgttatcatttccttcttccatttgttcttcctcttcagtttcttcctcgccgtagacttcttgtatgtctgtatcgtc

SEQ ID NO: 7841 - DNA, 1276 bp, Diabrotica virgifera
  SmartBlast Evalue=8E-65; Info=Endonuclease-reverse transcriptase n=1 Tax=Bombyx mori RepID=D5LB38_BOMMO
gggttctactgtatatgtattgacaccgaaaatgacaagacgtgttttgataaatctcaagtaatagagagtaataaataggtgactctctgacagatgcaaagaaagagaagatctggataaaaagtatgatagctttaatttacacaaaaaaatcaaagaaatgacaggttatagaaaaagcacaagaacgaatacccttaaaaatgataaaggggatattattactgatgtgaaggagagattgtgtcactggaccaattacatccaacaagtaattaatgatgaacgagaagaactgtcattagaaatcacacaggataccggaccaccaatattaagagaagaagtcatctatgccattaaaatcacaaaagagggtaaagctactgaaccagatgatgtgcccagcgaattattaaaacttattgatgaagatgatattgatgtaatggttgaactctttaatctaatatatcagactgccacaatccctcagacaatggctgcaatcgacctttgtagcaattcccaaaaagtcaagtgcaacaacctgctcggatcacagaacaatatctttaatgagtcacacacttaaaacatttttgaaaataatacacagtagaattgttaaaactctcgaatatgaaatcagtgacacacaatttggctttagaaatggtatgagcacacgagatgctttgttcggcttgaatgtgctggcccagagatgcatggacatgaatcaggatatgtacttatgttttgtagactttgaaaaggcatttgataaagttcaacataaaaagcttgtagatatattaaaaagcaaaaatattgacagtcgtgacatgaaaattatatctaatatatattggaatcaaactgccaagataagagttgacaaccaggacacccaagatatcaaaatacagagaggagtccgtcagggttgcgtgctgtctccactacttttcaatgtctacagtgaagcggtatttcaagaagcgctctcgattcaatagaaggtatatctatcaatggagaagttttgaacaacttacgttttgcagacgatacagtaataataacggataacaacaatgatttacagaacgtaatgcaacgccttaatgaacgctgtcatgagtacggactgaagatgaatttaaagaaaactaaatgcatgatcataactaaatcagcacacgcaaacatccaattaactattgaagatactgtaattgagagtgtggataactacaaatacttagga

SEQ ID NO: 7842 - DNA, 1276 bp, Diabrotica virgifera
  SmartBlast Evalue=2E-81; Info="Serine/threonine protein kinase, putative n=1 Tax=Ixodes scapularis RepID=B7PAN3_IXOSC"
caatgttgttgtgtgcacgtcaaacagaaaagttataaccttcagttaaatacatcgcgtagtgtttcagtggttttgttattgtgcaattttgtctcaaggatttgtttttacctttttggaagtgccaagcaaggtcctttggtttcatcatccatacctacaagtgtcagtagttcccgatatcgcaaaaccatctttatatttccttttaatcgattaaaaacagtgggtgatacttagtgatttaacttactcgttcaaaaatgcaaaacatacgtgtccaagaacctccgcaaagtgttcgtcgtttaaatgacaaatcgttagaaatcacctctgccgggggtgatgtcgtgaaactgcgagtaccccagccgcgcgatacgcaatgtcgggtaccgagagtgacttctgatcgtagtagacatgttcccgtgggtactactaacagtgaaagactcttgcagagttccatcatagccgataagtaccagttgttcgaacaagttgaaggcagttcgttgtatcggtgtctggatatcaataccaaggaagagctggtttgtaagattgtgtcgagggaaagtcattccctagtgtcagcccattacaaactggatttccacccgcggatctcgtcgattcacgaagtgatagcccggaatcgttacctgtacctagtattccccaaggctcacggcgatctacattcctacgtgagatcgagaaaaaggcttcgggaatccgaggcaaagaagctatttaggcaaatcgcggagacagttcaggtgtgccacgaaaatgggatcgttttgagagatttgaaattaaggaagttcgtgttcgcagatcaacaaaagacggaattgaagctggaatccttagaagatgccgtggtattagaagaaccagatagcgattggttgcatgacaaaagagggtgtcctgcttatgttagtcctgagatattaaaagccggagcccactattcggggaaagctgcggatatgtggagtctcggagttatcctgtatacgatgttagttggaaggtatcccttcaacgactcagaacatgcgtcgttattcgccaaaatatcccgaggtcatttcgtaattcccgagtgtttatcgtcacgagcgaggtgtctaattcgatccctgcttagacgagaaccctcagaacgcatcacctcatcagacatcctctaccacccttggttagtgaaagaagacaaagattggtcttcgagatcctgtgatcaactagtgcc

SEQ ID NO: 7843 - DNA, 1274 bp, Diabrotica virgifera
aaattaatgatatattacaccgatataaaaataaatacatacaaataagacaatcaataatactgattgatggcatcacattaaagataagatatacggcacaaccttaaataaaataaaagaaataaataaaaatattaaatcaatactaaaatgtataaaaaggttttacaaattttgaagctacaattgtcagttttagtctaggaaccagggggcgtcagataatttgttaacaatttaattgtttaaattattgtatctcctaagctattatagttatttaattttatatttatttacatttatttatatttttctacaaccgtgttaaaaatgcaatttttagcactccatacgagcgttaaaaatgctactttaaggcactagtgctttaaaaaaaaatttaaggcactgcagttcgtattgaccttatatgcaattttaatgtaatgtcaaaaaaatataaaattggaatgtcagtccagttcaagtaaaagtttttgtagatattgtcctgtaattacgtttgtagaaaaaatgttgtatgatatgcgtgttaaaaagtacatttttaaggcactcatgtgaattgcagaactcgctctcgctcattctgcaaactttcacatgcatgccttaaacgggtacttttaacactcatatcataaataactattatctacattatttttggttaattaattttcattattttactttttaggaacatttttaacgtttaattgtaataactttttttatcgataaagataagctaattttgcaaatatttttttaaagcttaaataattacttttaagacgatggggtcttgaaaattattactcgcaagaggaaagtcagttatacttggaaatatgctggataaggggttgtatttacgattatatgggtaggcagttattaatacattggatcgtactcagccgaagacggtactcagcatacgctaggcggcacatatcaggcaaattcaattgaatttgcaaaaatatattcgcgtctcatttatttattagatctgtatgttcgtattgttcgtccgttataactcctcccatgcgtcacgattcatttccaaacaaatctaaatcaaaacataaagtgaaacgaacgtcgatgtatatataaattttgtatactttatactatacagtgatgagcgcgctaataaccggcaaaatagcgcaaaagatggacaacgtaacacattgcgaaacaaaaagagatgaaaccagtggagatggaaa

SEQ ID NO: 7844 - DNA, 1272 bp, Diabrotica virgifera
  SmartBlast Evalue=9E-28; Info=Endonuclease-reverse transcriptase n=1 Tax=Bombyx mori RepID=D7F157_BOMMO
tgataatttaagtgtaatttgcaagattatggtaatcgtccctatggtggttaacaaatccaatagagattgggagaaattctattaatggtgactggagaatccgtgctttcaagattcttaaaaggcaatacgtccagatccttgtcagtgtattaaagatcccggatttcccgagtatttttaaaacaaagatttgcatacttcttctttttcgcgcgactaggattactcctgtttgtctgcctcttattcctttcagttgttgttgactgtacattgtctttccaccttttcggcggccttccaacgggtcttttgctatacggcttgttgtttttacagatgttcgctaatctatctggttccattcgatttacgtattcgttccagtttttctttcttgtttttatccacctgttaatattttgaattttgcaacgttctcggatacttctgttgctttgtctgtctcttaatgatatgcccgctattgatcttaatactttcatttcgatattgttgatttgttgtttcgtctttcttgtatcggtccttgtctccgctgcatatgttaggataggtcttactgttgtcttgtatacttttattttgctttccgtggtcagatatttgtttctccatatggtttctcggaggcaaccacttactcttgccgcttttgttgcttgtgttgtggtctctgttcttatattcctgtcactagtgatctctactcctaggtaattgaatttcattacttgttctacaattttgccgtctatttctaacttgcatctacgcggctctttacttatcacatacatttagttttttctactgatattctcatattaaatttatttgctgtgatattgaaagtgtggagctgcctttgtaggtcatcctcgttatcagcaattagtactgcatcatcggcatagcatagtatcgtgattttatgcgctcccatgtggtatccatgtcgttttcttacttcgtgaattatttgattcatcaccatattgaataacaatgggctgagcgagtctccttggcggattcctccttttagttctatgcgttctgtttctcctgttgacattataactctggtcttgttgttcttgttaatttcattaattaccttattatctggtggtctatttgttcagcttgtaataaatagtccctgtcgaaagcactttttaaatctacaaagcacatgtatgctggttttccatattcaatagacttttctactaagtattt

SEQ ID NO: 7845 - DNA, 1277 bp, Diabrotica virgifera
  SmartBlast Evalue=7E-42; Info=10G08 n=1 Tax=Ips pini RepID= Q5FYF7_IPSPI
taacgacaattataaatacacctaaaatgtgtaattattcagtcttacaagtttatttgtagtattattagtgtatttttagtgaaaaatggaaagcgaacgaataaaagacctaaataatttattgaaaccagcacttggagaaaatgttgaaatagtggacaagactataacaaatctcactcagccaggtgagaattactttagtgacatgctcagattgcaagtaacaactaggaataaggacaccaatgctacaaaaactgaacatttcgtagcgaaatgttgtatagtagacgaaagtttgccaaaagaattctctatggcgagtcgccacatgtttaaaccagaaattaccttctataatgaaataataccgacaatgcaaaagtttgcaaaagaacatggtctgaagaaagtcgatttttttgcaaaattgattgctgctagatataatcttgatggtaaagaagagcctgaccagaatgcaattctgcttttggaaaatcttcaagtggcaggatacagcaatgaagacagacataaaggattcgactttgatggtgcaaaattactattaactgacctggccaccttccacgcaattcctttggcaatcaaactaaaagacccagatttgttcaaaaaggtattcctcgacaactgcccaggcccaccaacttttatggacaaatccaatgataaaggtcctgggcatgggcctggacatggaccaggccatgggcctgggaatgggcctgaagatcatggtccaccaatggtaccaagaattctactgaaacaaatactaaaaggagataatttttgtagaaaatatgtagataagttggatgctatactggatgctgacgaggaaaaatttaaaaaaggaaatatgtttgataaacctgatcctaacaaaacggtcttttctggagtcgtacataaagacatgtggttaaataatacgatgcaaaagaagaacgaagatggaaagatgataaaaaataaattcgtggacttccaagtgtactcggtgcaagatattacattagatctattcttctttcttattactagtgtggaagtagtggtattagaagaacattttgattatcttttaatgttctaccatgaacatttcattaaagctttagaatccttgaaatgtgacgtggctccattcacatacacagaatttataaaaaaatctaaagcaaaacgctactttagaatttcagcatataattttgatgactactactgtaatatttggc

SEQ ID NO: 7846 - DNA, 1274 bp, Diabrotica virgifera
  SmartBlast Evalue=3E-88; Info=Transmembrane protein 104-like protein n=1 Tax=Camponotus floridanus RepID=E2AFQ6_9HYME
attgtttatgatgtcagctgtgttctttattcagacaataatatttaaatttataaatgcaaaatgataacacgaatatataattttcaataataaatatgccacaaagggaccgatacccgtcatgggttgggttagtttatatttttaaccttattgttggaactggtgcgctgacattaccagctgcctttgccggggcaggatggctcttcagcacgttcatgattatttttttggcatttgtcagtttcgtgacggttacttttgtcatcgaaagtatggcatgtgccaatgcaacaattcaatggagaacactgcagtccagtgaatcgtatgagacggactgtcctcaagaagactcagaagttgaagagccagagcacagtaccagtaacgaagagactgccattttaaataaagtacctcgaagattgtcgttatacaaaattgataccaaagtagaattaggagaaatagccgctctatatttaaacaaattccatcacaccttatttttctcttccttatgtatatatctttacggagacctggctatatacactgccgcctcaggcaagactttagtcaatttgatctgtaacaacgggaatgaaacagaagattatgatacgttgtgtttgagtaattcgtatttgactaaaatagatatgtatagaatgtttgttaccacgtttgctctgttggtaggcccttttgcctatttcaacgtccagaaaacaaaatatttacaactgtttaccatttgtataagatggttggcgttttttattatggttaccttagcaagcataagattgtttaaactggggcctcaggggcatcctgctctagtgaatttaaaagaagtacctgctttagctggcagtacggtgtacagtttcatgtgtcaccactcgctgcccagtctattggttcctattcaaaataaagacaaaatatttaagaaagttagctacgatttcgtagcaatatgttcattttacttattgttggctctaacaggcgcttttgcctttgctaccttaaacgatctctattctttaaattttatttatagtcatgactcaaatctctttagaaaagttataggattcttcttggttattttccctctttttccaatgtccacaagttttccgatcatagctataactctacagggaaacttaaagaacttaatgctaaatagaaatagaccacgagctaccgtcgtactagaccgcctaatatttcctacgatagcaattgct

SEQ ID NO: 7847 - DNA, 1276 bp, Diabrotica virgifera
  SmartBlast Evalue=8E-11; Info=Immunoevasive protein-2 n=1 Tax= Cotesia kariyai RepID=Q8WTN7_COTKA
caacccatagctgaagtccaaacgatgtgattaagtgaatttttgaacacgcctagtttgtagtttagattttaaaattcttcagtcagttttatttgttaatgttataagtataatgagttcgactgtagtgtatctaattgtttttgttgttagtgttgttacagtggtatgtgatcatttaagcgactccctgttagagcaattaatggcaatcaatagttatacaaaatgcagagtagatgcagattgtgctaagatcagcgaccatactttttgttttggcaacgatgcagacaaagatggatattgtaggtgtaaagaaaattacgacatggttagcagaaataaaacatttttcgcttgtttgggacccgccggattaggagaaaaatgtgaaaaaaatatgcagtgtcaaattgtattaactgaaaactcagaatgtgcaaattcggtgtgtcgctgtaaaaatggagctcatctttataaagacggaagatgttatgtttcagtgttactaggagacttttgcagaggcagtgctaattgttggttagcctcaaaccagttcggtaattgcgtatatggaaaatgtacttgcaaatttgataacgaagtaccaggaacagacagaatgagctgcgtgcacggtaaaaagataggagaacagtgtgaaagtgacaaccagtgctctctaaccgaaaatacccaatgtaaaactgtttgtcgatgctctcctggttttgtgatgtcacgtgaccagacaaggtgtctaaaggctgctacaagattcaatgacgtttgccttgaaaatgatcagtgctcagctagtctacaaggaagcatttgcctcagtaataactgtacatgcgatattggttttcatagccttgacttaaaatgtgtgaaaactgcatctttcggtggaccctgctctaacagcgaggaatgtgttagggattcctcccatttagaagtaatacattgcaataatggagagtgtcaatgcaaacctggtgcagttaatgagacgttagggtgtactaatagatccaattttatagtacaaaatagttttgttgttattttactaggtttagttttaaaatttttgtgatttgaacagtaaaatctgtttttaaaattttgtgtttttggttatccttaatgtattgtattttccgaagaaggtaggtaattagttttaccaatattgtcacaactttcggtaatatttgctcgtgtacctttttaaatatataataagtctccacta

SEQ ID NO: 7848 - DNA, 1275 bp, Diabrotica virgifera
  SmartBlast Evalue=3E-17; Info=Protein slit n=11 Tax=Drosophila RepID=SLIT_DROME
atccaataatgtaaacgtgagatgcctgatttgtagacatatagtatttcctgactcattcacttaaaaaaaggaaaataattcgcattttcctcaaaaatgaggtattcaaaaaacccactagtgttcatagtggccatttttgcttatagttatggtttagaagacagttgtccatctatgtgtaactgtacagaagaacaagttgactgtatgagcagagacatagaagaagttcccgattttgaaaccttgaccaatcgtccgcaagttatcgatttatctggcaacaaaatagcaatgataggtgcatatgatctatcgttcgagaagagctatatggtcaaagagctatatctcaacaactctgaagtgatagacgtcgaggacgaggcgttcgatgatttcgaaaatcttcagatgctttacttgggagagaatttattgcgagtggtacctgaagaattcgtcggcgatttaacggaattaatcttattagatctctctggaaatccctttgaaggtaaaatgcccataatacgatctgactccttagaagtactagctttagccaagtgtcaaataacagaagtaacagtagaagcccttagatatttgccgaatctcagattgcttctgcttccagaaaacaacatccagtacatacagcccgatgtattccaagacgtgtctgaatacttctccatcagactctcctacaacacctgggaatgcaactgtaggaccatggaactgtttaggttcctcgcagacaagaaatacctcgacttgaccgaaccctatcaatgttccacaattgatggtaaaattattaatatctccgattttcagagtatggatgagtttaaaaatggatgtaacgctacagaggaagaaacactacaaaggaagcaaacaattggtgtaggaagtttgtccagagaagagaaaacaaactccagcgaatcgtccgaaacaaactcgacaaaaaatcgaacggtgcgtgttgtacaagaagaaaacgtaatagttattaaagagaatgacagtaaccttatatttggtgtttccttaaccactatcctagtatcagtattaagctttttgtctggcttacttttggggttttttcttaatcattttataaggcgaagacagaacttagaagagtctgaaagtaccacaaaacttattataggaaataaagtgccacattagactttaccaataagaaaaatattttcttagttttctcttgtacatgtcatttattac

SEQ ID NO: 7849 - DNA, 1271 bp, Diabrotica virgifera
  SmartBlast Evalue=1E-14; Info=Endonuclease-reverse transcriptase n=1 Tax=Bombyx mori RepID=D7F166_BOMMO
ggggcggtattccatctatattgtgtcccccttcagtcggctccagtaggcaatatattcatcttttttaggccttaaattactgggaaacgcgattcatgtggaggatactagcattgtagcacacggtaatgctttagaatttggcactgcggtcgtcaacggaatttattctttcgtaggtcaattttgcagcttcatgtttgccttttacttggtccctgtccaatacttttcagacccacatactgacattcaaatggcaaatgtataatgtttttctgcgttataggtatatgttgagtatacctatatggtcctaattgaccattaccatgtactgtaatgctaatagcatgcagactaaccggtatgctcacgatggcacttcttactagcgtttcctactaatccaagggcttcttgcggtgccttatgtttgccttctttcatggggttgatatcattcattataaagagtgtgagaacacacaatgtattttgaatatcgctaagacatcctagcgaatattggtaataatacggtagtgaatatcgacaagaaaaacataaatatatcgataaatatatgattgaatgaggaattatacagggcgacaccgtctgcccccaactatttactgcagctctggaatatgcattttaaaaactaaattgtgctaaaaggtgaataaatattgatggtgaatatttaagccacttgggctttgcagatgacatcgttattatagccgagaatttaaatgaagcttacaaaattatggaagaactaaaacaggcaatagaacaagtaggcctgaacataaactttcacaaaacaaaatacatgatgatcaatttagttaacaagaagagatatggtaccaaataagatagtgagagagaggactaaagtgacagatgtgatagaaaaaattgcacaagccagatggagatgggctggaaatgtagcatgtttaaatgataataggtgcaccagaagactcacagaatggagatctggagaagctaagagaaccgaggtagactaccaaaaaggtggatagatggcttgagaaaaacagtgggaaattggatacagaaggcacaaggtagtgaataatgaaagaatatggaggagacctacatacaacagtggattcaagaggttgagaaatgatgatgatgatgaccgataaaggagaacaacatcgtacatttaccattcaaagtcagtatgcgggtccgaaaagtattggacaaggaccaag

SEQ ID NO: 7850 - DNA, 1274 bp, Diabrotica virgifera
gtttaaagggtttttaccctaatatttttactttggtggttagcatgttcgattcaaaaaacactgatgatcggtcaaccgattgaaaactagttctgtttgttttatgatttagccctgtatagggattttgacaaatataccttttataaaggatttcatggttttttgtaataaatggtatacaggaaattttttcctcgtggatttgttaaccctttaacgtagagacgcatatattcacttgcatcaaaatgtacttcagagcgagaaacacattcatttctataaataattaataaaacgtttatcttgtgtgcttgtttattaaattctacactaacgaacttgtttaccacaaaagtcgggaaatgcatagatgcgcggaagtgttaaactgaagcgcacggaagagcaaggcccaaaaacaccatatatggggcacggcacgtttaaaaactgccgtcgcgaaagggtactatagggagctattttctaaaaatttcattattagatcataatcattattcaattacgactgtatcagtcatagcttatcataagtttaaccacatttgttctcattgttttaagagagcattcttgttctgttttgtcatcttgccttatacctaaaatattgttttactgcacagttatcctgctctcaaactaaaaggaagtataacatagttaataacaaaaaagccttcattaaaacaaaattaaaatcatagattgttaattattggaacatacgaaagttgcttctagaactaagttagcgcccctttttttgcaaaaaaacagacgagcaatgaatccgaagaaggtagctcctgctttcgtcactagctgtcagcccagaagaacgaaataaaacaactaaagctgcagaatcttccactgtcatgctgactgattcaggtttcaagtttgtttttccagaattttaataaattattatcgaatacatattgctgggacacagagatagagagaactgattaagatcaccagatctgagaaaccaaggggaagacccagagagagatatcaacatcctgaaagtgagaaactggagggaactatgcacatattaaaatgagtgaaagaaagccaagttatacaacaaactttgacaacatacaagaggaatgcggagtgattctctgcaataagcgaatgggagagttgtaagtaagagtggcaaacattccatccagaaagaaacgccttcatgatgatgaatatcgaatacaccatctacaatt

SEQ ID NO: 7851 - DNA, 1275 bp, Diabrotica virgifera
caactgtcttatcagcgccattcttaagctgatctagaatatttttaccaaagtcaactgaaaggttaggaacctgtttcttgactgtccagttgtataaaaagctaggatttgactgttgttgctgcataatccaaccctccaaagagtcagcattcagattcaatgtcttttgttgctgctggatccagttttcgatagcagataaatcaacgttgttcgtttgcttttgctgaattacccactgttgccaaacttgtggtgttactttttgctctgttggtagtctcatttttccgtcccaagttctcatgtctggaatataacctggcagcctcatgttacctaaaagattaggaacctggtgattaatgatccagttatacaagaagttagggttagatttttgttgctgcatgatccatccttctataactgtagtgtctaccttcaataataaatgttgttgattaatccattgttcaataagagttaaatcaaggtttctgttcctttgtttttgttcaagcagccattcttgccactctagaggtgatactctcttaatattcaaaagcatatttctccatggacctgcgaaaccgggatctagtttcatatttccccatggtccagagaaaccgggatctagttctaaaataccatttggtaaatgacctgtaagtggtatacgaactgttgcgtccctatctctagatgtagcaataacatttatatttggtactcgattaataagaagtcctccttgttgcatatatccaccattggagccactgtttccgctaattacaaccctaccggactgagaatgttgcaatacattatcttggtctgcaccatcgacgtaaatttgtccattgtccaagtattttctgaccaagacggagttggaaccgatgtactgacgttgaagggtgtattgacggcctctgttgtctctaaagacttcgtggttgtgttggtcaatagcgtgtccctcaagcacatcaccatggacattaaccttctgtcccaaaacatcagcatctcctgagaggtgggccccaattccttggccaccaacgccaactgcaccatcaactcctactttgtttcctaaaaggttagcttcggcgtcagcgttgacgctaatgatgttgccgatgccaagtttattagcagtttgtgctaggattccttgtcttcctaaaagagttgcttgggagattcccacgaggaggaaggaggatataagtattttgagcttcatcttgc

SEQ ID NO: 7852 - DNA, 1273 bp, Diabrotica virgifera
  SmartBlast Evalue=3E-41; Info=Pancreatic lipase-related protein 2 n=1 Tax=Harpegnathos saltator RepID=E2C0E1_9HYME
ccttaaacctactataaattaaatatcaattatcgctctataatggcacaataaatcaacaaagattatcaaaataatattattttttcagataagatagtgtgtacataaaactgcctaatgcggataagaattatccatcaagttgactaatattttgttaaaaaacaggtatgaaaattatctccagcattgcagttaatgttacatcaaaatgaagtccaacgttgtgttagtacttctggttacgttcttctttacgctttcactttctgatccatccagtgatgatgtaattttcaatttttacaaagaaccgaagatatccacagaaattattattagtaagattgatgagttgaaggatgctggatttgatgcaactcatgataccgttcttttgatttacagttatggagatccatcagatttagaaactaaatggaagttgtcgagttcaatttttggagtcgttgctgatctgaatatttttgtcgtcgattggagtaaagcaactacaaaagattacttcgaagctcaaaaggatgtgacaacagttggtggatatattacagagtttcttaatgcacttgtatctaaatatacattaaacttagatagagtcaccatcatcggctgggatcttggagcacacatcgctggaacagctggaaagaaaatggataagaagttatctacgattataggtcttgatcccgctggtccactctttgtaaacaaagacacttccaatcgccttcttgcaacagatgccaactatgtacaagtgattcacacaaatgctctcattaatggattttcttatccttgtggaactgcagattattatccaaatggtggagaaaaccaaaccagctgtggaaacgacataactggagtatgctcgcatcagaggtctttggcattctacgttgaatctctaactagtgataagtttgtgagttacaagtgtgacgactatgatagttacaaaaatggaacgtgcaaacttcaagatgataataagtctataatgggccagtttactaccaaaatagatacaaaggcaagcggtacctattttctggacacgaatgataaacctccctatgccaagggttaaaatctgaaagtgtttttatatttattacttagacctaggtagatgatcatgcaattataaggttttgtcttataatatatgttaaatatagttaattgacaattttatttacaataatacaatcaaagaaataaagttaaatttcgagct

SEQ ID NO: 7853 - DNA, 1271 bp, Diabrotica virgifera
  SmartBlast Evalue=3E-99; Info=SWI/SNF complex subunit SMARCC2 n= 1 Tax=Harpegnathos saltator RepID=E2BNI2_9HYME
ttggagaaggcgtaacttccacaatgtttggttctggagttggttcctccatgtcttttgttaagtcttcagattcaggatcctctggtctagttttcttgcccacagcagggcttctaccacttttcgtttgccaatcttagacggaggcgaaggagaccgttttcttttacctttgttttcttactgcgttcatctgaaggattcattagatcttcaacagacattaacctgggatgtactttctttacgccattttcgtctacttcatagtcttcctccgacatccattcattgtactggtcagtttcatagacccaagtagaacaaatacgccaagcaccagaatgcgggctaggattattttccacggtcagattttccaagcctgctgtttctaaatttacccatgtatcaaatgaattcgggaagtaataccagtgcatcattaccattttgtctcgtttcgtgacaggtcttccatattcgtctttgagtggatcaaccggcccatatataatatgagtagcggtctcttcagtttccacaatttgaccattgcgcttgcggataatttcttttactttctgagctactgctttatccagttctggttttataaaaacgataggaagagaatacaattttgcagtaatcagcgccttttccatactttggaacatttcatacactcgctccagtttcgagacattctttccagcagggagttcaaattttcgccatccatgttcgcttttaaatttataagcagctaatagcatgtggcaaagaccacctccaggcttgaaatccaagaagtattttattggaattctagtcattggtggtttctgtgtattctttcccagaaaatcctcctggaactgcataaactgtactgccgtggctgataatgttttgtttgtaattggttcattttgtacatactttttaccatttttctgcaaccaatttttaactgcttcgaatgctgtgagagtctctggtgcctcaaaatactttatatttggacctccgtccatttttggccctacagataacatgttgatgttttatatgaacgccgatagtgagaatgccgctaatactttgtttaatagttacaatacaaaaagttctatcttatgatcacaattttcacttctaacatactatgttataatagataaacaattattcttcgcataattaattagaataggaatcaaacaatgtttacaacaattacacaccaacagccgccatctttt

SEQ ID NO: 7854 - DNA, 1264 bp, Diabrotica virgifera
ttttttaaacaactatcgctgtctctgttaaaggccgtgtacttctgattccacccagatatagtgctgctataagtgtaacttcattatcaaatcttcaatttaattgaagatttttctaccagccatcgctaccttatcgacccatccttctaaagccatcttcatgacatatgacatgttcgccacaaatgtcaaagcgcatccttgtctaacccctcgctttgctctgaattggcttgggaatttctaatctaatcatactgtggattgatctagttggactggtatatatttctaataagtatcaccagatgtattagtgtaccaggttgccactcatttctattaaaatggactaaagatttatctagcttacacaatcgaatgcgttctgatagttaacgaattttctcgacttttcgatgagttgtctttagttcagaatttgctcccggaattattttccctttactgtttttttacttatttcttatgtaacttatctgttttttttgttgtctagtagaatataaattaaggtacaccaatcaaatggtcattttccagaattccaaacagtgacacatataatggatatatcctttgtcacctagtgactgcattatttctgctggttttgtgtcagtgtctggggatttattgtttttagcgctttaattgcatcttttatttcagaaccgtagattctctagggtactaggaggcccatagatttctgctggagtctctataaatctatataaattcctcataataatagtagttttgtctcatttccaatatttcgttattatcggttaccttgcttatccatcagagaccaatttgagttttaaactctttgttaaggagtttggtcttttggaataaatctttcagttcattccgacaaccatgttcttttaaatagtataggtattgggtgtttaaagcgatttgttttaattagtacaacagagttaagcaacgacgtttctaatatctgtttatataatttctttttataagatagagatatttataaatttacgttgagagcgttacgaggcatatatgccccgtagtgaacctttgccacagtgaattaggacagagtcgacgcagccaaccgttagtgtaatacgaggtctgtttgtctcgtaacgcagccaaggtgttaactttcagcatgcatgttttaccattaaaaaacatgagatatgcaggtgaacttcaaatagttcgtcgaatcttaagataa

SEQ ID NO: 7855 - DNA, 1267 bp, Diabrotica virgifera
  SmartBlast Evalue=1E-127; Info=Kynurenine-oxoglutarate transaminase 1 n=1 Tax=Culex quinquefasciatus RepID=B0WL67_CULQU
tttaagtctattatcaaggtatttgtagttgattatcataaaatgagttgaattaagcaccaattaagaaaatattaacagtaacagtaacagtagagtaaccgtttcggtcgatgtatgttgtgccgatgtgttcgatgaatagcgttttgtttggaattaaatacttaattaaatcttttgtgacagttaaagaatgaataaaaatttcgttaaatttcaacaaatagcaaaatatgccacaatggctgatgtacaggcgaggtttgttttaccgaagagatatgaagggtctggacccagtgtttggacggaatacatccaaatggctatagattataaaccccttaatcttggacaaggtttttcagattactctccgccgaaatacattacagataatctagccgaagtatcacattcttcaaatccattaatgcaacagtataccagaggattcggccaccctagacttgtcaaagcaatagcaaacctttattctccattgataggaagaaatctcgacgaaaggaatgaagttattactacatctggtgcatacgaggcacttttttctgctatttctggacatacagacttaggagacgaagttattatattagaaccgttttttgattgctatgaaccgatggtaaagtacgccggaggtgttccagtatttattccactcacgccaaaagaatctcgtggtaaattaccaacatcagccgattggactttcgacaaactggagctagaaaaggcgtttaacgaaaaaacgaaaataatcattgtaaattcccctaataacccactgggaaaagtattttcgatagatgaattaacgtttattgcagatctatgtaagaaatggaatgttctttgtatttcggatgaagtgtatgaatggattgtttataaacctcacgaacatattagaatggctacattacccgacatgtgggaaagaaccattaccattggatctgcgggaaagtcattcagtgtgacaggttggaaagttggctgggcgtattgtcctgagtttttaatgaaaaatctacatattgttcaccaaaatagtgtatatactggagttactccgatacaggaagctgtagctatctcaatggagaaagaaattgggagatttggacgtgacgattgttattttttttcgttgccaaaagaattggaaaccaaaagggattatatgaccaggatgctgatggacgttggaatgattcccaatgtccctgatgggggc

SEQ ID NO: 7856 - DNA, 1268 bp, Diabrotica virgifera
tcttagctttccaacaatcttaacaaaattcaataattaataaaactatcactaaccaattaattcatgggacaaattgagcttttctgaccttagttcacataattgcttttatcaaatttgcagtatagtgagattgaatcgcggaactactgatctactgctgctcaatttaatgcttgcacgatcaaaattttcactaaagtttatcgattacatctcgaaaataagcaccaaggaacttgtcaagtgatgagtgcgctaataaccggtaaaataacgcaaaagatggaaaacataatacgcggtgaaataaaaagaaatgaaacttgtagaggtgggtagtcgaattatcgatacaaacctataaatttacatatcaaaagttagttcccacctttacacgttagcctaagatagtagttgactttaatcataattatacatatgatgtcaaaatgacatttttttatttcgcataaactaaaaactgattgaagacaattgcaatgtaaattagtgggtttctatcgagataattttccaccaatactatacctcattttaaaactaggaggagtaatacaaatttacctctccgtaatgcttgtttgtaattggtccaaccgcaggcacgcttactccactaaattatgaaatgttgacactattggcaattaggaaatgttgacactattggcattcaaaaggttaattaagtcatatcggcgattttttgagttttatgcgttattcctttaatttttagtttttgagtctgcatttatataaaaaaacagttgtttttagaactctttaacgatgtattagtgtaatataatatttatggattaccgtcgaaggccgacatgatcaaacagaaatattttttgatttttctagtgacattattgggtgtaaacttgtcttttgactttactcctcctagttaaaaaacagggtataatttcatctctttttatttcagaacgtatggatccattgtttcatgacatgtctgtatggatccatggcatgaatcaatggtataaatcacaacagaacataatttagaacctgtatcaaagataaaaagttttgtttgactttcatttggcccctaaagacgactaaaaattcaacttataccagccaccacaaaacgcgtcgtgacgtcacggggttgtatgtttacattctacaccaattgtatatataattttaaattagacattataaacgtcagtaaaaaatacagttatgtgacg

SEQ ID NO: 7857 - DNA, 1270 bp, Diabrotica virgifera
  SmartBlast Evalue=1E-116; Info=Hydroxyacid oxidase 1 n=1 Tax= Harpegnathos saltator RepID=E2BJY7_9HYME
atgacaaaatatgtattttttaaaattaaatataaaatagaatacctatttgattagaacattgatcttgtaattcctaggttgtttatctttttcatcgacgtttgtaatcttcttacagttttgcgtaataactctcgtgtacaaccaaatctctgggcacctcatttatttttgaataacctgcgattcctatggaagttttaagttcgtttttaagaatattgagaactttttcaactccttgttgtccactatgagcgagaccccacaaagctggacgtcctataaaagccattttagctcccaaagctactgctttaagaatatcaatgccgtctgttattcctccgtcaacgtatacctctattctgtctcccactgcctttacgatctctggaagagcttctatcgaagcaggtgttccgtctatttgcctagcgccatggttagatacttggacagcagccactccagcttgaacagcaagtagagcatcttcggctgtcaaaattcctttaagaacaattgggagtttagtaatgctcttcaaccacttaatatcttcccagctgatagttgcgtcgaagagatctgttacgtaggcgttaagacctgatcctttttctagatcctggctcatttcagatgtatgtccttggaaatttgctaatcttaaatgtggaggtagagtaaatttgttcttcaaatctgctaaacgtagaccaaaaacaggagcgtcgacagttaatactaatgccttatatccagctttttcagcacgtaggaccaagttttttgtaacatttctgtctctatagatgtacaattgataccatttcacagcatgaggtgcagcttcagccacttcttcaatgctgcttgttgaaagagtgctaagagtgtagatgatccccaaagcttgagcagctctggcattggcacattctccgagtggatgtgccatcctttgcatagcagttggagcaattccaaggggcatggaaatcttttctccaaggacaatagttgacaagtctatgttttctacgtttcttaaacatcttggtcttagtttatatctgaaaaaagctctcctgttatccgctagtgtctcctgtttcccagctccacttctgtaataatccaaagcatttctgggaagaactttaacagcatgctcctcaaattccaaaacactgaccaaatcggacattttcacgtaaaagatactaactactactatgtaagtacttaagtacgaagtaag

SEQ ID NO: 7858 - DNA, 1266 bp, Diabrotica virgifera
  SmartBlast Evalue=2E-23; Info=Importin subunit alpha-2 n=1 Tax= Harpegnathos saltator RepID=E2BX42_9HYME
tgtgtgccttgaaaccaatgtgtaaccttatcaattccaaagatcagaagactgtccttgttgttttagatggacttaacaacatactcaatgcagctaataagatgggtcaagtggagaaagttgctattatgattgaggaatgtggtggcctagatggaattgaagccttacaatctcatgacaatgaaaagatatatgagaaagctcttagcatcatcgagaactacttctcagagggcggtactgaagataataatatgcctgccccagttacggcagatggccaaatgcagttctcttcccccacacaagtgcctaatggaggattctcattctaaaaccaaatttcattaagtatacaacgttttttactccagtttatccgatctcgccattccataatattaaggatagaaatagaaaaagattgctgattaattgttaaattagaatgattagaatcgagacccggaaggagaatgtaacaatgtcatcggtagcattttgtaaagatgaaatactccatgattttatttctgtatcataaattttgattttttaaaatgtcttctttctgtagcgttgaaataatcagaagggcgaataatttattttaatattgggtgggattgggtggattgtatgtcatgtgctgcttgaactactgttgtcgacaataaaacatgacttaaaccactttggagaacttcaatatgtgtaggacagatttgtctttaatacaaacaattttagaaccatacagaccataatatattatgtacttcatatcttgaacaactttgcatagatataatagattgtatttatttatttatttgtttgttttataacaggaaacaacttggtagtgatacagaacagatttttacataggaaatctgttgtctgtagtctagattgacactttttgttaatttttttacaacatagatgtacagtatggtttttattggctatataccatgtgacatttgaactactatctgatagtggtctgtaaacaggttagaatgtgtcttgaacaccttttgaaccttataacagatatagaacacaaattttatttatgaacacattttcaggataataaaaagcaagtattgtatagaaaatgtacctgtacgtgaagtgtcacctattctgtcagattgttgtacaatactattttattgcttgtgtcatgtgacatttgaacttactttttggtagtgacctgaaaacacttctaacaactttacaaca

SEQ ID NO: 7859 - DNA, 1268 bp, Diabrotica virgifera
  SmartBlast Evalue=1E-93; Info=Pom1 n=1 Tax=Aedes aegypti RepID= Q16JS5_AEDAE
agtgctcctactgcatcttgattgtaaatttagtatagtcacgtgaaattaaggttacagaaacgattagggttttgacagctggtggttacgtgggaaatttaaggttatttaaatttcgtgaggtagataacgtaaattgtaaaaacctcctctgtggctcagtggtaagggagcctttggatccaattgttgtgagttcgaatctcaactgggtaggaaatttttcatttattaacaattaataaatgaaaatagtttctatccgtgtgggatcggtactcaccgaagggatcgcagacgttcggatacaattagggtgtctttgtaaagacattgaagttgactttactaagcaataagacacacattacactaattgcgaaatcactgtaccatgccaatggccattagtttttgatgcattagctgaataaaaaaaatgagtgttagggacataacttaaaagttgagagataatgtaagctttacaatccaattacacacactacattgataacaatcgtgtaaaacttgttgataaaatgctttaaatctttggtatagaaacatcagtttcaggatgtgttaaaggttggatcagatccacttttttctccttcggtttcttttgttggaaactcaagctatctttatcgaaatctaatggcattattcctaagtctccactatatctatttttgacaacttgtaaatatttctttcctcgaagagcagtaagtcgcttatcttgaataatgagaatattatcggcctcttgtgaagctttggcgcctccaaaaatagaactggtagtcaagtcttcggcgtccctttcttttctgggatgtataaccaaagtaacatggcagtttttccgcgtggcgaactctctaaagcaacctatgattagatcttgcttccagaatcggtccatgtgtttctggtcttccgaagtgcccatcatgaattggagattatcgattatgacgtgcgctatgtcgtggacgtatgtcgcatgttctattgcctccatcaccactttaatactctggtggccgtgaaacgtcataaaatatataggtaacttctcgaactggtctgcccaataatcgaataaatgcaaatgttcgtcaagaggaatgccagccaactgctgcagcatggtttttgctagtcttgcgttgcgtatctcgaaactaccccacaaggtgtttacctaaataaagaagtgaatttataagagtcaacgtggtattgaatgatat

SEQ ID NO: 7860 - DNA, 1267 bp, Diabrotica virgifera
  SmartBlast Evalue=1E-149; Info=Cationic amino acid transporter n=2 Tax=Culicini RepID=B0W124_CULQU
cgtaaaattacgctgatgaacggggttgctattatagtgggtacaataataggaagtgggatcttcgtttcaccccaaggggtttatgtagggacaaaatctgtcggtgcgtcgataatcatatggtgcttttcaggaatgttttctatgttaggagcgttatgttatgctgagttaggaacgtctgtgacaagatcaggaggagactacgcttacatatacgttgcatttggccccctaggagcgtttcttatgttatggatatcgttgcttatcataagaccaacaacacaagccattgttgccataacatttgcagaatatgctgccaaaccatttttcccggaatgcaagccacctgaaaacgctattaggttattagcagctgtttgtctatgtctgttaactgctgtcaactgtttgagtattagatgggccatgagaatccagggtgtatttacttatgctaaaattttggctctagtgggcattataataatgggagtatatcacttagcgagtggacacacagaaaacttcaataatgctttcgatggaaaatatgatctctcacatatagctttaagtttctactcaggcctattcgcatttggaggatggaatttccttaattttgtaacggaagaactgcaagacccttaccggaatttaccaagagcaatatggattgcacttcctacagtaaccggtatttatgtactagcaaatgtagcatattttgctgttcttacgggagttgaaatagaaagttccactgcagttgctttgtcatttggaatgaaaatgtttagcggcgtccaatggttagtgcccatttttgtcgctctttcaacgtttggaggtgtaaacggcattttatttacttcttcgcgactgtttttgactggatctcaagaggggcatttaccacaactattctcctatattcatgtgaatagaagtaccccgataccaagtttaatcttcacatgttttacatcgttgttgatgctgttcatcagcgacgtcttcgttttgattaactactacggccaaatactatggctttcaagtgctgcaagtgtggttggtatgttgtggcttcgttacaaaaaacctgagctgcccaggccgattcaagtacatacttctatacctatattatttttgctctgttgtgcatttataattatattcccattccaacacaaccatggaatacactcattgaggtagcaattcagaagcctcagggtaggtaacttgg

SEQ ID NO: 7861 - DNA, 1269 bp, Diabrotica virgifera
  SmartBlast Evalue=3E-90; Info=Beta-parvin n=3 Tax=Aculeata RepID=E2BWM8_9HYME
gatcaaagagtgtatcaaaagcatctctctcgcatctcataccaacatcatcataagcttttgtcaaactttctctgacagtcttgtgtactaatctaccgccagccttctgaactaccacaacttcaactgaaacatgttccggaagccttactggaggtctaaaatgccttgctagagctaccaatagatgtgttatagctactatattcttcgagtgaattgattctacattccatttattatgagataacctttggattcccaaaaccttattaaaatgatccaaaactaccattagtttttgcttttgtccttcttcagattgggtgacttcagggacatcaaatttatctcctgtaagcttttcgagtaatttttgtagtacttgtccatcatacaagtcttcagatagatcctgcacaataattctttgggaagcaagctcatcatttatccattcttttaaaacattaagtaagtcataaaatttaggatcttcatatgctcgaggttctatcatacatctttcttcattatcttcaaggttatagtcttctgggggtataataggagcagtaggacaacctggagaatcaatagcatgttttccctctgcttgtacttcttggacttccttaattcgttttttgcgacctaaagtaccaagtttatcccatattgtttcttctttctccccttttaatggcacagggcgaggagattttggtcttaaagtagccatgtcttcgtttcgatgagaagctccacccactgtgttgtctccgtccttgtcttgttgactatcctttttcctgtgcaaggcttttagtagaccaacggatctttcctcttcctcgtttatttctgtcatcatattttctttagacaagtgagcttctgtcatcatatcattttccgatgcatcactagaatttctagaactagtggaaggaggatcgtgtaatactacatcttttttgaaaccaatctcaagtttcttacttaactcttctcttaaactggaaaccgaagtttttctttggatatcttgaccttcactcatattattatcgtagacactagttcgcggtgatggtgctttctgattttgttcacttttataaatatgttcaagtttgcttctaaactgtttacttgccgtaggagaaatatttcctccatcactatcactcttctttacgttttcaaacataggcgacatacttttttggtttaggagataccatgggtgcactcattccatgt

SEQ ID NO: 7862 - DNA, 1269 bp, Diabrotica virgifera
tgatactcagacaaaagacgatacacaatctgatattggtccggtctcaattgagtcagaagactcaaattacaggtccaaattacaaaaaattgaaactataccatcagttgaacctcaagaacaaataactactgagggcaaaacacaagaggttggaaaacttacatactcagatattgttaaagaacatacagaatcaaagaaagatattttaaaactacaagttaaagaagaaactgaaattacattacctaaagatattgaagatccagttaagattaacgaaaaagaagttacccaggtagttaaaactgaagaaattgtggttcagactgatttaacccaagatgtctattcagcaagcgataatgagaaattaatggaatctgtgccaaagaaatctaagaaaaacaaaaagaagaaaggtattgtggaagtagaatctgatactaatgtatctaaagatattgaagaaccaatcaaaatcgacaatgagaaagtaattgaggctgttaaaactaaacaaattaaagagactgatgttgaagctgttacagatcagaaaaacgtagtactccttgaaactgttgatgaggttcatgccgaatccctattgaagaaatctaagaaaaacaaaaagaagaaagatcctgctcaaatagtgcaatctgaggttacttctagctctaatgaaacagaacaagttgtggaatctgaggttactcctagctcaagcgaacgagaacaagttgtgcaatctgatgttgctcctagctcaagtaagccagaagaatttgtgcaatctgaggttactcctagctcaaggaaaactggtataaatactgaaatcgttcgtgaagtgacaattactactgtagaaacgcctacagaaactgaaagaacagaagaacatatttatgtcacctctgacgttaaaaaagaagaagaactgacgccacaacaagaatctgagttgtttaaagttgaaagttgtgttggtgaagaagttgttgataaaaatgagttgaataaacgagtagttcaacaatttttagaagatgccaagttatacgatcagtctgttttgaaagagacaaaagtagttcaagaatttttagacgatgccgcgaaatatgatgaagcttatttgcaacaaaatgaaaccgttgaatcgaatgatacgtttgtgtctgctgaatccacaccttcaaaaccgtccaaaaagaaagaaaagaagtccaagtttgagtctgaggaatcgaagaa

SEQ ID NO: 7863 - DNA, 1262 bp, Diabrotica virgifera
tttgtaatgtcacattaatcttaacttcctaatgttttatagtttcaccgtgtataattgtgagacatatcgattaatagtttaatcaccagtttattcaacttccggcaagttgaatgaattgccaaatattgttgcaatggttcctcgtttgaattgtatttgtcagctttcaaagtgtgtacaaggtttttgttactgtgctagggacattgacctttatgtcgagatgtactttattggtaggattttttttttatccggttcgaaggataagtggacaattcgatgtaataaagtttcgaattgtctctaatgatctgtgtccgttttttctcgatcggcgataataaataaatgttgaagtcgttgagtaaaaaaaaatgattttattgacagctactgaattattacactacagttgttggttagataaaattttataatagactgcgctcaaaagagcccatatcccctaatttataattttaccaataatgtacacctcggcataaaggttatggccctggcatagtaacgggaactttgtacatgctttgaaggttgacaatatgatttggacgaggaactattgcaacactatgtgctgtgatacctcgtaaagtgttgcgacggcccagtttgcaaattttcactagtaatcctcgatccctatcaaacacaattcctggtctaccaaaaattttgtctagtttgagcattgccactttcacgataatgcttaagtatgtcagcaactgtagacttagccagatctaatttttcagcaatttccagaattttttactctgacaatattttttaattatcaattggtgaaatttagtatgtggattggttaaaattgtgaaaggttgtaaagatgaacgttttcaataaattttggtttatccgaacatttagttgttagggcttgcacaccattgttctcgaaattgaatctctatttaaaacatacaactcataatatgtattgtacattctatttatcgtatattgtaaggtctttagctttagtacccttgtgtataatatagccgaattcagcaatgttacaaaaataatttaattgcttttaactgatctgtttattttttataaactctttatcattaaaaaaataaatatagatgattgggtttcgatttaattcgtgtctctcaccattctcctacaggtgtttcatattttacgtttcatcagggaagactttgtgaacggagagactctgtatcatttta

SEQ ID NO: 7864 - DNA, 1267 bp, Diabrotica virgifera
  SmartBlast Evalue=1E-123; Info=Mitochondrial glutamate carrier protein n=2 Tax=Aedes aegypti RepID=Q16QJ1_AEDAE
agattcttttatataaaatatactgtataacgtcacatgagaaatatttttcaacgtttttttccaataataaatataaacattctaacaaaaacagtaataataccgtaagtttactataaaaataattgtttttaaataaaataaatagactgcgttattacttaaaattgctttaaaaattattgatttctattaaaagtttagcctcgatggtagcccattaggtattcagccacgccaaggtagtagacggtctgcgctatgccaaagagaggtgcaatgacaatcatacggcacgcgccacccttgaagaatgcttttggaccttcgtacttcagaatattgacaaatgcgtttcctattcctgtataggatcgttcgccttcagctttcgtaagagcttgcaatctcgtcttgacaacatcgaatggattaactgccaaagctgcaaaagatccggctacacagccagacaagaatgaacaccaaaatactgcttcgttggaatctttacttcttcgaggacccaaatcattaagagtagcaaataaaggaaaatatatcacagaaaatgagacgtctcttaacatagtcgctccagtacccttgtacaatccaagaataccatgttttttgaacaaaccaatggccagttcggttgcggacgtcttctggacagtcttaccaactaagagagcttgtgcggcaacccttccagcatcttgcatttgaatttttaataactccatgggagttgtaattactatttgacataatcctgccgaaccacctgctagcatttgtctaaacattggaagggtcttgtctttagtttgaaggttgtatctgaaaaaatcgttagctgctaacttgatggctttttctggagtaatcagtagaatgttaacggcagatcctcggtacatgcccagaaacccttcggccctatacgtcttcttgaaggcgtcaaccatactattgtacattttctcgccattgggaccaatttgttgattttgcagtctagttttgacaagatctaaagggaagacacacgtgacaccaataataccggcaataccgccattgacaattttcggaactaatgagaacgacgcttgcttttcagccataggagaattcgtgcttaatctatggtaatcctttttttttctatagtattttgttgtttattcacgtgcactttccaataattattttttaaagacgccttattatctcaaaaaatatattatctgctctg

SEQ ID NO: 7865 - DNA, 1267 bp, Diabrotica virgifera
  SmartBlast Evalue=2E-89; Info=Acid phosphatase-1 n=1 Tax=Aedes aegypti RepID=Q17L85_AEDAE
aatataaaacttgtattgaaaaaatgtattatatacacatttgcttaaaactaatatcactatggtcctcttaattcaggtacaacaaatccttcatcatctactttacattcttcctcccagtttccagggatgatactcttggtgagctctttaagtttggtcaatggacaaaaactgtcacatccaggaattcttagtttaaatggaggcactacggttgtgtttcttaagtaaatctcaactccatattcatttgttgatctatccttagacagttcgaataggattgaaattgcgtaatcaggtacctgttcatcccaaactttcaaagcactcatcagattaacgatggttccgtcatgacctccgtacaagacagctttcctcgctagcttgccttcagatttagctgaccagtcttcaataagtttttttaccaatacacctccaatcagcctgttcatctggtcattgtatgcattcaatacaaagcttcttactgtggggaaatacatcctatcgggataataatttttagtccagtcaggtaattttaggtggaatttctcctcagccatgagagtagtataaatatcctgaaccccttcaaaatcttcagttttctgacctgtgatgtctgtcaattctttgtagagatcttcatatttactaagcatatctttgacttctttcgattcaaaaactttcttcttctcaacgtggtatttgggacaaggttttcttacaagtaaaagcatgtcttgtgatagaggttcagaagcaactgggattggttgccagtccaagggtccccatacttgttcacctttggggggccataatccggcatttaccaacatcatacttgctttcgttctgtctacgtctgttgattgggtgtagtattcgtcgggtgagtatttgtctccaaggaatttcccatatcgttccctgtagtattttcctatttcgtataaagcttttttaccttcgttggttagttgtccccatccagtggggtataatggatcatttttgtaggggtcgttgggataagtactgacaggagttctagcaccgtgtctcataactatatggaccattttcagttctctgtcgggaattccactgacgtggattgcttttattcctactcccaagaagaccaaaacagctgccatagctgtcacggtaccgcaaataaatgtccatctcctcatcttagtataaaaaataaaaacacaacttcatcaattgatcagtc

SEQ ID NO: 7866 - DNA, 1266 bp, Diabrotica virgifera
  SmartBlast Evalue=1E-107; Info=3-hydroxyisobutyryl-coenzyme A hydrolase n=1 Tax=Glossina morsitans morsitans RepID=D3TLD0_ GLOMM
ctggcttattaatttctcatccaattacaattctattaatgttaaaaacgctttttcaacagcgaggtaactcactactcactctagtccaaggtcgctgttaagtgcattcaaattaaaaatatatttgtctcacaagtcagattaatatgattaaaccacctggttcgcttataaaaagttttaagtgcctgctaacctcaataaaccgaaatatgtcgtcgcaaacaagtgaggttatcgtgaaagatgtgaacaacaaaggtgttttagtgcttaacaggcccaaagcgttgaacgctctcaatttgtccatgatcgagaccatcaaaccagtattaaaagattgggagagcaagaagtctttagtattaatcaaaagcacgggagagaagtctttttgtgccggtggtgatgtaagagccgtggcagaggctggtctgagaggagaaaaaaccttaggacaaatcttcttcaagactgagtattctacgaatgcattaattggttcctataaaattccttatattgcgtttatcgatgggatcgtcatgggtggaggagttggtttgtcagtacatggcaggtatagggtagctacagaaaggtcactatttgccatgccagaaacacagattgggtttttcccagatgttgggggatcacacttcctacctagactcacaggaaagctgggatggtatctagcactaacaggccaaagattaaagggatctgatatactcaaagcaggaattgctactcatctctgtgatagtaaagatcttcctcagttagaagaagccttgttgaacaattgtacaactgatgcagatatacaaaatactctaatcaagttttccaagaaggatgtaccaccattttcgttagaacaagtattagacaaaatagatgattatttctcagctcctactatggaggagatagtagctaaattagaaaaggatgacagcaaatgggcacaagaaactttagcacttttaaggaaaatgtctcctactagtctcaaagtgtctttaaaaatgttggaattagggcaacactataacctcgatgactgtcttcacatggaatacaatatgtgcttgactttcttgaaaaataatgatttctatgaaggtgttagagctttgttaattgacaaagaccagaaacccaactggaagcccaagacattggaagaagtcaccaccaagatagtagatgagtacttttatgatttaccaaaactaaagatcaaaatgt

SEQ ID NO: 7867 - DNA, 1255 bp, Diabrotica virgifera
  SmartBlast Evalue=5E-13; Info=Zinc knuckle domain protein n=1 Tax=Penicillium marneffei ATCC 18224 RepID=B6QJV7_PENMQ
atcgattttattcaaagtccaggactcgacaccataaagtagaatgtagaatgtagaatgtagaaaatggggcggccaatagagcctgatacactgcgaccttagtagatctattgtgtttcccctttcttttaaagcacttcatctagcttagtcctcttaatgagacttaacagccttgatagtggccttttcatgtagcctggtgcttccggtttttcctcaccgagttctagaaaccgcactcgtgcgagaccttcgcaatgacacagaacgtgtagagcggtttcctcttcttccagacagaaccgacaggtgtcctcttctgtcaggcctatgagactcaagtgtctattgagtctacagtgtccagtcagcagacccactatcattctgacagtgcttcgactgcgcgaaagtaagtctgttgtaaatttagccgaatgtcctttgatgaactgtttggcctgtctctgtcctggggagttgttccaccattcaagagacctctgttgcgcccatttttgtatagctgctctttttatcgtatttgcgattccaaagacgggttccggaccaaccagtggcgtagatgcgccttctcgggccaattcatcggccttctcgttgccacgataacccttatgtcccggcacccaggcaagtgtcaatctgtttcgacttcccacctgagagaggacactcaaacagttccataccagccatgaatcgacctgtaccgaactgagagccttcagagccgcttgactatccgaatagataacgatggagtcgttatctagatttcggctgattagttccatagcgcacctttgtatagcagctacttcggcttgaaatacggtcgcgtatgttcctagacatacccggacttccgtccttggctttatgccatatatttcagcccctgtaccatattgagtttgccgttagcggcggaccagtttcccagtcctctctttttggtcttgtaatttgaaaatttttgttaaaactatacctcgtaaccattcggtctacaggcattcctagaatggggtctgcctttatgtcctggtatagccttaagttatcagctccctgcatcatattagagcttggccctggatcaaccgatgtactgttgatctggcttcactctgtatgcatatacgcagaggtggtaggtttaacagaacttctagcgcgtccgttgggtctgtttcatggctcctgtaatactcaagcatgccag

SEQ ID NO: 7868 - DNA, 1254 bp, Diabrotica virgifera
aataactattatcgcaacattgttaattaaatgtatgtcaaaagttaaattctgtagtattttgtaattatattcatattcaccaccactaacagatgcattcattgaaaccaggaattatacagatttacacaacagtaaattattaccagtttataaatttccgtataaaactttgataaaaaaaccaagaatcataattcctaaatatacagaatcaaatcatttaaataatattttagtaaaatctatactgagcgactttgtggattatacagtaatttacacagatggttctaaaaatcaaacaggagtaggatgtgctatgtatgtgcaaaatacccatcaacatataattataaattatctagtattagtagtatttttacagctgagattatagccatcgaaaaagctctagaatggatcaaagagaataatattgaaaaagctgtgataataacagactccagatctgcaatatatgcaattgaaaatactgattttagttcatacaaatcaaaaattttatgtaatataaaaaataatttgtctaaagtggaagtagtatttatatgggcaaaagggcatgccggtatactgggtaatgagaaagtggatgagttggccaaagatgcaataaaaaaatggtgagatctaactcagatcttatcgacagatgcaataaatgacgtcaaagatagaataaataaaatatggaaaaaacaatggaaaaatatttcaagcatatcaaaaaatttatatttttctttacatcaagaacttcctccgccacctgaatacatatttaagtataacctgccaaagcaagatatttctactatcgtcagattaaaaactcgacacggaaaatatgaggcacatctgcacaaattaggaatagttaattcatcagtctgtttttgtgataatgtttcgattagagatttgaaccatattttctttgaatgcaaaattaacgagagatatataaatcaattatattacaatttacgacaaacacaagttcattttccaattagtatagaatatctataagttgtcataaaatggaaatatttaaattactcataaactacttgaaagaaacaaatatagtcatttgagtcagataggtgggaatataacaaaactaataaattgaggtaaaaataaataaaaatctgtggctaacggactcgcatccaagccattttttcacacacacacacacaccacacacacacacacaca

SEQ ID NO: 7869 - DNA, 1264 bp, Diabrotica virgifera
  SmartBlast Evalue=1E-163; Info=Eukaryotic translation initiation factor 3 subunit M n=3 Tax=Aculeata RepID=E2A8T3_ 9HYME
cttttctatcgtttatggccagtgtggctaatagataaataataaatatattttatataaagtaaaacacaaatttcacgatgcaagtgcctcctgtatttatcgatatgtccctggaagaccaggcccaagaactcagggtgtatttaaaaagtcttggcgctgaaatttctgaagaaaagtctccgaaaggtatagaagacgatttacataaaattattggagtatgtgattcgtgttttaaagagggccaggaaaatgatgtggagatggtgttaaatgacatagtttccataatggttttgattccattggaaagatcagaaaacatcatcctagccttctgtgaaaaactcacaaaagcacagggccaaaagttaggtttagtatgtcttagagcattatggttactcttccaatcattggatgatcgttctccaatgcggtatcctgtatattaccacttaatacaaattgcgaaacagacagaatctgtaaaattagtgtttcaagatatcaaccatctaaagcaacagtttgccaattgccttccgtctaatgaacagcttcaaaagctttataggcttttacatgaagtactggttaaatcaaatcaaagtgagcaggctgctttagtgatgattgaacttcttggtacatacactgacaaaaatgcttctcatgccagagaagacgccatccgttgcattgtatcagcactagctgatcccaacacattccttcttgatccattgttatcactaaaacctgtcagatttttggagggtgatttaatacatgaccttttaaacatctttgttagtgaaaatttgtccacctacctcaagttttacaatgaacataaggaatttgtgagtgcacaaggtttaaatcatgaacagaatatgcaaaaaatgagactgctttccttcatgcagcttgctgagagtaatcctgaaatatcttttgatgtcatcgaaaaggagttacagatgaaaccagacgaagttgaaagctttattattgaagtattaaaaaccaagttagttcgtgcaagaatggatcaatcttcccggaaagtctttgtgtccagcacaatgcacaggactttcggaagggcacaatggcaacaactgcgggacttactgcactcttggaggggaaatataagttctgttcaagacggtatgaagactatcgccgctgctcagctagaacttatgaaccaacaacagtaatgataatgaagttttcataactttta

SEQ ID NO: 7870 - DNA, 1262 bp, Diabrotica virgifera
aactataaggtacataatataaataaagaagcattttcttattaaaaaaatgtttaaagaaggcgataaaatcgagatagtacaaaatatccattcggggtgcaaaattaacgggacatcatcgtctttgttttattttttgtaatattacatagaaaatagaaaatgacaagtgtaaaagcgattcagttaagagactccatttagtaatgaaattatggattatcgacttcagagcgacgctctcaaactagttttatgtttttccgatatgtccgcatagtattaaatccaaaaacgatttcgtttcttcgaacaaaacgtattttttcgtaaattagcgtttttcgacaaacgaagacaagttttttgccgaaatatacatatacaaaggtttatacgaagctataaagcagttaagatataaattctagctcgtttttggaaataatcaattcaaataacatttcaaagtcgttggcaacattctactgaaagttgccaacgatattatcgcttttatacttgaatatgttagaaatcttatatagttgtagtgtacttgtttaacagttgctgatatatatttttttgtaaaattattaattgctgttgacccgttgattttagttgtacacatattttatatgatatacatacagaacttaaatttttccgtcccacataccattctcggtttgaaactgttaaaatgcaacaacaaaaattgcaattttttgtactagacaatcaaattttcagctctacagtgttgccgtctgtgtgatactagtatcggttctgggtaaatgcgcacatctacgagacggaaaaatttatgtactgtatttaaaaagtgtgcatccctgtcaaatcgaaacttcttaaactctgttaacctttaacatttcgtacgctcttttaaacaaacataacaaagtacacttataagctagtcttccataagctaaatcgacaacaataaaaaatatctatattatctatatacgaaaatatagtatttcggaattcgatagtttcatttaagctaagacggtatttttatttgttttcatttttttttttcgtcgacatgatgcagaaatcacccaaaacaagtgagtcttatctggccaggtatttgacaagttttttgcgcatttaggacaaaaaattattttttctgtcgtaaattacgtgttggttatttattgtacgagttgaaaggttgaaaattcaaggtaatttatcgtaaattcatg

SEQ ID NO: 7871 - DNA, 1264 bp, Diabrotica virgifera
  SmartBlast Evalue=1E-129; Info=Chitinase n=1 Tax=Monochamus alternatus RepID=A4PID4_MONAT
ctcagactagcagtataacttaatcattttttattttttattattacaatgaaaatcaattaccatattttaaactttaaatactacactaattatttattttatttatagttcttaatagtggatatttatctccgcacgctcctctaaaatcgtcataatcgagtgaccacaacatcatgcctcctaagttattttcaatagcatagtttactttttctgttaaagacttctcatcttcaaaacccacccattggtcactccagtatctgtgaggaactctctgttcgtcatcccatacgtaagttgagtcggtatagtatttgcaaatctcattatatcccaaatatccagattgttgtgaataaggtccaactctacctccacctttgacaggagcatatagagcggtattatttttatcagccaaagtaaaagttcttccataagcgacaacacccaagtttaattttgcaggatctgcaccaccattcaaccaatattgaattcctgtatccacattgtatgttttattattatagtaatcgtagtcaactttagcgggaaaaagcggtgagatatgtcctacatagttgtcaaaagcgccgtggaaatcgaaaaccataacattgatcaagtctagtagctttgaaatcgctggaatgtcgtaagcttcatcaattttttcaattgctcccgctactgctgcacttaataagtatccctggggctttaaaacattactaagttcttgtaaaagtgccgtgaagtcgcctttgtcaattgttgtgtttcctcctctcaatccaggatattcccaatctaaatcaaatccatcaaagttccacttttttataaaggtctcaacgttgttggccaatatttttctcttcattgcatctgcagctactattgagtaattctgagatgcttcgttccaaccacccatacttataattactttaagatttggatttgtttcttttagagccaccagatttttgaagccctggtaacctccaggatcatttgattcccacgaatctaaaatgtgaatggaggcatctgcgtaaagaccaatgaaagcaaaattgatatgggtacataacgatgggtctatgttacgtacgtcgaaagatccatctccaatcctataaactgtccagctggcgaaatagcaaacaatattttttcctgaacccaaggtaggagcagtgcacaatgttgctacgaaacaaagcgttataaacagtttcattatgat

SEQ ID NO: 7872 - DNA, 1262 bp, Diabrotica virgifera
  SmartBlast Evalue=7E-66; Info="Lupus la ribonucleoprotein, putative n=1 Tax=Pediculus humanus corporis RepID=E0W2T5_PEDHC"
caaagtcgtaagtttgaattccggagaatatttgagatgggcgaaggtgaatatgaaaatgaacacattgaagtttcgaaaaaaggggcgacatcgaaaaaaattactctataattcaattttacaactaatggaattttatttcagtgattctaacctagctaaagatagatttctttcacaattaattagtgaaaatccatttgtagatataaatatatttttgaaattcaataaaattagaaaattaaactgtactctggatgatttacgaaaagcaattagcaagtcggatatgatagaactatcagaatgcaaagaaagaataaagagaaagatgcctataaaaattaatgaaaatgtagacaattgtacaatatatgttgaaaatattaaagccgatgctaaccatgagtgggtttcacagatattttcagaatttggaaatgtggtttatgtttccataccaaaatacagacataataaaacaaacaaaggttttgcttttgttgagttcgaagatgaagctggtgctaaaaatgctcttacatactttgagagtattgggtgtaaaatgccatcagaaacaaacccggagaatttaaagagtattcagacatttcaagaaaaggatgcagatgatttagccaattcagaatgtgccactgatacaaaagaatacaagcctgaggaaatgcaggaagctaccaagaggaagaatgaggaagattcaaatgaatgtaataaaaaaagaaaactggattgtccggaaactaacaaagatcaaatagaaaacaatgaatcggacaatataaacaagactgaagaagatttaagagagcctaacaagaaagtgaaagtggacaatgatgactctgacccaaaaacagatcatcaagaaaatatggaatttgaagacattgaacataagaagaagaaaaagcacaagaaagataagaagaaaagtattattaaagagataggactacaaattttatcaaagccagaatggaaaaaaatgagaaatagatatttggatctacagaaaaagaaaatgaaggaattcaaacaatatttaaataaaccgaaatttagtcaaaaacatgataaattcaagaaggggaatattgacaaccaacaaagctctcaagcagaaaaccagaaggaggagtcgaatgtaaaattaacatttttaagtggagtcattgtaaaagtgacactaccagaaccagtggtagatgccaaaaaaataaagaacgaaa

SEQ ID NO: 7873 - DNA, 1263 bp, Diabrotica virgifera
ttactgagggccgaaagtacctaaaaacttctgtaatgtttattttaataagttacaggggtgaaaataaagaagacaatttagtgtgatttttaattgcaaatatttcattcaaaagaaagtttttatttattctacgggactttcggccctcggtaataacgtaattaacttaataaacattatgcgtttaaattttttaaaaatgcttattagttttctcaggatccgaaaaaaaatgaatacatttaaaacgcattgaacattttgacaggcgacattttgcacctttccccttgatctagaaatgattattgttgctaattatgtatttttttcgaaaaatttgccgccgattatactataatccattcaacgaactctctttggtgaattaggtataatgaccataatatggagacggcatatcttttgttgtgtaacattatgctaagatggcgaccacaaagctccgtcctcaaaatggatggagatggccagattagttgacaaatcgatgcctcagaagccaatcggtgtaagtcaataagtgtttaaaatgagatactaacatgtttctgacaatagttgcagaagtataagtgtagttattaaaaacaaataaactgtctttatttatcatactatgggtaacatattcgtaaatacaaacaaggaaataatattatatataataataagtgatatatctcaagtcatttttagggagaatgtgacttacactatttggcttctgaggcatacaaatattgtttttcgtacgtaactgtcatttgtcaattttattgttacagtagttgtcaacagccatttgacgtcttaacactgaagggaacagaagacatatttttccttcttaataccttattctgagaatacttgcgaatataaaaaatattactacatgtaaaaagttacgacatagaatttgatacagaacacaaatttttaaagtgaaacttcaggtcgtactcaaataacttctgtaaggatgaaggtgaaaatatgccttaacgtcataaagagcttctgaaaatgttcaattcttgacaatcctggccaattgatgttcctggaggcatagaaaagcaccgacgaacgtattatttgtattgaacgtattaaatgtattgaacatcttataaataaaaaaacagaccttgttgtaatcaagattgttgagataaaattaatatttacaacaatagaacgaacatgatgaacgtcctaagagagagagag

SEQ ID NO: 7874 - DNA, 1263 bp, Diabrotica virgifera
  SmartBlast Evalue=2E-96; Info=Synaptic glycoprotein SC2 n=1 Tax= Camponotus floridanus RepID=E1ZVD6_9HYME
cactattaagataaatttattataccaacagaccacaattaaataacgaaaataaaattaataacaaaagtataatttagaaaatttataaaataaagggaatgatagctttcctttgttttgggtagtctggaaattcttttttgtaattcttgtgctttcctaatgcccacattgtcatttgatagaagccagctgcagtaaagatcccagcaggaatgcatgaagttagaattgtaaaaccaatccatgaaccaacttcgtaactgtaattgggacaagaaacaaagtcgaatagtagatttaatggacaaccgtcaggacgagggatttttctaacagtacttccagcaggtctgagatttcttaaaagtagatgagttgctaaattccctgattcgcacacagcaaacatagctaatccaacagcctggaataaaactggaggaggtgtaaatagtggatgattaatatggtacgctacataaaggcaaaatccccaataatatccacaatttttgaataggtttctaattggcatagttccatgtgaaaaacgatgaacaaataatgtttctaggattctttttaggtaatggatggaccaacagcctagagctagcttggcggttgtggtgaaggtggcattgctagcagtatctccatacaggatccatggtctaaaagacactgcagcatatataaataagggcccagcatattcaagaagaaatactgtattccatccaatctgtggccctaagtctttaacaaatacttttcttaatgattctagattaggaatggtagcatcatttcttatatcctttcccttggcctctgacctcagtgactgtctatctgcaggaagtttcgttacttttgctatttctttttttatatcacctactgttgtgttgttggaagctgtaatgtccccgagttttttgttttttacagtataaacctcgacctgaaccattttttcaaactaacttaagaacttctcggttgatttacaagtagagtactatcggcgtcggtctctaactacttagaatttaaatatattcactcaagttaaagtagcacaataattcaaatcataaatattaaagagaggtaaaggtgtatatcgcctattcaaggttaatcaaattttaaactggctaacaacgctaaagtcgctaaaaaacactctacggaactcactcaatcaactgtcgataattgttttgatatgacgttacatgttacagttac

SEQ ID NO: 7875 - DNA, 1259 bp, Diabrotica virgifera
  SmartBlast Evalue=2E-70; Info="Autocrine motility factor receptor, isoform 2 n=1 Tax=Harpegnathos saltator RepID=E2BPI8_ 9HYME"
aaccatgtaaacaccacacaaaggtttgttttgtagacctatgataattgtcttattcagtttaaagcttttacatagggtactagctcaaattctcataaaaccaagctcttttagttcggtttccacaatcttgtaccccaaaaactgcgtcgttcagcccgtttctacatttatacaagttcaaactaccatttcacacaaatttgctaaaaactggcaaatattcagcagaaataccaaaatgttggaagaactttaataggtatatatataaaacgtaacaagatctaggaaacaaactgataagacctacaattcatttatgtgaaatgagctggctatttgctattataaaatcattctttgcaacgtatatttgcaggaaaattccaaatgacgattatctctcgagcaacgtatccaccaaatcatttcagttcgtctggaattcccttcaactttgaagttcgtccttgaccgatacagctgctctgtgcttctctatgtagcgcttcctggcttggtgtctcatctgttcctttcttctttggaggatcttttcacgttccgttgaggatttagagaagcggctacccaatggcactgtgtcttccacttcaacggtgtcattactaaactcatcccagtttcccgtgctaggctctggatcgttgaaattaagcaacgaaatgggatttcggctggccgactgctccatgtccaaatctctaaacataggtggcgccaccaaccttccatctagtacgttttcaatggtcaattccaccgaacgggtcactcgtaagtcttcgattatggtcggtatgggaatatgagggaatagagtctggacttgtcttgccatcgcgtctaattgggaattagaagcggagatgtggttttgacgtatcggttgggcgttgctgacttccacggagaaactaggtaaccaggatacatatcttgaaccatcgaaatggaaaaagtgattgaacggtcttcgtgtattctcctgaggctccacctgtatttctggaggttcaagacttgcaacagacggactttggatgttcaatgtcattctacaagttggacaggaagtatcttgttccaaccacgacaataagcaggtgttatgaaagagatgagcacacggtaattttctggcagtttccattttctcccagcagatggcgcaattgtctgagttttcctgcaactctttgtcagtggccatagggtagttttgttctagg

SEQ ID NO: 7876 - DNA, 1265 bp, Diabrotica virgifera
  SmartBlast Evalue=8E-38; Info=Reverse transcriptase n=1 Tax= Schistosoma japonicum RepID=C7C211_SCHJA
ttcccttagatgaaaccatcaacataataataaattcactttttccaagttccaattcaaactttttaggaatgaagcagtcaaaatttaaagatctaccgacattagctgccaaagaatgtctattcagttttgacggaaaagtgtatagacaaatagatggcgttgcaatgggctctcctttaggaccagttttcgcgaacacttttctatgtcaccatgagaaaacatggttaactgactgtccaattgattttaagccacttctttatagacgatacgtggatgatatttttctcatcttcaaacataccgatcacattcaacattttttagattatctcaaccagaaacaccacaatatgaaatttactagtgaaattgaagtcaatggaaatctgcccttcttaggaattaacatcttcagatcaccttcaggtttttccacttcaatatacagaaaaccaaccttcaccggcctgtatataaacgcagatagcttcattcccaacaaatacaaaacaagtttaatcaatatacttgttcaccgcgctttcactatctgttcaaccgggcaattcctacatgaagagttagaaaacataaaggtaatcttaagtaaaaatggtttttcgttgaacttcttagaaagatacatcagacgttttttcaataacaaattccaaccaaacagcaaagtagaaatcaaagaaaagatctatatcaaacttccatatactggttaccacagcttacaaatccgacgcaacatccgtagaacaattaaaaaagcatttccctctatagaattaagatttgctttcacaactttggaaaggataggatctcgtttccatgtgaaagacatgattcctagtgatcgcgcatctaacattatataccaattcaaatgtagtagctgtgcagctacgtacgtcgggaagactcgacgtcactttaatgtcagatgttgcgaacacttaggtgtcactcctcacttaggaagacgatcaagaacaattccaaattcagcggtattccaacatatgactgattctgaccaccctattagtcgtaaggacttctcaatcattggtcatgcaagttctccaacggaactcagcatcaaggaggcattatccatatttcttttgaagccacccttaaacacgcaacaagacatggcgtgtttgaaattattgacttaacccaatgattgtcaatgtcatttttacgttttcattaattattgtttgttcctttaa

SEQ ID NO: 7877 - DNA, 1263 bp, Diabrotica virgifera
gcgaatatttcgcgaaatgaatgacatggaaaaactaaaaatacgttctcaatatttttcaaaaatctatcgaatgataccatacacgactttccagggagaggggtgcgggtaaatttaaaattttaaatactaatcccgcgatattttgcgaaattaacatcagatcgaaaaactgaaaaatacacgtatttaatattttcgaaaaatctatcgaatggcaccaaacacgaccccacggaggtggggtggggggttactttaaaatcttaaataggagctcccatttttattgcagatttggattcgttacgtaaaaataagtaacttttattcgagacattttttcgaattatggatagatggcgctataattccaacgattgaaaattaaattaaaaatggaaagtccccactaaaatggaaaactctacttaatttttttggttttaggacctactcttcacaaccgaataggtcccgataacgctctagtaactgcacatttagcatacttggctcccctaccatatcgcttatccttgttgtagtttttatggatagacggcttaattttgggatactacgtcagtaattttattcatgtgcaaagacacgttggcacaactgtattgaaaatcgttttaagaagaaaataaatgcctaatgtgcaaatagtgaatcttgataggattgtgatataaatgacacttaaattataaacggggttacacccaagttacggatttctacttcccaattcatgacgacattgaaacctaaaattctaaaatacgaatgtaaaagttatattcattatattctaaaacatcaatcatgagtacaatgcgttatacactacaagctagtcctcaaccgaaaacaaaaaaatatatattaatataaacctaacatctattatcacaagcatcaatatgatgtactaattcatcacaataaaatacctagtaggggtcgcactaaacctatcttataaagtaaaagttcgatccatatttaaatcaaagattcttagcattagagtagaaagaagattttttgtctctatttattaatattgttttttaaatgttcggtaaataccctgttatcttatgtaaaaaacttatttatctttcaaatcctaggcaaagaaagaaaattaacaatttcaaaataccaaaattcaaaaatttcaaaattcaaaagtgtcaaacaaaatttcaagttatcaaaatttcaaaagttaaaaattgaaatttc

SEQ ID NO: 7878 - DNA, 1262 bp, Diabrotica virgifera
  SmartBlast Evalue=1E-142; Info=26S proteasome non-ATPase regulatory subunit 7 n=4 Tax=Apocrita RepID=E2A9P5_9HYME
cacaagtcacaggaatgaacagcaaatttttgaagtgtcatactgtttttatttagcaaaatagttaattgggaacaaagattttattagaataatataccgaaaatgccgagtcaagaattaacaactaataaagtaatagtccaccctttggttcttctaagtgtggtggaccattttaatcgcatgggcaaaatcggcaatcaaaagcgtgttgttggtgttcttcttggctgttggcgtgctaaaggagtcttagatgtttctaacagttttgcagttccttttgacgaagatgacaaggataagtctgtgtggttcttggaccatgattacttagaaaacatgtatggaatgttcaaaaaagttaatgccagggaacgagtagtaggttggtaccacaccggccccaaacttcatcaaaatgatattgccattaatgagttaatcagaaggtattgtccaaattccgttctagttatcatagacgctaaaccaaaagatttaggtttaccaactgaagcttatcaagctgtagaagaagtacacgatgacggttcacctacatctaaaacatttgagcatgttcctagtgaaatcggagctgaggaagctgaagaagttggtgttgaacacttattgagagatattaaagacacaactgttggtactttgtcacagagaataacgaatcagcttttagggttaaaaggtctccattcacagttacgtgatattagggactatttggtacaagtgtgtggtaaccagcttccaatcaatcaccaaatcatctaccaattacaagacatatttaatcttttgcccgatataaatcaggatgcatttaatacatcgttttacgtgaaaaataacgatcaaatgttagtcgtttatctagcagctttagttagatctattgtcgctctacacaatcttattaacaacaaactaacaaatagagacgcggaagaaggaaaaaaggaggatagtaagaaagaaagcaaagataaggacaaggataaagagaaggaaaaggataaagatgctaagaaggacgagaagaaaaagtaattgtgtattatatctggttctacattcaaatgttctcatgttgtgttttcaaacacgatattttaatggtttcaacactttccatttgattcgagtataataatttattttcattttatatgctagtttagtatatacctaacttccttactaagtttgatttatatttaggcaataaagttctttat

SEQ ID NO: 7879 - DNA, 1262 bp, Diabrotica virgifera
tggttcctaagacggttaacgttttaataacaaacgtatactctgtttcattaaacaatcgtttctgtagctttaattgttataaattagcgatgatgttacaggtaccaaaaggcagtgttgccaattatttatcagtctgtgtattagaagtaatgaatcataagaatccggctcgaaggaccaaatgcttatgtaggaaatattcttgaagaaaatggtcttgcttagatctgcccatttcgtgggaacgaacctatatttacgtgtaggccgatcgagtgaaagttacaaaattgcgttcgcatacgtttttaagaggcgcaataaatcagataaagtatcaagaggttgtgtgtcaaaatagcagtattaccaattactaattagtctttgtgctagtatttgagttggcatacactgttgtgtggaaaactgaacaatacgctattcatttgaagaactgcttcaaataatagcaaataatagaagtatagatcggagaaacaccgtaaaaaatcgggcaaaaagttgctttatataaaaattcaatgaacgaggaagtttatcattaagtggactttggaagagaactggaaggaaactgttcagtcagtcacgaagttatatgtgataataaatgtttaatctttaaatttgaaaacaaaaccgccaatttaatgatagagatcataaaggatcttaaatactacgaaaaaaattgtcagttctatcgagtaagtttcagtttgatttcatttgccttatttatggccctatttggaaatgtaagcgttaatgcccattgcccattgcccatgccattttcatggtaaatactatttaaattagtagcattgtagtttatgttggtatattgtatgaaaaaatcaaatttattactattttataactaaaaagctatagaaacgacgaatattattatcagaggtaaatgcaacgattcaaagaaggcaaaaagttaggttaagatacctgtcactgatattataaccagaatctcttggtcgtttgttaattatacttaaatcattgttccacgttgttaaaggcacataaagagtaagtatcttcgaccaaagttatcagaactcttctatctttcataatatatcttagcaataacagcttcaacgtgaaaggatcaactaatattccacatattgtgtacataaaaaacactgattattttacaataatattgagctctcactgcaacagttgttgttctttggtttgaa

SEQ ID NO: 7880 - DNA, 1260 bp, Diabrotica virgifera
  SmartBlast Evalue=1E-124; Info=BmAcer protein n=1 Tax=Bombyx mori RepID=Q9NDS8_BOMMO
agtccggtatggagtaggctgatcgcggtacagtaaaaagtactctatgtgtcccatttcgtggtgagctgtgttcatatcctcataattaacgtcagtacacattttgatcctgaagtcctttccatcgtagaagtcccaggctgaggcatgacaaacgatttccctatccttcggcttctctatgattgatctctgccagaacagatcgggcatagctgttaaattgatggacttgaaaaaactttcggccgtttcaaatatcttcttcgctgtgaagttctgtttcaacatttctgcagttatatcataatcaacaacatctggatatggtaatgtgaagcttgcaatattgttccatgtttgtgcccacatatttcctaacaaatgagcaggaataggtcctttctccgggacaacatctccgtatttttgtcttagcttgaacctcacataggcgtgaagttctaggtataaaggcttcacttgctcccataaagcttgtacttggtctttgaaagtatcgtcttcgtagtttaagagccacagttctgcattatcagtaaagttgtttaatttagctgcctggttagatagggtcacgtagggaatataatctgctttgcacttgctaagggcctttctccattctacccatacgtgttttagttccttttcatctctcgagtttgccaaaatagctgtcaattcaggttctaaagctagatcacagttggttttgttattataatcacaaatttttgccttggcgtacacagattccatgtcgctaatatgtttcttcaaagccttaaattctgcttctggtaaggctgcgcttccaataactgagtaagacttaaactgcctcctcagatcagtagaagagaagcgtttccaatcgaactgcttcacttgctcccaggtttctttatcttgttgggcgacttccgcagatacatttaaactaatttcaagattataatcggtaatgttagaagcataattccattcagctatcgttgccttattgagattttcctcattctttttattagtcactcttataaaattataagcagttgcttcttcttcttctatatttggatccttgccactggcggcaagaacaaaatacagaattatggctatcacagccaccatggttactgttgcggatataatccattttttgtgcttttgcaagaaattagccatgttttcactttcgcgcgtctttcagtggccacgacgattaga

SEQ ID NO: 7881 - DNA, 1261 bp, Diabrotica virgifera
  SmartBlast Evalue=1E-48; Info=Munc13-4 n=1 Tax=Culex quinquefasciatus RepID=B0W8K2_CULQU
taaaaccttaaacctaatgttgggttcgttcaagaatcccaatgactgtgatagctgtgatgctctgaccagaactgaacaaacgttaagggtacacggactagaaactactgatttaattcacgaagtacacaaaaatttaaccgccaaattcaaaaacacaaaagattctccattcggagagatctcagttagagccaaattccaagacaacgatctcatcgttgaagtaatgaacgccagaaacctgatggccatggattcgaacggatcctgtgattccttcgtacgggttcacctgttacccgagcacaagttcattggaatagagaaacctaagactaaaacccacaaccggatgcagtttccattgtacgacgaacaattcacattcaatttaacttgcgaccagaggcagatagaagatgctttaatactgtttagcgtcaaagataaagatttgttgggatataacaatcagtatatcggcgaggctttcttgccgtttagcgagatagaagacacttcggagtatatcaccaacttgtctcaagttcatttacccttggacaggcctacagaaagcagcttacaaacgatcgaaatacgcgctttggagcacagacagggtgaaaaattagccaaagaatttttaaagaagttcaagcagaggatgggctcctgatctttacttaatagactgttttactttaagattcgaagctacagaagagacagggtcacacccgtgttttaatagagacagtgttcaacaaggcaatgaattgttaccaacaagaatcatttttatatttggcaacgctttattagggatcatatattaggactttcttttgataagtatttttaaaacatctagtagataatttatactgcggaaccaatatcttcattgtaatggaggttcagaagcagatttaagacattttgacattgtaggatataataagatattggagaccaaggccaaagcgcggttgccggattgcagctgattctgtctcagtacgccacatctgcgcataaaccaaaattttacatagtggataaacgtttcttgtggggatctactttgtcgatgatttgtaaaattatttgaatatttgcttatctgaatcgcgcggtatacgtactatattggaattcgtcattataacaatttattgccaaacaatgtaagtaaccattattttttaacttgtatcgtcatattacttgctatactaagcgtcgatgtata

SEQ ID NO: 7882 - DNA, 1263 bp, Diabrotica virgifera
  SmartBlast Evalue=1E-116; Info=Sodium-dependent phosphate transporter n=1 Tax=Culex quinquefasciatus RepID=B0W5R8_CULQU
gtttcagtttatcgtagatagtcttgcgtggtagcagttgcgagataacagtgcataccgtgttttgccgatatatttttgaataactttagtggaaaaacatttaatttaggttatttttgttaaagagtttttccgtacaaaccaggaggctttccatataagatcataaacgtaaataaaagcgtcttgagtttacggggattcgtggaatggcaactgcaactaatcgacgaagatggtcagattttctaacatgtcgtcaagtgttaaatataatggtcatcttgggcttcatgttcaattacatgttaagagtaaatttaacaatagccatagtcgatatgatggtaccagctcagacaaatgccacgaactctacaacaacaacaaaggtaccaattgtggaccaacacaaattcaattggtcgtcttcagagaaaaacgacattctgggaagcttcttctggggctatattctaacagaattacccggaggccgaatggctgaaatcgtaggtgccaaaaaaattttcggaggaggaatgcttatggcaagtttgttgacagttttaacaccggcagcgtgttactggaacttttacgcgatagtgattctaagagcactagtgggatttgcactaggtgccacgtggccctccatgcctccaatggctgcaaaatggataccgccactagagagatctaagtttatggctaatatgatggctagcgcactaggagccgcaatcacattaccggtttgtggttacttgatcagtgtatctggttgggagagtgttttttacgttactggtgccgtaggtatagtttggtctatactttggttcgtgctagtattcgattctcccgcccaacatcccagaataagccaggaggagaggatggatatcgaagataaaatagccgagtttgaaggaggagctaaaaatattaaacctgataaattcccgtacaaagctttgcttacctgtgtgccagtttgggcgattgtagtgacacatgggtgctcagtatttggctattttactgttgtaaaccaattgcccacgtatgtgaatgatgtgctacattttaatataaagaaaaatggactattatcaagtcttccttattttggtaaatatgttatggcagtcatagccagctacctcgcagataaaataagaaaatcaggaaagatgtcaaccacagtaacacgaaaggtcttcaccactttcgcttgcttgcttcctgctatac

SEQ ID NO: 7883 - DNA, 1253 bp, Diabrotica virgifera
  SmartBlast Evalue=2E-13; Info=CG1105 n=9 Tax=Drosophila RepID= Q9VI53_DROME
tttgagttgtttactagtttactgtagtttcttgtttccattttcaaccgtggatagaatattgttgcttttattttctgtttattacaagctgacactcaggtttacattatgacctgtaaaattgttataatcaatccaggtatttttcgtccaggtgatgcgataacaggaaaaataatatgtatattcgaaagggaagaacgaataagaggtattaaatgtcaatttcgtggaagagaaaaagttcactggaacgagcgaagagggaaacatacaacacattatcatggacaaaccgattttgtggtggctaataccgattttatggacgaaggtacaatgaggcctggaaaatatgaatataacttctcgtatgtactacctccatcagatattccaagttcttaccaacatcagtttggtagtatcagatattttttgcacgcctacgtggatagaccgtttgcgttcgattacaaagatgacgtggcattacacgttgtatcacctataataaatcatccaacacaccaaatgagagcagtatcactggaagtcaacaaagaagtggggacatgttgctggcccaaagaaccctcgactatggagttgcgactagaaagagacaactatgtattaggagatgtgatctactttaaagcgatcatacgtaacacgtccgattcagaaattaacagcatagcggtacaactatcaacgactgtccaacttacggcttactccccatcaacaagacataaaacagagagaattcttttagctgtagcagaaggatctggtgttgcaccaggaagcacaaaaattcataaatttataaaaattcctgaaactgctataataactaattttactagatgcacattatttaaacaatggtgttcattacgggtacaagcactctatccattatttcacagtaatatggttgctgaagttactattaaattaggagatactatagtcaggactgaacaaattgaacatgctgttaatagcccttcaaatagttttgttcctgtagctgaagcacctccagtcgtttatcctcctgttccaccttctgcacctttggccaatgatagattagctttcattgatgacaataatggtacagcagaaggacctcctccttcatatgacgatgtggttaaaggcagttactgacattaaacaacgggcatctacttaaagcacaaattgaatttatgatatatattttatatacttaa

SEQ ID NO: 7884 - DNA, 1248 bp, Diabrotica virgifera
tttactacaatgcaacgacccatttaataatcacaagaaaaattaggtccggattaacaaaaacaaattaaaaaaacaccctgtatcttagaattttcaaaattcgtctgcacatttaaaaagagcataaaaactaaatttaattgcttcaattttttgcgcagacaatttaatgacatcaattttgaaataatattatcgaaatttttgttttgaaagtacgagttcttaaaaatttcgacataatttcaaaattaaagtcattgaattgtctgcgcaaaaaaatagaagctctattaaagctcttttcaaatgtgcaaacgggttttgaaaatttcaacatacaggatgttgtttcaaggtcacaatggatttataattttgtttaatccggacctggattttcctgtgattagtagttgggtggtttgggttctaaatgtgacatatgtgtaccaaatatcaaaaaaatatacaaggtggttctaaagttatgggtccagaaagaaacacccgcatattgcaaaatcgataaacaccctctaactctgttatacagtcggtggagcaataaatttagtatgtctagaactgccttatttacctctattcaccattcaagtatttccgtttcccaatgaaacaccctgtgtactacttcaatttgattgcggcccgcaagctgtgacaatagctactatgtggcccaggaaagaaaaaggttgagtatcgctggtctaaataattgaaataagccccgatttctcatcagaatcttgaaactgaatgtttaaacttcaatttaggcacttgacaaccgcaaaaatcataatttaaacatgagttttcaagcttcgaatatgcttattttcgcatttttcaaattttaaatcgcttaaacctcgaaaagatcttttttgtttaagatgacccaaaaatgctaaaaacgattttcgggggcaaaaagatgatgttttgattttgttaaaaaaattgttaaacaatttgtgcccaaaaatttcgcccggtacccttctgatttgtttataggggacatttttaacaagaatcaacaaagaaaccgaatcagaacaaccagacacaggttgcattaaatccggaccccggaagtgtcataggttttcgaaacggaccatcagggaaactaattggtgacccctgatctaggccacatatattgtagttgattatccaggggaagatagacagtaagcgaggaccaggcag

SEQ ID NO: 7885 - DNA, 1261 bp, Diabrotica virgifera
  SmartBlast Evalue=1E-127; Info="Tricarboxylate transport protein, mitochondrial n=2 Tax=Culicini RepID=B0X308_CULQU"
gtgacataacattattttgatttcggttatttttgatccaatatttcttcatgtttttgtgttaaaatcacatgcttttattgtttaggcttaaagtcacattaatttgtgtccagttaattaaaattttgtgatttactctaattaaattgatttgtgaagtgcagttttattatccggtgaaatcgtaaagtattaaattcaacatgagtccatcacctcccacaccatttacatatcctttcaagaggccgtggctaaaggactatggtgcagctgctcctgttggaggcggaagtattggtcttaagggaatcatagcagggggtataactggtggtatagaaatttgtatcacatttccaacggaatatgtaaagacgcagctccaattagacgagaaaggagataagaagaaatacaatggtatcgcagactgtgtaaagaaaactgttaaaagtcatgggttcttcggtctgtacagaggtcttagtgtattattgtatggttcaatcccaaaaagtgctgtaaggtttggtgcctttgaaagttttaagaataaaatgcaaaggcctgatggcacccttagcatatctggtagattactttgtggtatgggagctggtgtttgtgaagctattttagccgtgactccaatggaaactgttaaggtgaaattcattaatgaccagagatctcaaacgcctaggtttaagggatttctgcatggtgtaaagatgatcgtcagggaagaaggtattggtggtgtatacaaaggagttacagcgacgataattaaacagggttctaatcaggcgatacgattcttcgttatggagactttaaaagatgcttacaagggaggcgatcgtgataagaagattcctaagatagttgtaggtgctatgggtgcttttgcaggtgcttgctcagtatacggaaacaatcccatcgacgttgtgaagacccgtatgcaaggtttagaagcgaaaaagtacaaaaatacccttgactgcgccgttcaaataatgaaaaacgaaggtcccctagctttctacaagggaactgtgcccagattgggtagagtatgcctggacgttgccataacatttatgatctatgacagtttcatggaattgtttaacaaattctggtaaagagattttatgagttccttctggcatctttaacgattgtgtggagctatatagtcacattattttagcgggaaaagtatatttgactaacatatatgcattta

SEQ ID NO: 7886 - DNA, 1260 bp, Diabrotica virgifera
  misc_feature (71)..(71): n is a, c, g, or t
  SmartBlast Evalue=1E-161; Info=Ubiquitin carboxyl-terminal hydrolase 14 n=1 Tax=Harpegnathos saltator RepID=E2BDN2_9HYME
aaggatggagtgacattttgttaatgggcagcaaagaagaagatgtgcctaaagaaccggttgaaaaaacngtttttgtggaagacatgaatgaaagtgaacttgccacagctcttgagttgccagcgggtttaacaaacttaggaaatacttgttacatgaatgcaactgtacaatgtttaaaagctgttcctgagttaagagaagctcttcagagttatcaggaagctatcaagctaactggtagtaatgttgtaccagctcaatcaataacagcagcacttagagatctttatagcaacatggacaaaggaaatacagttcctccaattctgttacttcaggttatgcatatggcattccctagatttgcagaaaagaatgagcatggaacattgtcccaacaggatgccaacgaatgctggactgaaatggttaggatgttacaacaaaaattaccagccagaaagaatggtggggcttcagcagaacagtttaaatcgtttatagatcaatactttggaggtacctttgatgttgaactgaaatgtgtagaagccgaagatgaaccagtgtcaaaaaacaaggaacaattcttgcagcttagttgttttatatcgcaagatgttagatatatgcattctggtttgaaaaataaattgcaagaacaaattacgaaaaattcgtcgatgttggatagggacgctgtttacacaaaaacttcaaaaattagtaggttgcctgcatacctaacagtacagtttgttaggttctattacaaggaaaaagaatcgatcaatgcaaaaattctgaaagatgttaaatttcctttagatttcgatgcatatgacctatgttcacctcagttgcaagaaaaattagcacctatgagagccaaattcaaggaatttgaagatgctcaagtagaacgagcatcaaaagaaaaagataaagctgttcaaggcgatagtaaggaagtgaagcaatatgctccttattcttttgaggatgatttaggaagtaataatagtggttactacaccttgcaagcggtactcactcatagaggaagatcttcgtctagtggccattatgtaggttgggttagacagtcgggagataaatggataatgtgtgacgacgataacgtctctcctgttactacagaggatatcttaaaactctctggaggaggtgattggcattgtgcttatgtacttctttatggcccaaaattgttggaaatcagttctacagatg

SEQ ID NO: 7887 - DNA, 1257 bp, Diabrotica virgifera
  SmartBlast Evalue=1E-60; Info=Calpain B n=1 Tax=Gecarcinus lateralis RepID=Q5IW12_GECLA
taagttattagtgataaaggatgatggagaattttggatgcaacacgaggatttcattaaagattataatttgttagaattttgtcaccctaatcccgactcactagaatatgaagaagatgaatcacataaatggaacatttttatgcttgatggcagttgggttgcaaaaattagtaatggaggtcagccacatagtacaagtttttggcataactcgcaatatttgttaaaaataaatgatagtagtaatgctatacacagagtagtaattggattaatgcagaagaatagaagactgtacaatcttcccaagattcctataggatttgctgtgtatgaactaaaatccgtttctggacgtttaacgcataattttttctcctcaattaaacctatatatattagagaaccagagaacaatacacaggttacgggacacatagatttaccaaaaggatcctactgcataataccatttacagatgaaccacaagcaagctgtgaatttcttttaagggtttactctacagttacatttgatgttaatgaacacgaagtagatgttcgattgatagatccaacagtaccattaggagggttacgtgcacctgtagacgcagtagatggtgcggctgccgataaaggaataaaacatgtattcgagaactatgctgataaagaattagaaataggttggaaggaactagtatctatactagaacttcttttctcaacagaacaacacatattttcaaaggaactgtgtcgaagtatggttgcattagcggatactgacctttcaggaaaactcaattttcaggaattctatgagctttgggaacaaattggagaattaaaaggcattttcaaaaattttgattcagatagttccaacggaatgtcagtgcgtgaacttagacaggctcttagagtagctaatttccaacttagcaataaaattttatccctaattggactgagatatgcaaacgaaaaagatgagttggaattagaagactttttgcattgttgcgttaaattaaaattaatgatagatatttacaactccaaaaagaaaagagaatatggcttggaggaatggttacttgaaacaatgtatgcttaaggtgcaagaatatttttgttatattttttattggtttgataaaataaaatgaatattccagtatataaatatatgagttgattgaaatatccataatatttcaatcaaccatattttataagtattta

SEQ ID NO: 7888 - DNA, 1259 bp, Diabrotica virgifera
  SmartBlast Evalue=3E-61; Info=Serine protease H1 n=1 Tax= Tribolium castaneum RepID=D6WBT1_TRICA
aaaatgtcggtgtacattttattaataaatgttttgttattgaaccattttcttatagtgaaagttcagggaggttttcggtcaaaaagagaagatattgaaacagaaaatactgtgatagaagttttccatgactgcaaatgtgtgaattactatcagtgcgatgctaataatagagtgattacaaatggtgaaaatttaattgacgtaagaatgggtggaaacgttgctaaaccagggaacatgaccagaattcaatgcaaaggaggcacattcgaaggagagttgatctgctgtaaagttattaatggcactgaaggcagtactgagaaagtaattccggatacagaccatgataataccactgtagatccaacgcatcaaactcagtgtggaaattgtggaactcagagaaccaaaattaacgtcagaattatagttgatgaagacagtgaggaagaaatcaatccactggatggagaatttccatggattacacctatttacagaaaaaataaacaagggaaatggtatttttacgccagcggaacgctcatacatcccaaagttattttgacagctaatcacttattcaataggaaacatgccaataacttcaaagtaatcctaactggtaacatagaactaactaacgttggaaataatgttaataacgagcggaatgtggcagaaatagtaaaccatccaaagtattatgcaggtgccctttacaatgatggtgctctattgatcttggataaacctttcgaatctacgaatacaaattcgataaacaccctgtgtttgccacctgataatcttaacatcaactctctgggcagatgtctcgtggcaggatggggaaacggatccgaggaagcaggtacacgaattttgaaaaaagttgacttaccaattgtccccatcgataaatgtcaagaacagctccgcaaatccaggatgggtgaagattatattctccacgagtcattcatgtgtgcaggtggagagaaaaacaaagatgcctgcaagggagatggaggaagtcctttgatgtgtttacatcctggacaaactaatagatatttcgttatggggatagtttcgtggggtatgggttgtggaatcgaaaatgttcctggtatttatgccagtgccgttaaattgaaaccttgggtattagaagaactgaaaaaaagaaatttaatgttataggtttctgtattttatattttataatatactcttttttcacattt

SEQ ID NO: 7889 - DNA, 1254 bp, Diabrotica virgifera
  SmartBlast Evalue=2E-27; Info=Fat storage-inducing transmembrane protein 2 n=2 Tax=Xenopus (Silurana) tropicalis RepID=FITM2_XENTR
gtcatgataaatcggcaatatatacttgaaaatgtgaaattttataacaaattttgaactaaatgtaccaattaatattacgtcaaaatggttagtaaaagaaggccagtccacgcaacgaatctaaattttcggcctaatatcaataattcaaataatatagaacaaaaagggacgaaacccacaagtgagcctacctcagtcaaggaaattttaactttaatggtcctgtacttatgcaagaaatcactatttttcgacacaaatttaaaggtgggaatatatttagcttgtttgttccttatatcattaatagccgatgtattaatgataccaaaaacctatttggcaagatcagataatatatttaataaggtgtttgttaaattcgcctggggatggaatttgaccctcatcgtgccttttctcattttgacgtcagtggtgtattgctgtggaaataaacaaaagattcttaaacaacacttcccaagaatcctaatagcaacgtttttctggtggctatggacaacagttttcaatgtaatcgaagcatcccttggtagatgtgcaactccaggtttcaatagcaaagtggtatgtttacatgaaggacatgtttggaatggttttgatctgtctggccattcatttattttaatttatggtagtttgttactcatagaagagacaaggtgtatcgtgaactgggacacaataaaagactacatacgactagaggagcatcaacgtttagcgagagatgcaaacgaaaaaccgaatcctttacgtaatctatcggacctggagttaaaagaaatgaagacaaactatgagaagtttacaccgtatataagactgttgtttatagtaattgctgttattcaaattttgtgggatattatgttgatcagcaccatgttgtattaccatatcatgatagaaaaattccttggaggggttgttgctattgttacgtggttttttacttatagagtgtggtactctcagccatctctcttgccaaggcttcctggtgaagggaagttcaaatacatgaaaaaacaatcggctcaaactccacccacagttagaaccagaagaagggaaagtttaacaacagatcaagtaccaaggtttatgggcaggcccatttataccaatctaagaccagaagaaagcgctacagctagcgtttcaagatagcatcattttttaccttttaatttatttttttattttatttttatttat

SEQ ID NO: 7890 - DNA, 1256 bp, Diabrotica virgifera
ggtgacctcctaaattacagggagaacatagttactctaattccgggccacagtaatccttgagaagtgccactctcatgttttcgccattttgtcgctttagttgcgggactagcttatctagccactgtttcgtgtgctgatctctacatgtgaccaaaagtgctcctttgtggctcacagtgccttcaatttctaactttgcgttactcttcacgtttacagttgacatatgtgtcaatatcaaagctttcagaattgtaatttcaaatttagagaatcgtatttttggatatgcgcgaggaacaatcaatgtctttctttcgggatcgtcatatattttcataaatttagaacatttctgctctacaggaccagcaaaatcttcagacttttctgactcctcctcagaatctctgtcatcattaaaagggttgagtcaccgtggaattgatttgtgttgctgctgaaagtacttatttcattgttgaaaggatttcttccttgggttccaccatgcattattccacttgtgaaagggtttcgtccttggttttgaccatgcattgttccgtttgggaaagggtttcgtccttggttttcaacatgcattgttccacttgagaaagagtttctttcttggttcccatgatgccattgatttcctccactagtaaaaggattaacaccagcgaaagaactttgtccaaaagttccagggcataattgactgccctgattagtgaaaggatttccttgacttgtgaaagggtttattcccagagtttcccgatataattgtggtctatcactcgttgaagaatttcctcggcctgtttcgatatgcagctgacttctttcacttccaaaaggattcatttctcgattttctcgatgaaattgactcctctcgttgacgaaagaaccgcctccaaaagtttcacgatgcagtggacttctttcacgaccgaaagggcttcttccccgagtttcacgatatacttcatttctttcactagtaaagggtcttctttcactggcgacagtatttctttcacgagaaacgtggtccctataggaatgcgaagctcggtcgtgcccataaggacttcttctacgaggaatatcagactcccttcgaccttcatctatatctcttccacgagatggttttccgctatgggtagcaggattagaagggttgttcttcctagcaaatgcctcggccattgtttcaggttttctcttatctacag

SEQ ID NO: 7891 - DNA, 1247 bp, Diabrotica virgifera
actttcactactaagccaaggtaaaaatcaccccaacactttttaatggcaatgggggtcaaataagatatagtttttgtctttaattttttaaattcgatacatcaaaacttcattttatttatttaaaaagacttatactttcaattgtatttacctacctaattagttgatatagtacgcaaatggtttagattttatttcttcgcacagcttttgttttattttgtcacatttgtcacactaagtaaaggatatgatttaaacacataaagaacctgaaattcgaggattctcttgtaaatatcagttgtaagcgttaatttgttgtctttgaaaatttattaccatggtttattccattccggaaagggtagatatcttttagttgtattctatgaacaataatgtgccaatatgacggctcagcaatttattgaatgacaagataaacacaacagtagaaagtatgttttggattcggtaaaaaaaaattcaggaagctgagattaatgaacatattaagttgcagtattatgagatgttcacctagattatacagtacactggaataagtgttatccccccccccccgcccttactaacttatttatttagcacataaacaaaatgctcggtgttagtatattatagcatcaatgtttcgaattttgcacgatccctcttcaggtgattcgaaaaacatgaatgcgtttaaaaataattcgatcgaaattttgcgcctacgctctcaaaaaaggttaaagtattatacatttttgtaatcagtatttcaattgcttttaaatcagctgtcatatgatgtacttttccatttaaaaaaatcaaagttgtgcctgtcacctgaagagggatcgcatgaagttcgaaacattgatgttataatacactttgatcattttaaaaatcgacctgtccgagcgttttgcttatgtgctaaaaataaataagttaatagggggggggtaacacattccagcgcactgtatggtaactacgaggcaagtagaagctgtacctggaatcaacataattagcgtttaagccattttgaagaacaaattccattcatataaaatgtacacctagtacagaaacttaatgagaatgattatgaccgacgtttacagttttgtgaaataattagtgagcgagcagtgagtgatccacagttgcgctttaatatttttctgcggtgaatacactgttctcataaaaaaatggaa

SEQ ID NO: 7892 - DNA, 1257 bp, Diabrotica virgifera
  SmartBlast Evalue=1E-121; Info=Trimeric intracellular cation channel type B n=3 Tax=Aculeata RepID=E2AIS7_9HYME
ctgtcctctaccgaagaccttggccaatgtatcgaacacgcctccgaagaataacgcacacatgagattttcaaatggaacgaagggatcgtgaatgcccaatataatggacgataacttaaagtagacgaagaatatcacgattccaaagtagactaaggcgtgtggagccgaaatcagttctgtctttttgtctagaatgaagattatggagcctactaagcaggccttggtgtagaaacttggttgcatgaattccatcgctgtgggcgtccaaacacctctgatcaacctctccatgagtcttgtaaaaccggctccattacctttgatcgttccaattatcaccataacgaggtaggcgttgggatacagctttgcagcatgagtcactccgtcgtacacttttttgcatctatagatctctttcatcgccgagaatattattttaactggtaggaacttggctagtttgtatcccaagtccagcggagtgtaaaatactacataccaaactgctgttgctactagcacttgaggcgtgtttttcaaaggggctaaaatcggttctgcgaggagtccgttggcaaccatacctccggcaaagaccaccaacatgtaggacaaccaacatgatagcgggtgtttacgggaaaatgcttgagctccacttccaaggtcttctctgactgacaaggcacataaggtacaatgggctatatcaaaatacggaaacattttgagcttcaccacctggttggcgatgtctaagaaggcttccggatccatcttgaggtatttctgttatttcttgtacttatttcaacaattacttatttttttactcaaaattgacgaaatttaaagcgctgaagcattttcggaatggctgaccacggactggtgtattttgaatcccaacatatgaatcttttgtggtgctgtctgtagtctgttgggaatttgtgacaacgtgtgcgccagatgtgtgttcgacgtcggcgtcgtgcgttttttaagaatagaaaatcgtctgtgagaaacctgatcgaagagataatttcctactttcccgtaatctttcctcaaaagcttcaccaagtttaccttttaagatgacatactatgactatttgctatcaatataatgagataatcttatacgtcaaactaagccttaattttgatgttcatattaatcttctctaataatttattctttattattaaattggctttatattacctatattttat

SEQ ID NO: 7893 - DNA, 1253 bp, Diabrotica virgifera
  SmartBlast Evalue=0.000000006; Info="Myosin-like protein, putative n=1 Tax=Plasmodium berghei str. ANKA RepID=Q4Z7K3_ PLABA"
gaagttgaggttaaatctaaaaaagaagaaacgacagaaattcctgaatctggtgatcaaagacaagaaattactatattagaagtaactgagacagttaatcaagttgatgttgataatcaaattacagtaacttcagacaaacaagatcaagtagagtctgttgatatcgttaaacctgtagatattcaacaagcagataaatctgtcgacccagattctaaatcaagttctggtaatcaagtaataataacaggaataacagaatctacaataactacagaagttcaatctaatattgagaataaagaagactatgtagaagacattaatacagaattcattaaaaaagaatctaaagcaagtaaagaaacttgtgagcaacaagtagttgagacaattgtagactacggtacgccagaaactatagaaataattaaggatacaaaagaaattttagaagtggagaaatcatcagattctgatcaacttaaagcctcagaaataaaagcgattgaggatcagaaaactaaacctattgaaagtgtttcagagattgaacctttgaaatcattagaggaaggaaaaattgaagtcagtgtcagtgaagaagtcacaacagatactattgtaccctctaaagatgtgcataaacttctatattcagagagtgttaaacaaattccaagccaacaggaatttgaaaaaactgaaatgccaattaggcccgtagaagagaatgttaaagtagaagctatccaagtaatacaatcgaaagaccaagaaaaggctgaattacctaaagaagacacaccaacaagtgtcacagaagttccagtcgaatcaaagaaatctaaaaaaggcaagaagaagaaagatatacaacaagtagaacctgattctgtaaatattgaaacacctaccatagacgtagaaaataaggaagagcctgcaacaattgaagtcattcaatcagttcaaactatagaaacagaagaatctgaaattaaagctgagccttctaaagaaataccagaaaatgttctcgatgtaccgacagtatcgctgtcgaagaaatctaagaagaacaaaaagaaggatacagtacaaacagagcagatagaacctgtatctgaacagattgagataccaattgtagtccaagaagataaagaagagacagttacggttgaaaaggtccaagcaattgaaactaaagaagcgcaagaagctgatgttaagattgaattacc

SEQ ID NO: 7894 - DNA, 1257 bp, Diabrotica virgifera
  SmartBlast Evalue=8E-91; Info="Adenylate kinase 2, mitochondrial n=1 Tax=Anopheles gambiae RepID=KAD2_ANOGA"
attcactcttatctcagttgagtgagttggtggaaattgagcaaaggtcatgccatgttgtataacagattatctatgatatcgttataaattatttaaattttttatcatataatttagaagccttttctccaccccaagagggtccgagcatcgttgaaacaatggcacccttagcagcaaaagttatcccaaaagcaaatgaagtggaagaaggaataagagctgtattgctgggtccaccaggctctggtaaaggaacccaggctccattacttaaggaaagatactgtgtctgtcatctctctactggagatatgcttagagctgaagtacaatctggatcatcattgggaaagaaaatccagcaagtaatagatgaaggcaaactagttaatgatgaccttgttgtgaacatgattgataagaacttggataagccagagtgtcaaaatggtttcctccttgatggttttccaagaactgtagtacaagctgagaagttggacgacttgcttgaaaagcgcaacactcaacttgatgcagtaattgaattcaggattgatgacaatcttctcttcagaagaattactggtcgtctgattcactctgcaagtggaagatcatatcatgaagagttcaaacctcctaagattccaatgactgatgatgttacaggtgaaccattaatcagaagatctgatgacaacattgaggctcttaaaaagcgtttagccacttatcacacccaaaccaaacctcttgttgattactaccaaataagacatattcatcatcatgtaaatgcagcacaggcagccgatgccatattcgctaacatcgactccattttccaaggcaaaagagctcataaactgtaaaaattcagttatgttctgttccttttcatgcattttatacaggtccagttaggttttgtctatatttttgtaattctttgtaaattttggtaaataatttatttttctaatcatctgtaaattttagccacaattttaccaaaaaaaaaaatgattttattaacgtttcgaagcccaaatcgggtttcgttgtcaaaatacaaatgtggcttatttcccattgaaaatagtggattataaaaatacaaggaaataaagcttcagaacaacatttggtaaataagttatacatatttctaatctatagatatatttgaaaatggatgcctcattattgaaatgttattagaatttaaataaaatcagatcatttaaa

SEQ ID NO: 7895 - DNA, 1256 bp, Diabrotica virgifera
cccgagcatttgagtttcaattttatttaacatctattaagaatccacacccctaggtctctgaagacttagagcttccgaggtatatcaaaagttaagtagcaccaagtatatttttatattttgttaaatttgtcatgttacatattttttgcctttgttatccataggcgtgccacattaaaatgtcgcccaccgtgtttggggcatacttagtgccacattaaaatggcgccctttcgtgggacttacaatttattagcaactgctgtccagcataacgttagttgctaataaatatacaaactaatagtgcaaaataatcacgtcgtcacggcgacaactccaactaccgcctgcagttgccgtctgccgtcgatgtcggaatcgtaccttaattcctaattcaatatgtttattgagttattagctggaaactacaaagaatttttagctattgcttgtatatttctgtttttgtgtttgtgatttttacaatggaatttcaactaacttttttaacaaacatggcctaaaactagataagtcttataaattatacctcgaaattttatcacaaataggtatataacttataagaaatcaatttcttttagcataccaagcatctgtgtttgggtcataaacgtatgttttccattggttattcatgaaaatgctgaaagagtttccagagacttgtggtcctgattgactaccaccggctccgaatctgttttcaaatccttggtttccggtattagaaacaggtctttggtttccggtgttaaaaacaggttcttggtttccactagtagaaacaggtcgatttccgttaaagttggtttcacggtttggagaagctccgatatgtttttgaatggcttcagcgttgacatgccaaaatggtttgttttcgtccggccatgtattaactcggtttttaagatcaacatttgggtcaacaggaattctttctggggttctatcaggtacccctagcctgctagcgaagtcctgcggagcttggttagatacggtgccttcagttttaaatcgtgacgctacatcagggacgcctttcgaactgctgcctgcgaaagatggtctaccttgtgcggtggcagaagcaataaggacagaagcgagtatgaagtagatcataatgaaaccttgagtcacaatatcttattcgtaataaaaaacaaaacaaactgttgaagagtccgagttcacttaactgtaaccgagcagat

SEQ ID NO: 7896 - DNA, 1256 bp, Diabrotica virgifera
  SmartBlast Evalue=1E-100; Info=G protein alpha subunit Galpha73B n=1 Tax=Bombyx mori RepID=C7S8B5_BOMMO
caatattaaggtgttttgtaaagccatcaatgtagagattaattttttttatttataaatatgggttgtggcagtaaagtcaaagaagatagagatcatgaattgtatacaaagaaattccttcagacagtcaaattgttgctccttggtactggtgaatctgggaaaacgactatcatcaagcagatgaagattttacatatcaatggctattcaaatgatgaaagaagagaaaagattccttttataaagcaaaatattcatgagtccatatttgacattgttagtaatatgagtagaattaatcctccagtagaagcccaaagtgaagaaagtaaagcatctattgaatacattctaaacctaggaccaggttgtccaagtgaatttacagaggaatacattcaccatgttaagacagcttgggctgacgccggcgtacaaaagaccttcaacagatccaatgaatatcaactcattgatagtgcagaacatttcttaaatcaagtagacgtcgtttgcaaaccggactacataccaacaaatcaagatatactattctgtagaataatgactgtatccatctcaaaaatagaatttgacatgccagtacctaaacaatacggaggaggtaaagcagagttttggatgttcgacgtaggaggtcaaagaggagagagaaagaagtggattaaggtatttgcaggaattcagggaatcctgtttctaattgctgctagcgattttgatctaatgttaagagaggatacaagcgtaaatagacttgaggaatccttcaggttatttcaagacatttattctagtgagtatgtggaaaaagttgccatgatagtatttttaaataaacaagatctcttacagagaaaaattgagcaaggcagaaaattggcaaagtactttccagaatattcacattttaacgtaagcgataccagtgaatatgaaaaagcaaaattatttatgaaacaaaaattattaggcattgctcaaacgcctgtgaatgtagaaaaatcggtcaaacgcggcaaaaatattactgaaagaatagcaccaagagatacctacatccattatacaattgcaacagatacaaataatattaagagagtatttgattccgtccatgaaagtattcttagaacaacggtacaagaagttgggcttatctgatttatataaaataatttctatttttcttttaagaaataattatcacacaatatacatacataaag

SEQ ID NO: 7897 - DNA, 1255 bp, Diabrotica virgifera
attttcagggtacaagggttctcctcatgtaataatctgactcgctcgagtaactgcaaaaatctccacttgggctcccctaccaatacggcatatctttgatacattatttactaagaattttgacgcttatcattttgtgtgacattggcgtatttgtacatttcattgtaatttttattctcaaaaataattgttagaacgactaactgttgctctcttacttgattatttccggtaattatttattgttaatgagaccagtaatattttaaaacatacaaattgtcgttatactacatgagtctggctatagttatatcgaacggaagcttatttgcttatgttcgagattactgtttaactttttgtttttgtttatttattaccgttctatatttatatttatgttattaatagtcggtatgatgttcaagctgtttaatgttgctgtaatcaatctcctcaatactggaaagacttcaataaaatttacatttttaaactttataaaatacgtccaccgcgataatagctatttcctaataataacattgacagtacatgctgccgtacgtttcacttaatattttgatttattatcaatataagtcaatcattacgtttgcgcaaacatcccttggaacaactgtatgtatctaaccgtaggcagatattagattagattagattagattatgtgaggtcgttaaggctatggagcctctcagcacttcgacctatagagatcttttgtgcataccttaatctagttaaactctaggatgccaatacttttgatgaaattgattagcatcctaggtgacttgtttcctatgtcagagggcgttagggtgacctcttctaggaattttagtcgtgtgcagaacaacgctacgcaattgcataggatgtgttctgccgtttctttttcattgtcacagaaacgacagttctcactatcggatttgcccatttttttgagatgatatctcagagggcagtgcccagtgagaaggccagtgaccatttttatatcttttttactcatttcgagaaggcggtgtgttgcactaggcgacacctttatgagcctttttgcttgcctttgtcctggtgtgttggaccagtataattttagttgattgagttcccaggtccggagttcctctctgatgtggctttttggtagtccacagaagggttctggaccttggaatggggtgttggccccttcttttgcgaggctatcagc

SEQ ID NO: 7898 - DNA, 1246 bp, Diabrotica virgifera
  SmartBlast Evalue=4E-74; Info=Methionine sulfoxide reductase n= 1 Tax=Bombyx mori RepID=Q1HQ83_BOMMO
gatgggtaacacgttaaataccgtcccaatatgttgaagtctattcgacgtgcagtcacactccggatttcgtataaccccgtgagagtaacacccagttttgtaaccctccatccaagtgtgacaacgagattctacagtcaaatcacgagaacaacccagcgcgctggagaaagaagacgcttatatcacaaagaaacaaaaatgtcaaacattttacacgaagtcgatacacctttcgaaaaagctacctttggaatgggttgcttttgggcaaatgatgcattatacggtgctgaaccaggagtactgagaactcgagtagggtacgcaggaggtacgaccgaacaacctacatacaggagcataggtgaccatacggaagttatagaaattgattttgatccaaaagtggtgacttacgaagatttgttgcatctattttggaaacatcacgaatatggactaacaaccaaagttaagaaacagtatgcttcctgtattttgtatcacaacgatgagcagaaacagttggctgagaaatcaagaaaagaagaagcggaaaagcataatgtcccattgataactgacattgttgcagcaggaccattttatccagcagaagactatcaccaaaaataccgtctgcaaaagcactcgctgttatgcaatgaattatccttgacaccagcgcttcttcagaaatcccacgctgcagcccgcttaaacggatatgtagcgggagttggaactaaggacgacctagaaaaggatctggtaaaactgggattgtcagaaaaagctgcagaaattgtcagaaaacaatttatagaaaatcaaggaggcggtttgtattgctgatatagaagaaatttgagcaaaagttacaaacgtcgtcacgaaaatggatgtgtgactatttgaatttgacgaaagacgactttaacttaattgatcaaagtggttttacacttattaaattaattatcatggtttctttatttttatgcttttgaagaattcagtatgataaattcgattaaatatatggaatttaatgtttgtagtaattatacagtgagcacgtaagggttggaataaattcattttctcgagaatggatagtcccgaaacaggtcgatttttattttggattgcgactttttggcatatatatagtactggtgacgtcacccatttgggcgtgatgacgtcatcgatgatttttttttgatgagaacagggg

SEQ ID NO: 7899 - DNA, 1252 bp, Diabrotica virgifera
cgtctctagctgaaggaataataaaattaattattaaatgtgaccttggttttaaatcctacactcccctaagtaaaatatgtttttcaattcatttacatgtacacatatattcattatttttcccagctgctattctctaccttcctaaacttattaaccaaataagttaacataaataacttgactggaaattgacctatgtagagtataatatatttatctgttatatacccacgattagaaaacctagtcgattctaagtcgtctaattttctagtaaaattcactacggcctaaattaattccaagttaaatactaaattctcgcaacatatctcgtatattatttacaaaaactaataaacaagtgaatataaaacatgaagcttcaacttttataaataattgataaccgagctctaaattttaactctagtctataggaataactctcctaaaatgctcatgaacataatttaaatcgatatagttcttcaaaaatatgctcaataggatactcaatataaagagcgccatctcttgtcaattgtgacaattaaatatatggaccaacgtaaacttctgtaacaacacaatgccttagtaaaatgatttgaaacagttctcaaagttctcaatctgtggtacatccatacaaaaaaacagccaaaattcagcatgataggtatttcagttaggcgaaaccaaaaataattaaaaggattttgtggtacatgactcaaaaaggttgagaaccactgatttagaatgttgtgaacgaaaaaaacgaggaaggacaactataaaacaatgcataaaagcttattaaaaagcaaatagttttgaaatataactttttaaacaattcgtaaatattatgtattacctgttattggaatttgatgggaatatcttcatagatagccaggcaactcttaaggcactgaaaaggctgatggaatggtcaaacaaagctcatcaatgtcattggtaggatgggaaccttctagggcgttgcaaaggtagtaacaataacggctacaagaaagtgggtagctcacaaatccctgaaattgtgaaggatcaccaggataaaaacaaacgaaacagttcattcttagccaaaatttacgacagtcctaataggcatagacaggaaaacaatcaaagccatagcagctgaatagacagttgaagttgatgggattggcagatgctgacctatacagattgtgtcacctagaggaag

SEQ ID NO: 7900 - DNA, 1252 bp, Diabrotica virgifera
  SmartBlast Evalue=2E-40; Info=Chymotrypsin-like proteinase 6A n= 1 Tax=Tribolium castaneum RepID=D0R8R1_TRICA
gttgatttttcgtatttaagaacgtgattttcatttaatattatttataatcgtaatataataagctaactcatcatgaaaactgccttactttcagtgttaactttagccgtttgtaccattgatagttcttcactaaaatcctacagaatattcgggggacaaaacgcgaaagaaggtcagtttccttaccaattatcgcttcaaggtccacacttagaaaatttgaatcctaaccagcactactgcggagccagcatcctttctcataactggattgttaccgcaggacattgctgtttagataacgttactgcaacccgtataattgcaggaataataaacgctgctggcgaggacagcgaatacaaacaggagagaagtattgctgaagtttatgtacatgaggattttattggcggtgccaatccacatgatatctgcctcattaaaataaacaaaccatgggtttataacgacagagttcaacccatagctcttccagtccaagacttaaacatcataggagaagtcgttgcatctggttggggagaatctgctccagattattttcctgacatgttgcaatggcaaaaatcagaaatgccagatgaagagacttgtgtgaatttgtgtgacaaaatcgaagcaaacccctacgatagtcttgcaaatgtatgtacagcaaatcctgaagctgatcatggtgtttgtcatggggattccggtagtcctttggttttagataaacagttagttggaataggatcttgggtatttggtccatgtggtagaaaaggcgctccatctgtgttcaccagagtaagtcactatgttgcgtggatcaagcaacatgttactgaattgtaatacaagtatgtcaataaatataggtcattaaagtaggggagatatgcctgagacggcatactttttttaatgttttgtaatcgataatcgatagagttagacatgtaataaaaatcaaagtcagtgctaggaacatttacataaatataacattattttttaacaaggtacatattatagttttttctgaaaaaataaattgtaaagtattacatgtgccatctcacccacatacatgtgggtaagatggcatacccttgaaataaaggcactaatctcgacataagtcacaaataatttttttgtagtcttgggtacaccggcacattcggaatatgaccacttgccacaaatttggcaaggttagtcatttggcacatct

SEQ ID NO: 7901 - DNA, 1250 bp, Diabrotica virgifera
  SmartBlast Evalue=9E-23; Info=Endonuclease-reverse transcriptase n=1 Tax=Bombyx mori RepID=D7F170_BOMMO
cccactgattgattataaacttggcgggggcaaaagttgtttgtcctaacgtggagcatcctcctaagaaaattatcataccaattggactttgagctccgaagatacaatacggttactataacctatactataaaaccttaattcgaccaatagcatactatggcagtgaagcatgggttctgaaagaaacatccaaaaaacaaactcgacaggagttcgaaaggaaagtactgagaagaatagaaaatactgagaagaatactaggacctgtgagagaaaacggaatattcagaattcgatacaacaacgagctttatcaacttcataaggaaaaacgcttgtcagacttcattagaatgcaagtattgcaattggccggacatgtgataagaatgggagatgctatgctaccaaaaagagcactgaacgctagaatgcagggaaagagaccggttggaaagccaagaaagcgctgggaagacacagtaaacagcgacgcacaagcccttttaggagtccgtgtatggagaagagcaagtaagggtggaggcaaaaaataaggaggccaaggctcaatttggactgtagtgccatagaagaataagtaaaaagtgaatctttctcaattcccaatcgaatcacaaagacactagaatcgacctactgcaagattcaacgacgaaggaagagttgggcgccaagtccgtgagacagggaagcaaaaaaaaaccgtttaattgatagagaaggtggtttgagtcagtgtaccactttagaaagaggactatgttgacgaatatgttcggaattatccctaaaaaactgtcgtttcattagttgaacccgagacttattaactgaagtatattctgtagaagttcacttaagatctgttctaaaagttgcaaaatttattttccacgaagaacaagtctctttactattacaatagtttattataagtcacagaaatatttttttgtccaacagagtatcataaaattattatagctattccaactttgaatttaatgtaaatttatatccaataactttttttgtcgttttaaaaacctaataatactaattttacttttttctttataaatctttgaaaataaataaaatgtatcacaatatttacgttaagtcaattgatttatacaaactaatgaataaaatactgaccaaattgcatagcaatttgctagtctattgcaaacatttggttaatcaaaaattcgca

SEQ ID NO: 7902 - DNA, 1253 bp, Diabrotica virgifera
  SmartBlast Evalue=5E-59; Info="Glycosylphosphatidylinositol- specific phospholipase C, putative n=1 Tax=Aedes aegypti RepID= Q16LR9_AEDAE"
ccttaattgatgtttttattatcacaaatatcggtgtgtttgtttataataattattgattagtaatgaagctgatcgtagtattaatagacgaacgcaactgccagttggaaataattagtggcgaccacaaaacactagcgggagttgttgttgttgtttaacctagaaaattttagaatgggtaacgagtttagagatttggctgacgatttagaaaattggatgtcgcggttaccacaaaatgtgcgacaaataccaattactaatatttctatcccaggttctcatgacagctttacagccaacattacgaaagactctgatatatcccctgatgccgaagatatagttaaagaactctcaattttgggccccttatttaaagaggtcatagcaaggtggtcacgaactcaaagctttttagccaatgatcaacttattagaggtattagatattttgatattagaacttctacaaaagaaggaactgacgaactttatatagtacatagtttgtattctgtaccgctacagggttgtttaaacgaaataaatgctttcttatctactcatccgcaggaagtagtaatattggattttcaacatttcttcggttttgatgatagtattcataaaagactggcacaagatattattaatacgtttggaggtaaattaataccatatacaaatgaaattaatacaattacattaaaatcgatggctagcaataaataccagatatttgttatataccgtgtaaagggcacaactttttggcctgccgaaacgtttccaaatccgtggcccaatgtggactcaaaagaagccctgattaattctttggataacaaccttgcaaaaagaaatcctaatatcccgtttatttcccaatgtgttcttacaccagacgctggatttattattgccaactttttaagttcattggaagaaaaatgtgcaaaagaattagagttagatagattaaaatggatagaggctcagaaggctgggagagggggactgaatattattatagctgactttatagaattatcggattgtaaatatgttaaagatgttattaatgctaatcaatcgctactgaataccaattaagtataaatctgtttaacaaactgtgccaaaagtgttaaaaacaatgtaaagtattagaagaccaaattttattattatacacatacaaaaaaaaacatatactgtaatgttaaataaatatatttaatatt

SEQ ID NO: 7903 - DNA, 1251 bp, Diabrotica virgifera
atcggaatttaactctttgactgcgggaacctcattccgctcgaggcactttaggtgggcggttcacgcccattcattcagaaaccatctgatgacatatgttttatattttgtttacgttatattttgtctatacgcaaataatcgctaaccgcagcgaaacggttagccctgttgcatataagcgtctcccgcacatctcgtgcactactgaaattacgcaaatatgcggttcccgcagtcaaagggttaaaaataaaaatcgacctgcttcgggatttttccttaaagtcgccggtttgcgaaataatgaatttatgcgttactttgtggacgcactgtataaactgtcaactttctatgtttatattggtttctatacagtttctgacgttctagacgtcattagacataaaagtaaacagtgcaccacgtgaagggtccaggactgtattatctcaatgtatccgtctgtctagtagcgtggcggttattgtacatattacacgtaggtgaatatattaaaaggtctattaaaagccaataaatcttacaacaacctaactagacttgacgaaattttcgaaatgccgtacttttggcattagttgttgatttgttcaaagttgtgtcttagaaaaatcgtattgttcgcaggaggtacaattattagtttttgtattgtaaatataattttagtgcactttatgaggcgttcaagccaacgattttttatgcgtattaatacaatggggtttactttaactttaaacaaatcaacaatgtttgggtagttattatatagctctataaaattgtaagtataacaaaaccagtataatctctgttacgtctgctttcctttttagtagtgtctgacatatatctatataagaaaatttgctgtcaaaaaaacatgttggtaatttgcagttagttttctaatcttctatttctatcttctacttttaattcttctttaggcctctccttgtgttttccatattcgactgtgttgagctatctggtgtcagtttcttccggtcttttctttacatcatttaagcccgccacagcctctaatagtctaggcgtcaaatagaggtcaccgtgtcctttttcatttctgatggataaactcaacggtttcttatggatttttggctgcttattacgaatttcgagggtgaatttcgatccgagtggtcaaaaaattgttataaacaatttaattgtttataaggctctggc

SEQ ID NO: 7904 - DNA, 1253 bp, Diabrotica virgifera
agaacatccgctctgatacgtgagctgctgctatttgtagacgaactctgggaaaataatggactgaaattaaatatattacataccaccagtaaactaaacatcaggaaactcaacagacaatctccaaagtaacaaaaaaacaagaattcaagaaattataacaaattataccacgtggtcacgtatcagagatcccagggttcgttttacattctacatcatatttccattccacccataatatggatacttagctggatttttttatggttaaatataccttatataactaatttggatacttaattggatttttttttatggataaataaatggataaacatactttatataactaatagtaggacatcataaaccattaccgacccgtttcaccaaatacatccacagaacctctcaacttcagaccgctccacacagatgttatagtgcccagagatttcccaaatctagtggaccttcctatgaatatacccaggagttgcaaaagataagagttttttttttctttatttcaattcatacctataaatattttggtttttactctacagtaataaatttgtgtaaactgtttatatgcatataacaggtacctatactacactatatacataggtttttgaagtaggattttaaataaagctaggtaatggtaaataataaataaatattcaaataaaataaattaattgataagggaaaggggaattaagacatatataaagattgtcgataggttttaaataatatttctggataagtctttaaccaaactcattttgttagttttatatagcttccagcatctatgtttacttaggtatagtacttagacatagatctggtatttcgattgtttcggacacttaatagttcgattggtgagtacgtcaccctttaagtctctgctagataaggtattaaactttttttgtgtaaccattagttgttctagtattaactataccttatctagtctaggatcaattaatattagtatactaaccatagtataggattttgctacgcttacggacactgacctggttttcgttattgatattttttatattgcgcaatagcggtggtaatttacttggcgtaaccctttgggttctagattgttatttttctcaactccaccactattgtttatctcacatgttttataagtatcatggatacattgtaagttgtgaaatagtataaatatatttgttcttagt

SEQ ID NO: 7905 - DNA, 1247 bp, Diabrotica virgifera
  SmartBlast Evalue=6E-16; Info=Endonuclease-reverse transcriptase n=1 Tax=Bombyx mori RepID=D5LB38_BOMMO
gaatattttattctgtaacattacatttcaaatttaaaaacagatatatctacaaaaaatagaatgtacagtgaaataactaattaagatatcacaaagaaaaactaaacactactatctaagattccaagtataaaaagtattattgcaagaaaataatgaaactaaagcaccattaagttaatattgtgtgagttccagttctcgaaaataggtttcagtacataacataccaggataattcgtaaaaaaatgttccctatgccgccgagaacgagtgcggcgtactgggagaaatctggcaacactgccttacacataaactctcccgctctcttatccaactactttcgcctcgctgtattgctcagtgtcggtctagcagcctttgaagatggaggtcgcagtcacagttatcgctaatgtgaaattaatgccgtgatacgaaacttgttgatgcatattcgcaaggaagaactggtgacatcaaaaaccataatgcttaacaaattagaagcatttgacttggattgctatcgacggatcataaaaatatcgtgggtttcgcacacttccaatgaagatgtcttaaaatgaattcagaacgtctgctcataaacatcaaaaagagaagaaaaacagaacttgggccatataattagaggacctaaataccatctacttcgccttcttatattacaaggaaaagtggagggaaagagatggattggtcaaaagaaacattcgtggctgcgtaatattagacaaggctgtggttccacattagaataattatttcgtgcagtagctgatagagaaaaatttcaggaaattgtaaacatgacgacgactaacgtctgaatacaaagacggcagctaaagaagaagaaggttaaactgaatggttgtaaacatatattttgagtgatagtgatgataaacatactgttgatagttaaaatgctagaaatttattctttacaaaactgtaaagtcacaataaattaaactgatgtttttcttacgtgatgccataaatgtaatattaaaacaagttagtaacacaacaaacatgagataaaatcataaaatttgaggtagtagaagaaagaaatcgaatttgttacattatttttccaaaaagtgatgttaactctttgtttcagtcttttgagttattaatttcactttgtatgtatatagttggtagatactacacttctaatacaaattgcccttcaaacaga

SEQ ID NO: 7906 - DNA, 1247 bp, Diabrotica virgifera
gtacagtggaaccccgataagtcggcccccgataacccggaactccggctaacccggaccgatttttatcagacaaacatttcaacaataaaaatgtattgctgttacaaaatctcgtgaacctaattcattcatttggtgacgtcaatatacgaacgaaacgattgaatccgacattactgaaaatatcagggtgcagatgggaccctgtcgcgcaattcgcagcaaataaaatagtcgtatgtttttggcttcattttatttcggttatacatacgcattttcaaggttcacgaggttttgtaccaactctatgtaatataatatttgagagataatggaaccggattgaactacatataccatagtaaaaatgactcatggcacaccacattcattgtgtgttatcgaaaacaggcacctgtattatcctttatttatttgaaactgtcttagcattgtttagaaaagactattaaaattctttttttaacaatggtcttagtcatcactgttattaaataacataacatcagagacggtattttgtgtagtaaagtcgaattgttcgcttccgttctgtaatcgtgcgtaaatctattcagattttgtgtgcgtgtcttttgtctataagggcaacaaaacgtaaaaatgttgtagtgacaatggaaaagaaactaaaagcattaagtagaattgataaaggtgaatcttgcagcattatatggtgtcggtacatctacagtatcggattggaagaaaaatagaactaaaatcgaagaatttttttcaaaatgataacaaaagacagtttggacaatcgctgcaaagctaataaagctaagaatgagactcttgacgacgctttgtatgtgtggttttgtgtggaatgcgaacgtggtttaccagtgtctgtgtgacaattataacggagtttatctgtaagcataccatattttattaatttttaccattttctccggctaacccggattttcgataacccggatcggccgcggtcccgattaatccgagttaacggggttccactgtatctggcaacctcaaaaatactaacttaaatatgagcttttaagcctcaaatttttttcgaatttttcatattttaaatcgcccataactcgaaaacaatcaatttttaagaaaaattacaagacacctttcttgttcaaaatgatccaaaaaacctaaaaatatatgttccaggacaataaaacgtgatcttt

SEQ ID NO: 7907 - DNA, 1249 bp, Diabrotica virgifera
atcgattgcgtcgtcacgcccagatggatgacgtcactagtatgacataatataatatgccaaaatatcataatttaaaaatgaaaattgacatgtttcgggatttgtccttcaattcgccggtttgcgaagtaacgaatttgttcctttcatttgcaccatactgtatatgattgtaatatatttagctagaacatttttccaagtttttatgttctaatataaatttaaagaaatatttaaagtacgtaatgtatgtttattgttctacttttaatccaggtacgatctagtatcttattatcttcttgggttttgatagtctttaagggtgtaggcgcaaaatttcgcgccaatctgttttaaatgcattaatttgtttcgaatcctgataaaactaataagtatttttgaagaatttggactcagaatggaagattgcattattgccgagggtcgaatgtctcttataataaccaaataaccaaaaagtttcttttgaatgagatatttgaaattcaaaatcacactaaactttctctttttttttattacgcccctgtaacttattaacccgggatcgatcgcgccgttagaaaaaatctaacattttatcttttttccgtggtaacttaatgaaaaattttgcaacataactttccactcgtaagtgcctcgaggaagagtatagtaatgcgtaggattttttttgtgtggtttttatggccttgatgagaaccgattagctttaataaatgttagaaatagatatttttaacataacaattaaataaaaatttgttttaaattcgtattgttagatttaacgcgcgaccgattacgtgacagaaaagagggcgaccccaggtaattatacacccgggtcatatttattacgttaatgtccgactggtctattatttgacaaataatgttattatttcgaagtctattaagtacgatataacgcccaagggcgtgttattgaaaaataacgccttagggcctattaaatttaaataacgagttaaatactgttaagttgacaaataaaactctaagtaaaactatgattaccacaattacgttacgactatttctggtaaatgtacttatttgaaaactaattaatttaaaatccattcaaattttttgcatataaagaataatttagttggacattaagcgttgaaggcaccacgggttttataataataacgctttcggtcagcgtatataactcgggccg

SEQ ID NO: 7908 - DNA, 1243 bp, Diabrotica virgifera
  SmartBlast Evalue=1E-111; Info=Beta-glucosidase (Fragment) n=1 Tax=Tenebrio molitor RepID=Q9GSE6_TENMO
aaatgatgtggatctatatggtgtttggttttctcctcagtaacgcaatagcagacgataacaccaaatttccagaagggtttacattcggagttgctacgtcggcctaccaaatagaaggtgcttgggatgaagatggaaaggtgaaaataattgggacagagtagctcataccattccaaattttatttaccataatgacagtggtgacgttacctgcgattcttaccatcaatgggaagaagatataagaattttaaaggaactgaaagttacacattatcgattctcaatttcctggtcaagactcttgcctcatggttttaacttcgaagtaaaccaagcaggcgtagattattacacaaatttaataaaagctttaaaggccgctaacatcgaaccatatgtaactctcttccattgggatttgccacagtttttggaagcacttggtggatggccagaacgagagattgtaaagtggtactcagagtatgcaaggctttgtttcgaactttttggggacgatgtcaaacattggatgaccttcaatgaaccaaagcaaacctgtacaaatggatatggatcgggatcttatgctcctgccatcaaatcccctggtgttggagaatatatgtgcatccataatcttataaaagcacatgctgcagcgtatcacatatacgacacggagtttagggataaacagaacggaaaagttggtatcgtcattgattcagcttggtgggaaccctataacgcaacaacagatagtgatgcttctgaacgattattacattttacttttggtatgtacgcaaacccaatcttctacggagattatccagaagtagtcaaatcttcagtcgctcgacgtagccagagtcaaggtttcccaaattctcgtcttcctgaatttacagctgaagaacaaaacaccatcaaaggaacaatcgatttcttgggattaaaccagtactcatcattttacgttacagataagacagacgataaagatggaatgggttatgacgcagacgctgaagttaaaacatgggctgacgaaagttggcaacaaggcgctgctgattggcttaataaagccccttttggtatccgcaatatgttaaaatggattaagaaaacttaccctgatattcctgttatcatcactgaaaatggttggtcagattttgtatggaactttagacgagaatccaaggatcgactatatatcgagcta

SEQ ID NO: 7909 - DNA, 1248 bp, Diabrotica virgifera
  SmartBlast Evalue=1E-115; Info="Carnitine O- palmitoyltransferase 2, mitochondrial n=1 Tax=Camponotus floridanus RepID=E2AEF2_9HYME"
gaaaatatagctggagagttcaaagtgcttgtggaaagaataacatgatttaaatgagcataatcaggatcttcaaatatattacacatagtgttggtcttttctgcgaacttctttaaagcaaacaaagtgcctatcaaacccttggcccatggctgcttcccttgttaattgattatgcatgtccgaacatttagatatcatagctttaagctcagaaactgagggtttgttctgtgaggtgattgccaaggcaaattctttggtggcattagtacaagatctcacagtctcagttctgccatgtttaaaggccgcagtgctgcaagattcgtaggttggcacaaattttcctgtcattttgtaatatccaagttgaaatcccaactgcataatagcatcagggctaacaccctgtttcttacaaacattcttaccaattcgattgaagattaaataatctatatccagacttttacaagtatttttgtattctttctttgcctgagtaatactaacttccatttccttgtttaattgcaaatccagtcttattattttatcaatattgcttgggccctttggtgttgtctctggtgtaacacatggattttgtatagaatctttataaatatcttgcacatatctcagtacagcaacaccatcaccccaagaatgttcaaaatttactgcagcatgtccatctttgctaacttggagagaaaacgatttatcgaaccatctgttttctccatctccatgtaagaaatttcttacaattccataagggtcatcacctagattttctgtatcaagacaaacattgaacagagcagaatcaataaatttaaacgcctgagtatttccgtttgattctatgttgtgtcttaaagtcgcccatctatctctttccaaagtagtaaggacaccaactggaaattcacacttgggaacagggtcatccagaatatatttcaagcttgctagaatttcatcggcagatataatttcgttgttctcattgagcactctaaatgcataaaaatggcctttgtgctgtacagttatgtgcttccccgcagggttgtgcacaagtctatctttgtctatctctggtattcttgtagtattaaataaatttgggtattggttcatgtctagaggataggccttgaagaaatatgctccataccacgatactgaaggaggcaacaagctacagatgtttctaaattgttgtgtattact

SEQ ID NO: 7910 - DNA, 1250 bp, Diabrotica virgifera
  SmartBlast Evalue=2E-87; Info=Cleft lip and palate transmembrane protein 1-like protein n=1 Tax=Camponotus floridanus RepID=E2AW37_9HYME
gacgtgttcgtgtttaaaaccaccattaacattaaaattaaaacaattaaacatgagaccctctttaggttcgatattaacagtattattttttatatttattttaaagtctatgtatagtctttttggaatattccaattaccggtttgtgaaaagggggacgtgtgttataaatcatacttgaattctaatccaaagctggatttagttgtttttctatctgataattcaaaatcgggaaattttgataaaattttacacttaaaagagtttgattatttctcaccgctagaaaaacagttaactcttgaaatatcaaaaccagctcgcaataatggctccctcatcatacactctgtacttgttccatcccaaagaatacacacagatgatctaaaggaattaatagatgcaccagattccacttacattaaaagtaggcttaccaaatactccattccaataagtgcctcatttaatctacttaaagaaaatggaaaaactttaacttggaaacctgttacccacctccgttccagatacgctgtgataatgtgcactgatgaagtgactgtcccccattcagccattcctatggaaataataagagattttagagtaaatagacagcggaagtttctaccaatcttccacactgatgttctcaacatgagaacacgagatcttgtggaaataacacctgagacaacttcattgaatttcacttatatatacacaccgacttcttttggaaaaatgagatttatattacaaatcgaaataactttaaaacaatttttaaacttaggttttactgagaaggatttagacgaagttaaaggagtgtttgctgatactaatttacatttgttatgtgctacgctcttcattggaagtgttcatcttcttctagacttcttgacattcaagaatgacgtcagcttttggaaatctcagacatccatggcaggtttatctaccagagctgtactgtggagagcgttttcacaaactattgtttttctctttctgttagatgagggaacctccttattggttcttattccaagcggtatcggaacattaattgagttttggaaagttagtaaagtatttaagacgactatttcatggaggggattaaagctgaataaagcacaaactgagactgatgaagaaaagaaaactagagaatatgatgaagaatgtatgaggtacttgagctatcttctatatcctctgtgtatat

SEQ ID NO: 7911 - DNA, 1248 bp, Diabrotica virgifera
  misc_feature (32)..(34): n is a, c, g, or t
  SmartBlast Evalue=1E-162; Info=Uridine/cytidine kinase-like 1 n= 4 Tax=Apocrita RepID=E2B6P7_9HYME
aagttataccttttattttgaaacatatatannnaaaatcaattacataaaaaacctttattcttaatttgaaaatgtcctgatgatgatgtccatccagtcttatatttcgttttctgacggttccgttccaaaatatcgatcgccgaaattcccgatgccgggtaatacataaaatttatcattgatttcgggatcgatggctgtagtgactatttgaacctccgggaaggcataagctatcgattgcactcctgattcggccattagtaaagatactattaatatattactttccagaacatcgtggtctaatagaactcggatggccatcattgcggctgcaccggtggctacggtagcgtccatcagtattactttgtagtccttgatgtctttgggtaatctcaaataatacaattcaggttcaccagtttgtagattagtctgtattaatatttttcctattctgatatctttacatacatcacatactgcttgttccatagtttcacctgctctcaaaattgaaacgccacatatattactagtggccatctttttaccgtgatagagcacgccttgtggcgtttctactgttttatctatgaatgtcatcaacgacaacgtatattctatgactagtcttattaatcttttactgtaaaatataaactcatctctgggcgtatctttgtttctgataaacgtatgcaaacctctgatctgtggagtagtcggtagcagtcgcactgtgtctggcctgggcattttgtaatgtttgtttaccgtgtaggcctgggcaagttcttccctgagttttaatccacgcaattgcaattgagtctggacgtgctgcacgatcaactgtatagcaacttcgttctccccacctctaggaactattatgtcggcgtgactcatgagtggagcaatataatggttaaacgacggctgcaccatcgaggtatattgtttaagtactccttctaaatctctgcctctttgactaatgtctcttcttaacctacgggctaaccgaacgtctggatctgcgtctacgaagattttcatatccagcatatcgtttactttttggttgtggaacgtgaggatgccttcgaagattatcacgttggcaccgtacatggtttttgttttggcttcccgggaatgcgtgacgaaattgtagatcggaacttccacttttcttccttctttcagcctctggattgtgcttaacaacaa

SEQ ID NO: 7912 - DNA, 1248 bp, Diabrotica virgifera
  SmartBlast Evalue=1E-111; Info="Phosphatidylinositol 3-kinase regulatory subunit alpha, putative n=1 Tax=Pediculus humanus corporis RepID=E0VYA2_PEDHC"
gtgtcacattttattgagaccgccatggaacgaattatacaagttgtctacaacacacaagcccacaatcggatagtcgagttgttattgctgtcatgtgattggggagagaagcttccagaatttgctgcagctccagctgtacctcctagaaaagtatctcgcatggggagtagtgtttatcacgggatgctggacagggataaagataaactcaatgctgtgctgagtttgcaggatgcggagtggtactggggtgatataaagcgtgaagatgtgaacgaagtgctaaatgataccgtagatggaacatttttggttcgagatgcatcgaataaatgtggagagtacactctaactctacggaaaggcggggcaaataaactgatcaagatatgccatcgaaatgggatgtacggttttacagaaccatatacgttcccttcagttgtagacttgattaatcattttagaaatgattcattgtcgcagtataacgcttcgttggatataaaattgctgtatcccgtttcgaggaataatcaagaagaggagctagccaagactgaaaaaatcgaaaagttagttgaaaagttggtttatctcaataaaagtttaacggaaaagaacagagtgtctgagacagtttcaaaagattttaacgatacatcagtagaagtacaaaccaaaaggcaagctctggatgcactcaaagaattagtacaagtattcaaggagcaaacgaccattcaagaaaagtttcagaatgaagcccagcctcatgaaattaagagcctggaattaaactccgaactactcaagaagcgattgaatttgatgtctgaaagttgtgaacagttagaagagattttaaagcaaaaagaggcatatagaaaagcattagaaagagaattgacttccttaaaaccacagattcacaatttggtgcgtgaaagagacaagcacactaggtggctcttacaaagaggtttctcaataaccaagatcaatcagattttgaataaaaacgctgacgagacacctggagattgtgaggtagagatagatacggactctctgccacataacgaggaatgtacttggctgatgttgaattgttcccgtgttgaagctgagcaactgttgttagacaagtgtgatggtacattcttaataagaaagtcaagacagatgactaaatatgcattgtctatagtgtgtaatggagtcattaaccattgcatcatc

SEQ ID NO: 7913 - DNA, 1246 bp, Diabrotica virgifera
ggtggaggtggaggaggaggaggaggcccacgaggcggagtgtgcgggggcgaccctgggttactaggattgggagagggagggggcgacacacctagtccgcgttcacccctccgtgaaaagcctgcctcagggcagcgacgtcttcgttactgttggctgcgcccatgttgccaagctcctgaagggcccgcgagccctgggtggcggtcatcaccttgaactggcccaacagcgctgcccactcagggctgtagtcttcataggactcgactttagattgggcaagatggggtgactgcgccagcgtcgacttggggaacatggttcttatgtatgtcccgagtcgccccagaagagagtcactgatggagtcctcgaagtttgctctcggagccccagtgatgtaagaagccccaatatgatatgcacagaggttcaaccttatctcgtcactcccaagtcttgctgctgtgaagttgagtgcgtcgggacaatacctaaccaatgaagacctggtcagtcttgaagctgctgcgcaggctacagccgtcttgtgtgtcccagctggcaatgacgtaaatctcagtctggcatccatcgacaaggtgacagcagcagtccctcgatgtaacgggtctcccacccttctaaccccctgcaatccggccagggagagtacgtgcaaggtgctgcaccaatgaccaatcgtgtgtgcagcagtcgtcatttcagctgttggctcagctccataaatcgtatgcagcaccttccgcgtatatccctggcaggtgccctgaccagtatggtgattcattccccaccaatttgctttagtagcaataatcaccgttatcgcatgctgcattgcctctcgggttaacatggcgttgactctaagtatggatggatcatcgagtgggtccaagacaactctctcagaagttctccagtcaccgtctgaggcttcccctactcgcctaacaagaccacaagacactgcaacgacagacgcattaacatataatttcaaaacttctgcagatctctgttggaaggtggaaaacgcccaagatgcagcgaatctagacgcagttgccaagtcacccccggtgactactgggagcttcacggagtcttccagagagggatcagcgccgacagcgagcccagcttcgatggcgccattgaggtcgggcaaggtgacttgtagtgcaactgccatgccttatttgagtttttcaac

SEQ ID NO: 7914 - DNA, 1248 bp, Diabrotica virgifera
  SmartBlast Evalue=1E-103; Info=Serine protease P44 n=1 Tax= Tribolium castaneum RepID=D6W6R5_TRICA
gagtgaacacacactgccaaaggttgcttctgttgttggtaaggcgaaggcggtaatgttgtgttagttttatgtgtaacttattatatacgaaacatgaaacataaacttatattcctcttcgtatattttgtattctacaacgacgtatatgctcaagttggcgatagatgtacattcaaaggaaccacaaaaagaggggtttgcaaagaaattactaaatgtccagctgcagaggcgcaagccaagcaaggaactgatgatgtaactttatgtggttttgcaaatgatttgattactgcgattgtttgttgcgaagtgactgtggaaccaaatgataatctcctccctgccgactttgatacaaatggagaaacaagtccaccaggaaaaatgagtgaaagaaagtgtcaagaatatagtaaagcaattacatctgaagtacaagttttatccttggtctcagatgcgacacctatgtcttaccgtactcctaaatgtgattataacactgtaccattaatagtgggtggtacacccgcagaggcaggggaatttccatttatggtagcaatcggattcaatacaacttctgatcgatggagatgtggaggaacattgataagcactagattcgttgttactgctgcacattgttgttatacaagagatgctgggaaaccgagtgtagtacgtgttggagaactcgatttagcatcagatcaggatggttcggtgtatgcggactatttaatttcacgagtaattgtacatccaggatattcagctccatataaatataatgatatcgctcttctagaaacacaacagccagtagtttttacaaattttacaagacctgcttgtctcaatcttaaccataacgtagctcaaagtcaagctatcgctacaggatggggaaaaactgattttgctggtgatgctagtgatagactattaaaagtcactttaaatctatacgacaatcagagatgtcagagaacatttccccccaataataaagaactaccaagaggaatagaaagtaccatgttatgcgctggtcatcttgagggaggaaaagatacttgttatggagattctggaggtcctcttgtagtaacaaaaaagggaaatatgtgccaattcttcctagttggagtgacttcttttggtaaactttgtggtcaaaaaaatactcctgctatttatactagagtttcagaatacataccgtggatagaacga

SEQ ID NO: 7915 - DNA, 1248 bp, Diabrotica virgifera
  SmartBlast Evalue=1E-126; Info="Arsenical pump-driving ATPase, putative n=1 Tax=Pediculus humanus corporis RepID=E0VDM0_PEDHC"
gccggcttacatgttacaagagtaactgactcaatacacaatagatttaatgtgacgtaagtaaaaaaatgtcttaaattttgtttatggcccattttctctgactcgcagtgaagtactaaataaaaaattatgcaaaattctttattgaggtacttaggataagtgagcatcttgcataaattgtgcaaagattttttaaaattattctaaatattagccaacgtaaggagttatcaaatattctgaaaattttcttacactttctgtacctctaacttccttttcaaggagtggcaactttgtaacatggaaatcttcatatagatcattgatttgatccaaatatttttcctgtattttaaatctagaagcacacattttacattcactagtatttacattcaataacaactgattgacaataatattatgtgtatcaattttacactttgttaattcttgaaccaatctttctgtttcatataacgatagaaactccgctatacaaacacatacaaaagtagtctgatctgggtttttaaactgctcgttaacttgttttattatgtttaacatctcctctaactttgaagagaagttgtcagcactgaaatcgggaatacccagaagaccactgatttgtgatattaaaggtgaaatttttagtttcagtcgcagtaattttcctagtcctttttctactacttgtggaaatgacaagaggcgtaatgtgtgacctgttggagctgtatcaaatacaacaacggaaaaattcatgcccttgattaatttcattacttctgcataactcatagcttcatctattccaggaaaggcaccaactatttcttgaatgattcctttactcattttcattgcatctggttccccatcaaaatattcatctggtaattcattgaatcctacatttggatcaatttccatagcatagagattggtaaagccctttacgagggtaggcactttggtaaatttctgatcgaatgcatcagaaatattatgagcaggatcagtggacaatattagaacacttttcctcacttttgacaactgtactgccagactacaactgcaagttgttttgccaacaccacctttaccgcctacgaaaatccatttcagggtggtttgatctattacatttctgagagatggttcaagagtttcaaaattctaattcatcagacattgttgataaatctaaaataagttatatggtagaat

SEQ ID NO: 7916 - DNA, 1244 bp, Diabrotica virgifera
  SmartBlast Evalue=0; Info=F-box-like/WD repeat-containing protein TBL1XR1 n=6 Tax=Apocrita RepID=E2A6P0_9HYME
caatatacagaagctgaaattagtattggagaagatggtactgaacaaaggctagtagaaagtcttagtttaatagatgctgtgatgccagatgtagtagctagtagacaaaatcaacaaaatcagcaaaagcaggctgttaaagctgagcaatcagaaacaaacggagaggaagctgcagtggaatctacacaaagtgaaaccatggaagtggatgtcaccattgagattccatcctcaaaagcaacagtactccgtggacatgaatctgaagttttcatttgtgcttggaatcccaccatcgacttgctggccagtggatctggagacagtacagctagaatctgggatatgtcagacaacacagccagtcctaatcagctggtcctgaggcattgcatacagaaaggaggcacggaggtgcctagtaataaggatgttacatcgttagattggaattgtgatggaagcttactagcaacaggaagttatgatgggtatgcgagaatctggacaagtgatggtcgtttagcaagaactttgggacagcataaagggccaatcttcgcactgaagtggaacaaaagaggcaactatattttatccgcgggggttgataaaacaacaataatatgggatgcggccagtggacaatgtacacaacagttcagcttccattctgcaccagctttagacgtcgattggcaaaccaacacttcattcgccagttgttcaacagatcagtgtatccatgtttgtaaattgtcgatggacaaacccataaaaatccttccaaggacatacgaacgaagtaaatgctatcaaatgggatcctcaaggacaactgttagcatcatgttccgatgatatgacattgaaaatatggtccatgaagcaagatacgtgtgtgcatgatttacaagcacattcaaaggaaatttatacgatcaaatggtcaccaacaggtccgggaactcataatcccaatatgaatcttatattagcgtctgcaagttttgattcgacagttaggttatgggatgtagaaagaggcttctgtattcataggttaactaagcatactgagcccgtttattcagtagcattcagtccagatggtaaatttttagcaagtggtagttttgacaaatgtgttcacatttggtcgacgcagtccgggcatcttgttcatagttataagggcacaggaggaatattcgaggtttgttggaattcgagaggag

SEQ ID NO: 7917 - DNA, 1246 bp, Diabrotica virgifera
  SmartBlast Evalue=1E-113; Info=Talin-1 n=1 Tax=Camponotus floridanus RepID=E2AHI2_9HYME
gcgctgtgtctcttgcagcttgagatgtatacatttcgttgccctgagctgcagcactcagcaattgagcaataccttgattgactagtttgctgctggcagccagttgtaaggcacctctttcaggagtgtcatttggtaatggtcttaacctgcaagcatctacagctcgttcgaattcgttcagttcttcttgaaggtctgctattagctgttgtgccgcgtccattcctagaccttggcaagctggtttagctctactgatggcactgtgtaattcacttatttcggagttgaatttttgtgtgctactggacagttgttcacgaacagaatgttctgtcaaagttggtaacgctgattgagaagattgtatgaattgagtcgctggatgcaaaaagacttctgcaatgtacatcaattcgacctggcctgtagtatcttcagcgttttgagcattggctttgatggactctactaacagaggtatagtttcgcccaattcaacagtatcttggataagtgtttctctggtaacggcgtttgtattgtaggggtgacttgcttgtgctgcattgatgcattgagtagcagaggctgcagcctttctggcgcaaatctgaactctgtcgaccaattttgcacgaagtgctggagtggtagcagcgacaacagtgacatctctaaggtcctctgcagtttttctaagttgatcctggtacactatttcagttggatgactagcgcactgtctggcagcttctaccatcttggcagtagcatcggctaaagttttagcggcggccaatagacggcgttgtatatcagagtcgggcagtttttcggcttcgcctttgatactctggataagttgtgctgtggcttgtcccagacgcctagcttgtctaaccatttcattggcatcaccagaagctgctgatagtttatcagtggctgtgtaaatctcctctacactatgttcttgaatggtttctctaactctttcacgcccagccaatttcatatgatttaaaagatcgttcaatgtgcgggttacgtctgcagctgcaaccttcagctgattgttcaaatcttcatttggacatgactcattgcatacagcaaccagattctcgacagctctggctacctctcgaacagcagtagtcagttgttcctggcaagctggtgaatgtatggttggagcaacaactttggcacaagcgacgagctgcgatgtagccaa

SEQ ID NO: 7918 - DNA, 1247 bp, Diabrotica virgifera
taatttaacagtatatttaacttcagcaaatacataaaattaaaaaggctatattataaattgacagatttgtaatctataggtacatatattacaaaagctagcactacttaatgtaaatctaaatgatgtgtttgatttatttgtttaaattaacttgatgagtccccaagtcaacacaatctgaaaaaaatatatatattatcttggataaaactagatctattcacggtgaagcacatcactggctttcagatcaccttgtgtactgtagatctacgaaatagttgattctagcaaataaggtttatacttttggaaactacaatatctttcaaaatctgaactaaaaaatacgattactaatggtaaatgtaacaaggtatatttaaataaattgaaaaaataatttgagattatctaaatcaatcagatcacaaatttccactttaattttaataactaacaagactttaagatacttcaatcacctattatcacaaaacaacgtaaacggtgattgcaaatacaaaatatcacactatacaataaatgttataaaatgataatctaaaaacaaaatggaagtacataactaaattagtaatctgtaatgtatccgatatattaaattgctcagttactaaattttatagagtattgtttataccactagtcagtcatcgattaatttttgtttttttttttgttcggaggagaaaactaaaacaacactcttttctcacccataatcttctgtagtgatgtaaaaaaagaacatactcgtcacaaagtaacgaatcggtacaactattcaaaagtatcgaaaatttccaacattaaaaaatttattgagtattcctttgtacaatttttactattgttctgaagctatttcttagtaaattacaatttttacatccatttcctgtatgaattacaagcccaaatgggaacccaacattaaaaaatttcttgagtatttcctttgtgaaattttgaatatctaaaggcagttttcgcatttaggaacgctggtttataatgttcttttcatgaggatttttcagtgcgtcacaaatgatagaaaaaaggtaagtccgtgataattacattatttattctaacatgacattttagttaaatctgacagttgtcaaattttatttgcatttgggcataaaaaaatcaattgtctttattgcatttataaaatggtattttctttgatttgtatagtcatataa

SEQ ID NO: 7919 - DNA, 1244 bp, Diabrotica virgifera
  SmartBlast Evalue=3E-17; Info=Endonuclease-reverse transcriptase n=1 Tax=Bombyx mori RepID=D5LB38_BOMMO
gagaagagtccttaccgtttctatctttcaataaaaactgtatacgctacatggaatatcctatctttgtcctaggaaatttcatatccatgctcactcatccgtgtctcccagagtgcgagacctactacgagttgtaaaacataattattcatcattcattgttactgaatgcaaataacagcatctcatttttaaattttgtttttgcaaaaattaagttctttattttttttgttcaaagccatacaaagcttcttaggtataaaatatgaggtctgttcagaaagtaaaaataaaagggctgtgtaatatatggatgagggatgtgtgagagtgcgcatccgaaaagctagatccaccttcaacctgatggggaccgtgttcaagagccactacctctctcttgatataagtaagaatgctgcgatgctacatcttctctgccgttttttataatgttgagtcgcggaccttgagccaagatgtgtgcagaaaattagaagcatttgagatgcggctatataggagaatattcaaactcctatgggctgaggtcttcagaagaatgaaggagaaccgagaaatactgaccactataaaatctcgaaagttataatacttcggacacattatgcgaaatgaatccagatatgccatcctgcaaggaaaaatatttgaaaagcgaggtccaggaacaagatcatggttaaataacctcagaacctggttcaacatctgtgaagcttttccgcactgctgcgaataagatagccatgatgattgccaacgttcatcacggataggcatatcaattatatatggatatcgcagggcttacaggctgtcgcatgtgtcgaaaaaaaatttggtattttaacgtgacgaaaacaaagtttcccaaaattacaaaagatttatctgagtcgtaacaccacaaaaatcacgtttggaggaaacacaaacatcacatttttcgaaagattagcataaaggataaaagattacttccagaggactcattgaattcaaagcataaaatgagtataaaaatgaaagggtcagtgtggaatttgaaagttttgtgtgacttaacaataaaactaaatttacaggtcccacagtaaatttgattaaattgtaatcatcttttaggtaagtattgtatacccataccagctatctaagagacttatcaatattcagctcagcggggtgcaatagcctgaggtgtggaattccat

SEQ ID NO: 7920 - DNA, 1245 bp, Diabrotica virgifera
  SmartBlast Evalue=5E-85; Info=Multidrug resistance-associated protein 7 n=1 Tax=Camponotus floridanus RepID=E2B0Q4_9HYME
tctgacatgttatcatcgtcttctacgtaatcgatatagtcagtcgccgtcgctaagtatactgttaagttggtagaattggtaacggggctggttacaccattggctaaccaccagtcagtgaaattccgtgacacttgcattaaagtcatcgaaatcagtattgaaatgctgacaaagtggctgatgcctttccagtaagaaattatcacagtaaaatctagattaccccgttcgctgacttctttgaacagttcgatatccttatccttttcttgggcgttgtccacgcacaaactattctctagagtgcactcagacgatgtatattcagattgaatactatcctccagttctaaatctacgggtaaagtgtcgtctatgttgcggagtacatcgacaggtttgccaattgacttgatagctccgttttctaacaacaaaatcctatccgcgtgcagcagatattttacgtggtgggtgcatagtagtctagtttttccttggagaagtccaatgatgcaatgattgaaaatgtgtttgcctactttgacgtcaactgctgatagaatatcgtccaaaagatatacctgcttctcttggtagatcgctctagctagggctattctagccttttgacccccggaaagagtaccaccgctatctcctacttctgttttgtctcctgatggtaagatctgcatatcttcgatcaggccacaagcaaatatgatatctttgtatttcttctcttcgtacggttttccgaacaaaatgttgtccctaactgttcctctctgtaaccatggttgttgtgttacaagtccaaagcctgtttctacttgacgtacagcaagactgccggattctacagcgagttcacctaatattgaggaaagcagggtagatttaccacaaccaactgtacccataatgccaataaattcacctttctttatcttcaaagttatatctctgagcttgaaaataatggtttctcttctttggacactgctttcgccttgtccccttttggataacgttctttttcctttcccttttcctttaggcacttgtacaacgggagtggctttctcccagctgaaactggcattggagatggatatttctgtattttggtctgtgttatcttctagttccttgtggtcgtagatttcatttaggttcatatatggaagatctagtaacttctgaatcctcttcaacgacacccaggcttcagtc

SEQ ID NO: 7921 - DNA, 1236 bp, Diabrotica virgifera
  SmartBlast Evalue=9E-19; Info=Pol protein n=1 Tax=Drosophila melanogaster RepID=Q9GP60_DROME
ttggaaaatgatcactgcctccagaatcctctaacacatcccattggcatatatttgcaatttccgaggaaattagtgttaggtctaccgctgaggcattctgtccaggtagggtaatccgcgtgggtctcccatcattgcagcaaactagatccaaatcctctaaggattcagcaattattcttccattaacattaacagacacttgacttccccaaagtgcattatgtgcattcatatcccccattaaaattttatttcccctgattttatttatgcgtccaacccaactatttaaatttatttttgccctaggatggatataaatgttaataactgtaatgtcccaatctattatttttattgctaaaatttgaattttactaacattattattatacctatatactattttgtgatccagactattatgaaccacagtagctaggccaccataaccatccctcgatccaacctatgtatttcatatcctcttagatagaagtgatgatcattttttagccaagtttcatttaatagaattaatttgggtctatgttcgcttatgaaatattttagactgttatagttactgcttaaactttttatgttccattggataataagtggattcttgatatccatctaaatctagcaacttttggttcgatgagctttcatgtataaatagctggttcaagtaattgattatatgttccttatgtttccaatctagtttttttaatatcgcattcagtgtttttttctgtgtccctctctagttgctctgtacgggaacatccaggagtctcattgtttactgcacgagctctctcttcgcttctcccatttggagataataaatattgattgtgtacttctttattgtatgtcttatttgtttcattagcctttcttttatttttgtttgagttattctccatttttctactaaacaggtgttcagggttactctttacattttctatccatcgcatattgatgggaattgtctctaaattatttgtttgagttttatgtaatgttgggaattcctcctggctcattctgaatatattattctcttgcgattttctagtagaaacataaggaaatctctcgcatgcctcgtagtatgaaagattgtccagagacatgacagccttaatattccgctgtctcacatactctggacactcctcataggtacttatatgaaagctgctattacaatgt

SEQ ID NO: 7922 - DNA, 1241 bp, Diabrotica virgifera
tttaattctcaaagtataaaaattggttacagtttaaatttgagtaaaatttaatattcaaaatagataataaaacctattccgtatcccaaaacctaaataaaattagccatataccaagatttaaatggatactataaaaagcaatagagatacgctcagagtattcgaaataatcacgtagaaaggaactttgtgagtaaaatgtatcattaggatgactgttaatcatgtgatgacaagaagggacaattaataaaaaatttaaagagctgtaacaacaagtcgaaattactaaaagttcacgttgaatatgaaattattttgctgagcaatctcaaaaaacccagttaaaatactttacttatagatcacacaaacataatcgtcactcaatatcaaggtataaattagtcaaatgaaatccctcaattagaagaacactttaggtaggtacatcctccaattgtgttagtgaatggttcatttgtaggtatgcattatttaccagttccaagataagggaaattattatagctaactttttttaacacttaaaatgtcactaatagagattatccagatattttgcatttaatttttaatagttagaatatcatttatttgaaataatctttttgggtgatttaattaacatttaattttcatatatttaacattttaaatatgaaaaatttgaagaatatatgtgaaaaaattcattttgtttgtgtttctataagaatatcttttgattgaggaattggcaagtaaatagtcaataaatgcaaatattacattatattgttttcgcttttttctaagtaggtagtttttttagattatcttgggaaccactcacaagcaaaattggaggatagaccaaatcgattctaggactaaggggattcattttgcctacctatatgtaaagtatcataaatatgtaataaggagtttacttgtctttgaataaaatctacatataattactaatcgcttgcgaatttagtattatatgattcaaatacaataaagaagatgaagaataaattgaacaataaatatttaactctttggcaaataaactagtttacggaataaaaaaaaatggatgttgccacatcagaccagtttaaatggacaaaatctctttagatatttttataacaaataaaatcaataaaaacaaatacatgggtcatccagtttcaattgaatttgtgtagttgcccatcctg

SEQ ID NO: 7923 - DNA, 1246 bp, Diabrotica virgifera
  SmartBlast Evalue=0; Info=Supernumerary limbs n=2 Tax=Tribolium castaneum RepID=D6WA15_TRICA
ggaagaagtgtgttgtgatcgtcgtgaatttgtgtataaacgatcgttttaattaagtagataatataaaaattcgttattagcatgatgtgttagtgtaaatagttgtacaaactttataacaaattagtgcttatgtttttattgtaatcgatacgtctagaagtaatttcttacaatgataaaaatggaaactgataaaattgaggaatcaacgaccaataacactcagtatccaatgacaattttgccaccatatgatacagctcgaaagaaagaaccttcggcaacattcaacacggagagagaagcatgtctgaaatactttgagaaatggagcgaaacagaccaggtggaatttgtggagaatctgctggccaggatgtgccactatcaacatggtcatataaactcctatctcaagcccatgttgcagagggattttatttctctattgccaaagaaaggtctggatcacgtggcagaaaatattctgtcatacttggatgcagacagtctcagaaacgcacgattagtttgtaaggaatggttcagagtgatctcggagggtatgttatggaaaaaactaattgaaagaaaagtcaggacggactctctatggagaggattagctgaaaggcgaaattggatccaatatttgttcaaaccgaggccaggagaaaaccatcgtcctccagatttctatcgagctctatatccgaagataattcgagatatcgacagcatcgaatccaactggcgaaatggaaagcacattttgcaacgtatcaactgtagatcagaaaacagcaaaggagtgtattgtctacagtacgacgatcagaaaattgtatctggtttaagggataacacgattaaaatatgggacagaagtactttacagtgtaccaaagtgctgattgggcatacggggagtgtattgtgtttgcaatatgatgataaggttataataagtggatcaagtgattcgacagtaagagtgtggactgtaaataccggcgaaatggtaaacactttgattcatcattgtgaggccgtcctacatctcaggtttaacaatgggatgatggttacttgttcaaaggatcgttccattgcagtatgggatatgacatctcaatcagaaataacattacgtcgagtgttggtggggcacagagcggctgtgaatgtcgtggactttgacgaaaaatacatagtgtccgcgtcgggtgatagaactatt

SEQ ID NO: 7924 - DNA, 1246 bp, Diabrotica virgifera
  SmartBlast Evalue=6E-51; Info="MOSC domain-containing protein 1, mitochondrial n=1 Tax=Camponotus floridanus RepID=E1ZZ63_9HYME"
tattatatacatctagcaatttatatacagttattgtaaaccattcaaatggttttatttagattcgcactattcacttctatgaatgtatacagtatcaccaagttttagtaatcctgtttgtctaacttccaaatggactcccataattccataatcacctggacctttgcactttcggtaagtttttaatgtagtcaatggttccatagaactatttctattgctagtgtctggatctagggtagtcagcatacatctggtgcattctctaacatttctcataataacgtcgccaattttgacccattcccaattgtcttcgtcaaaagctttcatggtgggaccgttcacaactaagttaggcctaaaattgtgaacgcttactgtaccattacctatctttttaaccaagtcgtctactgatcgctggtttattaaagacatactagtaagatccggatatagtcctgcagagaaatttgaaacacttgtataaaatgatatatcctctttgtgtgccttctcaatatcccttttgtaaataccatcatgaaaccctaaccgtagaccagtgggtttttgtaaaattagtctggataaccaagttgctgcttcatctccacaatcgatcgctctacaaggttcttttacatgtagcgtgatggtaacagatttattagtttctttgctgggaattttaacatagagagtcctcatggtaggagcatccaaagcaaaatgattctcatcgtgtacagatatgtctatctgtaggagttgaggatatgttctagctgttctaaattctttatctttttctgtgtatactactaaacccctgtctcttaattgaagtactttttcatcctcttcagtctgttttaaaccaagacgggtacattcggcttgacttagctcctttcggtgaccactcttcaatggatataaatatagtccagatactgaacctatttcttcccattttgtcggtattttcacagccttcctcttttgaaaaaagtggaatccgaggtaagctagaaccgcagctccggctactagagttgtgctagtagctactacttgattgttgatcatctcagtagccgcctaattttgatgtcggttaaattgggctttgtcgcactgattgtaaatttaaagcatgtgatcaggatttttataacattctgaataaatttaatcagaatgtaggcagcgatgcaatgttgtttgaccttcc

SEQ ID NO: 7925 - DNA, 1244 bp, Diabrotica virgifera
  SmartBlast Evalue=1E-160; Info=Guanine nucleotide-binding protein subunit beta-2 n=3 Tax=Aculeata RepID=E2A8F5_9HYME
ttttattttagcaaaaaatcgtagacgatgcctcccaaaaacgatccggagcttatggcgttgaggaaggaagtggaggagctttataagaagttacaggaagaccagaaaaaagtggcagacaccgacttagaaaaagcatgcgacggtgtaggtgcagcgcccaaagtcaaattagtcaccagaaaactgatgaagggccacttgaataaggtgaactccgttcattacagtggagacagccgccattgcgtcactgggtctttagatggaaaactcatcatttgggatacctacacgggcaacaaaatgcagattatcccattgcggtctgcttgggtgatgagtgttgcgttctccaattcaggaaatttcgttgcttgtggtggtatggataatatgtgcaccatttacgacttaaacaatagagatgcaaatggcgtagcgaaaatggttagagaattggctggatacgatggtttcctgagttcttgtaggtttttaagcgacaaatctctcatcactggatctggtgatatgaaaatatgcaaatgggatttggagaccggtagaaaaacctcagatttcgttgcccacaatggcgacgtggtatctattagtctagcttcagacggcaatactttcgttacaggaagcgtggataagacctgcaggttgtgggatataagggaggagaaacctaaacagacattttttggacatcaggccgatgtcaattcagtgtgttaccaccctagcggctattgcttcgcgacaggttctgaagataaatcggcaagaatgttcgacatcagaagtgatcagcaaatagcacagtatcaaccaccttctaataatagtggattcacgtcctgtggattgtcgcttagtggacgaatactcttgtgtggatcagacgacaataacatacatatgtgggataccctgaagaatcaacacaatggtactctatctggacacgacaatcgagtaacctcaatttcagtagctgaaaacggaatagcagtcgcttcttgcagttgggaccaaaccgttagagtgtggggataattatcttgaagataaattagagtaaatcattcagattctacagacaacgatattattgtgttctttattttaaatgctcatattttacataagtacttattactaatttttattatatgtaattgattgataatgaatgtttatcatcgccattaaaaataattaatatatgt

SEQ ID NO: 7926 - DNA, 1243 bp, Diabrotica virgifera
  SmartBlast Evalue=1E-111; Info=saccharopine dehydrogenase-like n=1 Tax=Tribolium castaneum RepID=UPI0001A47C97
atttgttcttgttgaggcgaaaaacattgcaaagaaattctgacgtggacgtgtcggtcgggttgtatttttgatttttgtagtgtcattggtgtggtggtagcttgatcctgttttgaaactcctgaagtgctggaaatacataaaattgtaaaaggatggccgaaggaagattagattttttgatatttggggccactggttttactggtttacactgtattccctatgtatacaaattcgctaaagaaaatggaagaaatatggcatggggtgttgctggacgttcagaggaaagactcaaggaagctctcgaaaaaatgggaaagaaagttgatgccgacctatcagaaatatccattattgtagctgacgttaaggattatgactctttggttaagatggctaaaagggcaaaggtagtaattaactgttgtggtccattcagattctttggatatcctgtcgtaaaagcttgcgtagaggctggtactcactatgtggatgtatgtggggaaccacagtttattgaaactgttgagttggagtataatgaacttgctcgtgagaaaggtatttacatcgtaagtgcatgtggcttggacagcatcccctgcgatctgggtttgttatacttggaagacaaatttgatggcgttatcaactcagctgtaacttacataagtacctggaacgaagataaaaattcgtccggtcctgctgtcagttatgggacatggcacagcctcgtttatggacttaaacatgccaaggaattgtcgagtataagaagaaaactgtaccctacgaaattgccaaattttaaacctaaattggagactacaacaagaccccaccgttcaagtatcgcaaatggttgggccctaccattcccaggtgccgacaaatcaataatgaagaggactcaacgatatctgtacgaacaccaggataaaagaccaatacaagtggacacgttctttaggttatcaaattttatacagaccttcgtgatgattattatgtttttcgtttggtcattgtttgtaaaattcgactacggcaaacagctattattggactatcctcacatatttacgttcggaatgttcagaaaagacgtcacaccgtcagaagagacgatcgactcaagctggttcaagataactttccaagtcataggatggaaagaaaaactagccagtaaggacgatcagtacgatactcctccaaataaaattgt

SEQ ID NO: 7927 - DNA, 1241 bp, Diabrotica virgifera
  SmartBlast Evalue=1E-94; Info=Zinc finger protein n=1 Tax=Culex quinquefasciatus RepID=B0XF71_CULQU
agttagcgacaaagtcatgatacctcaagaagaacatccggaaattaattttgtgggtcttttaattggtcctagaggaaataccctaaagacaatggaaaaagaaactggtgcgaagattatcataagaggaaaaggatctgtcaaggaagggaaagtcggaagaaaggatggacagccactcccaggagaggacgaaccgttgcatgcctacattacagccaccaatccggagtgtgtgaagaaagctgtagaaaggatcaaagaagtcatacgtcaaggagtagaagttccagaaaatcaaaacgatcttaggagaatgcaactgagagaactcgcacaactaaatggtacattaagagagaatgatggcatgagatgtaacaactgcggagccacagatcataaatcttggctgtgcccggataaaccgaacattaccaacagtatcgtttgctcgagttgtggagcagctggtcacatagcccgcgattgccgctctaaacgaccaggacaaggaggtcctccgttgcctggacaaggggacaaagcgaaaatagacgaggagtatctatctctgatggccgaattgggcgaaggtccacaaccagtttttatgcagaacggaaacaatcatcagagaaagcaaccagcgccacctccagtttcaagtttcaacattttcgaaacccaagcacctccccgacccatcatgcctcctccaatgcctggagctccgatgcaaatgataccaagcggcagcatccctccgccgtcttggccggcccctgcgccgatgccatggcctccagcgccgcctccgggaattatgccgccgccaccacctcctggtgcgtccagcccaccacaaacgatggcgctaccgcctccatggacgtcgaatcaaccgccgccgcctggtgcgccgccaccgttcacgtcttggccgccgagcagtttccctccaccgcctccacccggaatagacgtcagttctttgctgacgtcaccacctccgccaccgccgtcttaaatgcgctccggaagggcgacagtttagtgttgaagatgttggtagttttagttgcgaagaagtggttgttcctgtagaacatcccgatgtttgggttaaatatacagtaagcgccacgctagtagatacacggtacctaatctaggtgtgggctaatccggcccgttctcacctgtgacttttatgtctgtcatgtcatgtgactgtc

SEQ ID NO: 7928 - DNA, 1241 bp, Diabrotica virgifera
  SmartBlast Evalue=1E-56; Info=Probable phosphoenolpyruvate synthase n=1 Tax=Harpegnathos saltator RepID=E2BY46_9HYME
gatggcaacatgggttaccgattataacggaaatggcagtagtagtacaaaaaatgattcaggctactgcagcaggtgttctttttacttgtcacccttcaacatctaatccttcacaaatggtcattacatcaaactttggacttggtgaaactgtagtttctggagaaagcgaccctgataattttatccttaatagaacttggaatgaacaaatttatgttatggacaagagcctgggcaataaacacaaagtattaaaaaatgacaaacggaagtttagaggaaattatagacaatcagatatacagcgaagcttggagtatatcggagaaacaggctgtcgatttgggtaaaattggtattttattagagcaagcttttggaaatcctagagacattgaatgggcctattcggatgaaaaaatatacatccttcagtctaggcctattactactctaaaccaatggtcagactttgagctctcgcacgaaatggacactccagtaagaactaaaaattcatattacactgtagccaacgtaagagaagttattcccaaggctgttacagtattaactcattctacctcagtaaaatctacggattgggctattcaaaagtgggcgcaacaaaattttgaccgagcttccaggtcaggacttatcacgtaccaacataacatgatgttagacgttattacgttaatccatagacacataaaatctaaagtacatgttagtggattggtaatggatctagcaatattcggacatccagtgctagatgataaaatccatgaagttattaaaaaccgcttcgggattgcttccaccttaacgctcacaaaagacataactagaataatgtcacacgcttgggtagataatgccggtaaagctaaaatattggtaaatgacttaaaccttgatgttaaggacggggatgatgtacgaacaatttttatgaaaattgatggaagtttggacactatgggagaagtatctctgtgtcatgttaaaactagtagtgtttcagtattcttccaaattattgctatgaatatcatgcttgaaagaaactcagaactgtctacagaacatatatctgatttcgcagctatactatcgtcttgcaaagacgttatttcagcagaagttcctatatatttagaagatgttgccaaaatactcaaagaaaatgaatgtgcagaaacgttctgcaatataaatcctagtga

SEQ ID NO: 7929 - DNA, 1243 bp, Diabrotica virgifera
  SmartBlast Evalue=5E-52; Info="Prostatic acid phosphatase, putative n=1 Tax=Pediculus humanus corporis RepID=E0W1G0_PEDHC"
atcatgttccgtcagcttcagctcttagcccttttattttcagccgcgtttgctgcatcagatctatctgatttggatcaagctgcatccgatcagttggtggctgtcgttcagttatttagacatggacacagaactcctacggaattttacacaaatgaccaatattctgatttatcaaaatattggggtggcgttgacttaggacagctaacaaatctgggaaaacaacagcactatgagctaggacaatttactaggaaaagatatagtaaatggctgccaaagagatatgacaaagctgatttctacgcccagactacagatgtagatcgaacacatatgtcaggacaaacaaatctatactcactatatccagccaaagaagatcaagtatggagaaggcaaactgattggcagcccattccactacatccagccgattccaatatctgggaaacattccccagctgtgctgcttatacaacagaattagccaaagttcttgtgtctgatttgtataaagctatagataaacaatatgcagaggtatattcatatttatcacgctattcaggtgaaaatattacaactctatcaaaagtgtaccccgtgtttgacagtctgaaaagtgaatctactgctggtcttcgtcttccacggtgggcttcaaagatatatccagagcctctaacacaactgatgggatattatttccattcaatggttttcaccactaaacaacagcgatatttttcaggaactcttctgaattcgattctaaactattttgacaacaaaataaatggttcagtaacccaacagttcaaaatgtacagcgggcatgacacaaatgttgcaggtctgttgagctcgcttaatgcttttaatccaccttcgcctccagaatttgcgagcagtgtgtacttcgaattaagaaacatttcaggatactattttgtaaacgtatggagcaaagacggatccaacttcaaaaaggtgtctataagaggatgtgctctggattgtcctttaaatgaagttagacaaagattgaatgagatagttctagatgttgataccagaaccgaagagtgtagtgccgaaacgacattcgaaactgttgcagccaaaaatatgtacaataagcttattgaaactggtgaaattgaacgtcttaaaagcaaattttaaaataaacttatttaatctggtttaaatacactgtaataaaagtagattt

SEQ ID NO: 7930 - DNA, 1239 bp, Diabrotica virgifera
  SmartBlast Evalue=7E-42; Info=Large proline-rich protein BAT2 n= 1 Tax=Harpegnathos saltator RepID=E2BM78_9HYME
aacagcaaaaaagttcatcagtctacatcaaacatggcatgcaatcactcggtaaagtcccaaatgctcgtcgggccccagcaaatcttccatctttgaaagcagaacacagcggaacagacgcagcagtacctttagtaccaccaggagcgccaggatggggaaagcaagatacatcagccactgggacatctcaatcacccaacaacaatcatcagacagttgcacaatctcaggattcgaatgtacccccactgaatgcccccaatcagactggagtctcaccacaactcagttcacatcaagctgcaattgcccttccagtaacgaacactattcccccacaaacacacaaacagttaacccctactgcacagcctgtgcctacagacaaactatggagttccgtcatgacaggacccgagtctcatcctcccctatatcagagtgtacaattccaacacgaattccccagcttgtcatctggagatggcgcccccacacgcactggttccgatgctccccagtatccttcagggctcagtctaagaccccaaacagaaggctcatggacacaaggtggacaaagacccatgggcccgccaggtgttacaggtggagacgcagcaggtcaaggcagacctggctcggcccacctgggtcccccaccacagctttcggcccaggcaggccaccaacagcaaccttttccaccgcaaatacgaggtgtgatgcctccgtttatgtacaaaggtagtaatttccaacctgcatctggaattggtattcaaaatcctcaaacaatgccgcaaccgaataacgggcgaggtaatagacaggtagataaccgaccacctcgtttggcggatagagaaactgacgaagttgcccctaggcccataatccgagaagaagagctgagtcgtatggacgaaatgagtaaggacatgggttgggcagaatcagacgaaattgattacaatcagaaactggcattcagtgacgatgaaggtgaaaaatcttccaaaagggaacacaaaaaaagttcaatgaatagggatcatagagacgatcgtgaaagtcacaatgccgacagtcaaaatcgtcaatggagtggaggcatgaggtctaacgctcctagaggaagaaactcagaagatgaagatatctgggtgcaaagacgtacccaacaagacaaagaagtggaaatagccgttcaaagggcgaagcagcggaaag

SEQ ID NO: 7931 - DNA, 1242 bp, Diabrotica virgifera
  SmartBlast Evalue=1E-122; Info=Alcohol dehydrogenase n=1 Tax= Aedes aegypti RepID=Q16R03_AEDAE
acgacagtcaagaacaaacacattgtcgtggtttggtctgtgaaacggtcagaaacgcaaaacaaaatatggcgtcaactaaggacaacttgagtgctgttctctatgggatcaatgacctaagattggaacaaagaccaattccagttccaaaagataaccaggtccttcttcagatggaagtagttggaatttgcggttctgacgttcattacctagttagtggaagatgtggtccatttgttgtcaaagaccccatggtaattggtcatgaagcttcaggaacagttgtgcaagttggaaaaaatgttaagaatcttaaaccaggtgacagagtagccatcgaacctggtgtaccatgccgtacctgccatcactgtaaaactggtgcttatcatctctgccccgatatcttcttctgtgcgactcctcctgatgatggtaacctctccagatactacgtacatgacgctgatttctgttggaaacttcctgataacatggatctcgaagaaggtgctttgatggaacccttgtctgttggtgtccacgcttgtaaacgagctgaaattaaagtaggtgacgtttgtcttattaccggagctggaccaatcggtctcgttactctcttatcggctaaagctatgggagcttcaaaagttgttatcacagatattttagacgtaaaattagagatggctaaacaattgggagcagattataccatcaaaatcgaaaagggtatgtctgaagaagacatcgtcaaaagagtaatccaacttttggggcaagaaccaaataagagcatggactgtactggagtcgaacaatgtgtcagagtttgcgtatctgcaactggagtaaatggatgcgtagtacttgtaggattaggtaaaattgaaatgactctcccattaactaacgccttgatcaaagaagttgatgtcagaggaacattcagatatgttaacgattaccccacctctattgagctagtaagatctggaagagtaaatgtcaaacctttggtgactcaccactataaactagaagactcagttaaggcattccataccgctaagactcaagaaggcaacccagtcaagatcctgatccacgccaatcctaactggaaaccatcttaataatttaattgccgccatacgtattagtttttgttgaaaaaaattgttggagtgtatgttgtttttttgtgtacgttaataaagaaattttaatgtt

SEQ ID NO: 7932 - DNA, 1235 bp, Diabrotica virgifera
  SmartBlast Evalue=0; Info=Probable JmjC domain-containing histone demethylation protein 3B n=1 Tax=Camponotus floridanus RepID=E2A2I7_9HYME
tgcggcaaggagggattattcttattgcacagaatgtcctgaggaaggggcagtggtgcagcaactttcctatcaggttcttccggatgaggaccaacgtcttccccttttagccaattctcatatctgtgtggctgaaatcgtttaacaaatgtatccatagaaattttgaccatatccttactgcatgtacactgtgaagcacgctttccatattcgatccaacgttcttgtgcaaaatttgtagattcggcacaattgaaaccatggttaaatcctgcatggtaaccatagggaaaagttatcatgatctcaccagcctcttgagtgatcttgttgtaaggaattgaatactgctttaaaatttgaggagagatcaatgtcattttgtgccgcaaaaaagcctgacaggtcttgtaggaacttgggaaaaatccatttgcaagtctttctaatcttctaccatgttctggtggaatggaataccaagtttttggtgctccaaaatgaagatagtttatcgagtagaggtccatatcttcagtatgccaggcaaatgtagttttccacataccgaaatacaggtaagcagtgttaactccttcaatagaaatgccataatcttcattaacgtaatccagtattgttcccaatctgtttatattccattcattgacattttcatctgtcagacttccagaaacatcagcaccgtagataggagcaacgtaagtgatattcttccaatattttctttccaaatcttcgtaatcgaaatgtctcggagtagcataacgttccgaattagccagttcttggtactgctttacagtcattgatttcttttgaatattaatttgttgatacagtccttgtttaccggtgacgacttgacaaattggggcaggaatagtcacttttaggtcgtcaacgttgtatccagacttgcggggcacccattctgaaggaggaataacttttgccaatccagccttgtgagccatttttgattccatgtgctgcacatacttggaaaagtccttaaattcctcccaggtaggacggaaaaccataatgtttggaattcttggaaaatttggttcagccattttattatgtatcgattttagtaacaattaatcaatgtgataccaaaatacaatggatttacattataataatatatttcataatattgttcgtcaattttttcgggcggccatgattgacacact

SEQ ID NO: 7933 - DNA, 1235 bp, Diabrotica virgifera
  SmartBlast Evalue=2E-29; Info=Endonuclease-reverse transcriptase n=1 Tax=Bombyx mori RepID=D7F170_BOMMO
ctaaattccaaataatatctagtaatatttctagcaagataatcgggcgaaaatgtctggttttagaaaaaattctaataaatcagaaatatatatatctttataaaattataataatgacgaactttcttctaaatacactatgtaataaaaatcaaaactataataaatataagtattatatccctaaactaatatgtagttcccactatacttgaatattactattaaatatcagcttgaagaaacgcccacaaaaatacataatatatgcttgggatgttacataacagcactgcaggcctcaggggcccacggcttaaaatttttcaactgtctttttccactttactctctccagagcagctgtcttccagtttacaacgcctgctctttgtagatcttctttggctgcttctagccactttttccgcggtcaacccctcctttttcttcccttacctcttaacaatatagtcttcgcccatcggtacactgacattgtttccacatgtcccaaccagcgcagtcttctagttttaaccatgtggctgattactggcttcccaaacagttcttgaacttccacattcgtccgtcttctccatttgttctctcccactttcacaccaccgaaaatcttcctcagtacactccgttctcatctttcgaatgtttcttctctcttactcagaacccaacacgcactactatacagtactgtaggttgtaacaccgtactatataaccgcaattttgctgctcttgagataagactactttttaaaagtttgctcaatactccaactgctcgtcctcccttcacaattcttttttcaatttctgttacagtcacccccaggtattcaaattctttcactttctcgaaagaatattcttttccatcgttacctattctaattttcaagatctattcttcatttagtgtatctcccatttccataaattgtgttttgtgttcgttaattgtctgcttttcttttctttaaaaaggttaaatactcttagcagttcttctttttgttcttgttatcaatactatgtcatctgcatatgcaagtacctgagttcttctatcatagattgtaccttgcgttctgatcccgttttccctgaatattgcctctaatatccttgggatgtagtatgaatcattcacaattttaaattgtctgcattttcttatagatttttggtctttttaaatgggtggg

SEQ ID NO: 7934 - DNA, 1241 bp, Diabrotica virgifera
  SmartBlast Evalue=1E-154; Info="Septin 4, isoform A n=8 Tax= Drosophila RepID=Q0KHR7_DROME"
ggggtcacgaaatgagattgaaattgtgtgtgaaccgagcgtcgtcgtttaggtactctcggtgaatattaatcacgaaaaaatggccaaattataataaaatagaagcgagtaccgtgtagcagcggaaagttgtggttccctcagctcagtacgcgagtacgcgttgaggagagtgagattagtattagtgtgtgcgacgtgcgtgtttgaaaaaaaccggaggaaatgtcagacaaagatcgagactacatcggttttgctactcttcctgaccaggtccaccgaaaatcagtcaagaagggctttgagttcacgctgatggtagtaggtgaatcggggttggggaaatctacgttgttaaacagcctcttcctagaagacttatatagaaatagaaaaattccagatgtcagtgaaagaatatccaaaactacaagcatcgagaagaaaacaatggagattgaagaaaggggtgttaagttaaggttgaccgtagttgacacacctggtttcggggacgccatcaactgtgaagaaagttggaaaacttgtgtcaattacatcgatgagcaattcaggcaatatttcacagacgaaagtgggctcaataggcggaatatgcaagataacagagtccactgttgtttatactttgtgccaccttggggtcacagtttgagacaaatggaccttgaagtaatgaagagactgcaccgtaaagttaacatagtagtagtaattgccaaagcagataccctcacatcatctgaagttgccaaattaaaagcaaatattcttaacgatattcgagacaacgatattcagatgtatgaatttccagaatgtgatagcgacgaagatgaagaatttaagcaacaagacaaagaactaaaagcaagcgttccatttgctgtggttggcagcaataccactttagaaatagctggaaagaaaatcagaggaaggcaatatccatggggtgttgttgacgtggaaaatccaaaacacagtgattttatcaaactcaggacaatgttgatctcaactcatatgcaagacttaaaggatgttacagaagacgtccattatgaaaatttcagggctgcgtgtatttcccaaatttctcagcatgcacgagaacgagggaaactaaaaagagactcaactccatatgattcagatatttctgaaacagataggctgctaatacagaaggacgaagagattcgtcggatgca

SEQ ID NO: 7935 - DNA, 1239 bp, Diabrotica virgifera
  SmartBlast Evalue=4E-42; Info=10G08 n=1 Tax=Ips pini RepID= Q5FYF7_IPSPI
ctcctagcgattggatgtatatcatccattgttaaatttttgacctcttcaaagttagccttttgtcctttttaccaaatattactaatatgttcattaaaattatgtggaaaaactcagaaggagctgtttgcttcagattatttataaacaaggcatatttaaaaggagctatgtcacagttcaaagcttctaaagttttaatgaaatgtttatggtacatcatcagaagatcatcaaaatgttcttctaatacctctatctctacactactcataagaaagaaaattagatcagcggtgatctcttgtacagagtacacttgaaagtccaggaatttattttttattatctctccatcttcattcttcagctgcatggtgttatttaaccataaatctttatgtacaaacccagaaaatgcagacttgttaggtttaggcctaaaggaatccccagttttaaaaccttcctcgtcaatactcatcaaaccatccaatttatttacgtgctggctgcaaaaactgtcttgtgtgagaatttgtttcagtactgttcttggtatctgtggtggaccatgatcaccatcaggacctttagctgtggggttatccacccatttcggcataaaagatttgtcgacaaatgtctttttaaacaattccgggtctttctgtttgattgctaaaggaattgcgtggaagacagctaggtcagtcagcagtaatttggcaccgtctaagtcgaatcctttgtgcctgtctgcgttggaatatcctgcagcttgaagattttccaaaatcatgactgcatctccgtcaggttcttcgttaccatcaagatcgtatctggcagcaatcaattttggaaaaaattccacctccttcaatccatgttcctttaaaaacttctgcattgtcggtattatttccttatagaaggcaatttctggtttaaacattcgatagatatcatcagcaataccttttggcaacttttcgtcaatgacaggacatttagcgacaaaatattcggtgtttgtagtcttggtgtccttatttctagtcgctatttgcaatctgagcatgtcactaaggtaattctcacctggttgagtgaggtttgttattgtcttgtctactatctcaacattttctccaagtgctggtttcaataaattatttaggttttttattctctcgccttccatttttcgtagaaaatacaccaaaacacaat

SEQ ID NO: 7936 - DNA, 1239 bp, Diabrotica virgifera
atattaacaaatattggaataaacacagaggccggagaattcgatatcaaacgtgggatctaacttgccaaacttctccactaaactagtaaatattttatacccagaaccacattgcttatggtaatatcgccttgtaacatacaagcagtaaactgatatcatactgataggacaaaggtttaagccaaaactgttgaatgtcagtttgtgagtgaggcattcgagactgtcataactgcatcctttagaatcataacttgctacgctcctatgtaattgttcgttaataactgactcgtttttattaaacgatttgcctattccattttattatcataatcttgaattttcaatgactttgtcaattacaaaatggccagtcctgtattttagtatgaaacgattaatctgaaaatgtttcaagcaacaactataattaacacgtcacccgttgtagtattataacattagatataacttgtttcagggcttgttccataaaattacaatacaattacttatatttatgttaaagtcaatatatggccatcacaaacatttagacgataaaactatgaatgtgtatatagtcacctcaacgttttaacttggaagcttaaaaataagaacgaaaatgcccagtgacttcttcgcagggttgtcgctgttaataagactatccattgcttctcatttgtttaatacacctgacacatgacgtgtatatatccacgtcagacgttcttggtatatataattgatatataccaatgacgtatgacgtacatatatattatacgtcatatgtcaagtgtaccaaacaaatgagaagcgttgaatagccctatacgacgatatattttcgttaacattaaatatctgaatgtatgttaaacaattgacctatattgatgtacttaaattcattatacacatatttaacacttgtaaaaacagtcttcatttcaaatatttactatacgacattaaaacatcaagttctaaactggggttggaaatttgaaacagtggggagttttaacaattttataaaagaaataggcactttttgcgtttcagttactaaaactataacatttataatctttatttttaagctgcgaagaaatctcaaataattaattgctgaaataattctttaaatgtttgtacaagaggcggtccatttcaaaactaacttctttcatattggatgtttataattactatggtctg

SEQ ID NO: 7937 - DNA, 1239 bp, Diabrotica virgifera
  SmartBlast Evalue=1E-176; Info=UDP-glucose 6-dehydrogenase n=2 Tax=Aculeata RepID=E2AU70_9HYME
gtcccattctgtgcaaacaacaatagcgtgacaatctttcgctgcttcgtaagggtcatcgtatgtctcaattttctctttatacaaaccgggaatccaacaaacgtcaggtttggtaagatcttcataaatttgttttataccaacctttgggtcataaattcgaagagatgctccctcatctaacaaagttttggctacgtatattgccggactctctctggtatcgcctgtatttttcttgaaagcaaaaccaagcatgcagatgttcttatcactcaaggtattaaaatttgattgtataatttgtttcgtaaatcggctcttctgatattcgttcatatctatcacctgctgccaataagcagcaacttctggtaggttacaacattcacaaatatatactaaatttagaatatctttttgaaaacagcttccaccaaatccaactgaagcttgtaaaaatttggagccaattcttgagtctaaacccacagctctagctacttcagatatatctgctcctgtagattcacatactgctgacaaagagttaatactagatattctttgagccagcatagcgttggcagcaagttttgataactcagaagaccatgtgttcatggtaataatcttccccctgggtatccagttttcataaactgagcataacacctctattgcttctcgtccagcttgagtatcttctcctccaattaaactctatcaggattgagcagatcatttacagccgtaccttcggccaagaattcaggatttgataatatttgatgagttgtccccggcttttggttagctcttaaaatgcttgatatactttcagccgccctaacagggacagtacttttctctactacgattttattagttacagctacatctgctattagtctggctgcaccttcgatgtattttaagtcaggagctcttcccttcccatttccattcaattttgtgggtgtgttcactgatatgaatatcaagtcagcatctaatattgcttgtgtaatgtcagtggtaaagaataaattcctatttctgcactgccatactatattgttcaaaccaggctcataaattggaagtttctcagagttccactgggctattcgttcagggttgaggtcagcaacagtaactttaatatctgcacatttaaaagctatcacactgcaggttggccctcctacataaccagctccaaggcagcaaata

SEQ ID NO: 7938 - DNA, 1241 bp, Diabrotica virgifera
cagtgacacttgtattttttccaaaaaaaaataaataaacaacaattggttcatacaaattgtttgattcgtaaaattttaacaaataaaatttacaatacacaccccttgagacattcattttacctttatttatcaaatacataacaaattacaaaatgcatacaccacatctccaaaaccagctgaaggtgctgatcaccttttcagcttgtcttagaaaatgattcaactgaacttaataatatgtatttcaaaagtcagtgcagaaagagaattttacaaataaatactttaaatactgatttagtacttgaattaataatgacttcagtataatggttacataatagctagccaaaaataatttaacgagtgaatactttgtgttgccattcttaatagtaactaaatgcattcgaaattcattcaattaatatattgtagagcctgtatgtcagtagaggacattactctttttttttctaccaatttttatggccatcataactgagaatttttaatttgtagtaatttaaattatataccaatacttatcaataatttaataaaaacaatcataatcatacatgaactatgtacagctgcagtcaatgaatagtttacaccttcctttttattttgtaatgcattgtatttatacataaattttacatttgaatgaagcacaaaaaatcaagagcacttgccaaactcatacgctaaggcaagtagctgcagatttgaacatggccatatgttcatatggaaaagcaaacaaaggtgggatcattttcaccctttaggacagttaggtggttcaagaggccagatctccaacgggcaacaagatgaggtgttagtagattatttgaaagatctttttgccaagcttgacagcatttccaggcagcatatacactccatgtagaaggattgcaaatgaattgataaattgtgcagctgcaaggaaaccttttttgactgaggatcacaataggagaccagttgcattataatataatgaattcataaactatgaaaacaacttttggtctaaggttgcattttctgatgagaaagtgtttcaatcatatagtaatcatcaaataagagtttataggcagaggaatcataggttttatgaaaaatatattcatcatttacgaaatagtggaggtatctttgtcaacataaaggaatggataagtgctaaaggcccaggcatttgaagggtacag

SEQ ID NO: 7939 - DNA, 1237 bp, Diabrotica virgifera
  SmartBlast Evalue=8E-73; Info=Adenosine diphosphatase n=1 Tax= Culex quinquefasciatus RepID=B0WFF3_CULQU
tgacgagtattggtccaaaacgcccctagtcttaaaagacaacggcaggattgaggatgctgcctctccatcaagcagaaaagttactggaatcggtgaaagatgtgttcaaaacgatgccatttttgacaaatgaaaatgctgtagaaattatggacggtactgatgaaggagtgttttcgtggtttactgtcaactttttattggaaaggttaagtggagatccagccaatagcgtcgcggccttagacttgggtggcggttcaactcaagttacctttgcagcgatgactccagcaagtcttaaagaaagcgactatattcagcaggtggcgtcaccaaggggttcgattccagtctatacaaacagttttgctggcttaggacttatggcagccagacatgccatgattacgataaatcaaccagatactatgaatgtgaccagcgaatgtgtaaatcctataataaagaagaaaaaattcctttatcacggtaaggaatatttcgtttccggtctacaagagaactatcctacttcaaaagtcaggggtaccaatactcaaatcggtgaaacagttcctattgttagttttcaggattgttcaaagctaattacggagtatgttaagagcaaagctagccctccacacgaattgcctctaaaaactatttttgcatttagttactactttgatagagccacagaagccggactgatagatgaagcaactggtggcaatatactaataaaagatttcaaaggagcagctgaaaaagcttgtcatgaggccaatgcagaacaaccgtttatgtgcctcgatctaacgtttatctggtcacttctggagcacggatttggtttaaaacccgaaactaaaatatttttgcacaaaaagatcaacggacacgaaatatcatgggcactaggtgctgcttacgaagttcttagaggaaaacaaacagtccgatagaaggaaatggtgtagagttaacgtacaacgattaatagcactgtatatttagtatcaattttttataagatcaagaactttttcaattacgaaacaacataataaaacggttaggttgagtgttatattggaatatttgataaatagtgtataggattgattacttcatttaataagagtttttagatgcatgtaatattttcgctgaagagaaactttcggttttggactgattcattgtttccttctactctcaatctcac

SEQ ID NO: 7940 - DNA, 1237 bp, Diabrotica virgifera
  SmartBlast Evalue=1E-70; Info=Pentatricopeptide repeat- containing protein 2 n=1 Tax=Camponotus floridanus RepID=E2AYS9_ 9HYME
aaaccaggcctctgctgatacgtgaaagacttctttttggtatatgtcctctgtgtgttctgcggttgtctgaatctcggttgaaatttattttgccttctttcggagatcactgctggtggctgaatttcctgacataactgttcatccatagtctgttcgacaatatggccttgtttctgaagtaactgttcgattctgttaaattccactgcatattctggattgtcaagtgctgtaacagcttcttgaactttctctaacgtatctttattaaaagtgtgcttctgagtccccggtgtgtcttcgctcaatacgcttttcattattggaatggcattttcaaccctacccacagaggccaaacacgcgacctttaaatttcttacagtggtataattttgatttttcgctgatgtgagtatttctaaagctattcctggatttccctgattatatgctatacctgcgcaaaaagtacatgcccgtctcatagggaaatggccaatgtctttcaggtcttgccacaactttaatgcgtactccaagctttctttggaatttaatttgtaacaggcagccatagcaagaacaacaacatttcgtggatacttcataccttccatttgtttatctttgataaaatctgcgcagtcgagaatttcttgatacatctggttttcgtacagaaggtctaggagtatttgatatgaaataatttgatcaaaaaatcctgatagctcatctgatttgaagcattctaaagctaaatcaggtctgttgtaatgatggaatagacgcagaacaactggaccaaaaacaaaacttccaaatctgagttccttattttgtttattgaacttttttatcatcttgaccactaaatccagatctttttcatctttggataaatgtatcatattttttaaatcttctgtaaacaccatgtgcttgccttcatcttgactaaactcaaacattttttctttgaacttttcagatatattttccatttgttttcctgtcgtttggcattgttgtaaaaacatatcaattcctaatgttacctttgaatataagggtcttgcattttgtatattaacagcgaatcgaaagccattatttatttgaggcacctttgaaatagtacacttgctacttttgaacacacttaataataatctgttaggaaacattttaaaattataataaatttttattcaagatacgctctcac

SEQ ID NO: 7941 - DNA, 1236 bp, Diabrotica virgifera
ggttgggtcttgttgtgatcaatatgcgttgcgctagaaaaataactgcacaggtcacccgtcctgccggcgcaggttgtgactcgcttaggttcaatttgcggcggggatacttaaaaaggaaatgcttcaaagtcagtatcttaaataacgtgttttgtgacctagactgggctatgttaacactacaaaattgtttttaccgatacaaaaatgttcaatttgtatattggatcaaaataaattcattatgtacaaaattatatttttaaaatacaaattcaaatatttaggttatttatcataaataatttagacgctagagcttaaattattattattgatattaaaatttaccttaacataaaaataagttcaagtttataggattgaaacaaaaatagaaaaaatgctttattgaagcaaagcttctatcctggcgttgtattagtttttctgtatagtaaaatgctgaggcgaacgtgacggagcaacacgaaatacaggttcgtggttcccagtcacagtaaacacttggaagagttaatttacgcgactagaggagccctttatacattttcaattttatttaaatctataaaaaaaaatactaaataaataatataattacattattcaattttaaaaatatcatctaaattttaaaatacagagaacatattatgaagtttcgtgctagactacagtaccgcctattgtacgactttgttttaatcatttcggtgtttgattgctactaaaataaatgaaatttaaacataatacctgcatatatatcatgaacgagttcaatatttcccaggagttgttttttaattattcgaaaaatgctgtgaactggcaattattaattttcatttttacatgtcttgtttttccgagtacatactacttacaacgcttaaatgcaaatttacaacgcaaatattttaaaacatggttgtttagataaaagtgctattttattttggttattaaaatcccatcgtacggcaagaaatttgaacaaacgttttaaaaagcactctttttaatcaccaaaaaaatttaacaagggtattttttatatatgtttttcctctaaattttccgttaaagtggagcatgaagaatcgatatttttattcattttaaattacaaattattattttatatttatatattatatttatttgttacatatggatatcataaaatacttagtgagcgtttac

SEQ ID NO: 7942 - DNA, 1235 bp, Diabrotica virgifera
  SmartBlast Evalue=0; Info=Chitin deacetylase 1 n=1 Tax= Tribolium castaneum RepID=A7U8C9_TRICA
tgattgtttctgctcagaggacggtacaggcattcccaatgatttaccagccaaagatgtacctcaaatgataactgtcacccttgacgacgccataaataataacaacatcggtctatacaagaacatttcaacggtgaacggaaaaaccccaacggttgtcatatcaaggctacattcttcgtgtctcacaagtacaccaactactctgcagtccaagaaatgcatagaaaaggtcacgaaatcgcagtacactcaatatcgcacaatgatgacgaaaacttctggtccaacgccagtgtaaatgactgggttaaagaaatgggaggtatgcgagtcatcactgagaaattcgcaaatattaccgataacagcgtagtaggagtaagagccccttatctaagagtaggaggtaacaaccaatttactatgatggaagaagaagccttcttatacgactccactatcaccgcacccttaaataacccaccactatggccctatactatgtattttagaatgccacacagatgtcacggaaacctccaaaattgcccaacaagatcacatgcagtatgggaaatggtacttaacgaactagatagaagagaagatcctgaaaatgatgagtatttaccaggttgtgccatggttgactcatgttccaacattcttactggagatcaattttataacttcttaaattataatttcgataggcattacaatgaaaacagagctcctttgggtctttacttccatgccgcttggctaaaaaataatcccgaattcttggatgctttcctttactggatagatgaaattctctcaaaccataatgatgtatattttgtaacaatgacacaggttatccaatggatccaaaatcctagaaccgtctccgaagccaagaacttcgaaccatggagggaaaagtgtgtagtagaaggaatcccagcctgttgggtacctcatagctgtaagcttacttcttccgaagtacccggagaaactatcaatctccaaacttgcgtaaggtgtccaaataactacccatggttaaatgacccaaccggtgacggtgtcttctaagtcagctctagttaaatttgtagggtagtatttgaaagcagagctgcccaaaatattatgggcagctagtgatcaaacgttacaatatttcgtatttattttttagcaatgactggtatgcgtgatctatttgttgttataat

SEQ ID NO: 7943 - DNA, 1237 bp, Diabrotica virgifera
aagtttagtacagtttattaaaaaagtataaaaagaaatacaatagtgtcagttaagagttaaattttacatattttcaataattcatatttctagatatttttttgtctcgattctgcataacaaaaataaaaataattatcttatcattttgattacctattcatagattaaaatgtattaaaaattattgtcatgttaaaattaatatacctaatcaaactattttaatgacacgataataaataacattgtttatgtataaatttttgaattattgattaataagtgatcgtattaagtattaaaaaatatttttttcaacgaaataaatggaatttgattaatatgtttatatgggattaagccacaaattatttattgttgtaatgaaaatcacacttttaaagaactaatgttttacttttcgataacaaaaattattttaaattctgggaacatgtataacccagttttattagttgagtaggctaataaaacttaaaataagttatacatcttcccagaatttttagaatattttttagaacgatttctgtagtggtaatcgaatcgtcaaacattagttaattaaaaatttaattttcgttacatcaatcattgtggctaaattccatataaacataatacataaattagacatgttacaagaaacagaaagcagatacagaactttgttaaaaaataaagttaattttaaaaattaaacatattatacaataaaagtttaccgttcactgtagttctggactacaccaaaaatttgccagttcttaaatgtatagacctacttcgtcaacatgaagatcttcattggtgaacttcttgtattgattgctggtactgaatgtcatctgagccgcttgggatagcactcctagttgcttatttttggtctccaagactctgatgttcgccataacaacgatggaagcatctgcgaatgtgttggatgtgtcgaagacgtagatctgttggccggtgatgtcttttatttctttcgcgatcttcagctgcaattccagagattttttgacaaactcgtctgcgatatcgtcacttgctgttggaattccatagatagtttcagttaagaccagaagaactgccaaaactacgatttgcaccttcatttttcggttgaagtcgaactttaaaatttaaaaaatatttttcgatgtatgtagacgtatctgtctaatctgtgattgtcgat

SEQ ID NO: 7944 - DNA, 1231 bp, Diabrotica virgifera
tagtcgggctcttaaaagttttctgaagttgtcttgttttaaaacatgacaatattattatctgcaacctaaccctttggcgcagtcttttcttttttttttatgacgaaaattgtgaaatgaaataaaagtgaataagttatctggtagaaggaaacggaaattatctccaaattgatcttttgtcagttggtgaatattgctaccactctaccagtaggcgttagagaatttaccactggtaaatatttctaccgctttatctgcacactaaaagaaaagtgtttcaagagaaaagcacttttttcgaacttaatttctgattataaatagaaaaacattctttgcataatgctacattactttttggccgattcttatttcttaataaattacgtgatagaaaaaaaaacgaaaattatgtccaaatttatcttttgtcaggtggtgaatattgctaccagtaggcgttggaacatttaccactggtaaagatttctaccactacatctacacactagaagaaagaaacatttatttaaaacttaatttctcatgatatatagaataacgttctttatataatgttacattattttttggctgtttcttatttgaagtgcagttaccacatctggggtaaggacctttgattttgaatttttggactaactgaaattccggctgtttgttagatcaaatcattgtattcatgtcacaaatcataaaaattgccgtgtattcatgaaaaataattacaaagtttgtaaaaaaaatattaaaatgtgttggcaacgttcaatagattgaaataactttcagaaactactttattgtgtcaaaaacattttttacgctatgttttaaactactacgctttttattttccaatattgcaaggaataaattaataaaaaatttaaataaattgctaaataaatataacaataacaccggtaaagtaccctatataaatgcttattggtagctatctttaccgctcaataccatcgatcctttgcagcagtactgtttgtattttcggtctagtacttattgctataggttagaaaataaccttaaacaacataggtaaatatatctaccactgacacattagctggtagctatatttacatttttttaatttaccaggggcagcatattttgtacaatattttatttttccaataaaaacaagaaaaaattaatattacatatcaaaaatggt

SEQ ID NO: 7945 - DNA, 1236 bp, Diabrotica virgifera
  SmartBlast Evalue=1E-109; Info=Sodium-dependent phosphate transporter n=1 Tax=Aedes aegypti RepID=Q16UY5_AEDAE
tcaccatctctttcctagtgtgtggattttttgaccttattaggaccatgggctgcaggttgggatgcctgggttttaatagcatccagatttttgataggattgtttgggggcgtagttttcccaagtcttcactgtttgattgcccgctgggcgccgcccgatgaaaagggcaaatttataggatcccttttgggcggttcactaggaactgtgataacctggcccctcttaggggccattatcgaaaaattcggatggtcgtgggcctttatcggatgcggagtatttgtcatttgttggactggtttgtggtatcttttcgtcgcagattcgccagagcagcacccgcgaatctccgaagatgagaagaattatatagtgcagagtttgtcaggaagaatatctaaagttaagagacttccaccgtataaagatattttccttacgattccattttgggcgttattgattttacatttcggtaacctgtggggtctatttttcctgatgacggcaggacccaatttcctttcgtcggtgctgggattcacattaggacacactggcattttagcagcgttgccatatttagttaggttgatactaggaataatatttggacagatcggtgactatatcatgaaaaaggatctgatgaggaagactatgataaggaagagtttcgtgatattttctcacttacttccaggagtcttcttattcatacaaactttaacaggatgtgacgtcacgtgggctattgttttgatatctctttcactgggaatgaacggggcttccacattgacgaatttgcagaattctcaagatctatctcccaatttcgctggaacgctttatggtatcatcaacagcgtaggaagtacaacagggttcataaatcccgccatcgtgggatacattacagctcaacacaatggcttggacgagtggcacacggtcttctacatcggatcctcggtttacattgcttgtggactgatcttctgcgtatttggtactggagaaactcaagtttggaacgaagtggaggaaaagaagaccactgacggaatagaaaatacagcatttgaagacatagacataacgaagaacggtattgaaaatacaaaagtgtaacgaataaccaattttagttctattgttattagtacattgtacagttatttatatatttttattgactcattctaataaaagaactagttgagt

SEQ ID NO: 7946 - DNA, 1236 bp, Diabrotica virgifera
  SmartBlast Evalue=2E-62; Info=Putative acid phosphatase 1 (Fragment) n=1 Tax=Diaphorina citri RepID=Q0PWU9_DIACI
gaatgttattttgtttattttacactttttatgtatacaagagaaacaaacataacaacaattttataataaattaattatacattataacaaagatccgttgacgatggtagatattcttcgaagatactctcaaatttatctaatgggcaaaactcttcacagccaggcagttttaagagctgaagactatcggtggtccaattattgtagtataacttaattcctataacgttattaatgttatgaacttcaaagatcaagtaagccccataaggaggaacatgaggatttttgaacacatcgagaagtaccatcatctctcctacattattttcatgagctgaatataaatacatttttactccattcttttcacgttttttcgctttagttttagtgtcttctataattttcttcaaatgaaatccttccgcaagtttcgccatttctgtggtacccgtttccacataatattgtttgatggataaatcaacaatcactttaggccaaactgaatgcgtccatggtggcaactcttgtccgtattcttcttcagtggataaaccaaagtacatgtcgtacacctccttgaatgaagttacgttcaaccctgtatttttcgagatataatcgaagtctttttgatattttttaaatgtagccttccatttgggtgagtttaccagttccttgtataatgcctggtaacgtggacaatttatacccataagtactggatcgtgatctactggataataattatagggaacaggttgccatccaagtgcccaattccaaacatctgtgtattttggcctgaacaaactggctaatactaactcaagcgatgctttggttctattcttgttggtcgtgacagcgtcgacgacctctggataatacactggtcccaaaaacttatcatagcgtctacgcagatccttgccaatttggtactctcttagttttccagcgtttgtcaattgtcctcttcctattggaaagtaggtaaagttgcgatagggatccttagggtaagtttcagatagttcagcggttctgtttccatgtctaaaaagaacatgcgttaatatcacagtagaatcagctggttgaatattctgtggatcactatgaattctatagctgttaacaataacagagtacaaacttgttaaaataatcgcgactttaacaattatcattttaacgtttagtgaatttttacacggg

SEQ ID NO: 7947 - DNA, 1234 bp, Diabrotica virgifera
  SmartBlast Evalue=0; Info=26S protease regulatory subunit 6b n= 10 Tax=Endopterygota RepID=Q172T1_AEDAE
caattttacaagtcatcaaccatggaggctatggatattgttataccagaaaaagaagaaggtagtccttcggaagtaaaacaagtgctgcaggatgtggatactgaagatttgtacactaaatataaaaaacttcaacaacagttggagttcttggaggttcaagaagagtacattaaagatgagcaaaggaatctcaaaaaggagtatttacatgctcaggaagaagtgaagcgtatccagtctgtcccgcttgttattggacagtttttagaagctgtagatcaaaacactggcattgttggctcaactacaggttcaaattattatgttagaatcttatcaacaattgatagagaactcttaaaaccttctgctagtgttgctcttcataaacacagcaatgccttagtagatgtcctaccaccagaggcagattcttcaataagcatgctccaggctgatgaaaaaccagatgttcaatacagtgacattggaggtatggatatgcagaaacaagaaattagggaagctgtagagttacctttgactcacttcgaattgtataaacagattggtattgatccccccagaggtgtgttgatgtatggacctcctggatgcgggaagactatgttggccaaagctgttgctcatcatactacagctgcctttattcgtgtagtcggatcagaattcgtacagaaatatcttggtgaaggtcctcgaatggttagagacgtgttccgtctagcaaaagaaaattctccagcaatcatctttattgatgaaattgatgcaatcgctaccaaacgttttgatgcccagacaggtgctgatcgtgaagtccagagaattttattggaactgcttaaccagatggatggttttgatcagacaacaaatgttaaggttatcatggcaactaacagagctgatacattagatcctgcacttctgagacctggtcgtctggacagaaaaatcgaatttcctttaccagatagaagacaaaagcgtttgattttcagcactatcacatctaaaatgaatttgtcagaggaggtcgacttggaggactatgtagctagaccagacagaatatcaggagcagacataaacgccatctgccaggaagccggtatgcatgccgtccgagaaaaccgttacatcgttttacctaaagatttcgagaagggttataagaataacattaagaaggatgagagcgagc

SEQ ID NO: 7948 - DNA, 1230 bp, Diabrotica virgifera
  SmartBlast Evalue=5E-23; Info=Reverse transcriptase-like protein n=1 Tax=Takifugu rubripes RepID=Q9YGS2_TAKRU
acttgctatcgatcattttacaggcagtattttggaaggatttgaaaactttcttgatacccttgcctcgttccttgatcttactaaagcttttgattgtgtcactcatagtattcttcttaaaaaattacacgcctacaattttcatcctatgtctattcaattgattgagtcttatctatcagatagatttcaatatgtgttttttaaccagcttaaatctgataaaaaacctttgatgtatggagtgcctcaagggtcagttctaggtccaatattatttctcatttatataaatgacttgggattttcacaagagggcccggtaagcacagtcctatttgctgatgatactacatgctatcaaagttaccacccttcccaaatcagtgatattgatcttgagaccacagagagcaatttgttccaatggtttttggcaaatcgtctctctctcaataactcaaaatcacaaacagtgaactttaccctaagacataacaccattacacatcccattttaacagattgttcacaggaagctaaatttcttggtgtttatcttgatcagggactcacttgggaacggcacatactgaaactttcccaaaagctctcaagccaactctttttatttagaaacctatctaaggttacctcccttcaaacccttcttacatcatatcacagcaactttcactcacgactaacttacgcaatcctttcctggggacactcttgccatatagataaggtgtttggtcagcagagaaagtgtattcgcataatcacaggtcagggttatcgggacgattgtaggcagtctttcagaaacctgaggattctcacactaccttctgtgtacattatgcagtgcctgttgtatgttcatcaaaatgtagatctgtataaaacacaacagcatacttatcagactagaaatcatgatgcccttgtaccagacttcagtcgacttgagaggaccgaaatggaaccagatacctagcattgaaattttataactgtataccaatatctattaaaagtcttgattttaaccaatttaagagacaaattaaaaattatcttctgatgggtgctttctactcatttgaggagtacttcagatctaaattttgttttgtcctgtaatttaattagtgtttagttttaaattttagtaataggtttttttactgaagtactgtcaacttttaatgtaattttaga

SEQ ID NO: 7949 - DNA, 1232 bp, Diabrotica virgifera
  SmartBlast Evalue=9E-84; Info=Forkhead box subgroup O n=1 Tax= Aedes aegypti RepID=A0T2W4_AEDAE
cgtaaggagctgtatatggcggtggtgggggctgtgctggttgcccattcatataccccaaatatgtgtctggttcgagcttcatcccttgctggaggtttcccgccaattgatctggcgaataattaccgctgggtacaatatctggactataggtttggctgttaaattggttgtgcgtagcccattcggattcggctcctacagaagggatgggggacaggcgcccgcacgaagaagtgttcgaagaggctcttggtctaaaatctgggctcaattggaaaccgccgctgtgaatcggcgaatctggaaacaagtctaaactctcagatacagatgaactaggactaggcgttgtgtcgggcaggtaaccgttttttatcatttcgacttttttctttgctctaccccgttttttctcgaatttgctagtttccatagaggctgctcttcgtcttacggattttccgggcttggcgtcggggtttatcatccaccaagaggattttccagtaccttcattttggacccgcatgaatctgttgtgtagcgacaagttgtgcctgattgagttcttccatcctgcagagctgttactatccccttgtctttgaagtagggcacgttctgcaccatccactcgtagatttggctgagcgtaagtcgttgatctggagaggtcttgatggcttgtgtaattaaatcagcataactaagatttccccaagcgtttctcctgctggaattctttttcgtgggcaccgcagacgtcaccgaagacggaacgggcccttgtccttgctgtcctgctaccacacacttgttgcctgtcgcctcatcggcgggatccacatagttatcgggccggggcaagagccacgtgtttgatcgcgcgcgggtttgaggctcaaaaccgtcaagctccggcaagggttccatcatgctcatgtccattttctggacccaatttccgtactgcccgttcatagaaactgagagctgaaatcgcacttgttgaaaatataatcctaacaacaggcacacaagttattcactaactctgaataaaaaaccactagtcataaaacattatctttcactcactagtttcgcgcttaaactgattcgaatttaagaactctggtttagtgcgatgttacctgcgacgcagttacgcgatatttggccgagagaattgctcgagctagtactacaccccatcaagcgcccaa

SEQ ID NO: 7950 - DNA, 1229 bp, Diabrotica virgifera
atgttatcctttggttgatatgcaatccaaatggtattaacaatataaagaggttaatacaataaaacaaaggtttaagtattttattttttaaatttaatcctttatgtattagaatctataaagttttgaaccaaagtattaattacacttttcatttgcatgccgtcagcatttgtttatttaaatgtactataaaaaacccaccatacagctaattcctttattattatttttatcctttaaaacaatttgtttatcatacatttttgctagttgtggaagttcttttaacggaatgtgatataacatactttaaatgatacttaaaatcatttcaaatcaataaatcaaacaccaatatcatgtatgtacatatttataaatttattaacaaactgcaatccaagaaaaataatatattatcaacattagccatttacagtaaaacctccattaatcgaaataattgagggggaggctgtttcggataacaagaatttcggttaaaaataacattgttttttgtattctccttttatcaaattacatagtattggagagatagagctacaaaacatcgttgtcgaagggaaacacaaaagaaaatagaagattcctaaaaaaaacactctaaacatgttcaatttgcttaattttattgctgtttaatttactttttattgacaaaattatttaaactgtcaagacatttcggttaacggaatttttactgtatttgccttaaatggcaaaattttaaaacaaacaaacacacacataaatatttgcactagattttctcctagttaaaaatgtactgccacagcttgttccattaaataaccgcaggctcagttgccagtatttcaatgttttctctaaacaactgcaatatttgtaaagctgatattctttgaacaaaagatttcttgcattgcatctcatttcacatatcaatatgaaaaatctcttcaaaataccaaatctttcaataacaagcaatatttataatggaagcacttcaactgctgtagttgagaactggatagcaatacattgtccataaattccccattttatatacccataatatgcacaagtatttaacaactcctaaaatagagtatttatttctaaatgtacttctatattgcaggatgattattatcggttatgttctatgttgttctgttctttaaatgacaaaatactaattaaagtctaac

SEQ ID NO: 7951 - DNA, 1229 bp, Diabrotica virgifera
  SmartBlast Evalue=0; Info=Spliceosome RNA helicase Bat1 n=2 Tax= Endopterygota RepID=E2AH52_9HYME
ctttctgtctgttcccggcgttctttgaaaaagttttcaataatactctaaaaaatggcagacgctgatgatctattagattatgaagatgaggaacagacagaacaaaccgcaactgaaacggcaactacagaggtacagaaaaagggtgtcaagggcacatatgtatcaatacacagttctgggtttagagattttctgttaaaaccagcaattctcagagctatagtggactgcgggttcgaacatccttcagaagttcaacatgaatgtattcctcaagctgtcattggcatggatattctgtgccaagctaaatccggtatgggaaaaacggctgtttttgtattagctacactccaagtaatagatcctacagaaaatgttgtatatgttctcgtcatgtgccataccagagagttagccttccagataagcaaagagtacgaacgtttcagtaaatatatgcccaatattaaagtaggggtcttctttggtggcttgcctatccagaaagatgaggaaacgttaaaaaataattgcccgcatatcgttgtgggtactccaggaagaattttagcattggtcagatcgaaaaaacttaatctcaaacatctaaagcattttattttggatgaatgtgataaaatgttggagttattagacatgagacgtgatgttcaagaaatatatcgtaacactccccacgaaaaacaagtcatgatgttcagtgccaccttaagtaaagaaattagaccagtttgcaagaaatttatgcaagatcccatggaagtatatgttgacgacgaagctaaattaacattgcatggtctacagcaacattatgtaaaactaaaagaaaacgaaaagaataaaaagttatttgagttactagatgttttggagttcaaccaggttgtcattttcgtaaaatccgtacaaaggtgtgtggccctggcacaattactgactgaacagaacttcccagcgataggaattcacagaggaatggaccaaaaagaacgactgtcccggtatgaacaattcaaggatttccaaaagaggattctagtagccacaaacttatttggacgtggaatggatatcgaaagagtgaacatcgtcttcaactatgacatgcccgaagattctgacacttacctgcacagagtagcccgagctggacgtttcggtaccaaaggtctagccattactttcgtatcagaaga

SEQ ID NO: 7952 - DNA, 1228 bp, Diabrotica virgifera
cattcatataatccttctcaaatttggttagttccgctgatggtgcgcactgtttcttcacttgggcaataaaacactcatttagatgtatatatctctcgcaaaatttttctttgctttcaacaagttcatcttcaacgatatctgttacttttctattacactcattgtattcggttgtgctttcctcacttttaagttttggtaggcaaggagtaagttccgaacttataaggataaaatcatcgtacatgaagcttatcatcgaatcaaaaacatcaaaaatcagttgaggaagatatttatatttttctggtaaacaagcctttaacgttttaataacttctttggtacatccgtcaacatgcttgatgtaaatgtgttttggagttaaaaaaaggggttttcctttatacaacttttcatctttgttacgctgtcttccaattttttagagtccaatccatttttgatacacttagttttcaaatgctcctcaattctgtccatcttatcagacattgccaattgccttacaactctatgcaaacttcttcgactcctatgtttaggtgcataactgcatgcgttggtttttaaaatttttattacagacacaacaacatctgtgatgttctgagagcaatggttgctgagagtttccataatacaatcctcggcgtcttcgaattttttgcatgtaatttgtgacatttcacgcattggagacatcggattgctactcaagcctaagcatttttcttgaatttttaatatcccttcgttcatacattccgccgtatattccttggtatatttttgtactttatcttcgtttttacacgtgtacgctattaattcgttatctatattctgccaaatatctactaaatatgattctgttatatttagacattgttttgaagcagatattagtggttcataacaaccactaatagcctggcgtcccaaacaagaagtatggtaaattggaattttggctacatttattttatttatgggaattcctttagaatgttcatctacacaatgtgataggttatgttgcaattgagtcaatttagaaaaagtacctgatccaccaatgatattacagttatttttattaatatctacttcctggtctaaaaatagcaccgttgtataacctgccagaataattaaaacttcgaaaatagacatgatcactttctcatatatatcactc

SEQ ID NO: 7953 - DNA, 1224 bp, Diabrotica virgifera
  SmartBlast Evalue=3E-51; Info=Putative acid phosphatase 1 (Fragment) n=1 Tax=Diaphorina citri RepID=Q0PWU9_DIACI
ttaattattgttaaactatatttaatagttctgccttccatcatgattttaacagttatattcttgggtcttctttatttggtacaagcaaatgatgacagtcttgtagcagtacatttgctcttccgacatggagacagaactcctgaaattgaaaatttgtacaaatctagcccatattataatggttcctcttttaaacctttcggatttggtcaactaactaatgaaggaaaactaaaagtttataatttaggaaaggaaattcgccaacgttattcggggtttttggacgaagagtacagcattgatgtaatcaatgcacgaagtagtgattttaatagaaccaaggcatcattacaattaatgctggcaggattatttccacctaccaaggatctaacttggttacctggtttgaactggcagcctacaccatacgaatacgttggaagacattcagaccaggaattattcggttttggatgtgaaagatgggatccgatattccaagacttcttagcatcaaacgatcttagcaaatatgacaagctactagcaactcttactaataaaacaggagaaccctgtaactctctcttaagaggttatcttttatattttggatttcaaattttgactgaacttaattacaccctaccagattgggcaaatgaggtttatccatacccattaacgaatctgacactggattactatgctatgattacaggatcaacaacactacgacaaatgtgtggaggatatctattaaaacatattcttgatgacactcagtcaaaaattgaggataaatttccagccaaaaaaatgtttatatggtccggccatgaaaataatatcgtttgccttctacgtgttatgaatcttttgaaacatgatatgtttccaaattatggaagttttgttgcacttgagcttcataaaataaactctacttacggatttaagatttatcttaagaacgatgataatgaaccaaatttgttaacaataccaaattgcgacagcttttgtcccttagaaaaatttaaaagtttagtacacgaaatattccagaagatatatcattctgcagaggaaataaaacatccagtggttcccagatgttctctcaagttaattatatagtttttgtttttatttatattttttataaacgtatttatatttatatttaaataaaacagtgcaagaggttct

SEQ ID NO: 7954 - DNA, 1230 bp, Diabrotica virgifera
  SmartBlast Evalue=1E-74; Info=TATA-box-binding protein n=1 Tax= Culex quinquefasciatus RepID=B0W4M6_CULQU
cagtgacaattaaccatgctgttcttgttttctttcgtgaatttttaaaaaagttaaaaatgagtaaattgtgacttaacttactgcagaaatcgttaaatggttacaactgatcgtatgtatttttatgtagactgttaaattacaaatatggaaggaaaacaacaaacagatatacatctcaaggcgatgctgagcaatccctccaggtttactccagctgttccagttcctgactggaatacaccatctacttctacaaatcctacaacaccctcacaagtacctcttataaaaccaaatttatgccttatgacagtagcaatgcctggttcagcagtaggtgaaccacacacaaacataatgttacagaattgtctatctactgtagatcttcaagttaatcttgacttggaaacaatcaatgctagaacaagaaattctgaatttaatccttcgaggtttcatggagttattatgagattaagagaaccaagaaccactgcccttattttcagatcaggaaaaattgtctgtacaggagccagaaatgagtatgatggattgttagcatcaaagaaatttgccagaatcatacaaaaattaggatataatatcaaattttgtaatttcaaaatacaaaatttagtagctacctgtgacctgaggtttcctattaaactggagaatttaaatatgatgcatggacaatttagcagttacgaaccggagctgttccctggactagtatacagaatgattaaacccaggctggtgattttaatttttgttaatggtaaagtagtgttcactggcgcaaaatcaagagaggacatcaaagaagctttaaataatatatatccaattttaagaagtttcagaaagaattaaagaaaataattggaaattgtcacatcacacctttgtaaaattaggattatctacagtcaaatttaaagcagctctgaatagacttatacaccagtcagaaacatattgtaaattacttcatgaataattgtaatgatttcagatgttctgtatcaagcagttgaagtatattgtaccacattctttattttgtttgagttaaacaaactcgtatttttataattagaccacctttttatattcctgatttacaatttttacaaattactgtacaatgttttgatactgatatatcctgttaatattattttattcttgctcgagaatatcttatttatt

SEQ ID NO: 7955 - DNA, 1229 bp, Diabrotica virgifera
caggataggtctgaatggaaggcaatatccagaaaggcgaagacccaacagggttatgatgcattgcagacgtaaaacaccaagaaaactacctagtgactccaaaaacattggtgctcatccactaaacctgtacaaactggtacagggttctagaactgtggtataggtatcatgaaggaatgaaaggtatataatatgccaaatggctctaagacgatttctgaaaaaagatcctacagtgcacgataatgagtaaaaataaaaaaaataacattttggtcctaaattatataacaatagtacgacaaggagcctattctttcgctgcctgaagaacattaagaaatgtgttaacgtgttttaagaaaaattaccttacatcggtcagatagcttcactgtgagttatgtgagttcaaatcctggcccggtgaacagaaaaatagaagaagttaacacagcagtttaaaattctaatgcaactgaggcttagaatggaatacgctggtgtctgatcggcctacgggggagcagcacggcaagggataagggcttgcggctcagtgatactccatagatccctattggaaggccgttgacacctaatataccttaatatgtccatacaccgacttaccatattattggttacttaccatgagggcaccttccgatgtggcagtttttaagataaaataaagaacgaagtcagtgcccgttcttttatctgtcaaaatagagatcacaagttaatgcaaataaatacgaattaaggaggggacggttatgtagttgagtattaatgagggatcagctaccaattagagatacgtagcaacactaaagggatgatagacatgtcatttatagcctggcgataaacaaacattgacttttacacatttaaatggtcaaataacaaccagttttgaatttctagacttgtttctgtagaacaatagtatacgcttgttcaattgaaagtcatccttgatcaggttagccctggaaataattttaatcactcaattgacgttctgcaacgttagatatgtttttaacgtcacactgatcagttcctaccatacgtttagttttcgattagagataggcggctgaaggtaacgctaaaatcggcaacattgtttatgagaatgagatacattgtcactgtagaatcgacaaatgcctgaataaatccgcgcgactccgatgtaggaagcggag

SEQ ID NO: 7956 - DNA, 1223 bp, Diabrotica virgifera
cggcctgtctcagaacttattctgaatgtcgctggtttactaaagaacgaatttattccaaacatttgcaccatactgtatccaatattagttatattaatgattatacactattttccttggaaaataagccacaatttaagttggaaaacaattcatttgacgtttcgacttccacttctgaaagtgataggtacttattaatattttgtattttgataacgacttccgaagtagaagtcaaaactttaaataaattgaattttcaactccaaagtgtggcccattttagaagtaaaatagtaaataaagtaaaattttattaatagagagtacctatacagtatttcaaggtcagtttcacttcaaattgtcattatgatgtgtgtttataataagtattgagtttcatttactatccttgatctttgggaacggcatgaatattattttacagatattaaaacgtgacagaataatggcaaatggcaccaccaaaaagcaatgtttggtttcattttaatgaactaaaacaatctcgctgcaatttttgctccaaagttttaaaaagatcagaaaatatttccaatttacacgcctattaaaaataaaaacatggtggagtttttttaaatcaagtaaacgaaggaaaagacagcgagaatacgaacaagagtgaagacaatgaatcgaagattaagatttaataaataaatctactttaaaatgtacatataatatattatgtctgaattgtcaatatgaatgagtgagataaaattaaattattagagaaaaattttttaccaagcatcaaaaacaaaatttgattaaattattaaagttttgtattttgataatgatttccaagttggaaattgaaacgtcaaataaatttaatttaaaacttaaattgtggcttgatcccctgtcacaagaaaaaaaaaacacaccacgtctacgtctatgcagataaggacacctgttaacgagtaaaatatttcttggattctcaccctgccttggacgtaaatatatagaccagcgaagtattgataaggttaccaatgattcacagtgttcaaggaatttgttcaacttagccgcccgtaaatatgacccatagaccggaggtatattgttaccgaggcaaattttatgaaatcatcttcctttttcccttatgcacattggcaaggcatacccaataaaaatgaccccgg

SEQ ID NO: 7957 - DNA, 1227 bp, Diabrotica virgifera
  SmartBlast Evalue=1E-107; Info=Palmitoyltransferase ZDHHC2 n=1 Tax=Camponotus floridanus RepID=E2A927_9HYME
gcctcacccataagtaatcaaaacataatcaaaagtaataattggcgttagctaaaagtagcgttagttagacgggttctgacctgttcggagtgatgtccattgagcgataggtacttggctggagacgagagtgtacaggatactctaacccgttacccaaacttgtatcaagaggaaaaaaccatttcattgggtcatctccaaaaacttcttggaaattcttatacctgcctatatggaaaccatacttatcaggtcctacatctctaaaattgggtggccggaacgcttccaatgtagttctgttctcaataactaaataacagtggtaaccaaacaatgaaagtaaactaatagcaaacatcactgccacaaaaaacaaaaacaatatgtggaaccgccccatgccaggcaaatctcccttccaaaaagaaatgaagtatgtgagtgatgtaagggatacatatatacagtacaaaagggcatatcccaaaaacaatagaaaatatttataatttgtgaaggacacacagttattaatccatgggcagtgatggtccatcttcaagacacaaaccccacacacagaacagtgatgtgcacggtcaggtttcactattctgcatttctcacagactcttactcctccggttacagttacatttgtgattggtaaacgccgagctagattttctaatatgcggttttgattttcatagttatcagagctactcagataagcatcaaaaatttgatccggaatcgcaaatttactaggcactcttccaatatctgtaaaaatggtttgccagtaggaccaaaaaaacatgaagaagaacatgtggaaaaatatgagataaaatattctcctaggtaagtcatctactgtcaataaacaaagttgaatgacataggcatagtaggaccaaaccacaatggttacaataaataagactggtatccatttgactgctttgaaacaccagtaacatggacctttattattacccccaggtacagccatcacaattatttacattatttctgttaatctacttcacaaattcatttcttggaatcctaatcattggaatatactggggcggggttaaattcgaatatttattagtcattaatgttaatagaaaatagttaaattaaattttcattagattattttatctactttttagaatttttacacactattatagctaatgtcaa

SEQ ID NO: 7958 - DNA, 1227 bp, Diabrotica virgifera
  SmartBlast Evalue=8E-40; Info="RNA-binding protein, putative n= 1 Tax=Pediculus humanus corporis RepID=E0W081_PEDHC"
cacgtgtatacgaactaaatactttaaacttatgttgataatttttgttttaaattattactaagtactttattagaaatggagtacactataggaagtcttgctgacttaatatctggtaaaaatacaccaaacaaacctaaggtagtaaaagttgaagttaaacaagaaattaaatctgaagaagaggatgcaccaaaatcaataaagaaggaaaagaaaaagctcaaaccgtcagttagtgttttgaaacaggaggtagtctcgtctagtgatcctgttaaaaagaaccagaaaaagaaaaaaaggaagatatcaaatagtcaagatgatgacaatattcctgaaaaactagttgtaaagaagaaaaagcgtaaatcttctactagtcaggacgaagaacaaattacagaaggttcatcaattaaaaaacaaaaacataagaaacggaaaacatctttaagtacagttagtatagaagatacagaatcactagtagagaagacgagtagtaaaacacgtaaaaataagtccaatttaaatggaagcagtttagctgatagtgatgatgaggagaatcttgatgaaaaagtaagtagtgaacagaatggtcaagaaaaagaaactgcaaaaaagaaagtaaaagtagaacatgatccggaggaacaagagaggacaatatttgtaggtaatgttccaatcaagattaaaaagaaaaagataaaacaatttttcaaaaagtacggaacaattgaaactttgaggattagaggaattcctgtggctgatccaaagatacctaaaaaggtggctgcaattaaaaatgaatttcatcctgatagaaatagtgtttactgttatataagatttactactaaggaagaagctcaaaaagcattacaagcaaatggtagtgtatttgaagaacatcatctaagagtacataattgttctaccacagaaaaacctgatgaatctaaagcaatattcataggaaacttaagttttaatgctgaagaagaacaattgtggaagttgtttgaaccttgcggtccgatatcttcagtaagaattataagagactcctatacaggtatgggcaagggctttgcctatgtcaactttcaagattctgatgcagtacaattagcacttgaaatggaaaatgtaaagcttggtgatagagaactgagaattaaattgtccagtgtaaacactgctaagaaa

SEQ ID NO: 7959 - DNA, 1228 bp, Diabrotica virgifera
  SmartBlast Evalue=1E-138; Info=Eukaryotic peptide chain release factor GTP-binding subunit (Erf2) (Tr) n=1 Tax=Aedes aegypti RepID=Q17N55_AEDAE
tggagacgttctgcatttctactccagatagcgccactgtgacttggtcacctgcaaacacgactgtttttgaggcttcttcaatcgccagcgattttaccacggccgcttctctgttggggcatacgagaaccttgtcgcctacgcttagcgtaccagtttcgacccttcctgagacgcagaatgaagtaccagtacccttgaaaacatcattgattgaaagtctaaagggcttcgaaatgggcctatctggggaacggaatttatctataacatctaacaaacaaggcccgtcataccactgcaacagctcactctctgtaggtttcttcaccaagttctgtccagtcaatccactacaaggtacaaacgtgacatcagactctttgaatccggcttgcttcaggaaagccttcaatttctttaagatttcgttgaatctctccggtgaccaagaaaccgtgtccagtttgttgatggccacagccagttgagatactccgagagatctaacgagtaaagcgtgctctctcgtttgtcctccgtgatcgaaaccggattcaaattcgcctcgagttgcatcaacaaccaaaagggctacgtcggcttggccagctccggaaatcatattgggaatgaagtccttgtgaccaggtgcgtctaacagtgttaccgccttagttttggtttcaaattgaaatcgaccaacgtccattgttataccacgattacgttcttctccggtttcgtctaaaacccaggcgtacataaaactttgttttcctaattttctactttcttgttcatatttgtgcaatactttttgattaacctgccccaattcacagagaagtctgcccatcaacgtactcttcccagcatcgacatgcccaatcacaaccatatacaggtgctccttctcatctcccctttccttttggtacagctgctgtggatcaaacttgctatctctgcctttggcttgcttcacttcctcggcaaagtccaaagtatggttattgactggcgtaactttaccagaagcaggcgactgggatctaggagtgaagattttcccagacgcaggggattgagatctgggcgtgaaggctttcccagatgctggagattgagatctgggagtgaagctacctttttgtggcagatcaaaacccttcgtgatgttggtaacggttttcggagtggaggagatcaccttcgtctgttc

SEQ ID NO: 7960 - DNA, 1222 bp, Diabrotica virgifera
  SmartBlast Evalue=4E-88; Info=Cat eye syndrome critical region protein 2 n=1 Tax=Camponotus floridanus RepID=E2AKF9_9HYME
aaaactccataatctgccaccagtattttatttttgatgattttgttggtgttgaaagttgtatcttatgtctttgtatgtactgatctacgaataggttatgtttccaactttcattagcatcctagatattcaatcatggtgggaggtcccaagtatcgctcacttttgttcgctttttcgaacagcttttaatctcttagattttgatattgaggatcttgaagaagctcttcttactgatggtacagaagaatattcttggctacaagatttaatagtacggcttttaagtggttgtcttaaaaataatggaatctcaacttttaattaccagatgttcctgagaaggttgttccgccaaaaatgccaggaacacgatcgttataatccgtttaacacagatattgattttcagcttctaccgcttagaactaaagttgatattttgcatgccctttgtgactttcgcctagatgctactgatgtgttagaccagctaaaaaacctagaagcagatagtcttcgagtagaacctcttggatatgacagtaatgactctgcgtattggtacttttatgggaccagactgtacagggaagatttcacatcaaagaatgataaaaaaaagactgtatggcaagttatttgttttacacaagatgattggttgcaattgaccaagaaatttaagaagtccacaaataaagcagaaaggcagttacatcatactttaagtgaaaattttctcccagaattgccaagattgtttaaggaaaaagaaatcctagctaggaagaggttgttggctacgttgcctaagaggacttctaataggttaaaacagcaggaaaagaactgactgaagaaaataattttttgaaccaatatctgaaagagcaggaatctaaggaagccgaggcagaggtacagaaaaaagatttggagtccaggaggcagaaggcttacgaaaggcgtattaaattaagagagaataaagagagtgatgctttgagtgagacatcagtagatgagatggcaggtacacggagtaaaaaagcaaaaaaagttgaagaaaccaagatttcaaagtctggcaaaaagaaggaaaagcagagcgatgaaccaacaatatatacatccaaaccgaccactgttggaaggcagaccaataactctctttcagcagctactggccaaatagttatagagcaagttaaaa

SEQ ID NO: 7961 - DNA, 1225 bp, Diabrotica virgifera
gtaattaaagcgtaatattcaaaaattcagtatttgtgttgcaatattaaaagttgtacatttaaaacaactgatagacattaattattgccttgattttaaacgcgaattcagaaggtcagcttcttcctcaaatgaaagtatacttctccaagaaattaacgtaccaccttaaaaattgttaatttttgatgtcctaaacctgttgtccaatttaagtgatttttttttaaatgttattgccttattctttaacaatatcgctgtaacaatattgttgctagacagacaaactgtcattgtataccgcgtgtaccaatcaaactgtggtttattttaaagttcgcaacaccctgcagaatattctggcatttataaaacactgaaattaaaacccaactatagtctcaggttttattaacatttattacatgttgcataattaaaaagttaggtactttaacacctagatacatagccaagttgttcatcaatatatcctcattttcggattagtttaataaacaagcctaaagtaggctatgacttaacactttaataaatgtcaaattgttaacagtcaaaaagtgtctggtttgttgtgaacattagcagatttattatttaaagttccaattaggtccgtaattttttgttgtttggtggaaatggaacgagccacaaggaatttgacccgcgatgagtgtgttcaagcagtgaccatacgtagcgaaggacttagctaccatgctatcggctccttatgttggtaacaatttttcgctaatgcacgataatgcaagacctcacgctgcacgaactgtaaccgaatatttacaacaggtaaatcttcggatttttaattttaccaccgtataatccagatcttaacctgatggaacataattggcagaatactatgacagcgtttgccacctcctagaactttacaacaggtagaaacagtagctctcgagagttggaatgatattgatcagaccaaataaactaaattcgctcagccgagattcattttgacagattcagagtacgaaacatacaacacaaaaattactacctcacactattaactgctcaaatcaacttaatctttcattaaaaaaagaagaattattggaaatagtgggagtgtatcctaaactcataaaattttgtggaatttatttcttcaaaatacttttattttgtacaataaataattatt

SEQ ID NO: 7962 - DNA, 1222 bp, Diabrotica virgifera
gccactgtgtcatcgaacaccctgtaacattccaaccaatccttgcaatgtgaagctcaaaggtggctaaaattttcgttattaacttttcctgctatccattactatagcggatccattgagctttaacccaccaaccaatcaccctgtatatagaaatacagtagagcgtcgataatccgaaccctggtaatccgaacgttcgctaatccgaacgcaaaaaaaaattataaaattaaaaaatatgatcgcggaccgaatttttggatttaatatgacaatatgggcaaaatatgacagcggatttttgttttgtttatgcagaaatacatacaatatatttgtttattatgcaggtgttttattccttgtaactaaaacgtatgtacatatgtactatgtttatgagctttgtatgtattttgaacatatgttcgataatccgaacaatttgataatccgaactacccctgtaccaattagttcggattatcgacgctctactgtataataatactttaaaaaaatgtttttaacctgtgtgtaatttatatcgtcgccttagtactataacttgataactccaaaattgacgtttttgagataactagttcacaagatgtattttatttgcctccatattgtgtaaaaacttgataactcagctccaaacgggttaagtatttatttatgattgacgaaagttgataaaactcaaatgccctaatattcagtgctaaaacttgacaagataagttatcaagctattgtttaatcgaaataatcgtgaatacgacatacactgaatgctataactagtaactcgagttatctagttgtagcacgtgtttctctgaaaccattgagcttaccacataattgctatctgtttattcggttcattttaatgcaagaattcgagaattgttagcagatctggcaacccccatggcagagggctaattttcaacaaaataatgtttaaaatattagttgtgttaaaaagttcacttatatgcgacttagcacaacatgcgacattaccaaatgttaacattatggtagtgctaaaagttgataactttaatttttcatgttttcttccatattggaaaacaaatttacaccatattcctaaatagatcagttgccaaaaagttaaggaacagtattttagagccgcagagtgaattccgtatttaccaacatcatggtagcagca

SEQ ID NO: 7963 - DNA, 1216 bp, Diabrotica virgifera
  SmartBlast Evalue=1E-152; Info=TBC1 domain family member 13 n=1 Tax=Camponotus floridanus RepID=E2A9E6_9HYME
tagaaagggctttctctttctacctcaaaaagtgtcaacattatggcatataaagcaagattaaaagaattcgatgatattcttcaacaaaatgtgatagatatagaagcattaaagacactatcattccatggtatacctgacgatcaaggaaaaagacccttgtgttggaaactgctgttaaactacttgccaccagaacaaagtgactgggaatcatgtcttcaagaaaaaagagatctctacaaacaattcataaaggaaatgatagtcatgccaggaggaaaagaaataaatggggatgtcaccttaggagaccacccattgaacataaatcccgatagcgaatggcaaacgttttttaaagacaatgaagtgttgctccaaatagataaagacgttagaagactgtgccctgatatatcattctttcaacagccaaccgaatatccttgtaaagaaatagtcaatatgaatgacgtcaaaagactgcatacaagagtacaaagaagtgttctcaaatgtgccaatgttgaaagaaaaggcctaggaatcacaaagatcgcactattatctaaaaaggctaatgaagactacgctccgatgacagaaggcaaagaagctcactgggaagttgtagaaagaatattatttttatacgccaaactgaaccccggccaaggttatgttcagggaatgaacgaaattgtaggaccgatatatttttcatttgctttggacagcgacatatcatttagagaacacgcagaagcagactgtttcttctgttttaccaatttaatgtctgaaattagagacttttttataaaaagtttagatgaatctgataaaggtatcaatggaatgatgaatagactattaaaccaattaaagactagcgatctagacgtatggctcaaattccagcaatttagacttaaaacctcaatattatagtttcaggtggatcacactattgctctctcaagaattccctctacctgatgtacttaggatatgggattcattattctcagataaaaaaagatttaattttttaatctttgtctgctgtgcaatgatcgtcattctgaggaaccaattattagatggcgattttccgtccaacctgaaactactccaaaactttccaccaatggacgtacaaattattctatcaagagctgaattatcgcaacaaagatactttaaactc

SEQ ID NO: 7964 - DNA, 1224 bp, Diabrotica virgifera
cttacgaagaaatgccagatgtagggcctgaagaaactaatttgttaagggaccttgtgcaaaatatttctggttgtgaagagacgaataacaatgatgtagaagaatgggtgtgagctgatgatgatgaccacgagatatataatgatcagtacctaaatcattgaagtggttacagaagaaccttcaaaaccctccaatgaaagtgatggagaagaagatgtcaacagcgaactgcgggtaacccatgcagacgctgtggctgcgttagatctagcgctacgctacttagcgcaacaacctggcgccacaccagtggataccatttttttgagatgctggcgctggcgtaatttagtttcgagataaaaaaatcttcactaaagcagaaaaatttaactgatcttttcaaaaaatgtaaaatttaaaaggtttattacagttaagtacttaaaataatattttattgtcattttagatatataaagtagtggttcttggagtaagcgaaaggccacacgggtaataatttgcggcgccgtaagagcagtaaacccattggttgactaactcgtccaccaattgtagatgaaataggagttagtcaaccaatgcctcgtcaggtttacggcgccgccgccgtaagagcagtaaacccattggttgactaactcctccactaattgtagaagaaataggagttagtcaagcaatgtctcgtcaggtttactgctcttacgacgccgtaaattatcgctcgtgtggccttagccttagcctaagcagattttcggattaccgaagtacggattacggaaatttacttactgtaaatgatgccttaggtacatattgtacctaaagtgaaaaattattagaaaaaaataaaagtctccctatctctataaaaaaaatagtatggaagctgtaattatccttaatgtccgactggtacattatttgacaaaaaataatggcatgatttctaagtcagttaagtatgatataatgcccgaaaaataacgcccagggcattaaatttaaataattagttaaatattgtcaagttgacaaataacaacctaagtacaactatggttaccacaattacgttacgactattgctggtaaatgtacttatttgcaaactaattaattcaaaagtcattcacattttttgtatataaagaattctttagtcggacattaaaggttgaaggcacc

SEQ ID NO: 7965 - DNA, 1213 bp, Diabrotica virgifera
cgcaacaggaaatgacagaaagtgactactgctctgatcacggattgtattatgaaatttgatgttatcaaataaataaaatgtgaactgttagttatactttaaaattttggtgcagaactacagctatatttgaagtatatatagcaaaattagaaataatatactctaaaaattcaataaaatattttcttttcgtcttttctttcacttttgcggaaacttaaacaaaaccattccttaactgcgtggacgaggttaactttgtatgtaaattaatggcaaaagaaaaatacacttaccataaaattgcaaactccaataggtataaaattagttctgaaaacaattgtttgtgtaatgtaaataacctctgctttaaacagaggtaaaaaacagggcaaaaaacagcaaaaaatccaacaaactgacagacattttgctgacatttatgctagataacaattatgtattttatctcgccaggtgttaatagggcttttcattcacaatcatttgtttcgagcttctgtcaaatgtcgtatagtccgtgtatattaatattatacacggactatacaacatattacagaggctcgaaacaaatgacaatcgatgaaaaaccctatatcgcacgactaaagaaccacggactcgactgtataattttttattttcattaatgatgtcaatggattttcattatttgccgaaatatgattattataataattaattaacaacaatattataatcaacaaaatagatcatttaatatttttagcctaaggatgacaaattaatgtagtgaatggtattgaatacgagtagaatattgtaggtataacacgattgtttataaataaataaaggctttggattcttttacctaaattatgtgttcacaggtactttattattatttatattactaacttaacataatactaaaaaataaaaaaatactaaagtacaattttatttaagtacaatatttcattcgtattgaatactattcagtacatgcatctgtcatttttagccttagaatattaaatgatctattttattgattataaactataatattgttgttaattaatatattttcggcaagtagtgaaaagcggttgacatcattagttgaaataaagaattatagatattatttgtacagtaaacagcaacaaagaaaaaggtacataactccgcc

SEQ ID NO: 7966 - DNA, 1225 bp, Diabrotica virgifera
  SmartBlast Evalue=1E-111; Info=Basement membrane-specific heparan sulfate proteoglycan core protein (Fragment) n=1 Tax= Harpegnathos saltator RepID=E2BPV9_9HYME
gcttactcctgtgaagccattaacattaagggagccacgtttgccgtacctgatacgatactcagtgtgaaacgcgacaatccttgcagaccagggtactttaacgtacaagccagaaatgaaggagagtgtatcaagtgtttctgtttcggacatacaagcagctgtagatctgctgatctatttacattccaattccaacctccatttgattcattcaagatgttaggagctcgcatagatccatcaggatctgtcgattttagagatgaaccaatctatacaggagctgaaccctctctaacgccattaggtccacaaggtgtcctagcaaccgttccttcagattctagattaagtcaactgaacgtgattccatatttcactctacccgaaaactacaacggcaatcaactgaagagttacggaggttatctcaattactggatcagacactccaacagaggaactccactacaaggggctaacatcatcataaccggaaacggatataccctgctgcacacctcttctcacgcaccggcaccaaacaccgacgagaacatcagagtacgattcttcgaaggcgaatgggttgagagatcaccaggttcacgcgaaaaggtcgctaccagagaagaaatcatgatggtgctcgaaaacgtcgacaaaatcttgatcaaacttcagtacaacgaaggtacgctaaacacaagcatcactaacgttgagatggactctgctggtatatctaatgtcggacttggacctgctagttacgttgaagaatgtacctgtcctgttgggtactctggaacatcttgtgagaaatgcgcgcctggattctcacgtcaaagaaacggaccatggttgggattgtgtaccaaagaacaagtcgaatgtcctccgggcatgtacaacgacggaagacaatgtcaagtttgcccatgtccacatactacacctgaaaatcaatttggcagaacctgtcaactaggtgccgatggtgatgtcgtctgtaactgtcctccaggttacgtaggcaaccgttgtcagtcttgcgcccgggttacgaaggcaatcctctagtttccggcgattcttgcaagcctgtaagaccaccaccacgaccatactgtgaccccgctggatcaatcgacactagacccgatcagtttggacgttgtagatgcaagaatttggtaactggtcctacctgtaatca

SEQ ID NO: 7967 - DNA, 1225 bp, Diabrotica virgifera
  SmartBlast Evalue=1E-176; Info=Tyrosine-protein phosphatase Lar n=1 Tax=Harpegnathos saltator RepID=E2BS16_9HYME
aggggcctccaacaggtccgccaactaacgtaacctaccactttcagactccagatgtcgtttgcatctcctggagtggcccaagccgagaacatcgcaacggacaaattatcaaatacgatatacagtttcataaaaagtctgatcatagcaatataataatcagaaacgtatctaatacaaaggcagtatttaccaatttagaagagaacactgaatatgtattccatatcaaggcttatactagccaaggtgctggcccgaacagtgagaagtacactgtacaaactgaaagagatataggtcgagcccccatgtcggtaaaagcggtagctacctcagactctagtgttgaggtttggtgggagccagtaccatctcgaaataaagttataggttataagatattttacacgatgacagctgtagaagacttagatgagtggcagcagaagatagttgggttaactgagtcagccgatttagtgaatcttgaaaaatatgctcaatacgctatagctgtggcagctagaatgaagactggactcgggcgattatccgagaaagaattagttaaagtgaagccagaggacgttccgcttaatttaagagctcatgaggtaaccactcattcgatgactctctcgtggtcgcctcccattagactgaatccaatcaagtacaaaatatcctttgacgctatcaaagagttcgtcgattcccagggaatcacacagacgcagaatattcctagagtcgaaattaagttagatgcagacgttagatctcatacaatcaacgaactgtcaccgtttacaacgtacaacgttaatgtcagcgccataccaactgataactcttatcgccctccaacgaagattactgtaactacccagatggcagcaccacaaccgatggtcaaaccagatttttacggcgtggtaaacggcgaggaaattcatgttattctacctcaagcttcggaggaatatggtccaattagccattattttttagttgtagttcccgaaaacaaaatgacaatccagaaaaatcccgaccaatttttaacggacgaattaatagctaatatcgaaaagatacccgacaactcagatcttccgtacatagcagcaaagtttcctcaaagaaacatcccctacacttatcacttaggcacgggggaaagcaacgatggttacgttaactataaactagaacacgg

SEQ ID NO: 7968 - DNA, 1222 bp, Diabrotica virgifera
  SmartBlast Evalue=1E-93; Info=Dynactin subunit 1 n=1 Tax= Harpegnathos saltator RepID=E2BH22_9HYME
ggcgagttcttttcggattgtcatttccgacagttgttcctgcttttctttaactaatttctttaattccttaatgtcagattctttattctccaacttgcttgttagtgtttttgtttgttctagttctttcttcacggagtctgctcttactctaataggtggaacactcttttcttcatttttactagcagtagttatctcgtattcattatcttgtagatattgtgctaactgtgtgatttgtgtcatgataaaattcaaagaattctttatactttgcactggtcccaaatcatcttgttcgtaaaacttctcgcttgcgttgatggctatgtctttgactttatcaggagttacaccctgctcagtttctccactagccacaatcgtctggatggtagttctgactacatcattcagtgttttagatatttttaaagcatgttggtagcactggaacaggttttcatgaacttctttgttcagtcccaaattggaaatattagtatccataggcaatcgcctctttattaattttaattgttgcagcagcgtttctgatgaggtgactacatgttgacagagaagttccatatcaccttttgaactctccatcaaacatttgataaccgccgaatccacgacaaaactatccgtaatagttgtcagacatttagcattatcggttaacaactgcatgtgattcaatttggcgtctggaccgaacagaactgggaagagggtattgaagtaattcacgcatttttccaaagtctccatggaaatattctcgtctagttggtctctctttagtaattctataaagtcgtcgatgatcttttcttggcttgccatttcgggatatgtggcaccgacttttaataggatttctggtttgcatgtattaagtacgtagtaatactgatggagaattatctgaattgcataaacataaaagcttatcctacatttaaaagtatactgattgatagaatggcctttcataactgcattcatatcaaccttcttttcaatagcaccaaatttgtcttttacttgtcccagaacgatttccaacttttggatcattctcggaatcaataatatcacaagaactgcatcgtggtcacctcctcttgtcatgaaagaatccggcatatacgaactcaaaaatttaatatgctgctgcaattgggtgacatcaatccttcttagctct

SEQ ID NO: 7969 - DNA, 1225 bp, Diabrotica virgifera
  SmartBlast Evalue=1E-103; Info=Low affinity cationic amino acid transporter 2 n=1 Tax=Camponotus floridanus RepID=E2AUA5_9HYME
ctcccaataaactagaaaacagtgcacatattgctcctatactaacaacgtatttaagtacagtccagttcagtctagtgtaaatataagctaatggcgcgttctcatcctgttcataatacggtagaatcatggtcatgacggtagacatgccaaaataagcgcaaaatactatcataagagatcccacaactcctatcggtatagacttttgaggattcttggtttcttcacctgctgtggcaatacagtcgaagccgataaatccatagaaacatcgtgctgcaccctttacgatgccttttagaccgtaagggctaaaaccaccattgccttttcccattgcctctgcttttgttctgtgccaattcgtagaatcaactttccacaatcctgagattattaccaccagtacaaccaccaaattcacaaaagtgaagatattgtttatcattgaagattctttggctccacaggcaagagcaattgaaaatgcaatagccagtcccaatgaaaataaatcggcgtaatgtgagatttgatttccacctagtggtatgttttctgtgaaaaaattcaccatagtcttattcgccagctcatctatgtataaaaatattgctttggtactagctgcggatcctataagatattccaaaatgagattccatcctataataaaagcgaaaaattcgccgatgcatacataactatatacgtaggctgagcccgcttttggtacccttgctccaaattcagcgtaacaaagacctgctaatactgaagtcacagcggctataaagaacgatattatcacagcaggaccggcagtattttttgcaacgtccccagctaatacatacactccaacaccaagtgtgctgccaactccgagagctgtcagatcgaacgtcgtcaaaacttttgccagcttagaatcgctatcgcccttgatcactttcttcctcgtgagcaccctctgagtttcctcccaagtaggacatttgacccgcatactatccgaggtaccgatgaatttaactaattcttccattttcatcaccaagacgtacaacctcttgcaagaaacgtagtatttggcagtgcagaaatgtacaataaataaattaatcaataaatacaataaataattgtctgccagtcaattgtctgcgaatccaaacacaccagatcaatttacttcaattaaaaatttcactcttca

SEQ ID NO: 7970 - DNA, 1220 bp, Diabrotica virgifera
  SmartBlast Evalue=2E-27; Info=Endonuclease-reverse transcriptase n=1 Tax=Bombyx mori RepID=D5LB38_BOMMO
cccaagctatcagtcctaataagattgagaacgctaaagtgttatgtgtggtctctattactttattatggctgtgacacttggacattaaaatagcatgacatcaacaaattgaatttattcgaaatgtggatgtaccgccgaatgttaagaataagctggaccagcagaactacgaatgcagaagtactgaaaagaatgaatacacattctcatctggtcaatactatcgtaatgcgccataaggaatttgagcaactccagttaatattgaaagccaagatcgaaggtaaaagggctataggaagaaacaaaaaatcttggctacgaaacatcagagattggacctacacagcaggaaatgatttaattcatcaagcccagaacagaaagaaattttccatattgatcgccaatctcaatagagaaggcacttaggaggaggaggagataatatcacaattaagggatagtctagatttaatcggagtgtagtgagaggttcaaagtgtagaaatgttatcaatgggatattgccactgtccatcaaaaaataacttgacaacgactctaataaatgtcaagatgaagaccgaattttaaaaattctttctgtaactataattgttgtttctagtctagacgatagtatgaagatttatattagtttattatgacgatatttttgtggtggaccaggttcatttctgctgtattgtccaaaaagcaatgactattgcaaacatttgtataaaaacaggaagttgtgctttcaagtacactaaatagataacgccataggctatagccatagatacaactaaacaagatatgtatagttataaacatctcttacatatgcgagagttactttctggaagtagcatacaatacaataacaaaattatataaacctatgctacattatgtacatataaatacagttgtcgtatctagcatttcctagcgacttataataatgaacaactacataagcattattgcactgactttaaaatatgaccacaggttcctccgtaggtttctcaatttaaagtcgcttgaacataccaaggaaaactttcgtgtgtaaaatcacattgtttcctttgttcgttataaaaaatagtgtatgtataataccgttatatcaattctcttgttgttacagttatgtatatattatattaatgtacactttcagattatctatgcaaagg

SEQ ID NO: 7971 - DNA, 1224 bp, Diabrotica virgifera
  SmartBlast Evalue=0; Info=Probable histone-binding protein Caf1 n=17 Tax=Schizophora RepID=CAF1_DROME
catagctcgttgttgcctttcattgtggcgtttgcaaacttttttaatttattaaagtgtattaataagtataaaacgaaatagtagcctaaaaatgggggataaagcggatgccgagacgtttgatgatgcagttgaagagagagtaattaacgaagaatataaaatatggaaaaaaatacaccctttctgtacgatctagtgatgacccatgctctagagtggccctctttgactgcccagtggttaccagacgtcactagaccagaaggaaaggatcattctattcacagacttattttgggaacacatacgtcggatgaacaaaatcatcttttaatagccagtgttcaattacccaatgaagatgcacaatttgacgcttcccattatgataacgaaaaaggagaatttggtggatttggttcagtttctggtaaaattgaaatcgaaataaaaatcaatcatgaaggagaagtgaatagagctcggtatatgcctcaaaatccatgtgtcattgccaccaaaacaccatcaagcgatgttcttgtctttgattacacaaaacacccaagtaagcctgatccaagtggagaatgccatcctgatcttagattaagaggtcatcaaaaagaaggttatggattatcatggaatccaaatctaaatgggtatttgttatctgctagtgatgatcacaccatatgtctatgggatattaacgctacacctaaagaaaatcgtataatcgatgccaaaactgtttttactggtcatactgctgttgtggaagatgtagcttggcatttactacacgaaagtctatttggttctgtagctgatgatcagaaactgatgatttgggatactagatgtaataacaccagtaaaccatctcacactgttgatgctcacacagctgaagtgaattgcttaagctttaatccatattcagaattcattttggcgactggtagtgctgataagactgtagcattatgggatttaagaaacttaaaacttaaattacatagttttgaatctcataaagatgaaatcttccaagtacagtggtctcctcacaacgaaaccattttggcatcatcaggaactgatcgcagacttcatgtttgggatttaagtaaaattggagaagaacaaagtcctgaagattccgaagatggtccaccagaactcctcttcattcatggaggacacactgca

SEQ ID NO: 7972 - DNA, 1221 bp, Diabrotica virgifera
  SmartBlast Evalue=1E-89; Info=210kDa protein (Fragment) n=1 Tax= Sarcophaga peregrina RepID=Q9GV23_SARPE
aaaatggcgaccgggtgacagaccagaagccagaaaccacacgataacttaaaacctgaaggagattttgaaaggccagagaaaaccgaatgggtaccagttgaaagaccaaaaccaacaaaaccagaagacaatttacgcccagaaggcgattttgaaaaaagaacaccagaaaaatggcgtccaggtgacagaccagatgctaaacgccctcaagataatttaagaccagaaggagactttgaacgtccagaaaagccagattggagtccagctgaaagaccgaagcctaagaggccagaggataatcttaggccagaaggagattttgaaagacgtaaaccggaagattggagacctgctgagaagcctattgtaaagagaccacaagataatttgagaccagaaggcgagtttactagttcaacaacaaaaacagaagattataaagttgtacgtggagaaagagtcgatattgttcgccgtgaagacaatcttaccatcgaaggagactttacagatattaccacaaacaagacagacttcacaggtgagctagtagttcgacagaccccagttagacgcagaacatggacaaaagacgatgttgagaaattctattcaacccaaacaaccgaagtaacaacaacgagtcaagatatgtatcaaagttacgacgttacagatttcaacaaaactgtaataattcaccgtgataatttacgtcccgaggggccgttccatggcactccaaaatctaaagaggattatactcccaagcaagttgaaagaccaactccaacgaagcctagagataatcttaaaccagaaggagagtttgagaaaagaacacctgaaaagtttatacccgctgaaaggcccaaacaaaaacgtccagaggataacctcagacctgagggcgaatttgaaagaccaacacataccaaaattggacctgctgaacgaagaacgccaattaaacacgatgataacttacgtccagaaggtgattttgaaagaccagaaaaaactaaatacagaccagcagaacgtccaacccaaaaacgaccagaagacaatctaagaccagaaggtgacttcgaacgacctgataaacctgaatatgttccaggggagcgacctaggcaaaaacgacccgaagacaatttaaggcccgaaggagattttgaaaggcctacccccactaaagtaaaaccagga

SEQ ID NO: 7973 - DNA, 1223 bp, Diabrotica virgifera
  SmartBlast Evalue=5E-81; Info=Elongator complex protein 4 n=1 Tax=Harpegnathos saltator RepID=E2BB45_9HYME
gagttccatgaggtaaaaagtgaaaagtgtgtaagtggaagcaggaagagaaaacggaacttcgggattttcgcaattagaaaaaaattaatttgatggaaaagaaaactctaagaagcattccgggtacagcgtacagtgcccaaaatggtcatttactggtttcttctggaataccgtccctggatactctgttaggaggtggaataccggtcggaactgtggtattaatagaggaagattttcacggatcttactctaagatagtattaaaatactttcttgccgagggtattgtctctaatcattctactttagttgctagtcaagatgtaaatccttccaatattatcaaagaattacctgctgtgattgatagtgatctagagccagagagggtactacaatcccctggtattagtgataagatgaagatagcattcagatatcaaaatttacctaccagagacagtgcaagacaccacgtcaaacatatcggacatatctacgacttatcaaaaaatatgtcatttagcgatatagaaaattcagatatatgttattggactggccaaagaattgaaaatggttcaagaacctactcgaatccggcgtacaacgctctcttaaagtcaataagtaaaaaaatcaaagatggaaagttcttcctgaaagactccccggagaagaggaccgttctcaggattggcgtgcattcgctgggttcccccatgtggttacctcacaggaagtcgctgcattcgatagatagtacgagggatctagacaagttcatattttgtctaagggcactagtgagatcggcgtatgcagtggctgtcgttacgattcctacacatctttatcacgagatatctttggaccggtgtatacactccagtgacatcgccatgcgacttcaagccttcagcggaactgaactcgaaaataatcaaagtctagcggaataccacggtttcttctacctcactaagttagcggctatcaattctttggcctcgaggcatccgggatctatggaatacggctttaaactaaggaggaaaaagttctcgatagacgttctccatttacctcctgatattcaagataacgactccaaaaggcataatattccacagttagggtgtgccactggcggaggcatgaaaaatttagattttaaattaaatccgtaccttgaatcaagttgatgtaattta

SEQ ID NO: 7974 - DNA, 1222 bp, Diabrotica virgifera
  SmartBlast Evalue=1E-122; Info=Catenin delta-2 n=2 Tax=Aculeata RepID=E2AHM6_9HYME
agagatttagatcatcgagaataattttgagtttatttaacagccggttcagcagactcgacgtcgtattgctaatttgagcaacgccttcaccaaacgcaatcaattgacacggatgtgtaggggtgtgcacttcgcctgccttcctaatgactcactggtggcggatttggacctggaccgggggggtacgatcgacccatggctgggttatctggatacggcatgtccgctgtggggatgtcgtcattcctttggaagacgccagcgctcctgtttcccgcagtggtgcgtttcattgttctatcctcatatcttgttccactttgtgaagccatggggcggtttaaagtactgttggcattgttcggtgaattaggtccagcgttgcgtgcagctactgtttttgtcacaaaatcttgttctttccagccgtgctttttgtaaacgtcccgcaagtcttggtgttgccacatcgtaaacaggacttgtccagcgaattttagtacccttggagtatatttctgtcgttgccttgtaatggtcatcagtctttctacacctcctgcctctagtagagatctggagaattcagcgttctttttaataacttcgtttaaggtggctaagacagcagctatggtgtcgtcagaggtgccttgatcgtgctgtgtatttcctgacggaagtttttggacaagatctctcatggcgtactttcctatgagttctttgttgcgttgatcaatggcaagattcctaagtgctgtagccactgcacataccaccctatccacctccatacgtagcagttccactaatattgggagacctttctccttgcgtactgccgcccgaatctctatactaggttgccagtaacaagctgccaaattttgaagggctccagctgccgcctctagggtttctggattggaacagctttgcaataaagctaaataagattgcactacttctggttgccagagaagctccatccctctaactggatctcctctagcactcgcgctagacataccgcctggggctcctgcggaaaaattgttttccttcgtgtctgaggactgactgtcttttttctttttacttccaccgaagcagcccaaattttcacctttagatgaggtagcggccaccctagtttgagttggtaaaggattcttatcatagtttggatcctcaacctcttgacatcgatacg

SEQ ID NO: 7975 - DNA, 1223 bp, Diabrotica virgifera
gccccactagtttctaacattcttctatttccttactaatcacccattaacacacatctagacttgcaccttctctttaccttcactcttttctcctactttatccgattcctaccatagtttcgattcttcttttctgtttttcttttcctctttcttctcttcttttccttcttttcttttcctcctttccattttcttactttcctctttcttttatttcccatcttcttttacatttattttctattcctatagttgtgtgttttttcttgtcttacctcatgtttctgtcatttcgggtcctacagctcttatatcacaaatttttatcttaatttatttagactctcattctcttactgataatagcccttaaatcttgatctggtttacttgtctctccttggaatgttctctctcttaccacataatcactttgttttgttgcctgttatgtcaccttcgcttcattcatctcattcaataactttagtcaactcctttggtctgctacacattttactaacttttttattttgatgttacctttttctctttcaaaataattttattagactatactaaacaatagggtactgcaaacataaatccattagcttaaattcagtctgttcattttttctttttttccatctacatatcaggcaacccacattactcagctattttaatttaatttcatattagttcttttacatcattcttaattctggttaacatctctgtcatttaagattataaacttgcactaacattacatcaaacttggttcggtttgttcactcccctaccatataccacatcaaactcatagttcgctatctcagatactcagcattctagattctccattacatattgacactaacacataattatcctatattattagatatcattacattattcacccacactttaaccactgctgctggaagccttcatggtatttcttcttgaacgattttatcccatcctaaacaacataaagtgtaattagatttggccgtcacatattttattttccttttcgttactaatccattattattttattaattccattgtttacaattatttcttttaatattgtaatctactcttgatctgtattcttttagttattttaactttaattttttccataatttcctttacaattttaacagacagaatcatcattacaacagtatacagcc

SEQ ID NO: 7976 - DNA, 1216 bp, Diabrotica virgifera
  SmartBlast Evalue=5E-92; Info=Neurochondrin-like protein n=1 Tax=Harpegnathos saltator RepID=E2B7Q0_9HYME
ggaattacagaaattactccagatagggtttgcatgcccaaaaaccacaactccattatctccatccagtgttctttgtatgccatggacaccaccaacgctgtaggatcatttgattcatcaacattataagcatcccacaaaaatctaattgatgcttgaatatatctacaaattgaaaaatcattcttttttactttgtttgagagttgcttgagtaagagtaatcctagcacagatagatttccatgtaagactaagttctcaggtatatctttcaattcaggtaagttctcaaatatgaatttaagtaattcgttacaggcttcagattgttctacgtattttgcttctaaaaccgttaaattcattaataaattacatgtgcttatcatagctgttcttgagtccttcatatcttctaacatctcaggagttaattgaggtgcaggttggttcataacttttaacctctcagatctaggaacaggtggtcttttgtaatgtacaatggtccaatgaaatttaagcacatctagtaagaccttttcttctttaatctttagcattaattttctcgcatcgtcttcaacagctaaatgacaaagagaagggagcatgactcttaataagtttatgttgctaagaggatgattatcgtgtggttgattcgctttctcagcaactctcctatccctatatgcataaaatgtttcattagctaggttcaaaataaatggaagcagttggtatatttgaggcctcatagctgtagtttcttgtgcgagccaagctgccaaaactctaacagttgcacaaataaataatttatcttcagctgatggcttggatttatctgcatcaattttatcaataagttgacaactgcagtaaaagcaccttttaaacctgtgtatacagtttgccgttctttctgttcaagatctatttggtcatcggttataaaatttatacatacttccagaatcaagtagcatgctgtaatgagattctgttgaggtgctaacgacttcaaattttttccttctaactgcattctaacctcgatcgcagctaattggataagtagaagaaatatttgtttacctttttcctcgtcagaaaaaatccagtcaattcctagtaattctaacacacttgaagtaagcaacaatgcaggatttctttgagcagcacctattttactttgaagaat

SEQ ID NO: 7977 - DNA, 1217 bp, Diabrotica virgifera
  SmartBlast Evalue=4E-18; Info=B-cell lymphoma 3 protein homolog n=3 Tax=Murinae RepID=BCL3_MOUSE
tgctgataaaattaaaatgtttgccaaaccaataactgtgaggaacaaagtgatgtgtataccaataaatcaggacagtgtagagagtgttgcattggacttgacaaaacattgtgaatcccagactgtgaaaaccccagcaaaaatgttcagggatcaaggtactcaagttgatattgatattaaacctcctaaaccagaaacagtaagcatagagacgaacacagatataacaggagatatagttaaaaaggaagaaaactggtttaatttgcttgatttctctagtttggataacgatattccacaatcaccttttcccgaaggcctcctgaattcattagagaatttcgacttaccaggcaaaagtatggacaatagtaaagaatatacgacccttactaatgcagtaacaggcaaaaatgtagctaattactcagacaattcagtcaatacagcaaagaacctttttatggagttgagacaggctctagttaataatgatgaaggaaatttaccaattcacgtaggcgttatagcaaataatttcaaactagtcaaacggaatttgttcttgctgaaagtcctgaaacactctgtagacgtaccaaacagtcacgattatactccactgcaattagcattgatccacaattcttcgatagaaattatagaagccctcttggccgagggtgctagttgtcgcaccacagattccgaaggaaacagtattcttcactacggggcagagttaaacagaaaagaggctctcaaattgttagtgagcttcgccggtctccaaaggtgtactttgaatccgtttaaccacgaaggtctaacgccgttgatggtatgttgtttaaacaaaaatttcgaatgtgccgaaatacttctggatgctgatgccgatcccaatattaaagatcaaatatctggaaggacggcactgtttcatgccgctgagaagcacgacgtggaaatggtcgaaatgctcctgcaattcaacgcaaatacgaaactgaagaactttttcggtaccagcccccacgacgctatgtacgaactagacggcatgccggaagcgattaaatatatgattctaggcaagaacaacaaaagaaatccttagacgataaccctaaggtctcgaaacatagcagacccaacaatggagtacagcctactctcaagcgtacagtagatcacagcagattcga

SEQ ID NO: 7978 - DNA, 1220 bp, Diabrotica virgifera
gtgttgggataaagcctaaacctgaagagaaagaggaagttacaattaaaaagcccaaaactaaaccgaaaaaagaggatgaaggggaagatgaaattactattaaaaaaatagtccctgtgccaaaggaagatgagaaagaagatacagaagttgaggctgaagtaacaataaagcctaaacctgaagagaaagaggaagttacaattaaaaagcccaaaactaaaccgaaaaaagaggatgaaggtgaagctgaaatcacaattaaaaaaatagtccctattcccaaggaagacgataaagaggatacggaagttgaggctgaagtaacaataaagcccaaacccgaagaagaagaagaggttactattactaagaccaaagctaaaccgaaaccagaagatgaaggtgaggaccaaattacaattaacaaattagtccctgtgcctaaagaagataaggaagaagatacggaagttgaagctgaagtaacaataaaacctaaaactgaggaagaagctgaagtctctattaaaaagccaaaaccgaaaccaaaagtggaagaggaagaagaagcagaaataactatcaagaaatttgtccctgaacccgaagttgaaactcaagaggaagtaaaggtcgaaattaagaaacccaaaacaaaaaagaaaccgaaggtacaaaaagacgaagaggttgaagctacagtagaagtaaagccaaaggtggaagaagaagcagaggtcactattaagaaaactaaagatatacccaaagttgaggatgaaggtgaggacgcaatcacaattaaaaaacacgtaccagtaaaagacgatgaagatgaagttaaaataagagaagagacagaggaagacgtcgagttaacattaaagcctactaaaaagccacctgtaaatgaggatgaagcagaagcaacagtgaaaaaatatgaaattattgacgataaacctgaagaagagactgaggaaacagctgaagtaactataaagaagaaaccaaaagaaaaatcacctgagttggaagatgtcgaagcagaaattagattaaaaccgaaaaaagaacctgaagagacagaagaaacagctgagataatcgttaaaaaaccactagctaaagagccttctgttgaagagcaatctgaagaaattaccgttcaaaggctaaaacctgtaagaaaagcgtccaaaccagaaattcca

SEQ ID NO: 7979 - DNA, 1207 bp, Diabrotica virgifera
ttttggtggcttgaagcatgtagacctgtgatggcactgatgatggagtgttgattccggaaacgttttgtgatacagcctttttagggatttttgatgcatgtgccttttgcaaaataaggtttttattatttgcagaaatgcctgcgtgagttgtttacttcatgtaaggtattctacttacgaaattaaacgtgtgcgtgatgtttattgatttataaataaatatctaatgaattaatttaagatttttagaagtttctgaataatgagttaaatttcgttaccacctctcggtttctcaaatcactagtaacgacaaaatgtttttatctcacacgcttatcgaaacagcaaccacaatttttttcaaccaatccattagtgaactatgttacaatccaaaatagttaaacaaaataataatttctaaaataaattcaaattgcttggtgagcataatatatgatcggcatattattgtgttgtccacacataattctctctatctatatacataatgtagatcttatactggaagcaaaataatattgaaatagtactgtgaacattatcaaaacctttaaccagctcggccatatttctgtcccatttactatttcaaacttaacaaactcacaaatcactacgtaaaataaccattatattcgagaccccatttgagggcggccaacttaacaatggtccgaaacttgtttgatctcccaccctagtcttacgtccttatgtaagggtaggttgataagtcgacttagtcttttctgactaacttcattaagtattaaaatgtacaggaaaagttctacagcgtacgcgatatccgatatattctcatgcatgctaagttttcaagtaaagcagtagcatacataaccccaaaaaagtggatttcagaatatttttagttttcttatttttcgttcatttaggtaataaaaaaagttaaaatcgtttaacatcatttgagtaaatttgttgatattatacgtaggctaacagacgtagtatactaagctctctagtaataatatactgttaaaactagaaatgactgaaaatccttcagtcggcactcccactgatgtgcggcaaaattaccggatcttatcttagtatgagaagtaaattcgaccgttttacaatcatgcagtaatgtaatcgagtgtcgacgttcatccgtctcttt

SEQ ID NO: 7980 - DNA, 1215 bp, Diabrotica virgifera
acgtaggcctatctacgtggcgttccgctcttaacgtgaaacgctttatagctctttgtccaagtaaaccaaattaaaatggagacgtttttgaatataaaatgtttagtttttttacattggatcattcacttgtaatcgtaattttggcagcatacttaagttgttgttaagtaatagtaggtataatataagattaagaagttattttctaaatataactaattttattttttatacgaagtcgacaacagcatttctgctccttaaactggatcacaatgatttttaaaagtatattgtacaaaattttcagatttttagcaagatgtggaatagttatacagggtgtccagaagctctaccgacgaacgaggacaggaggtttctcagatagttttgggacaatttgatccaattcacctagtccgaaaatgctagagctcaagtcaagtcaagtcaagtcaaatttattcatcacatgcgacattgtacaaagtacatgtatgagacaagtcaaagttacagacatacaaaagtatataaattaataaatacgacaaaacatacttaaaagttatttttagaatatggctctagctcacaaatgtattgatgtacacacctccgaaagtttggctgatgtaaattcattcgtatatctattggcaatttgttaaagaaacttatggctgcataatgtgtgctaccttccaacaaaacagaacgatgtggaagcataaagtgattgtctctgaatcttgttgaataaacatggttaaattgaaatttattgaattcataaattttgcaatgtaaatacattatacacgaaaatatatacagaccaggaatagtaagaatattgttttgtctaaagatgcctctacaagaatctctaaatttcattttataaattatcctaatagctcttttctgaagtacgaatatctgctctaattcagaggtacaaccccagacttcaatgccatatttggctattgagtaaaaatgggcaaagtatactgtttttaatattgatgtattaaagagacgtgaaagaattctcaatgcataacatgcgctacttaatctggatttcaaattagaaatgtggtttgaccatttaaaattactgtctaacaggacccccagcaacttcgtgcagtttgttttatctattgctgcttgtatagtggcttgatggtttaataa

SEQ ID NO: 7981 - DNA, 1216 bp, Diabrotica virgifera
  SmartBlast Evalue=1E-102; Info=Ras-related protein Rab-2A n=36 Tax=Eumetazoa RepID=RAB2A_HUMAN
atcagagtgtaaaaattttgtgattaaaaacgtaattgtaattattttttaatattccaaaatgtcctacgcatacttatttaaatatataatcattggagacacaggtgtgggcaaatcatgtctgttactacaatttaccgacaagcgctttcaaccggttcatgatttaactattggtgtggagtttggagctcgaatgatcaccatcgatagcaaacaaatcaagctacagatctgggacacagctggacaggaggcatttaggtccattacgagatcgtattacagaggtgctgcaggcgcacttctagtctacgatattactagaagggaaacattcaaccatcttactacctggttagatgatgcaaggcaacactcgaattcaaatatggtcataatgttgatcggaaacaaaagtgatctagaaagtaggagagaagttatgaaagaagaaggtgatgcttttgcacgagaacatggtctagtctttatggaaacttctgccaaaacagctgctaatgttgaggaagcttttatcaatactgccaaagaaatatatgaaaagattcaagaaggtgtgttcgacataaacaatgaggctaatggtatcaaaataggacctcaacattcccccaccaacccatctttacctggatcaggaggtgcaggaggctcacaaggctcaggatgttgctaaattataacaaaatttttatccaaaggatctgttctgattgtatgaactgtcctacttaagaatgtggttaagcgcagaaatttactattcaaattctcggcctctaaaatctcttctcaatataatgaagttttatatattgaaatatttagttataggcctttacgacttcgagcctgccgagctttgaataataaagtatgttggtattgggactagattttaaattataacattaggtcaaactaattaatatgaattaaataatttattttaacataaatataatattaataacagaatcttattaagaaatgtgaagtatttttctgcattcagtagaattttctaagtgcattctgattaaatagtatctcatcgtttctataatttgagaaacgaaccattgttgtaaatagattgaaaattaaattttctaaaattaaatatctgtttacttatgcaattttacactagctatgaaattacagttgttctactgtcaagtgacaa

SEQ ID NO: 7982 - DNA, 1218 bp, Diabrotica virgifera
  SmartBlast Evalue=3E-51; Info=TBC1 domain family member 7 n=1 Tax=Culex quinquefasciatus RepID=B0WS62_CULQU
tatgatctgcaaaacagcagaaatgttgttacatttcatgattcgagcctttaaagttgttaagacaactacagctacaaatgcgagaatcttgtaagaaccgccacataatttatcccaaattctttcaagagcagatttatacaatattccagcgaaacagcaatcaaaccatttagctaatggtaaattgtccaacactccagttttacttaaatgcttgtaatatgcagcatcttctttctccagtatcacgtaagttttctccacgactttccctaaatcagcatcaaactttttgacattctcataaaaatttctagataaccaaaagacatctgcatcatcttcgaaaaattgcatgaaggactgaactatgttagtaaatcctctttcagtggccagactagtatcaatggtgaaattgccagtttgtagtagccacatggctaaaaatacttggggttttggagtgtttgtgtcaattactctcattacagttagagctctgtgtaattcatggtattcttgttttctttggtccattatgaagttgtggctgtctatatggactggaataacacctagaagcagtttccatactagatttctataagtagctggcacagaaaatcttacacagaactgcctcagttttccacgatccagaggtttctccttcaacaaaatttccagtgattttttttcttctacactcctaaatcctactttctcgtagtaagccgagcgaaaatttctttcatctgccatcttaccctaaccttccccacgataattgtagtactaactctagaacacttattttgtaaattaatttaataaacatgcaccattccataaatgaaagtccagcacagaatgtatgtgaagaaatgtccaaaaatcccattcaatagtagggagtttcgagatataaaatatttcttccaggaatcgataccagctttaaacaatagcataaaccaaaatgcagttacagctacaacaaagaatactgctccgtataatcctgttagtcccagtacacctgctgtacaaccggatatagctgctacagatgtacgacaatactccacaatagataaattgtttcgaatatttggttcactataagcaatgaattcgttttttgttttatttgccataattaggaactaacaaattgaaaaaattatactgtcatgccttccatttatg

SEQ ID NO: 7983 - DNA, 1218 bp, Diabrotica virgifera
  SmartBlast Evalue=7E-70; Info="Fam43, putative n=1 Tax= Pediculus humanus corporis RepID=E0VC17_PEDHC"
ctatccaatacattgctagagctattgcaatgctgaagaagccttttaagcttaatactctctttggaatcctgaaacacgtcgtcttcttcttcaattatttcttctatgctcatcaacttgggagctgatttggatcgttccaacggtggtctgtaattgtgtgaacccgtactcagtaagatctttcttctcggtattgtgggattttcgtagacagagttgactagagaaagccttgcgttctgtctgcaaagtttctcccgcttaaactccagaagtgcaagcgccagcgattctttgagttcttcttcgatttgcttcgctatagcagaagaagagcaaagcaccgcgtgacatcgcagttcgtgtcgtagtcgtttgccttcgtgtcggtagacccagcagaagaggcgagggaattgggacggggctccacaggcagttagacggttcgcccaatattcggtgagtccgtgatccttggttgtggcttttagaccgcctccacttactgtcagctgcatgcggacgtctgggcgggatgattgggtgtagtttctccataaggttgtcaaaggtttctcgaagcatccgtctcctttcgcccatccagtaacaacgtttcccaaataggccaccctatagaccgggtctggcttcgaaattgtagcacttccatacttcttcaatctaagcctattcagtaaacacttaatcgccttcttccctctgtctttctgcaactcctttctaggcatttcactattcaaagtttctatggatggtaccttcttcaaatccgctggtactttcggcggcaaaatagcgccgtcgacggtatcttggtcgacgcgcatcttctcctctctctcccgcgccgcgacgtacatttgcgtctgggttagggtaatgttgatatcacttgacattaacataattaaaatagtacacttttaaacttctttgagacgtttaaccacttcccgagaagtacttccgacaagtactaagtcacagtacacttatttccacgacaggtgttcgagtcgttggataataattacatggtggacgttgactgaagtctttctactgccttttcatgcgggattgtccgtctgctagcaattatatttcacaattatttatgaattgccagaaaactcacgattaaacgcgcaatataagatgagcacaactgtttttcaacaacgt

SEQ ID NO: 7984 - DNA, 1217 bp, Diabrotica virgifera
gccggttattagcacgctcattactgtatagtagaaaacgtctgatttaatacataattatagtttaaatatagaaaaatacgaagagattttaaggctgacagccgaagtttgacgtcacgactgtcatattgttgttatccctttgtaaacaaacattaaaaagccaggatttctagccaagcctttttaatatggccctataaagttgaaattttgcttcctctactgcttttccccttaagtatagtgttcttaagataataccaccataattcgttcttaaatttctatgaaatatagttttttagtgatattcaccaagcaaaggttaggaacttttgtgaaccattgtattttgtataataaaaatggtaattggctttgccccggattgtaaacattgtagtgacagagggatatgtagattttttgtgtttccaaaggatctggttgaaaaggtgatgtggatttcattactacggtaagaaaatgtagtgaagaaaaagaactgaatttatcgcccgtggaggtgggttgcaaattatgccaccatgagaagcattgtcgacatgttatattccctccatgtcaatcctcccagcggataatagtgaaatttggaggaaggaaataaacggatgtaggcttctcaaattgtcgacagattacgttacagaggcactttgactgataataattgtaaatggaacctaatggcaagtgatatctcgtttgaaaggtattggaaatacacctattcaatcatactaattttgtttgggtttaagttgattttgaagaataaattaaacaaatacatactaaaattctaatttctcatttgacagttgaataaatatatttaaactttgatatgtggaaatacaagatctacgattatgtagggtgttggaatgtgatcagatggtacttttttctaaatgcaatatctggaaattttttctaaaagaaaataaaagatatcaaaatgaaattaaaattcgagaataaatggatagacaaaccattttcacctattatattatattattattttatgatgcttggttaaataaaataatgttgttcacttatttttcacgtcccgacactgaaaagtaaaagggactcaaaagactatatatacttatttttcacaagggtaatacctatatgaataatcaaaacgatcgaaaatatacaccagaacatca

SEQ ID NO: 7985 - DNA, 1217 bp, Diabrotica virgifera
  SmartBlast Evalue=7E-97; Info=Methylthioadenosine phosphorylase n=1 Tax=Danio rerio RepID=Q7ZV22_DANRE
ttatgacaaaatacagtgctataacaaacaaatattgtgtgctatatattttatgaaagtacggaatgttatttcaagattgtaaaattagtcttcatctatcttggttatgtatatgtaacagtagtagaaaaataatgtcattaatttaaaatacttaggcaggtaggaatgtagaatggatccttcaacttgggggcaactaatgtggcaacatcacactgctttgctgcacttcctttaactctgtaattgtcttatgccaatcagtctcgccaattttaggtacaacggataaaaccagcttgataactttagaaatattttccctaaacgtcttcataacttcgggtacacatactttaacaccagaatccctccagcagtcatagtcagtcaccaaagaaacatttgcataacaaatggcagcttctttcgcaagaacaacttcaggaacttgtgtcattcctatgatatcgccgccccaagatctgtacattttactctcagcttttgtagagaatcgtggaccttctataataaccatagtaccagttttaattatggaaattccaagtttttcagctacttctagaatcaattctctagttttcgggcagtaggctggttccatagggatgtggctaactcctacaggatgtccaggttcgccgtcataaaatgtttgtttacgatttgtcgttctatcaataaagctatccgttaaagctaaacttccaggcttataatgttcttgaagcgagcctacagctgtagtggctataatatgcgtacatccttcttcttttaaggcccaaatattggctctataatttacatcactgggcataatatcgtgttttcgaccatgacgagctagtaatacgcatggaacgccgtctatttctcctaaaattaacgaatcagatgggtttccaaaaggtgttgacacagctttttctttgcgattttttaagatgtctggatcgtcaaatcctgtacctcctataattccaaccttaattgacaatgccatgacgattgagtttgactgaatacactgtacacctattaagaaagtaagttaaatactaaaataccgggattcgggattaccgggtgtcgtcagccctgcttgcgtggcccgttacaattacaattgttacaaagtcgcatcaaatttcagtagttccaaataaccccgctgattagggtca

SEQ ID NO: 7986 - DNA, 1214 bp, Diabrotica virgifera
  SmartBlast Evalue=2E-93; Info=CG9914 n=5 Tax=melanogaster group RepID=Q9VXI1_DROME
gtttggtcgtgttactcaaatcaacaaggcaattaggttgatagaaagtggtgcagtggtgctgttattacaagaatgtcaaataaaaagattggaattattggaagtggcctcattggccgatcatgggccatgatctttgccgccgctggttacaaggtctctctctacgacatagattcccaacaaattgaagtagcccttgcagatatcaatcaacaattgcaaactttggaaaaagaaaaagtcctccggggaacacttacaggaaaacaacaatttgctcttatttcaggtacaaccagtctcgcagaaactgtaaaagatgctacgattgtgcaagaatgtgttccagaagtgcttgacctaaagagaaaggtttggaaacaagttgacgatatcgcttcaccaaataccattttgtcaagttccacttcgacttttatgccatcactgttcagcgaccaccttaaaaataagaaaaatataatcgtatcccacccagtcaacccgccctactatgttcctgttgtagaagtagtacctgctccatggaccgaccctgaagttgccaagaaaactagagcaatctgggaagaagttggacaaactccagtttccctcaccaaggaagttcccggatttattatcaatagactacagtacgccgtccttaatgaagcctggcatctagtaactgaaggagttttggacgtaaaagacgtcgacaaagtcatgtctgaaggtttgggtatgagatatgcctttttgggtactttagaaaccactcacttaaacgaacaaggttttgtcaactactgtaagcgatatggtgatactatctacgctgtcagcaaagattttaaaccaacaccgaaattcgagggaccacatgttcttgaaattgcaaagcagctggaagctgatgttccattagataaactacaggaaagaagaaactggagagatctgtgcctcaccaaactgagtcagctaaagactgagatgaataaacttaaataatttgtctttgttctattaaattcattttcaaatatattattataataataatgttataaagaattgacaaacatgcaccacaaaaagttaaatttgacaatctaatgaccaaggcacaccaaggctaaatattaaagatgtatttacgcaacactatagtttttgttgaatttcaataaatcaattttact

SEQ ID NO: 7987 - DNA, 1214 bp, Diabrotica virgifera
tgtagaatatttagactaatattttgttgtttacatttcaaaactttgcttttttcatatttgaaaactatttttttaaaatgcaactgtatgtaatgtgatagtatgaaaaattgaagatatggcaacggtgtcgtatttcgaatttagaacagttctaaatcactagtaacaagtaggccacagaacaccaatttcgcttgacaatgcgcggttgccacctccttctgaccacgtgaaatagaaattgccgatttcgatttacttctatttcgatgtgagttaaagaatgccaatccaaacacgaaaaggacgcgatagatatcaaacattccgatttcaggtaattacaattcgacttggtcacttctattcgatttgttaaaagttacagaatagggctgaatgtgctgtgatagctcgtaaaatgtttcgacggcccagtttgcaaatttccactagtaaacgtcgattatcaagacctatatcagacagaattcccggtctactcgaacctttgcctttatttttgacacttccactttaacgataatgcttaagtctgcccgaaactatagacttgtcagatctaatttttcagcaatttctcgtattttttcaccctgacaatacatattttttagttatgaattgacaagatttattatacgtgacacttcctctagccatttttgaataaatattttatcagagctgtctgctaatattttatctgttatttgtaattatatctaattacaagtaactgccaaggaacttaaaacttatgagtttatgttaaaattatttattttatacacagtaactaaataattccgaacacttaggtgccacgatattatgcaatattttataaattaacgatggactaaatgtatttttgatcttgttctttaattcaataagcaacatagtgaagatgaaagtttcctcaacagatatttttattatgataaattgggagcaaatacacttattgtcttacacccttcctaatttttgcagctctgcttgtcactgggagctccgtaaacaagaattaattaaaattaatgtaatgtgaggcaaaataaactaaacaacgacagaatttgataccaaacaatcacaaatcagttgttccgtgtctaaattcactattgacttgtcactattgcaacaggaatttactgcgactggcgcaaaatggtgta

SEQ ID NO: 7988 - DNA, 1213 bp, Diabrotica virgifera
ctaaaacaaattttaaaatagatgcccaaggaaagaaggaaggtagaaagaatcctggttaggcggcatccagaaggcaaagtcggaaaggagccttcaccatggcgaatgaaacgatcgacgaagctggaaactaggaaccggaaggcggagaacgtataaaacaaacgggatattaatttacattttacacggtattaaacattatgtggaaaaaatcgtatatttaaaacacatattatttacgatactttttagtcataaaaactatataataaaaacaataacaatagatacctgataaaactgtctgataaaaaaacaataaaatatttttatcgtgtgagtgtatataggcttatgataaaatagttaacctatgcaaaacctatggagttgtgtgctaaatacggatcctggtgatcagctctagtggacggataaatacaaaatttgcatggatagtctggaggtttacaaagcaaatgctcctctatgaattgacatgggcacgtttgagaagggcaatgacgtccgcctgatgcgggaggactatttaacaaacctctagctctgtctctaccccatctagcagcgtaacgtagatataatagtgttgccctttcctgtttcctggataatctggtagtccgactaccttgtattataatatcttgtgcggaaatatccattctttgttcccatccaccgttttggtccctttcttgttggtcgatggtcgtctgcagatgggctatgcagggcgccgaatccatgtatataaaacatagcgtcactttgtggcagcttatttttcctctgtcatccagagctaatactatcttatgtctgagcaattgtttgttgacgttagccatacacttttccagatttctttgtagcttgaactttaagtacatcgataaaaatatagctgccgcattgagtaatagccaccctattcctaaaccaaagagaagaagtccttgaagaccggaaaagagtaaacccaaaagaacgataaacgccagagttatccaacaaacaagaactcttttgtagcatacgttgtatagagagaatctcacatcgtttactaataactccaaggcttggacgtattcttctacagttagtgttagaccttgagccataagctctttcaggcactaattctggacggattgagctggagtaatccatggtagtttag

SEQ ID NO: 7989 - DNA, 1215 bp, Diabrotica virgifera
  SmartBlast Evalue=1E-126; Info="Palmitoyltransferase ZDHHC3, putative n=1 Tax=Pediculus humanus corporis RepID=E0VT15_PEDHC"
taaatatgcctgttttgtaggaaaaaatttctaggtacttaatagtatgtataaattccataaattaccaaaaaagctttaattaaataaaattaatatgtatataaataacttaaacagcatacaaatcactttcatgcttaaacttaggtgaaggtctagcgaaaggcgaaaaccacaataacgaaaaacgtccgaacacagcctggatactcttccatcgcgatttcttcacccatcgagcctcttcttttttaagttgttcaattccagtctcgtcattccatattgcttgcacttgcgtaccgagcatcactgctgtgaatatggcgaatagcaaagcttcgaacataagaaaaagtaacagtactactgtcgcgggaggtgaatatgtcgtacagtctttccattcgtgccgaatacacgttaggaactgatcgatggccagaaagagcgaatgtagtgatatggtggcgatatacattgtaaaaagaacaaaatatttttgattattttctcctacacaattatttacccatggacaatgatgatccatttttctaatacacctttgacaaactgaacaatgatgggctctatctggtttaatactacaacattttggacacttaaatatcacttgtccttctctaaaccccatctgcttaatcatttctttggtagcatttcctttgggaactgctccaggatctgtaaacatagtttttagatgtgatgttattgctaaaaatgcacataattggaatataaccatatgaacaatactgtaaatgggataagggcttggaatgagtataacagacataacaacaaactctgcatataatatcaataaccatgttaaaattgcacatatgattccgcaaatatctctaatgcaccaaaacattccgccgcaacatttgttgtgaaaatctgattcttttctgaaagaaccgtactcatattccatcatgacgccctgaattgtacaaattcagttttattgaactacttttaattgaatccttttactccacatttactgatatatgcttcataagctctaatggaggatacatgcgagcaaatttcaaattatatcgtaactccaaatgaaattttctaaaaaacatgatttttctatctctgatttgtaaaagattacaaattacattttcattttcattttcatttcaacttgactgtgacttg

SEQ ID NO: 7990 - DNA, 1214 bp, Diabrotica virgifera
  SmartBlast Evalue=1E-120; Info=28S ribosomal protein S5 n=1 Tax= Aedes aegypti RepID=Q17EJ6_AEDAE
acctatcacaaccaacataatggaaaaatataaattattattttgaattatttatagtgtaatatactatatactgccatggcaggacagttagcaaatgtagtaaaaacctttcaaaaattaacaatagcctcaagatgtagaattgtcggtactattattaatcctgtaaaagagcatgaaccccaaattttgactcaaacttctacaagaaatactaacttctttaataaattacctgcacaagatttatggaaaggtataacttctgtcagtaatgctggcaagaagagaggtagagctaaaaatgtatcgaaatccaaaattaaagacttaaatcgtggtcaggtcattggtgtaggtaaagcaaatattgtgtggccaggtctctcagccccataattagaggaaaagaattagtggaacaacatcaactaccagaagatccagaaagagagaagaagctaattcaaattagagatcagatgggcaccataaagaggccaaaattaagtcccattgagagaggatggtcaggttctaagttacctggaagaagtattggaccaccagatcctgttgaagaagataactttgaaggttttgatacaaaagtgttagaattaaaaactgtgttcaacatgaaaggcaattttggcagaacgagaaggcagtcagctttagtggtaactggtaatggtaaggggcttgccggttttgctctagcaaagggtattgagggtagagcagccttaagaaaggctaagaatagatccgctcaaaaattaatgcatattaagttgttcagaaaccacacagtgtgccatgatttcttcacgcagtttggtacaacaaaaatttacgtatcacagaaacctgaaggacacggtttagtttgtcatagagcaataaaaacaatatgcgaagttgtaggtattaaggatttgcatgctaaagtagaaggatcgacaaatgtaggaaaaatcatgaaggctttcttcttggggctgattagacagaaatctcctgaagatatggctgaagagaagaagctgcacttagtagaattctgtaaagaaaataattactttccaaatgtcatagcttcacctaaagaatgtcgaaaggccaacgaaattcccaaagatgaaattctagattttaaacagtactgttttgatggcaaagttgtgttaaagagaaagaagtatcca

SEQ ID NO: 7991 - DNA, 1207 bp, Diabrotica virgifera
tttgctagtcattttctatattacgtatttttacaattatgataaatgtggtcatgtgtacctcgacgaagatacgaacataaaccatttccacaatgattcaagactgatagatttagatacagatccaaagccagatgaagatgatctctatagaatactttatacagttttagaaaaaggaaactttcccgcacaatcctcaactttcctaaggacacaattctatctagttttatatatattcattgacggattttggatgattagtactttcatactttttgctggcatctgttttaacgtaaaaaaagctttatccttgtttttctatggaccatggttggtggtttgcgggttccacgtagttctagacattatcgcagccgttcattatggtttggatatgttacagataaaaaactatacgagttggttgaaatttataggaattgaaaattacagggacttctccaaatttaataaatatgatagtgccgattatgtaccacacatcagttccatagttatggtgatgttcttttccagatttttattgtgctggttattgaacatcatgaatttttttaccattaccacaaattgtgccttggcctataaagacacatctaatatcagaaggtcgaaagaaactggcaacacttatcgtcgatcagctgcacacaactccacagaatcaaggatcagacaatggcaattgttttatggaaacgaagaaaatacgagtattgtgagtagttcttcggcaaaatctgataacgataacaatcccggcgaaaacattagaatgtctgcgagacacagaaaaccatcagtggacagtccacaaccagtcgcatgtgtcagcgctacaagatacagtatcgactctatgtcttcaaatcaaagtagtccaaaggtaacttccagttatttgaaatttccagacgtgatagaaggaatggagaacaatgaaagaaaaggcagcgttgattctgtaaatcattcagttccgtggtcatatacaaggtataatgaaaagcctccacgattttttggcaatcctggtgaagctgttaatgttaatagtaacaaataaaaccaaagtaaaagtgatcctagggaattttgatgtgcggttgttaatttgtgatagtttggtgactagcaaaacgaagacacttaggtatattgcttatttagttta

SEQ ID NO: 7992 - DNA, 1214 bp, Diabrotica virgifera
  SmartBlast Evalue=8E-61; Info=Acid phosphatase-1 n=1 Tax=Aedes aegypti RepID=Q17E64_AEDAE
gtcgtatcagttttttttggaaccaggtgtacaatgattaagtaacaaattaaaattgttgataatcaagatttgcactcatgtttccaactgtcttcatcaacggttatatttctgaacacttttttgtaaaaatctaatctacaagcacttatacaatttccgatctttagttctacaacagattcagtcttaaaaccgtccttaaaatatatattcaagtatggttctcctgcagaagtcctatacaactcccaaataatcgtcgaacaaaactgagggggtttgtaattataatctccgaaggtattcaaaatggacgcaatagtaccatcgtgcgcagagagcatcagaaatttaggattcgtaccattcaaaatcccgtcaaaatagttgttaagataatcaaaaaaaggtccaactttaaagcgttgcagtttggtcgtgaacgtttcggtactgaaagaaagtcctgccaattgagctagctcttcttggtctatttcattggcccaatctggaacataggaagaatttgtttcgttgtagatatacaatacagtccaaagatttcgaaataggtccaaagtaacgttccaaccagttttactttcgacaaattctttgagctctgtgtggttcttcattacattcttaaagtactcagagtctagggtctcctggtacagcttctcaaaattcttacattcttttttcatagcgagcacagcatcttttttgtattctactgtatggataggtaccgggttccaaggtaactcttgaggccattcaacaggatatgggcttccatcgggataatacaacccagctaagttggatgctgcagaattgagggttctatctacgtctgtagagcgaacatatagctctgtagggtaataccgagtagacaggaagttcttgtaacgacgtcgaagccattgacccaattgaaattgatgcacttttcctttattcaccaattctccgatgccgtctggccaatacttagcgtcaatatagggatcattagggaaagacgatacaggtgctcgatctccatgtctataacacacagctactccaacaagctcatcaccgttattttccaccggttttcctaagcacagctgaaacaaaactaacaacaacaataccactatttccctcatttcgccgctgatattatcactatgaaaatgactgattac

SEQ ID NO: 7993 - DNA, 1210 bp, Diabrotica virgifera
  SmartBlast Evalue=4E-42; Info=Endonuclease-reverse transcriptase n=1 Tax=Bombyx mori RepID=D7F167_BOMMO
gtccgtattggcgtataaagacttacaatacgccctccaaacatcaataaccttgtccaaatccgtctgtacattaccttcatcatctttgatagaccaagatttctgtttgaatttacgtgtgagtagtctgactttatcaaagagttctttggtgttatttgtgtcggcatgtagttgaatttctctgcagattttctctatatgcttgtttttgtctcgtctacaagcagcctgaatagctctagatagctgtcggtactgggaattcctgagagggttctcgattccagcaattttaagttttctacgttcttcaacgaggtcaaaagtatctgcagacatccacactttttttggtccggttgagacggcattagactgtgcctcgcagtcagccaaggtctgtatcaaggtatttttaaaagataaccaaatcttttcggaatcatgagtggcgatagttggtaaaatattttcgaatctttcattacattggcttttaaattgttgtgtatcttttatttttgatatcctcttgtttcggatcctagcacatgccttgaatttttgctttagcgttgcaaaaagaagttggtggtcagagccgcagtcagcgctaggtcgtgttttacattggctaatagatgttttccagcgatgtttaatcattatgtaatcgatttgatttcggtgtcgtcagtgtacgtacgttaacttaaaaaacactataattgaacataaaaagtagcagaggaagcaaaattttaactttatacgaattaaaaggtcttgaaattgagtatcttttcaacgtgttttcaatctttattctttgtttggaaaattgatcataacaacactgaatatagccgcagttggccgtgacgtcacactccggcggtctttcagattaaaacaagacatgcgtaattttttgcacggatagctttgatcccaataattgtggatcgctcgttacttctcctattctttggaagacgccattaagcaatattcctgacaacatgacacatcacaacagtatatgaactgcaatgtttgctttcaatgtcagctgtcatatgtcatctttcaccaataacgtcggtcaagattatgaatgtagcattcatcgtcaagatatttctttttaaaagcaatttttagacggttttgacttgaaattatcaatatgattagttataag

SEQ ID NO: 7994 - DNA, 1211 bp, Diabrotica virgifera
ggtcttaaaaaacgaaacatttgccggtccctaacgttcacttacaggtcttgaccggcaaaacgctattttctagacaaaaaattatccagaaagtataagttttctggtcggtcttaaaaagatttttttcagctgttttactcttctttcaactctttagtcaatgtgtgcttgcgcgatatgtttgttggtccaggaattagtgcagccacaattccaatagatatagaacattttattcgcaaactattatatctacatactgtgtattatcaaccaatttaagtcaatctgcgacatttgtcgcaaaattttttgtatttatataaaattaaagctacttttggagcaatctgctcacttgtgatgcttagtttgttttttatgcggatattgtgattggtggaactaacaactatttgtcgtgtgtttggatttcgtataaacaatctacaatcataaatctagtgtaaaaaatcacataaaaggcatccggtaaagattgttaaaacgtcaatacacctaaacatagttttatcgtaaaaatgtactcgaaaccgtccccaatatatatcacatacatacaaatcctgatcactacgtggctggttcgataagtacttagcctctcctccccagggcgccactaccgcaatatcgtataatacattcccgtagacaggagacgttaatttgtccaattcgctcctccacttgcgcatgtgcaggcaatgtcatattgaatttcgtgccaaaatttaaataatgtgcagtggacctattacggctaaaaaagattattctttctttaactagtagtatattttaacatttatagattattctttctttaacaaagtattcataatatctaaatgtgcttttaaacaaatgttagtgtagatttcaattaaattatttatctataattatttataactatttatatcttttagagaaaaagataaggcaagtctaaactataaaaaataggttaggttaaatgatattttcaaatatattggataagtagatacgaattaaaatggaccgatgccaacggaaaagacggtattattttatcagattgtacactttactacaaatttattttagagtgtagtgtgcttaaagtgtaatgaaagaattaacggattcgatggttggaaattcatgtctaacaataaacaaaacttttgttttcaatc

SEQ ID NO: 7995 - DNA, 1211 bp, Diabrotica virgifera
agaccagagtaagccctggtgatactcctgccatgtttgcattattagaagacttacagaaattatggactagggaacaaaaccgaattaaaaaaattaaatgacgatcttagtctagtagagggaacagcagcatactatatagaagaagctatgattagtaatcataaaaaagttctgaccactaacttttggatggagcggactgaacaagaaaagagtgatttagatttaaggcgattagatcatcacttgttccggttactaggagatccatattttcatccagcaggcccaatactggacagaaacggtcagtgtatatgtgaggaatgtttggttgccaaatatgatgttatgatacatgcagtcgaagaacaatcagaaaacaagctgttaaggagtacttctcgcctaacattttgtcgtagatgtcggacacttctggagcttgatagttttcatcgacatgttacagaccacgcggcagctgatgaggtcaaagcaataataaaggataataccacaaaagtaggtggagctttggtcctgtgcgaagaaccgccggaggtaagtcaaaggatcccaatgccgaaagaagcagctgacgcagccttgatgactacctgcgatatccacttttcaagacctaaacacgaccctaacgatctaacttgcactaggctagcgtttgaagaatttctcaagcagagcaaggatagtaccaaacacgacgccctttcaaataaaaacgccaggagggactttattaagattaagaaggatatattcagtaacacgggaaaagtggtctttgatgatagtatactcaatccaaatacatttgcctcaaatttaacgccgtccgtgtcaccaaccaagaaaaaagcagagccttctcctaagcctaaggaaatacctaaaactagccgaaagactgaaaggactcgaattactagtattaaaccaccacctaaaccttcagcatacattccatacgatcatctttgcaaacatgtcaacgaagctgctgtctgccaaggtcatagtggaatgtgtgaccaccaaaaagaagcaaaaaagtgtgattgtacatactgcgaagtttttggaacggctctatcctcacatacacacaaaaatagcgaactaagagatagattgcgaaatcgactccatcagcggcgagaaaaaagaacaaaggatactgg

SEQ ID NO: 7996 - DNA, 1206 bp, Diabrotica virgifera
  SmartBlast Evalue=1E-114; Info=Vacuolar protein sorting- associated protein 18-like protein n=2 Tax=Formicidae RepID= E2BRY6_9HYME
ggtcagcgccaagtcgacagcagctttccacattcccagcaagccatacaactgaacacaagctcttttatggtcatgctcgtggcacagtcttaaggcgtagtgtatgtcaaaatttaccatcgtgagcttctggccctgtgtattcatgtatttcaacatctcagcatcgcatttgttcaaatacttcatcaacatgtctgagtcgtatttggcatataacgaaattaagaagttatgtatagctttgtcggtattcttcagtttgtcaatacaaaactccagatatttaatgatttctctagcgtgcagctcgctgctacaggttaccatcgctggtaggagcttcaacggtatcagcttcctgccttgctctattagtaccttgatcatgtatttcggtatttcttgaatcaaaattggggtgaactgatagtaaagctcgtagttcttctggcttttgagcacgtccagagcgtcatggaagttgtttttgaagatgtgttgctgaattatctgttcaaagtttttgttgagtatagtcaattttaatacgttatttttatccccatgactgctcattagattataaacagtacccttattgtttttgatacaatttgagatttcgtctaaggctaaaaatacatcgaactccttctgcaagtctgcatatgttgccgtttgttctaaccctgctagacgcatctgttccagttttaccaaatacagttccatgacccaaatgactatcatagtgatttgggtcttatcttggggttttagtgtgtccaatttgcatctcaaaaacagcttcaaagcattatgctggttagcttcaatgaacttcaggcatatttcctctaagctactctcagtctctgcatatctttgggcactgagctcatgtttctgatctgcaaacaacttatcagcttcttttatcaaaacgtggttatagcattgcaagttccccctagaatacttcttagccaattcgaactctccattattacaaaatatctgccatatattcctctcttcgtgagttactctaaacctaaacacagaattttctgttatagcccaaatatcacctgttctcacatctttcaccaaatttaccagtctaccaaatgcctcgttgtagttgtcttcatacactacctcctggttgaatagacatactcctttcactgagtctgt

SEQ ID NO: 7997 - DNA, 1207 bp, Diabrotica virgifera
ttcacatcgatttacaagatctgtgatggccagcttcctccagcggagttcatcagctgtatcaagaaccaccctgagcacatcaaccaacacactacacctacactcggctaaggaactacttcccaacgaaaacgattagtacaaataaccggttggttgaaaaaagaagggatcaaacgtggcggcttttaaagtgttctacaatatatgttaccgcaactataccacaccttttttatttattatataaatatatattatttctatatattttattataaaatatttattatctgcagtagttcaccatatgtaaatatcctattaatttgtcttaagcttattatttaagcaaggatacaattttttattattttatatttagaaatgaatttacacattttttaagcatcttttggtttatacagcagtaacagttttaataattcataacatatataattgtttttaattgagattcggcattagctgtgatttcttaacgtttttaataaactaacccatcagagaaggatattgcaggtgaacaatatttcttttttaactttcttccttcgtaactttactttggagttagcattattgcttcttttgtatataattaacctgttttaagttatatctcttcttcttaagatgccatattgatttactgtccattcccttatattcttttgccatgtattctttacccttatattctttttcccatttccattgctttcatgatatttgtttttccctaattcttttacattttaaattatgtagtaaatttctagtcaatcttatttctaagtcacttgttcttcattgaacatgtttgtagataactaatgttgattgttatctttttagtagttatctattaatctctaaatcttcttatacacgttaaataattactttggcatacacaattcttatattgctatttattgttattgttttaaagtttaaagaatgttgttaaaattgttgatgccccttataactttttctttgttgtttcacaaacaattcataacgaaatattgatacttaaacaactgttttttctgtttgtattaaaaatatgtgtaaattctacaaaaattgtaattaacattgtttataattctttgtttgttaataacgtttgtttttgatatgaagtgatttttgattattgtttctaaagtgt

SEQ ID NO: 7998 - DNA, 1210 bp, Diabrotica virgifera
  SmartBlast Evalue=4E-71; Info=Vacuolar protein sorting- associated protein 13B n=1 Tax=Camponotus floridanus RepID= E2AKD0_9HYME
atgtatcaatgttttgggaatcatggcaaagtcagaatagtgatcctcagatccaagtgagcgttgaaagtgattgtattatgttagatattagtcccgagcaaatcagatgcatcgaaattgtggctaaagaagtaaatgagttcattgcaactttgccaatcacggaaagtggttctgctcctgaacctgtaaatgtggaaaatacctctggaaaaggatttgataaagatcaacactacaaggatgatctaagagcaggtgctttccagtttgtcgacgctaattctgataaaactgaggagctacctttaccttatcaggtaatgttctggaacaagtccatatctgcaatggcatggcgttatcctcagcctcgagctttaacgaaagttagggtatttccggtaccttataaaagaacactaggatctcatgatgacctccaagtcctgtgtcatttagaatattgggcggaatgcagaaacgcatatttacctttcgctcagtttttcttgtcagaaagtgaagtatgccatctgacattacctgctggaaacccacaaccgattgtagcttcaacatggagagtggtaataacaatggttaattataacgaagaacaaaaaagcagcatcttaatatcccccagagctctagcggcgtgcatgcgtattgattcttattttaacaaatctctaatacccagcttaacagcagccatgtacataacgagaatagacgtgtcattatacaattattttgacagatataacacgatgaaattaccgacttggttgaacaatttctctcccgactacatgttcccagaaaatcaaaggtttttaacgttaagctggtataatatgacgggatatttcttaaattgggatcgagacacaatgtccttagagctcagcacagctgtcaaatgcaacgttctcgactacaactttttgaccgagcagcctcttattgaaccatttacttgtaaaatggaggctacagtttcacaggatgttagtttgaaccttatttctaagccaattcaagtaaaatttggacctaatatagcccacagtttggctgttgctgttcaagtttgggatcagacatacactagtccggataaggagaaagattttattgtaatgaccaggatcatcgtctgtaacgataccatcagtagcatacgattcggtcaagcttc

SEQ ID NO: 7999 - DNA, 1209 bp, Diabrotica virgifera
  SmartBlast Evalue=2E-45; Info=Transposase n=2 Tax=Meloidogyne javanica RepID=E1A4A3_MELJA
agagttcacacagtgggagatgaagtagtgaaaagtacaagtcacaaccacgttgccgatgcgtcaatattagaagcaaaaaaaggcttgtaacagaatgaaagaactggctcatcaagttgaactaacaacacaaggaatcatagctaccgtttcacaagaagtgtctgtgggtgcaactgggcagctaccttctatttcatccctaaagcgaactattcagaacacacgccaaagagtggaagctattccggcaaatccaagaagcttaacagagcttattattccggaagaatacaccagaaacaataacggcgaaccgtttcttttatttgacagtggtccaaacgaacagagaattttaatattttccactgaaagaaatttaactttgatggcgagctgtgaacactggtatgccgatggaacattcacatgtactcctctattgtttggtcagctgtatacaatacatggcgtacagtatagcaacgttattccaactgtttttgctctacttcctaataaaactcaggcaacatacactcgactcttccatgaattaaaaacgttacgaccaggtttacgtcctacaacaataatggtggattatgaaaaagcagcaattaatgctttacaacaagagtttcctgaagtcagaatccgtggatgtttctttcatttcacacaatgtttgtggagaaacatgcaaggtacaggactgcaacaagtttatacagaagacgcgaattttgctctacatctgcgacaattggcagccctagccttcgtacctgaagtagatgttgttgcaacattcggagagctactggacagcgagttttacactcaaaatgaaaatttactaacacctttaataaactactttgaggatgtatggataggcagattggatcgacgacaacaaagaagaccgccaatgtttccaaggaatctttggaattgcttcgaatttatagaggaagatctaccgcgtactaataatgctgtcgaaggttggcacaacagcttctcctcgatattaaatgcagcacacccaaatctatggaagtttattacggggctaaagaaagaagagagtttaaatcgattaaaagtggagcaatacatagctggaaaccaacaacctcaaaaaaaaatttataaagatacagcgcggcgaataaaaacgatttgtttgcaatacgg

SEQ ID NO: 8000 - DNA, 1208 bp, Diabrotica virgifera
  SmartBlast Evalue=0; Info=Ubiquitin carboxyl-terminal hydrolase n=2 Tax=Tribolium castaneum RepID=D6WV88_TRICA
ggctgggaaactttggactcttttatgcaacatgatgttcaggaattttaaggtgctattagataagttagaaagcaaaatgaagggtacttgtgtagaaggaactgtgcccaaattatttgaaggaaaaatgatttcatatataagatgtaaaaatgttgattattccagtactagatcagaaactttctatgatatacagttgaatattaaaggaaaaaagaacatcgatgaatcctttaaagactacatagccaaagagaccttagatggtgataatagatacgatgcaggagagcatggtttgcaagatgctgagaaaggtgtcatcttcaaagaattccccccagtattgcatctacacctgatgaggtttcaatatgatcctgtgacagacagctcagtgaaattcaatgatcggttcgaattctatgagaaactctcgttggacgcctatctccaggaacaggatcccaacaaccctgccaattatactttgcacgcagttcttgtacatagcggtgataatcacggaggacattatgttgtttttattaatccgaaaggtgatggtaaatggtgtaaattcgatgacgacgtcgtttcaagatgtaccaaacaagaagcatctgagcacaattttggtggacatgatgaggacatgaatatgacagtaaaacactgtactaatgcttacatgttggtgtatataagggattctgaaatgcccaaagtattacaagatgtgacagatgcagacattcccacagaactggccgatcgcttggcagaggaaaagcgaatggagcaggtgaggcgtaaagaacgtaacgaggcccatctgtacatgacgataaacgttcttttggaggatgcgttcgatggtcatcaaggcaacgatctttatgatcaagaaagggctctttttagggtgttcaaaatcaaaaagatggccactgttgccgaactaatggaaatgctggcggacgcctttaagtatcctccagagcaaataagaccatggccttttagtcagaggtcaaaccaaaccatccgacccagtgttttagatctcgaaacagacctccacaagcctgtaatagacacagcagaaaacgcgaatccttggaacatattcctcgagctccttcctcctgattcggggcaatcgacacttccgacgtttgacaaggaaacagatgtattat

SEQ ID NO: 8001 - DNA, 1202 bp, Diabrotica virgifera
ttttagaacaaagctcaaaaatgtaggtataaaagagtaccaattttcaaacgaaaatatctaataaatacgacaaaattagtggtaacttgagcagcatatgtcatattaatgtgatgtcatatgcgtgatttttaaggttatgttaatttgaaaacattagagagattttgcacctcttattttgcaattccgttatggttatcgttatactacgtctgcgcagtagcgaatatatgatccgttatcgttattaaacataagggattccgtaatttacggaggtttaaagtgtgcttatcgttatagtaatggttaaattgctttgttgccagaatgtaaaaaaatcggtaaaattacatttacatagattctaattttgattacctataaattaaaatatcaaaaactgttaagtatatgcttaaaattacaataacgttgtgaagtgaggttatgtctaaataacgataacgatgacacgaaacacctacttgacaggctgcaaaaactctgctttttaacgttgccgtaatcgttatgcttaataaagttaaccatagcggagccaaaatcagcggttattttaagaggtgtaaaatctctctattagcgggttcatcattgtataaacactcccacagtttagcaattgttttatttctacaatagaatatacatattgtacataccacaactatagtatacttataactgaacttcttcaaatgcatatgtctcgaagttcctgcagctttttacaagattcagtatttatttagtaaaaaatgaagtcttaatttttaaataaattttaatacattcatagttggcaagtatattcgctccctgtgtgactatagcgccatataccccctcgcatttattcggcattactagacaaattaaacatgtgataaataggtaaacaaacattacattcgtttatttttagtagtactggaaaggattgggtttgttcatgattattagataaaaaaattaaagataactaacaaaactttgtaatattgaatttttatcgccagttgctccaaatgtagataccttacacaaaaacttgcagaaaaacttccgctgcagtattgtctgagttttattatttctttgagtgaaaactaattaaaaatcaagtgtctgtaatgtatttttctactaatcctcaactgaaaaagtttttg

SEQ ID NO: 8002 - DNA, 1206 bp, Diabrotica virgifera
  SmartBlast Evalue=5E-20; Info="Vacuolar protein-sorting protein BRO1, putative n=1 Tax=Pediculus humanus corporis RepID=E0W0I7_ PEDHC"
ctcttctgtgctcatacggcgatcgggatcgtcctcttctcctattcaacaccgaacgcacatcagacttgatgttctctttcctgtcccttcttaattcaacaggatccctatcgatggcgaacacgatctgtcgcgatctattcttaagtttccttcccagatcatcttctaccaagtcgatcacttcgatgggttctctgtagttgtttatgcttaaaatggttcttaaatctttgggttcttttttcaattgttcagtttggtttttttagtttctgaatggctttccttatttttatcctttcttcttcttcgtctgcgtacatacgcattcgcatcgccctaccttttggtttcttgactgtggtttcttcttcaactatctctacttcattttctgaatctgcacgtgttttcactcccaatcttgtagcgagactggaattctttatttctacagtttctcctgatgttggtgtagtttccctaaatttagcatctttatcccaattcctggccaaattcccccatggattcttaccccttggcagatctttatttctgtcaaatatacccctttctgttttgggtcggataaatttttagtagtgcccattcttttgtagtatttggctaggtattcaatcttgtatggttttttgtcagtcttcattgcatatctcaacagcaagcatttggctttcggatgtttgtcgcccagcctccagtaaccaggtggaataggtattgttatttctgtgatgtcaactgcatttttaaacttatccttagcagtatttggcacaataacaccatctactgaaagttcaacctgtctatttttaagcaaaatactctgaccatgctcttcttcaggttcttctccatccagaaagtctttaaccaacacttggttacaatgcctaactggcattcccttcactgctttagatgtataaaacatagcccttgctgcagttatattctcgacccattttacgttaacactttgttcatcaacacactctatttctgttggagcatacttagcaaagtagtctaagatgtcttcaattaacatatctttcgtacccaacaaatgcactgtatcgaacctgattaaattttcattatcgtctgtaattcccagactttctctaagctcttcatgatcagcatcagtaaaatggtggatttcttctg

SEQ ID NO: 8003 - DNA, 1207 bp, Diabrotica virgifera
  SmartBlast Evalue=1E-122; Info=Yellow-f (Fragment) n=3 Tax= Tribolium castaneum RepID=D1LZK5_TRICA
gacatacacagattcttaacattcatacgtgctcacaatgcgaactctcacggtgtgtattctttcgttattggcgatttttgtgtctggtacaggcctcaaagaagaattcacttggcacaggatcacttacgcttggcccagaggtcaaggcaatggacctcgtaacagggtgcaaaggtacgctcagtacgctggggctgggggtagtagcagtcctataatctacgaggatcccaatttgcccaacagcggatggaatccttcagaaggaatcgattataatcatgttacgaacattcctatgggtgcaaacgtatggaggaacaagctcttcatcacggttcctagaagacgactaggagtgccatctacattgaactatgtgccattggacagtccaagaagacacaacgttccgctgattccctacccagattgggataccaatatatatccagatcccaaaaacagcggtgataattttgtgtcagtatacagagtagctgtggatccctgtgataggttatggtttgtggatactggactggtagaagttcttggaaatgtcagtcgtgtgcggcctaccactttagtaatgatggatttgactactgataaaatcattcgatcattccaaatccctgcagaccaaatccggccaaccagtggtttagctagtgtaaccgtagatgtaactaaagacacctgtgatgatgcctatgcgtatatacctgatttaggaggatatggacttatagtgtacagcctaagggaagacagatcctggagaataactcacaactatttctacttggaacctctagctggagagttcgatatctccggtcaccgttttcaatggaacgacggtatattcagtgttgaactaactaatgttaaaccagatggaaatagagacttgtatttccattccatggcaggaacgcatatgtatcgagtgcctacgaacattgtaaagaaccacactttagctacgaggtcataccatggagaggatttccagaatcttggagatcgtggagccggatctcagacctcttccgcagacatccacaaacccagcggtattatgttcctaggtctagtcaaccaaaacgccctaggttgttggaacaccaaaaaacccttgagtacgatttctgtagtacaaaaagatgacgccaagatgatctatccttgtgat

SEQ ID NO: 8004 - DNA, 1208 bp, Diabrotica virgifera
  SmartBlast Evalue=8E-88; Info=Basement membrane-specific heparan sulfate proteoglycan core protein (Fragment) n=1 Tax= Harpegnathos saltator RepID=E2BPV9_9HYME
ttgccaacgtactccaagtcctcctcaaagatgtaactcgcaacagtggagatgtgacgatggtacctgcatcgacgcccaccgacaatgtgacggcgtcaacgactgtccagataactccgacgagattccagatttgtgtcgtgtttgtgcaaataaccaattccagtgtattgataatttcaactgtatttccctgagtttgcgctgtaacggcaggaatgattgtaatgacggttctgacgagtataactgtccaactcaaccaccaacttatcctcctcccacagaacctccaccagtcgtctgtccagaaggtcaactgccttgcagatctcaaccggaccagtgtgcaagatattgcgacggcagagctgattgtaacgatttctctgatgaaactaactgctcaacatcctcggacaaccttaatttgaaaacgtatccaagcagtacggaagaaaaagaacgacaagaagttgtgctcacgtgcagagacgaaggacagaccagagctcaagtttactgggccagagcaaacggagctcctctaccacccggtaccaccgacgtccacggtagacttacaattcccaacgtccaactagagcattccggaacttacctttgtatagctagaggcttccctcctaacgcgcccggtaccagagtctcagtaccagtcaccgtggtaagaagaccaactcgcccacctcttccaccctcagaatgtaatccggtgtatgaagccacttgctccaacggagaatgtataccaagatcaaaacttagagatggacacttcgactgttccgatggttcagatgaggacggttacaggcctggtggttgcgaacccaacgaattccaatgcgacaacaaaaaatgtatccttaaaacctggatgtgtgactctgacgacgattgctcagacaattccgatgaaaagaattgcgcaaccaatcctcccggatcgatgtgtcaataccaccagttcgcttgtcattcgagcaaccagtgtattccaaaaagttaccactgtgacatgcaaagcgattgcgtagatggaagcgatgaagtcggatgttctaaacctgttatatccagaccacctccaccaatggtatcgctcaacgtaggagaaatcttttgaaatttcctgtaccgctgtcggaattcccaccccgaaatagtctggcgtctgaact

SEQ ID NO: 8005 - DNA, 1205 bp, Diabrotica virgifera
gtaccattttattcgtactcatataccaagatgatagcaaaaacgttgtgttttcttttagtgcttttctatggtcaccaagttaatagtagaactactcaaggtgatgtcgttgagtggcaggattataatcccgattctatccctgacgatgcaatcccgtctggtggcacattagatgggcaggatatttatattggattagtgcactttaataataaagaatttgaaggttttatacctacaaatattatcggtggacaaaaatgtgtgcatattcctgtaggtttggaagagattgaaacagtctgtgatgacattaagatcctagttggaaaaaatgattacttaaacaaactgtactgggagattgccaaaccttcattttttgaatcatactttgactcagatgattttcgtcctgtccgagctggatgggaatctcatactactagttacaattcttcgctgtatattggaaaacagtacttttctggcgtgaattggataggaaaaatatataatagctatcctaagacagatgaaaatggtgccgctgtttatgttttcgaaaattatttcgatccagaggaactcaaaatttataaaggagtttattacggacttctattatttagatactaaaaatctttattatattatttgtgatattcagtcttttgtaacaattaaataacaaaaccatatattaactaagtattttttatcatatactctataaaattctatagttgtaacgttgtcaaaatattggaagatttcatcccgttcttatatcatgaatttaaaatccctatcttatgacaaaccctgcatactgtgaaacttttatttttgtgtataacccaatatgaattgagatcgatagaagagtaacgctgttttcggtctggcttagtaccctttcagattgatacacttggtgtctgacaccggtgtctgccaccggtgttcaattgcagcaaagcattgttttaaatgaacgactacagacgagtcactttgagtgtctggctgattttagtggctcaacaaggctttgctgcaattgaacgccggtgacggtcatcggtgtcggacaccagtgtcttagtctgaaagggtgaaacgaatatgacaatagactaccccagctaattgaaaataatatttcaaccacttagatagctatcgtccatcctagc

SEQ ID NO: 8006 - DNA, 1208 bp, Diabrotica virgifera
  SmartBlast Evalue=3E-19; Info=Interleukin-16 n=1 Tax=Camponotus floridanus RepID=E2ARU6_9HYME
ggaataaaaaatatatggaactatggaaactcttccaagtgactccagacagccaccagacggacacgagtttcctgaacatgacgaaagtcaatttaagaaggtctctattaatgtcaatctaataaatgacaggtttttatcagctgggcgggaagattctccgaaaccgaccaaccgatacttcattcaatctacttcaactactgatcttcgaccaaaaatgtacgaatctactgaagacctaaagtacagtgattttcttcccgagcccacacctctgtatacaagatcccagagtttaacagacgtttcctctttatctaaaaagaatacaaaatggaaccaaatgtatgagcagagaaggaaaggcctttccaaactgaaaggtcttgtaataccagaagcagcagaaaatgatttatctccaagtgtcaatttaccagaaattaaaagtcagaccccaacgatgtatattcctgtgccaaaactagacaactttagtagctccgaaacaatttcgaccagtgacgctgatctcttgcgaacttcaatagtaataccatcctggtctccaagcacgcctagtaatcttccgaaatattcaccagcgtttaagagaaaaagtctgcaagtgtatcctacaagtaaaagtgacagtgactactcgaataacctggattttcctatgaaatattgtgataaagttagccccaagggaagtaaagttagcgacgatgacttaaatcctcccaagtcactggagagcatttcctctccaactcgatccgactgcagtttcgactacataagctcttctaaaaaatacagcaagaataacggtgacagttttcacaaacaaagtggaagaatggaagatgagagcgacaacgattcagcagtaagctccagccaatctagttacaattcaagatattctcctccatcatctccaactaggtcttgtgagcttaaccactattctaaaaaattggaagaagatgacagaagtgctcagaatagattgttaaaaccttctagtgtcgaagccatcaacagaaaaaatatccttgcatctgcgaagtgcagaagtggaaaagacttaaaaattggctctccagtgatacgaagaaaacaggaagaggcacaacaagaaagtgaaaatcatctaccttaaaagtgatgaacaagaatttgctttgccagga

SEQ ID NO: 8007 - DNA, 1208 bp, Diabrotica virgifera
  SmartBlast Evalue=1E-84; Info="Medium-chain acyl-CoA dehydrogenase, putative (Fragment) n=1 Tax=Ixodes scapularis RepID=B7P7P2_IXOSC"
gaaattttttaaatatgtaaatagaagttatcaattatcatgtatttttttaaatacgtgtggcttctattgtaactactcaaatgggaatgagatgtgaaaatattatcagtgaaatcatacatgcattaaaactaaattaagccaaggtcatgatcaactaatcttttttccattattattaaaaagtgccatcattctcacatttatattgaattttatgcacaaacatgtccctaagttcaacctcccaaattttatgtaaaggaacaactgccataatttcaagatgttttagtttacataaacttccagaaactcataagttacttcaaaagacttgtagggactttgcagaaaaggaacttaagcccatagctgctctattagatagagagcataaatttccagaacagcaaatcaacaaattaggtgaactaggtatcctgggtatatgtgtatctaaagaatatggaggtgctggttatgatggtctaggtatggctgtagctgttgaagaaatatccaaaggatgtgctggtacaggggcaatagtttcaatccataactgtttatatgccagtctgctggacagattagggactccacatcagaaagaacaatatttaagagcttttactaaaggaactttgggatgttttgctctaagcgagccagatgctggaagtgatgtaggagcaatgtcatgtacagcagataaggatggagaccattatatattgaatggaaataaatcatgggtaacaagtggtttacaaggaaaggctgctgttgtatttgctactgtagataaaggactgaaacataaaggtattacggcatttatagttcctattccaagccaaggactgacattaggcaaaaaagaagataaattaggcattcgagcatcctcaacatgtaatttaattttagaagatgttaaagtacccaaagaaaatatttaggtcctattggtggcggttttagaattgcaatggaacaactggacagagctcgagttggaattgcagctcaagctgtgggaattgggcaagctgctctagatttggctgcacgttattcgctacagaggaaagctttcggaaagacaattagcgaactggatgctgtgaagttgcgcctgggagagatggctcttcgtttggaatcagcaagacttctggtgtggaaagcagcagtccttt

SEQ ID NO: 8008 - DNA, 1207 bp, Diabrotica virgifera
  SmartBlast Evalue=3E-59; Info=Rad21 n=1 Tax=Tribolium castaneum RepID=D6W9B8_TRICA
cataatctcctgcccaaggtgattgcaccctttcggacatattaccagctaccacatgttcatcatatcccatattcgccatctggttctgatcatatcccatattttccatgggtggtagttcattctggaaattatccaatggctccaacggtaaaccagtggtaataccagacgaatgcgccatgggtgtactaatgtgttctctcataagatcttcactggtatgcgccggcgtcatcggaggtacaccattaagagtttcttgctcttgtagtatagaatgtacttgatcggcaggtaaatgaggcatctcatccatatgatgtaaaggtgtgggtggcgcaggatatcctggagtttgtggatacatcatacctggcgtcgaaggaggtaataaaacacctgacatcataccttgtggagtatggggaggtatcaagtcttgtctcagttcctgcgtaggcatcattggcgtcattggttgtgcataaggcgtatgaggtgggaggggggtaggtgccgaagggtatggtgtccctggtggacctggagtatgtgccattggataaggagtcagaggtggtccaggcgtatgcgcagtgggatagggcgattgaggtggtaatggagtgtgtgcaacaggatatggtgattgaggaggaatgggtgtttgtgacatgggatatggagtttgagggggtcctggggtgggtatcgaagggtaaggcatttgttgaggaggtaatggtgtatgtgctgtagggtaaggagtttgtggcaacatactatgcattgaatcttcagagtgaagaaggggctgaggttgtggatcttcttgaatatgaagaggtgtttgactaggttcttcaacaacttttcgttttctacccctccttgctggaataattggctctggaggcactggctcctcatggtctctcgcttggtctaatgctaaagagtcagcatcgcctagtacactgaaatcctctgttccaattgctcgtaatgacaaatgcctttggtagttcttgaataaaatcctggctggaattagtcttgctggtaacgcgaagagtttctctacacctccagtttccttccaatgcataagtcttttagtcggtggagccaaatccaacgtcgtcacaatatcactagtatcacttagttggtttttcatttcctcgccggatatattttt

SEQ ID NO: 8009 - DNA, 1205 bp, Diabrotica virgifera
  SmartBlast Evalue=4E-17; Info=Chaoptin n=1 Tax=Harpegnathos saltator RepID=E2B834_9HYME
aatgatcgtaaataagattcttgtgttattatttcttcctttttgcttcggcaaaagtgtagaagtgacttttaaagatgtcacgttcaaaggctttagtgtttttacagaaaagttcaagaaaaagatcccgtctggaaacaaactagcagattttttgcccccgaaaactgtttatgatgccattgaaatgaaggaacaacatatacctgtacttaccaaaggctcgttggcagatctagaccagttggacgaattggttattgagtactgtggtgttgaagaagttgaatctggagctatcagtaatgtacctaacctaagaaaactgtcacttaaaggtaatgccatcaagtcgattgcaaaggacgtattttcccatttaggaatatctacactagaccttagcctcaatcagatatcaacaatccatccacaggcctttgacaacatgccggatctcttaaacattcaacttgctgacaatttcataacgcaatggaatccagaatggctcaagaatacaccgctattgaccaggatctcgcttcagaataattccatagaaaagctaccagcccatgcatttaaaaacatggtaggtgataaaaagtatggaaaaatagacctcactattaatctggtatttagtcataataaaataagtgagatagatcctgaagctttcgcggatctcagcagaattaacaacttgtggttagataacaatgttctagaaagtttcgatgaaaaccttttatcgggaataaaagttaatgatttgagactcaacaaaaataatatcaaatgtttagatggtaatctagataaaatactaaaagcagaaacgaaccacatagattcgaatccgttcgactgtaattgcttggagaagatcaaggaatggtcaaataaaaagaagaatgtggacttcacttttgctgaaatggagtgtacagcacaaagaataaaggttaagatgacagcactagaaaaaagattaaaggaattgaaaggagaacgggacatcccgaaagaagtggaagaaatagaagtttttgagactaaacctaaaaatagagcaattaaattcgtcagaatttaataagtatctgtacactagtttagtatgttctattttaaataagtcgttagttattattataataacgtaaatatttccaataaatatttcttttattgtc

SEQ ID NO: 8010 - DNA, 1205 bp, Diabrotica virgifera
  SmartBlast Evalue=2E-40; Info=Insulin-like growth factor- binding protein complex acid labile chain n=1 Tax=Camponotus floridanus RepID=E2A650_9HYME
caacaaagtagtgtgaaaagaaacatgttgattcttgtattttcggtcatcatgtttggtgttcaggctaattcactttgctcggattattgtgattgtactagtttaaacgtaagtgaatcagctaatgctaaccttagcgcagatatcaaacagtttttgtcggactttccggatataaatctaacttttgtgcgtccttatacaatagtgatcaaaaccagtgacagttcgttaaattctagtggaaactattcgtttagttgggttaaaactcttgttctcaccgagaacaatctcactagtgttccgggaatagtttgtgactttgtaactgtgcagaacttggatctatcaaacaatgagctagaaaattttaattcagactgttctaggactttaaaattgttaaatctcagttcgaactttatttccaccctaaacgatactagtttttcaaattcaaaagacttatacactttagacatttccaataactttttatctgctgtgccaagtttaaatctgccaaacttgcaatacttgaatctaagttccaatagaatcattgctctaactgctgaagtttttgttagtttgaaactactgcaatatttggacgtgtctcgtaacggtctcggtagaatagcgaccagtgaactgacaaatttgatgactttaataatggcgggtaacgtcgatctggccaacacgcgagatatctttttcttgggtcggaaaatccagaccctggacgcctcacaaaccggacttcaacaggtgccagcgattttaatccactccattcggcacttgactctccagatgaactttattcggacaatcaacggtggggatctggattcgtatcccttattgaactctctggacgtcagttccaacgtcataaagtttatcgaagaggacgctctggggagactcgattttttgtccgtcctttatctcagcgacaatcaactcgtggaaatcccgagaaggctacctgaaaaactcaaacttctcaacttgggtattaacaagattggaaagataagaaaaaaggattttcgaggcttgggaactctcgaaacgctctttttaaacgacaataacattaccgtaataaatgaaggggcttttacagacttattatcgctaaaaagcctggatttatccagcaatcctataattaatctccctccagg

SEQ ID NO: 8011 - DNA, 1206 bp, Diabrotica virgifera
  SmartBlast Evalue=1E-91; Info=Cyclin dependent kinase 4 n=1 Tax= Bombyx mori RepID=D2IGZ3_BOMMO
gttcggtggtgaatggtggttggacgttacgttaggggttaaacggtttatttttgtttatctttattttttgttaggcttatcatatttaagttatataaacaaattaaattaacccttaataaacagataaaagatttgtcggagctatattcaatttaaatatataattcttgttgtaaaaaaggtttaattttttacacaaaatgtcagcagatgaaccttcatatgaaccactcaatagaataggaagaggtgcttatgggacagtgtacaaagctagagacagaaaaacgggaaaccttgtagccctgaaacgagtatgtgtacatttaacagaagatggtatatcattaaacactttaagagaaatatccttgttacgacaagtaaactcctttgatcatccaaacattgttcgtcttttggatgtgtgtcatggacaacaaatggaaaaagaactcataatgtatttggtatttgaacatgtggaacaagacttggcaacatacatagacagacatccaaatggattcagtacaatacatatcagaaatttatgtaaagaaattctaaggggcgtggattttttgcacagcattcgagtcatccatagagatctgaagcctcaaaacttgctggtcacccatgatggacacatcaaattggcagactttggtttggccaagatctacgattgtgaaatgcagctgacatcagtagtggttacgctatggtacagagcgcctgaagttttactggggctggcttatgctacaccagtagacgtttggtccattggctgtattatcgtggaactgtataatttgaaaccacttttctgtggtacttccgatggcgatcaactcagtaaaatatttagagtgataggtaaaccatccgaggatgaatggccagaggaaagcgtttccataaaatgggaatcttttaacgtcattaatcaaattaggattgaccaaatatcacccactatgtgtgaaactgtatgtgatttgataacgaaaatgctcgtttttgatccaaagaagagactgactgccatggacgctttaaaccacaagtatttcaccgaagaaccgctaaatacgtaactgacacaattcttatcgatactttatgctaagattatttaattttaagtgtgatttagtggttacactttatttattcttaataaaatgacta

SEQ ID NO: 8012 - DNA, 1196 bp, Diabrotica virgifera
  SmartBlast Evalue=3E-16; Info=BET1-like protein (Fragment) n=1 Tax=Harpegnathos saltator RepID=E2BC20_9HYME
tttttttgcttttttaaaagctacatttttgctaagaatatttttttttcgatacaattacttgaaaagtatcgacttgttttttatagttagtcagttgattcattttggaatttactttaaacgcgcggttttttacccccgagacgggttaactgtaactgtcaccccccaagtaaaagcaaacaatgatacaagttcaactttgaagtagacagtaaatagaacctaaaattagattttcatgcaattcgaaggagactatgaaaattacactccaaaacggtcatttaaattactgggctattgttgtttatttgtcccgatctacaaccttaaatcccgatctgtttttgcttatgtaccgattaaaaacagatcggacctggcaacactagtcgtaacacactgtggcaaaggttcactacgggacatatatgcctcgtaacgcagttaacataagtttataaatatctttaaacgcagccaaggtgttaattacacaaaacgtaataaaaatcaagcttaattcccaagtaacatgcaccaaggatatacctaaaaccgaaagtaaaaatatacagatcataggattatttaaagcaaagtggtcattagagacaaatacattcaacaaacagtctattatagttaccccttgaaattattatacaaatccaatagaatttaatacaaatatgtcccactatgtatatgttacagctcctgataaataataccaactatacaccatctacctaaacttaataactagatacagaataaaaaacaccactacagaaaacacaaataaatacaggatgaggtaattatgagatcctttcgataatctcagtactcttgacatggtggtgcccaagaagcctccagtcttatctagatcgtcgtccacatctctgagcattctgtcctggtatttaacttcgtttccaatgtctatagtcaacgattttaagacaccaatcttttcttgcagatcattagtcattctatcgttttcatcttcgatttcgttggaagcttgaggtaatggctcgtaataattacctgcgtgggctctcctcatcttgtaggctgccacggttaaatatgcctttataactttgaaaaatggagaaaatatgtatttacaaaactttgtattttgtatgaagattgattgacgtgtactataa

SEQ ID NO: 8013 - DNA, 1206 bp, Diabrotica virgifera
  SmartBlast Evalue=1E-66; Info=AMP dependent coa ligase n=1 Tax= Aedes aegypti RepID=Q17P68_AEDAE
atgtctctgtcattccataaccctgtactattttggtttttggattttgagctttttctaaaaatctctgttcgtcagaaaatcctaaaggtgcagctccacacgttaacaactttagattcttaaaatattcacttttaactaaaggacttgaagttaggaataatactaatgggggtgctgcataaattaaactaatgggaaaattcttcagaacagatacatacaagtctggtgtaaatttttctatagcaatagtcttcaccccattatttatcgttgtaaacaatgtcattgtgagaccatatatgtgaaagaatggaagaatgccagctgtaacatcttggtaactatctgttggtgcctcttgataattgtaatcgtcgtgtttcatctggcataaattagatacaatatttgagtgagttaattctacccctttcggtaaaccagtagtaccactggagtagggcaagatagctaaatcgctgggtaatacatctacgtcaggtacatctagattggtgttcaaaagctcatcaaagtcgatgattcctgaaggaaggctctcgttttgcgttgatttaattgctacaattggaatagttgttttcaaaagatctaagctggcttttactgtaggtatagatggtgtttgagttattattactttcgcagatgaatcttgaagctgtcgtgctacttccgctggagtgtatatgggattcagagtcgttacagttaatccagcgtcgagtatgccaaatattgcaatcgcatactctgctttgtttggcgagaagatcgctaccacatctcctttttttaatttgaaaatatgtctaagcgctctacttaaagttttacttttctttttaacttcaccaaaggtataacttcttcctgttgtagcacacaccattgcagtatatttatgaaacttgtccaaactgggataaacaaattctgggatagaaacatttggaatgtccactgtagttccacaggtcaaaattttagactgtccgtcagatgtacccagcttcctagtataaacactaacatatttggtcgcgctcaaaatatttttttttattattcaaaatattcttgaaaaccttgaccgacattttgcttgggcactcaaacactcagtaagattaatctacttgtttttcatgttatcaatcacacgagaagactgcg

SEQ ID NO: 8014 - DNA, 1205 bp, Diabrotica virgifera
  SmartBlast Evalue=0; Info=Draper n=1 Tax=Tribolium castaneum RepID=D6W8W0_TRICA
aacaacaccgtatcctccttccgtagattgctccacgtggcgcactcgccctaaaatgttggattcttcacagtgatctcctatgaatccgtgtttgcagatacagccctctactggatgacagataaagttgtcgttctcacactcacaaggtgtcatgcagtggtctccatagtaaccctctggacaaagctctgtgcactgcgtaccagtccatccagcttggcatctacacactccatcgtttcttctacatatgcctccattcaaacacttacaatgctgactacagttcattccgaagcttcctgaaggacaaggagtcgtgcagtttcttccaacccatccgggaaggcactggcagtatcctgtaacatgatgacagtcaccaccgtttttgcaagaacaggtctgtaagcaattctttccgtactttcctatggggcatgggtgttcacatgtaaggcctaggtatccaggagggcaaacatattctccggttatatgatcacaagttttgttcccttgagaaactgctgggcacttttgtctacattctattccataataaccactttcacaaggagtagtacactcttctccttgccaacctctagcacagtagcattttccggtctctggatgacaggaactgttatttttgcaatcacaggtttgttcgcatgtctccccgaacttgccttctgggcacatagattcacacatgacacctttccactgcggtttgcaaatgcactttccagtgacaggatcgcatccaagattgtgtccatctagacaatcacacacttgctcgcaattgattccaaagtagccttggtcgcatttgctttcgcaaaattctccagtaaatccagcaccacaagtacaagtaccgttaacaggattacaagaagcaccatttttgcataagcattttttgctacaatgaacaccgaaagaattgtcgctgcatggtctatcacattgctgaccctcccaaccgtctgggcactggcactgacctgtttcggaagagaaatttgcaccgtttttacagtcacatttttgagcacaatcttctccaaagctaccttcaggacacatcttctcgcagtgtttaccggtaaaacctggtgggcagatgcaagtaccatttacaggagaacattgagcgttgttctcgcatttacactgttcatggc

SEQ ID NO: 8015 - DNA, 1204 bp, Diabrotica virgifera
  SmartBlast Evalue=7E-81; Info=Protein phosphatase 1L n=1 Tax= Camponotus floridanus RepID=E2AKW4_9HYME
gtgagtatatttcattaatttaattgaatggtagagtttacacttaaccttaatctatctaatacaaattctatgacgaaaatgctgtcctaattatctgcgacctgtgttacaaaatcctcaaagatttgtaagatggaagacgacctagacgacaaaatattctaccaaacatacgtttcacatatgaaaatcatgtcacgagtatcatggactgttcccttaaaactctctcacataacattctcttcacaaatttggaggcagctgaaaatctacgtcttcaagccggagtttttgatttttggtatgatgatatttttgtattcatatacattcaagctgtagatgaatggagtcgaagtttattgggaaagttccagtatagtatcggtaaggcaacatctaaatccaaaatcgagaagcttagctttttcagtaataccaacatcgaaaaatccagttgggagatgaaggtaggtaccattgcagcttacgctctacagggaagacgaccaaaaatggaagacaggtttgtgataaacgataatatcagtaatacaggggttgcgttatttgctgtgtttgatgggcatgggggagaatttgctgctacatacgccaaagaaaagcttatgcagaacttatttaataaagtcatagaaattaaaggtataatatctggggattcaaccaaacgtgtagtacctgaagaagaaaaggatgaggaaaagaaagatcctgaaaagccagttactcctactatttctcagcgcaggaagagttttagaaggactaattcaaccacagacgaatgtattgaaggaactaaagaaataacagacttgcaactgttatcaaaattagatagcataaaacccatatcaaaatcttcaaagccactgaaaacaaccccaagctttaaaaaggtgcctgtcaataattatttcgacaaatttgggatcgtgaattatgaaaaattattaacagatgaggtactagctgcagatgagagactactagagattgcaaagaaaagtttagatgttgcaggtactacagccctaatagccatattagaaggcaatagactgatagtagccaatgttggcgactctaggggagtaatgtgtgattcaaaaggaaatgctattccgttatctttcgatcacaaacctcaacagatgagggagcgtaaaagaat

SEQ ID NO: 8016 - DNA, 1204 bp, Diabrotica virgifera
  SmartBlast Evalue=9E-41; Info=Isoform 2 of Sodium/potassium- transporting ATPase subunit beta-1-interacting protein n=1 Tax= Drosophila melanogaster RepID=A6MHQ4-2
ctgtctatgacttattttaacaaaatcttatgacggagtgatgggaaaaatctagaccaaacaataaaaagtaacaacattttctcagctcattaatgaagatgaatcataattatccagtgcgttgcctgcagtcgtaatgtacaccttgactttctgccaaagatggttgtgaaatagttgtatctgtatcctgtaagtagaaataacaattcagacagtaatcagaaacaattaataattaatgccatgggcatttgttcaagaagaaacgttttcctttcaatatgctttttgcaaatggtagctgtggtggaaagacaggtgtttgatttcctgggttttctgtggattccaatattagtcaacttctttgaaataatatttatcatatttggtttttttggtgcttaccaataccgcccaaaatacatcatagcatatttattatggcaccttttctggattggctggaacatttttatgatatgtttatacctaaatgttgctggattagaccatgagaaaaacaaagtgctcaaattagatttaagcagtgatagctggtggaaaaagggtggaccaggatgtagagttaaaaatgtagattctgaagaatatgagggatgtttaatcaattatgtacatgtggaaatagtccaagctggtattcaatgttttttaactgtttttaacagcatcattggaatatgtcttagtcgtatgttcatggaagaagatgatacctttaattatgagaagccaaatgcacctgacagtattttattacatccaaagtatgtgaccagtgataaaatgtacagttctaacaaatttctgcaccaatctaatagctatctgttttttgaccaagacaagcataaacacactaagcacgtccatgcagattctatacgtgatttgaaaagaaggagtaactcttttagtaatgcgggtttaagtgggaagaagggttcaaagagacctatatctttatgttcagacacatacttgtatatgtcatgatagcacatttataattattgttgttagttctagtcattatttttagactgataaatatattttaacgtgcgaacagatagacttatttacgtagccaggtagtttttactactggtattatgtaatgattcattattcaggcttgtaggtcattttgattgattaatcaattaattaa

SEQ ID NO: 8017 - DNA, 1203 bp, Diabrotica virgifera
  SmartBlast Evalue=1E-152; Info=Glycerol-3-phosphate dehydrogenase-1 n=2 Tax=Bombyx mori RepID=Q68AX4_BOMMO
tggaatcgatgcggtctaatttagaatccatgtgctcagggtggttcttgatacagctgatgaactccgctggaggaagctggccatcacagatcttgtaaatcgatgtgaatagggggaactgattttccatgtttttgctctttaacatagtgttgacttcttctgctgtgaaaggcccttggagtttttgtccgttcaacatctcgtcttcaagttccttaatagttttacccgttttaacgaaggcctcactgacttttcggtttctacctccataacaggtagtgataaggtcggcaacaccgcagctttcgaagaaggttgccagttttccgccagggtaaaatacgtctacaaacttaaccatttccatcagacctagacggatgacagctgcctttgtgttatctcctagaccgagaccgtccacgaaaccagcaccacaagctacgatattcttaagagcaccgcaaacttcaacggtatcttcatcgtcaacaacgaccactctgaaatagtcagtctgaatgatatcccttaatagaggcccaagtgatacgtctttgcatcctattgtggtttcgcagaatttttcgtcggctacttctcctgccaaattggcacccataaggaccgagcaaggaattttcaaatggcgtgtgatgatgtgggaaattaggtctataccgccaccttttgcgcggtcgaatccttttataagtgataatgctactgcagtaggttttatttttcctaaaagtgtagcgcataacgtcctgatgaactgatgaggcaccacgaagatcagaacgtcggcgtctttggcagcgtctacaacatctggtacagcgactacgttgggtggtaacttatggcctggaagatatttaacattttcatgagtttcattgataatttcagtcagctttttaccatttatcatctcttcataaacatacattgtgactctaggatccagattatccaatcgctccgcattgttacctacaatctttgcaattgcagagccccagttcccactgccgactatacatatttttttaggttgtgtgcaatcgctgtgtgccattttgacgtatcgcaagttggaatttgacgagaaaaaattaaagttctgtttgccaggcttggcgcgatgtaactgctcgtgctcgttaaacttgaaattgctaactagcg

SEQ ID NO: 8018 - DNA, 1201 bp, Diabrotica virgifera
  SmartBlast Evalue=1E-144; Info="Titin, putative n=1 Tax= Pediculus humanus corporis RepID=E0VID6_PEDHC"
gaacccagaaagaaatctctcgagcctggctcaggtccaggaagtcgtagaggatctcttattcctccagaagccatgggcagacgtgccagtcttatcatctccgatgaggaacgtaggaaacttcgtccaggagaggttttagaagacaaaaagcgtcgtcgtccgagctccgacgtacgtcgaccaagtttagctgaattggaggatctcgtgaacaaaccctcgactcctttgaaaccttccggtccaaagggagcagcacctcaaattgtcgatgtccaagaaaattactcctcagttgaagatcaaactgcttacattactatccaagttgagggtgatccaccaccgacattcaaattctataagggtatgactcaacttattgagggtggtagattcagatttgtaaccgatggtgaaacaaacttgatcacactctgcattagaaaggtaaagcccaatgatgagggtacctataaagttgtcatagccaacgtccatggtgaagactccgctgaaatgaccctcttcgtagctggtgctggaggtgttgatttccgttctatgctcatgaagagaaagtacgccaaatgggataaggataaggaagaccccaactggggagacttaaaagaggttgaaaaaccagtgccagcattaaaaaaagtcgaaaagaaacaagaaagtttccttaaaccattggtagatcagttcgctaaagaaggaaaagataagaaagttgtgttcgacgctggtttctcaaaaaccaactgtaaaccaaaatggctgttcaggaaagacgaacttttcccaggatctaaatacaaatttaagaatgaaggtgacgtgtaccagctgatcatcagcaatcctaaagtagaggatactggaaaatacacaattgaaatcggaggagtcagctctaccggtttcctgacagtagatgaaccagatccatgttacacctttaccaaagcactgagaaaaaatatgatggatacaccaaacatgaagttgaactggcttgtactgtaagcagtagtttggccattgttggttggtataaaggagagacaaagttggaagataatgataaatttagtatctctaaagatattaacggagtctgtagactgactattaaagatgcgacatttgatgatgctggtgattacacctgcaaactagaaaaaca

SEQ ID NO: 8019 - DNA, 1195 bp, Diabrotica virgifera
caatcgtaataacaataattgttggtatgtttattgtcattaataaaaaacgtaagattgagaagatacctcttcactaaacgtaaaaatgatgatagacttaaaaggaacactacacattccatttttaaaaggtttctttgattttaaatttctccatcatttgaaaatcgccgtagaatttcatgtctattggactcttttggatcaaaattccgaaatccatttctaaagatatgggacgattcgatacatcatctttctcactcttagtcgccgcaggagctgtcttgctactagctagttgtgtaactctagctggaagtaatggtggagtttcctttttatcatccagagttattagtctaggaggtaattgaggaggaaccgcttcgttatctgaaactgcataaatgtcttcacttgagtcttcaccatttagatctgagtaaatttctccagtagaactcggatttatttctgaagactgctgatgttctgtcccattatctgtgctattcgtacgactactgattctaggaagtggcagtggtggttttcttaaggttcctgttcgactttctatgcgagtttgtgtaacattttcaaatatacttttccattccttccatatttctgaactttctacagctagcagacagctggtctgcgagtgtttgtccaaatttgagtattctgagaaatcttttaagcatatcttattttcttcgggaaatgttacgttcaaattcatgacttctatactactgtgataccgaacattttcgcttatatcatccactgtcgttataataagcaaatttttaaacaaaaataatattccttcactcttaataggttccaaaattgtaaataattgttttttctggaatggtccaaggtctatattattaattggaatatttgtaatcaattggctaatttcaaattcattttctttcgttagcaaatcttttttgacgattggtgttgttatatttgtattacttgatgcttcttccatttcatatgttgcatgtatatcgttaagttcttttaagctggcttttctttcaacatttctacttggagttggcatgatattttccagatagccatattcagtttcctgatcttcttgggaatccaattattttttagagattttcggggaattgaaaagggcaatattgat

SEQ ID NO: 8020 - DNA, 1201 bp, Diabrotica virgifera
  SmartBlast Evalue=2E-53; Info="Potassium-dependent sodium- calcium exchanger, putative n=1 Tax=Aedes aegypti RepID=Q17BT5_ AEDAE"
ccgaggcaacatgtcaagtgtcaaattcctctgcttggtgttcctggcagttgcgtgttcatcgtgttgtgcagaacctactccttcacaatcaacggcaagtttcaaatttgagaataaatatatcgatgcttcttctgttactaacacccgccacaaaagacgaatatttttcataccgttcgccaaaccgttaaaagggaatggtacagacaatgcaaccagcgcatgcaaagccgacgatggtgatgattttccatatttcatgtcggaaaaaactgttctacatggtggtgtagtagtggttattttaattggcatctatggattttctctgttagctgtggtgtgcaataactatttcttaccctgtgtagaaaccatttgtgagaggctaaaccttacgccagatgtggctgcagccacatttatgtctatagctacctctactcccgaattttttacgaatgtaataggtacatttgtaacggaatctgatttgggtattggtaccattgtcggttcttccttattcaacgctcttggagtgccagccattggaggattatgtagcccattccctctcaaattagattggtttcctttaaccagagactgcattatctaccttatctcagtaacagttttaattgttatcacatgggacggaaaaatcttctggtacgaaacactaatacctcttacagtttacataacctacttcgttatcatgttcaataataaacgtatagctaaattcgtcaagagcaaaatccgacggaatacagttaagattaattcagagataccgccggccacagaaagcgctaacggcgatataagaaaacttagtgagatttctgaaaagaagttaagtagtaagaaacacagtgttgatgaacatgacgctccaaagcactcaattatgtcagcgtatggtacgtatatggagggtgtcgataatcctgcgtttgaaacggagcatcagaaagtccttgaagcaattcaggaggaagcgaagaaagaggccaagaaatctatattcaggataccaacaggaaacgcttttaaacaggctttgttctactatacttggccaatcaaactcatcctccaatatacagttcccaacccccaaactcatcctaacttgtatcctgttacatttatcatgtgtatcgtatggataggagtcaactcc

SEQ ID NO: 8021 - DNA, 1197 bp, Diabrotica virgifera
  SmartBlast Evalue=1E-157; Info=Vacuolar protein sorting- associated protein 35 n=1 Tax=Camponotus floridanus RepID= E2B0Q3_9HYME
aacagttttccgattgggattgggggcggtgtaatttttttctattattaaatcgttccaactgtttgtttacaatgcctaccaccccacctcaaatttcgcctgtagaagaacaggaaaagtatttacatgatgctttgggcattgttaaagcacaagcttttcaaatgaaaagatcattggacaaaaacaagctgatggatgcccttaagaatgcctcagccatgctagccgaactcagaacttctttgttgtcaccgaagagttactatgaactgtatatggcgatctctgatgagctgaggcatttggaattgtttttagtagacgaatttcaaaaaggagtcaaggttcctgatttatacgaattagtgcaatatgcgggaaacatagttcctcggctctacttacttatcaccgttggtttagtttatattaaaactaatagttccttgagacgagatctgctcaaagacctggtagagatgtgtcgaggtgttcaacatccgttaagaggcctatttttgcgaaattatttattacaatgcactaggaatgttttacctgacactccagattgtgatggtgattgtccagaaggaaccgttaaggattctatagactttgtgcttatgaattttgcagagatgaataaattgtgggtgagaatgcaacatcagggacattctagagataggcaaaacagggaaagggaaagagaggaattacggattctagtagggaccaatttggtaagattgagtcaacttgagactgttacattagacaagtatcagaagtcagttctgcctgggattttggaacaggttgtgagttgtagagatgcaattgctcaagaatatttgatggaatgcatcattcaggtatttccagatgaatttcatattcaaacattgaacccatttttgaagtcctgtgcggaattagaagcaggagtcaacgttaagaacattgtgatatgtttgatggaacgactggcttcttttagccaaagatcagatgctattggaggagaagggggaaatatccttaaagaagtccaactttttgaagtattctcaaatcaggtgtcatcaattattgaaactcgtcagtacttacctcctgaagacatgattgcacttcaggtagctctgattaacttggcacttaagtgttacccagataaaattgaat

SEQ ID NO: 8022 - DNA, 1193 bp, Diabrotica virgifera
  SmartBlast Evalue=1E-106; Info=CDK5 regulatory subunit- associated protein 1 n=1 Tax=Harpegnathos saltator RepID=E2BU72_ 9HYME
tataaagaacaattggaagaattccttctggctactgaccttatatcttcaagtacgaaatattacagatgcgatgaactattcagcacaaaggaggtgtggcaaaacgtcaacgaccaagacagaagagacatctacgatgacgtcatgttttctttggccaagcgtgagaaagaagatgccaagaatctgaaaaagcgcaacatgaagaaactgtccgaagttttagagtgtatgactaaaattaactatgataccacttggagtgaggcccaggtgtctttgttagagaacagcaccttcaaaaatgacgtaaatctgctcgccatggacaaagaagatgcccttatagttttcgaagaacatatcagggtgttagagaaagaatatgctgaagagcgagaacgagagaagaggagattaaagagacaatgtaggaaaaacagggatcagtttctagcacttttggatcatttgcatgaagaagggaaattgacttcgatgtcgctttgggtagagttgtatccgattatttcggcggatattcgattttctgcgatgttaggtcagaacggttcaactcctttagacctctttaaattttatgtcgaagatctgaaggcgcggttccacgacgagaagaaagtaatcaaagacattctcagagaaaaagcatttgaagtacaaattgatactactttcgatcaatttgctactgtcatctgcgaagacaagaggtctgctgcgttggatgctggaaatgtgaaattgacatacaattccttcctagaaaaggctgaagtgaaagaaaaggagagactgaaggaagagagtaaacggatgaagaagttggaatccaatttgaaggagctcttgaaagagatgaatattgatttcgaattgccttgggatgaggttaaagcaaaattggaaaaggaggacgaatttttagcgtttgaatctgacagtgaaagacaaagagtctatagggaatttcaacatgaaatggaggaatcgtgcagccatcaccattcccggtccaagaagtctaagaaaaagaagaagaaggtgtacaaatcctcttcgagcgattcctgtagcgataaacataagaagtccaaacacaaatcgaaaagccctacgccttattctgaagacagcgcagacgactatcggaagaagaaatcgaagaa

SEQ ID NO: 8023 - DNA, 1192 bp, Diabrotica virgifera
  SmartBlast Evalue=6E-45; Info=10G08 n=1 Tax=Ips pini RepID= Q5FYF7_IPSPI
ctctaattataactaaacagttacataaacgtgtattcgattttatttgtcatccttgaacaactgttaacagtgacaatggacgaaatacgagatttagaggaacttttgggcataaaagaagaagtccgaaatgtagatataacatcactcactgcaccaggagacaattttggcagtttaatgctaaaagtggacgtaacactgaaggacaaaattttacacctagtagctaaaaaaatcccacaaagtgttttgtatcaaaaaatatttaatatacaggtgacgtatagaaaggaggttgagctgtataaaagtattgttccgattttggaagagtttgctaagaagaggcttgaattttttccacggtattatgcatcccggtataacctaaaagacaacgatgatgtgatcgatgaagatgctgtgttagttttggaaaatttagctgttttgggatacagaaatttaaataaaaaagaaggattcgatctacaaaatgccttattatttctagaagatctagcgaagtttcatgccgttcccctagcattcaaattgaaacatcccaatgaatttgacgagaaaataaaaaaactgtgtttcaatactgtcttcactgacgccaaaagatatggaatactcaatgaagcttctagaaaaatagtatcagagtgtaacagtatttcgcatttagcagacaagattctttttctcaatgtgaacaatatgcaacccgtcagtgatgcttatggaacactaattcatttcgatctatgggtcaacaatattatggttaatcttaaagacggaagatcagttggcaataaattagtggattttcaagtgtatagttatggatcaccagcatctgatgttttgtttttccttctaacaagtcttcaaggatacgtcattaaagaacatctagatgaacttattaaacactatcatgaccattttgttaaatgccttcagggatttggctgtgatacggactttacactttagaaagtttgttagaagaactcagaatccattctaagtttgaatatggtcatgctgtattatatacgactttttttattaacgctgacaaggtaagcgaagatgaaagtacgcgtggggatccagagaatatgattaggggaattactcaattggctaaagtaaaggtgtgcttgattac

SEQ ID NO: 8024 - DNA, 1198 bp, Diabrotica virgifera
actggaacagaataagaggcagacaaacatgagtaatcctagtcgcgcgaagaagaagaagaagacattggaggcaagtgccaaggttaggattgacgatcaaagagaaatattagtagaggtaaatgagtaatgcaggattgtgtattgtctcctatgctgtttaaccaatactcggaactactattcaagaaagcctggaaaaaccttatcaaaggaataacaattaatggagaagaaatttctaatgtaagatatgcagatgacactgctctactaattgatacagacacgaacacagagaacgtcttagaccaacttaatgatgcttgtcaagagttcgaaatgaagattaacgagaaaaacgaaaataatggttaataatagctataatgataaatgggaagatattaaaacaggtaaactattacaaataccttcattattaactatacatgaatatatggggaatattgtaaagaaacattttttgtcttggcttcggaatattagaaattgaatagaactaggttttgaataacttacgtatagctaaacacaaagaaatatttttcaccacgaccgctaaccgccgatgatagagatggtacatgaagaagaataaacaaatacggtttctttttaaaatccgtcacatgaaagtaagtaacttcagtagtagttggtattattttttagattgagtggacattaggtactttcaaaataaacttgataacatagcagtgtgagtgtggcgacacgcttcaattactattttactattttttaaatgctaattttaatttttcatttttaataacttttctcaaaacgaaagaatacgtcccatgtaaaattcacatttcttttggctcataatatctatataaagaaaccagatgttaatggcctgttcagtttatgtatgagaagcacaaattccataatagattatggtatcagattagccatcctctttatgtcaacttcttaaaaactacagaaatgttttcagcttttaaaacgccagatctaataatttatcgccttttctcgccatacggtagaaccacatacataatgacatattagcaattgtggtctcgttcagtcgattcacagcctcccgtcggtagtcacaccccagcgggcgtcgggataggtcaacgacgcactcttacgagatataagcaaa

SEQ ID NO: 8025 - DNA, 1198 bp, Diabrotica virgifera
taaaaacacgttttcatttcagacagccttgtctgacagtttgacgtcacaaaattgggaggagcttaaagacttaatgcttatgacttcaaacaatttccattaagaagtgtttcatttattgtttaggtgctttgtgtggtaaaataagacttcatttagatatttagttgaagaaacttgttaattaagagattttcattagtttttctcaagtgagtaagtttaatacaataattcttcttgaaaactgtttgacgttatgttttaatttgttttggatatgttatcgagttcaattaaattaacaataaattatttattaatttatatgttgtttcaattttaacacagtaagtatatgtatataaaaagtgaaaattctatacattttagagtcttccaatttggttttacttttagcctatgggctaaatttaaaacggttaaatgaaaaattgcaataccaacaatgcccatacgaataaaattattgtatatctttacaaccataaaatgaaacataatctaaaaacgacataaaaactacgtttttgatatcacgtatttaaaaggtgataaaaatgacgtcaattatggtgggacatattcacgtgactttcgacgtcgaaaaaacatgataaactgacgtggtttggtgataaatatgacgttttttcaacgttttgtaaacgttatttggttgcctgggtagttacttgaaacagggttaaagatgcaagtggcggcgggacctgtccgaaaggacatccctggcaaaaattccatacgatattattattattatgtacataagtcagtcacctcagaagccacaaagtacactgaaagaaaggtatcttcggtacgttctgcccatcatcgatgtaaacctcgacccccgacctccaccgcgcacatccatgaatctccgatgtgtccgtacccttacaatcaccagttgagtatgtacattactgtctttaaatttcgagtaataaaaaagacgtttatagatagttctaaatagtagttcacttttctacagagtttaaaatataatccagatatttaggaagttgaactgtatagacaatagtaaactctgaaagtatttatgaacattttttgtttgttaccaacactttgtattataatatgtaattattttatttgtgcatgtgtatgttgtatattc

SEQ ID NO: 8026 - DNA, 1196 bp, Diabrotica virgifera
  SmartBlast Evalue=8E-18; Info=Isoform A of Transcriptional adapter 2B n=2 Tax=melanogaster subgroup RepID=Q8I8V0-2
aagaatactgaaatggagatagcattaaagttatcaatagtagatatgtatgctaggagattaagggaaagggctcgtagaaaaagattagttagggagtaccagttagtggcaaaatactttaatatgaaaaaagatcctagtaaaatgctacaatttacaaaggaacaaagggaattacgggacaagtttcgagttttttctcaatatctttcatgtggcgaacatgaccgtctaatagctagtttagaaagagaaagtcaactgcgtcatagattgtccgaacttctgaagtatcgtagtttgggtcttaagacacaagaagaaattatccattatgaacagcacgttattcacgaaaggcagcagatgttgaagcaaaccaacaaaactaatagcaataccaaaaatccgggatatgttaaaagaactaagttgtaccaatttgcataccatctgggacaacaatggctttctactacaggtgttcctcctccaaagaggaaaaagagaagatcaaaacaccggttccaccgaaagaagattcacgttggaacaaagaggaagatgcgacatcagcagttactacttcaacagcaactggaactaggatagctccattcgtttctataactttgccactaattttcagaaacatttattgacgaaacgagtggaatgtttagatatttctacgagtctaaatgccagttaagactgaccttattacgaaagtagtacaaagtttttacctagtgtagtccttcactgcaacaactgtttaccaagtctatcgaataattaattgctcatacagtgtgtctacaaattcatggtgctgttttacatgtcgacaatttgattcaatttctgtactttggagctcaatattcagttaattttcgttaatattcagttaaaaagcaaaaattcgatatacagcgtgtttctttaagaatgtccaatctcggagttggagattctagacctcaagatattgagatttaactaagatctcttaatgaagtgtggctccttacagagttacaggctgttttatttaaaaatttaaacactatttttgctcggtgttttagaactattcgacatatccttttcattcttggcagaaactgtaggtattatacaccctatgaaagtatgttaaataaacgtttctggctattaatagaggc

SEQ ID NO: 8027 - DNA, 1198 bp, Diabrotica virgifera
  SmartBlast Evalue=3E-19; Info=Eph-like receptor tyrosine kinase 6 n=2 Tax=Danio rerio RepID=Q6NZS1_DANRE
ggtaatcgtaatcgtaataggtttataaataagtttcttgtcttgtttcttaaaacttaaaattgtgcttggcgtttgttttctgagcaaatttaatttgggtgtagttttataaacagcttaaaacgaagagatacctctacaaaaaaaaaatgaatccatttttaaatcttggtatgtttgaacaaataatgtttcaacacgcagctgcacaaattcaacaagcagtggaacaaggcttcaatgcacatttcacagctactgacgatgacgatagtactattgattttgagccgatggtaccacaaaaaaggattatgaaccgaagatgaccgatttggaactattagaaaaaacggtgtctatgatgaagtcagacaaggattttttattgatttgcaaaatattttgaaggtctgtgacgatcctgaaaaatttaaaccagaaaatttagccgtattaagaggttttgctcaattgctagacgagattagcgatgataattgcgagaaaccattgaagtttatatctgcaactttatctgaacgctttttaacaaaggaacttcttaaatttactggtactacagataaagtcgaggaactagcatacttagctcgaggaggttttggacttatatttataggaacacttaaaaaaactgatgggtctaaagataaggttatcgtaaaaagatcagtaccaggaaaggaggcatttttaaaatctgaggcaacaattatgagtcagttggatcacaagaacatcatcaaaatgttgtcgtttgttccagattcaatggaaattgtaatggagttcatggaaaataaaagattagatacatttttggaaggtgtgaaaatagaacaaaaaaatattttataatatgatattagacattataaatggtatggaatatttggaacaaaataaaatcgtccacagggatttgtccccaagaaatatttttgtgggttcaaatatggagtgcaaaattggagattttggtttcgctgtcaaagttactaggccagacggaatctacaaagaagagcatggaaagttaacaggacatcatataccacaaaacgttttaataagtcaagaattttctacaaaaactgatatttggtcttttcggattgcttgtgtgggaaatgcactatctcaaatttggcggtcctttgttatgttaatg

SEQ ID NO: 8028 - DNA, 1193 bp, Diabrotica virgifera
  SmartBlast Evalue=3E-86; Info=Ablim n=1 Tax=Culex quinquefasciatus RepID=B0WN17_CULQU
cgggaaaaatataaacaatggaaagcagctaaccttgaccctaggaacgcttccagaactccatctgcaaagaaagagcctaactatagctttagatatgataacccaattggtgcaagcccttctaggaacttagaccatcagagacccttcgacgatgacgattttgataggtctttgagctgtcgttcatctatgggtcgatctataggtgctataccaaattacaatgtagtatcagcgttacgaacggtacctaaacctggttacgggctcaaatcgtccactctatccagtagaaatgaatttggtgattattcatttagtggaatgggtactaaaacttatagtactgacttcagttgcggaaagtctgatatttcaaccgggtccataaccgatgtcgaacgacgtgctatgaattgcgaaatgccattatcgacaacgtacactggtggtttaggccgatatcccactggtggttatgcttctcaacaggtgcgacgctctttaccaaatatggctcattcaatactgataaatgaaccagcaaaaatttatccttaccatttactagtagttactaacttcagattgccttccgacgtcgatagattaaacttagagagacatctgtcagatcaagaatttgaggcgttattacaaatggcaaggtcagatttttaccggttaccacaatggaaaaggaacgaaatgaaacggcgcatgcgcctcttttaatagaaatcaagaaattaaatacatgtttagaaataatacggtgctgtaaagaaagtatgaatgattttcaatgcagaatgcacaggaatcctaattttactcaaagaaaaactgaactcaaaagaaatgttatctagaataaaattggcatattggataatttcaaaaacatatatatttgatgtacaaaaagacttaataaaaatgtgagccaataatcaacatattatagaaaatagagcaaaaaatattccattaaatttaaatttttccttgtgctttttcaagtaccttcattcactaccgaccatgctagtagagtattatagactagttgatatgtttcatagtttacaagtatgacagtttttctttatttttattagtatagacatgcatttaatgcaatattgaaaatcatttttatagaattttaaagaaactatctttaa

SEQ ID NO: 8029 - DNA, 1193 bp, Diabrotica virgifera
  SmartBlast Evalue=8E-26; Info=JmjC domain-containing histone demethylation protein 2B n=1 Tax=Harpegnathos saltator RepID= E2B7H5_9HYME
cccaccaagtttactgacttttttggcgtgcgctgatccgctcgctcctgagtctgagtctttgtcgctcccgctttctttttcgctgtcgcttccgctttcgctgggcgccgtcggcgtcgcttggggtccgcttttcctcttcttttcgtcgacggctttcttcactgcggaccccccgcctttttttcgcttcactttgggaggttttctttttggtggcgactttctgcctctgtcttgatcactacttgatgaatcgtcgtttttgtatcgccattaactgtcgtttctttagtaacctttctattagcagttttgttggtaaagtgtttagctttatttatactgtttactgccattgtacctatcgaatgtatcgagttaactggattttctctaacgggggcaggaggtggtgttgttgtttttatatttaatggtaatgttacgcaactgccagatccgacaacgccagttgtatcttcggcatcttcaccagtgtgcctctgtaaccatgccttcttcaagtgtctcactgggtaactaccgctagatgaactcttgattggtccaggactgtttgacttttcagagtcgatcacactagggttcactttaaccggcgtgcccggttgttcgtcagttggtcctggtgttacactagtaggaggtgtaggggtggaagctgtactaactggcgccggactattactcactgggacagttggtgtaggtggtttgggactttgatcacctatagaaattggtcgcggaggttcaattgtaactgctgttacactaacatccggtagattctcaggtagtactgtaggtgtttgtgatatcattgtagttggtggtgtcctgtacgccgcagtatttaccacagtcgtaatagttgtagcagcactagctattagcggactgggctcagtaactcttgataattgtggttgaatagaagaattattaaatatattcaacgtgggtggagacgcgcttgtgcccatcggtgagagacttgttcccattggtgatacactaggtcccaactcaatcttccgcttctttacatctaggcagactggatttcctagatcacctggtatgctcagtggcgtacttgattttcgttttggcgaaactgcctgatagttctccattttacttgaactaacacctaagtctag

SEQ ID NO: 8030 - DNA, 1197 bp, Diabrotica virgifera
  SmartBlast Evalue=2E-97; Info=Syntaxin-5 n=1 Tax=Culex quinquefasciatus RepID=B0W6Z0_CULQU
gtatacgtcatgtggcaaatagacgtgtactttcaaaagaaaaagtaaagttcattattaattgtaattaaacatattaaacccaattaaacaattagtcatgatatatactacagtaggtgataaaaatataatataaagtgaaattctagtgctttaaatatggttgtgctactttcaaaattaactttgtagcctcttaagaatgcaatgcttcctagacgtcgtcgagctggctctgaaactgagccccaagttatagtaggtaacgataattattggactaaccctcagcctaaaacgaatcagtcacacacggtgtatccaaacaatgttacatctgactactatttagaggaagattatatcgaagactacactgaaccagaattagtcatgactgccagagacagaactagtgaatttgtaaatactatacagacattacaaggcaggaacattgctagggcagtagctgctagggacccgaagaaatcgagggttatacaaagtcatagcgagtttatgctaattgcgaagaatgtgggacggcatatagctagcacttatgctaaattggaaaagttgacattgttggcaaaacgaaaatctttatttgacgacaaaacatcagaaatccaagaactcacatatatcataaaaggtgatcttagcaacttgaatcaacaaatagcccaattacaagatgtatctaggaaacagaagcagggatcaagtgggaaacatctacaatcacacacgagtagcgttgtcttagcactccaatccaaattagcaagtatgtcaacggattttaaacaagtgttagaagttaggacagaaaatttgagacatcagaaaaacagaagggaccagttttcccaaggagggttgcctcctccaactgtggcatcatcctctgctcaaggaagtttattgtttcaagaacaggatcaagtgagtataaatatggaaagtgcagcattgattccaaaagggcagacccaaatccaagcctctttgatgtatgaccaaacggataattatttacaaagccgtgcagagactatgcaaaatatagaatcgactatagtagaattaggaggtatatttcaacaattagctcatatggtgaaagagcaggaagaaatggtggaaaggatagacagtaatgtagaacatgccgaattgaacatt

SEQ ID NO: 8031 - DNA, 1195 bp, Diabrotica virgifera
  SmartBlast Evalue=1E-117; Info=Kurtz n=2 Tax=Tribolium castaneum RepID=D6W6M4_TRICA
gcagacactgtagaaaagacatcgctcatttgtcaagatggtttttaattttagagtgtttaaaaagcaatctccaaatgggaaacttactatgtacttgggaaagagggattttgtggatcatatttcgggtgtggagccaatagatggagtagtggtggtagataacgaatataaagacagaaaaatcttcggtcaaataatttgcagttttagatatggtcgagaagctgacgaagtcatgggtttgaattttcaaaaggatctttatctcgcgtcagaacaaatttatccacctcctgaaaaatcactgaacacgaaaatgcaggatcgtctgttgaataaattgggtgaaaactgttacccatttacttttactttacctcctagtgcacctgcttctgtaacattacaaccaggtaccgaagatgaaggacaaccatgtggagtgcattattatgttaagatttttgtgggtgaaaatgaaacggacaggactcacaaaagaggcacagttactatggctatcagaaaaattcagtatgccccatcaaaacaaggcaggcaaccatgtactgtggtacgaaaagattttatgatgagccctggagaacttgaactggaagttacattggacaaacagttgtatcatcatggtgataagattgctgtcaatatatgtatccgaaataacagtaataaggtggttaagaagataaaagctatggtccagcagggagttgatgttgtgttattccagaatggacaatacagaacatccgtagcaagtattgaaacgcaagaagggtgtccaattcaacctggttccagcttgcagaaagtggtgtatcttcttcccttactatcttcaaataaagatcgaagaggtattgctttagatggccaactcaaaaaacaagacagtaatttggcttcgacaacgttgttagcatcacctgatcagcgagatgcattcggtattatcgtatcttatgccgtaaaaataaaattataccttggtgcactaggaggtgaacttgctgctgaactaccatttgttttgatgcatcctaaacccaatgctaggggaaaggttatccatgcggacagccaagcagatgttgaaacctttaaacatgacaccattgatcaggatgcagatgatgataaatgtgattaagcaaaaatccagtct

SEQ ID NO: 8032 - DNA, 1191 bp, Diabrotica virgifera
  SmartBlast Evalue=5E-34; Info=Endonuclease-reverse transcriptase n=1 Tax=Bombyx mori RepID=D5LB38_BOMMO
taaaatacaatttttgtcttttcatgtcatgattttgaatgataattgtttttttttctatttatatgtttaggtatacattttcatataatatattattattatcatatatgtattatattatcaggtaatcaaaatcaacaaccagtcaagagtggctttaaatttcacacaatttaaacgagcttatgaaacaagtacttactattctggattgttgatggcaagcatataagtagtggaatatatgcgatgttggatagctaaaaaagcaccacatatctgatctgatgcgtcttcatgttgtgttcaacattaataaactataatggttctagctgctcgtaaactgaacgtgcgtgaattggcagaggccacaagaattagtaaggagcgcactcgtcatgcgatagtcatgcgcactagtcaaaatgcgataaggttattggttgctcacaattcggatttcgaaaaggcctgggtaccagggaagcactagctgctacccaagtgctagctcagggctgctacgatcaaagaaaagatgtaatgatgtgctttatagattatgaaaaagccttcgatcgagtacaacatcataaactcgtacatatactaaaacaactcaacatagatcaaaaagacattcgctgcatagaagctctttactggaatcaaacagctgtcgtcaaggtggataatgaaacaacgcaagctcaaaaaattctcagaggtgtaagacagggatgcattctctccccactactgttcaatctatattcagaaagtatcttccaggaagctcttaggaatgcgaaagcggcatcaaagtaaatggtacctgggtcaataatatacgatatgcggatgactcggtcttaatagcagacaatatagaagacctccaaaaccttcttaataaaattggagaacatagcgagaacatgggacttagcatcaacataaaaaagacgaagttccttataatcagccgtcaattatgtcaacatcaaaatgcaagactagcatataacaaccaagatgtagagcgcgtaagaaatttaagtacctgggaaactggctatgtgaagactggatgtcggatatggaaattaaatgtcggatagaaagggccagaagtgcattcacaaaattcaaaaaacgtctttacgaaactcttgacattgactt

SEQ ID NO: 8033 - DNA, 1191 bp, Diabrotica virgifera
ttattaaaacgtcaacaattgtatgtagtaaataaaattagtcattaaaatgcagtactgcaagcaaaatacaattaattaaatttacctttataatataataattgcatatcatatcaatattgtggagcaacatataatttttcttctttaatgacagtaagtatgaaatatacgtcaatttgacaatttcaattgacaatatgaattatttaagaaatttgcaatatttctcagctattcgcgcacgatcgtttctcgtatcccctccaagtacttgcacaccgcgaatagaacgcttacattttgaaagaaatattcttaaatttaacatatttcgatacgattatagacgaaacaatagagagatattgcagagtctttttgcacttgctgtattgcagcacgcgttattttgacagtagagcatgcgcagatgtgatatttggcttacgctgcgttattggaaatacggcctgccgttattaggggagccgttacgtgtgcggtattcgttgcgctattttctttcttaggttacgtttgttgttcgtatttcatttaaaccaagtttatttgtaataattttctaaaatgaatacctcagacagtagtaaatgagtaaatttacgctgatgacgatttgtgtttatttaaataagttttaggtcaaaattaattgacttgcagaaaattcgacgttagttcaggaaaacatgaaaagtgcaacaggaaaatcgtttattataagaacactcaaggatcatttgtttttcttgtcgatatttgaagaaaatacaaacctttcttccatctacattaaattctggattttgagtacaaattagataaacaactaatcgtaatcgagccgtaaaataccgcaaccaaaatgttaagcaatatctgcatttatgaaacgtctgagaaatgtcaattctatcaaaatggcgcggtgtaaatagcgcaacgtaggctgtgttaaatttgcaatatctctctaataactagttagtaagattggcgaatagatttagttagtgtttgcataaaccaaagcaaatatcaacaaaaaaatttggttcctgtcaaatatttgatatataaataataaatattttgagaatgcgactcatgtaattgtttacatcatacaatgcttttttacattaacatcattactttcttcca

SEQ ID NO: 8034 - DNA, 1173 bp, Diabrotica virgifera
  SmartBlast Evalue=3E-12; Info=Transposable element Tc3 transposase (Fragment) n=1 Tax=Camponotus floridanus RepID= E2AGQ7_9HYME
gcgagaagaagcactacggagcagagaacgcccactaaccagatgggccgatgattgaaacatgttatcggtaactggatgcaagccgcacaaaatagagatgaatggacagagctgagggagacctatgtccagcagtggacgcgtacgggttgatgatgatgatgatgatgaaatcgattttaaaacaaaagatgtagttaattaatggcattgtatgacattgtcacctgatgacagtatggtctggtttttattttataattaatgtattccgtgattgattattacacatttatccacagggtgttcaaaatttacggtttcatattggattatttaatgtgtcaggatgcttattttaaataaaacaccatgtatattaattaattattgtactaagcgcaggttcatctttcgaatggtatagggatgttctataactaagagtcatagtttttgcgtaatttacaattgttttaaacggtaaattgatcttaaaaataatatttatagtcactctcgatttttaaacagtacgaaataaatgtttgtttactgtatcataatgaaatgaaaattatgtctatttactagaccattattatgaaaagtaggtatattggtctgtatacaatacattaaaaaaaatcaggatcttctataaagtctaaagtccataaacgataagttaaatatttatcataatcctgttggtctaatactggtgtagttgagttttatacggataataatggtttctcttaagtattctaacagtcgtttgactgatttacaattcacccgaaattttttctttactagtatttgggttttccgtaacagaaagcagaacatcaagctccttgacgtcatcacaaataactggtttatttttatttaactttccgtatgcaacattaccagtagtacggaatccattgaaatctctcaaaaacgtcctttttgggtgtcttctatcaggatacttttgagcgtaaacttaagaaggtaagatacaattttgcaaacactccccaatgcaaagtaagtaccatgtctactttttcgtagattattcatttttaggaacaattaaatttgaatttcatacacggatgtttatatttttgataattaccagaccgtactgtcataaaatgacgatgtcat

SEQ ID NO: 8035 - DNA, 1191 bp, Diabrotica virgifera
  SmartBlast Evalue=8E-23; Info=BSD domain-containing protein 1-B n=5 Tax=Xenopus RepID=BSC1B_XENLA
gctgaaattttgatgtttgcgagaaaacaaaaataaaatttctagagttgtcaatcacaagttttttaataacatattttcccaaattcattgtgtaatttgttaacaaaaccaattttaacctaacaatggccgaacagaatgcgaatgataacaactggtttggctcttggataaatgctgcgaagaataagggttcagaagttctggaattcgtaaaaaaggatttggaagaatttggatctgctgttaaaaatgaagctactaatgtggtatcatctaccggagctgtactcgaaaaaacacttagtttggattctccgtcttctactgctagtaatatgaaaagaagttttagctcattccttggtcaaatgaataatgtattgaatcctagtccagatgattctgatgcagaaatgttgatagtcgaaaattcagagacagtcactttaaataaatttcagaaagctctatatgaacttcaaaaggatcccgtaacatatttgaagatccagacgagagtttaagaaaacaatataattgttggctagaaataatagatgaccagttaaatgacgatagaatagctaaacacgtaaatagctcagagattttaaagcaacactatgctaaattagttcctgacatcgtagaacatcaagttttctggaaaaggtacttatttaaaaaagccctactagaagacgatcttgcgagacaagaagcattagaaaaacgggaacagaaagaaaacaagctacggaagaaaatctcaagtgggaccaagaagattttgccgcagacatagaactcacagaagagcaacagatagagcttttggaacagtacgaaaacgagaaaaaggttagtcaaaagtcttcgcaacaaccaataggagaaacagtcgtttttaaacaggaatcccctaagaggaaaggcaaaggatccaaacggaagccgactacagaagcccaaaacacagaggccgctaccccaaaggaaaacgatctaagcgcgagtataaccagcaccccaagtagcaacagtagcctagacttagattgggaaaaaatcagtgatacagaaaagtaattttagagtaactaatcttatacttgactttggaaacttcaacatgtagctgaatgtgaatgtttgtcacagtaatattttccctattgataacta

SEQ ID NO: 8036 - DNA, 1192 bp, Diabrotica virgifera
  SmartBlast Evalue=1E-100; Info="Pap-inositol-1,4-phosphatase n= 1 Tax=Aedes aegypti RepID=Q17B69_AEDAE"
gtctaattgaattcttgaccttgcatttaaaacttttctaaacaaaaccgctattttttacacgtatgatcttgataaagggaatatcaaaattcgttacggtatagataattgataatttgttttaatttacaaactacaattttctgttaaagatgtcctgccagagtgctccacttattttgcggcttttagcctcttcagttactacagcaagaagagctggctctattattaaagatgtgatggaaaaaggtgaattgggaataatacataagggtttgagtaaaaatgatgtccaaactgaagctgatagatcagcacagcagtgtattataacttccctagcaagacaatttcctaatgttacgattataggagaggaaggacctttagatgagagtgaagttcctagtgattggattgttacagaaagtgatcagaacattttacaaagaaagtgccctgaaaattatgttaatgttaaacctgaagatattgttgtatgggtagacccgttggatggaacttctgaatatacagagggtcttttagatcatgttacagtattaataggaatagctgttagtggtagagcagtaggtggtgtaatttatcagccttattatgagtataaaaccgttaaaaatggtccgggtagaactttttggggattagttggtctgggagtaggaggctttgaaccaattaaaccacctagcaataaatttgtgataactacatcaagatctcatcgtgatggtaaggtaaatgacgctttaaaagcactaaatccagacgatatcattagtgtaggaggagctggtcacaaggttatcgtcgtgttagagggaagagctcacgcatatgtgtatgctagccgaggctgtaagaaatgggacacctgtgctccagaagctgtgttagaagctgcaggaggacgactaacagacatccatggtaaacactacgattattccaaaaatgtgtcatttccagacgatcaaggaatattcgcaacagccagtggcgtcgaccatgatgctttgattgcaaagttacctcaggaaatacgtgatgcattcccttactaaattaagaacaaaattatatcagatgtacagtagcgatatgcgaaagttgaaaggttttaactgtattttatttatataataaataacatttaagtctt

SEQ ID NO: 8037 - DNA, 1191 bp, Diabrotica virgifera
  SmartBlast Evalue=0; Info=Neurexin-4 n=1 Tax=Camponotus floridanus RepID=E2A9Q1_9HYME
caatggatatatatcatcaaattctactctagaaacacaaccgatgaaaccttctgtcatagattcgttctttccgatatacatgtattgaatgttgttgaactgggcgtcagcagatgccttaatattgaaatgaaactccttcgcctcatagccatcgacctgcatcaccaaagttgatcctccgttcttcctggaaactaacagatcgtgatattggcccagagcaaagtgcttttctggataaatgacttcttgccgttcgaatccaaagtcgaaaacgatacgtaaatgaccagaatttgataccatgatggtcatgtattcgccggtcatatttgatattaatcccaaaaggaaacctttaggattggtagtagtgaatccaactcgtatatgttctgcaatagtactcctaaatgaaccttcgaagtcgtaccgaatgagagaactttgtctcaaattaacaccgatctcatcagcgcaaatcggtcctttgaatgcggtccaacgacaatcgcacatataggaatcgtatctctcatggcacgtaccgttgttcaaacatgggccgctctggcattttcccacgcagccctcttgtataccgtaaagacccattcttgcgtattgacgaagatcgatgtgaagaccgttaattagtaaagctcggatgcaaccagtaaaaccatctctatagtctgtcgacgctccaataaagagctcagatgtcagatgcaatgctcttactggccctggtggttctcttacttcagctttgagggcaccgtcgattacaatcatagcttcttttctgttacgttccaccgatacagaatgccattcatcgtcgtttaatctgtaagaaacctctcgaatcacagcaataggacctgaacctgcttggtattggaactgaagttgatttccgttaactatacttaacttaatataatccgaaggtcctgtggaatggaatagtacggcactggctgaagcagttcggaattcgaaatatatatcaccgctatggcccatgtcgaatgtaggtaagttgatggtggaatctgccacccggaatgtaacgacgttgttaaacaaatcatctccttcacaaatcagtggtcccaacgtataacgtccttctttttcatcgagggcactgcctgtgtcaccaaaacgaagttgctt

SEQ ID NO: 8038 - DNA, 1184 bp, Diabrotica virgifera
  SmartBlast Evalue=1E-73; Info=Regulator of nuclear mRNA n=1 Tax= Glossina morsitans morsitans RepID=D3TPB6_GLOMM
cttcgtatgtgcttttgtaattccatcatcgcgtgcatcaccttcgactgcttcgcttgatattcatctaaggttacatgagcttgttgcagtaattctttctgaacgtacaagaaatctgtcatcatcactgacaccctttttctgtgttccatctcacaaactaacctactgttgtattcactaagtaattggacagcctccgtcacttgtttgcttaacttttcagcggtgtccttatcttgtattttagatatcagggatacctcagacacttctctcggtaatttagcaattctctctctaaccacttcatcagatgaagcaatatttacttctaaatcttgaatggcctttattagttcttctggttctggaggatctcccgcaggtgtgtgaggacttaactgtatgtgtgtttcgatggagccatcagaatgctctacaatcttttcactatcaaattttcttcgttctttagtcacagtaacttttacttttttaataggtggttcattttcctcaggtgatgaagccattattctttgaaattctagtatcagcttattgtcatatattcccctctcattccatatttttatcaacctattcagactatttttagtttttgtatcacttttagacatgtgctcaaatgctttgtcgaggattaaactaaattcttgtccatattctggtccctttttcctgctgttttgaataacatcatttgcaagatacatgaacgtaagttttttggaatctttggctttaatcaattctcgaaaccagatttgtaccactttgccgtgatgtttcctatgatgaattaaccacaaactgagtgtttgtatacttcccgaagagttgtttaaatcggataatttattaataaaggccgcctctgtaaaacctcctgccatcatgaaaagatatctcctggctgtcgatgaagggctaacttttctaattactaaataaaagtaaatataaccatcacatcaaatacaactgatgaaatattaagtccggtttttatacatttaagctgttttaatacacctacgtataatgtacaaacgacgacattattatactagtaagtatgtttaaacgtactagagataaatacaactatttttaagagtatgtaatctccctgacaacaaatatttcaaacctgc

SEQ ID NO: 8039 - DNA, 1170 bp, Diabrotica virgifera
  SmartBlast Evalue=0.000000003; Info=Poly [ADP-ribose] polymerase 12 (EC 2.4.2.30) (PARP-12) (Zinc finger CCCH domain- containing protein 1). n=1 Tax=Canis lupus familiaris RepID= UPI0000EB1E35
tccgtagtgagtggaataataggcaatgggtgaaaatgaaacaccttgaccaaattgatatcctttgtaagaaccttttaatctccaattaaaattttcttggcaaatgccgtcaatattagacttcttcgtgccatgaaataagagtttctcttcaagacttataccccttttcacatattccaattttttaagttcatattgcagtaataaatatgtattatgtactttctcaatgctatgtactttaaaaaactttttattggtgctaaagaaaagttgtttgaccgttctaaattcgtttgaatcttgatttaaaatctctagcttgtaaacattttgattgtctataaacatagtaagagttctcgaattataagctcgatatatttcatttagtagattgttgttttggacaacttttgtgccagtggaattttgtgaaataaccaagttccggaaattcttcaacaccatatgacttctgtggtgcaacgattcaacattagaaatttttctcttttgatctgataaattatcttctttattttttcgtgatgagtcctcctttgggcgttcctgctcttgttgtggctgaattattgtatgtcttttagagccggcataggttattcttagggtatccatatctcttttggttgttgaaggtattggtttggttggaatgtttgactgcctttcaaatccatccagccgatttggaattctttgggaagtacttggacgtttgagtaatcggtgtcattttcattttggacagtagtgctagttcctggaggcctaacattagatattcttctgttatctatctgtgttcgatttgattgtcttgacgaacttcgtcttaattcagtttctatggtaaatataggatcgtgtgttgaagttatggggtctccatcggaattaacaaaaccagtattatcacatgatatgacggatgtatctggatctactttttcgtataaagtagagcaacagcaacataggtttcccattttgaatttctttgtcttgattccctgacgattggaatatttgttaaataattactatttgcactttcctgatttttttattgcacacattatgggtatattatatcacatattcaatacacttgtatctgactacctatctaaacagcga

SEQ ID NO: 8040 - DNA, 1190 bp, Diabrotica virgifera
  SmartBlast Evalue=1E-74; Info=Serpin peptidase inhibitor 7 n=1 Tax=Tribolium castaneum RepID=D6WWI0_TRICA
gtgtgaaagtagaagacagaggtgttatatagcagtgattataaaacagaccatgatgaagtgtgccatcgttttagcactcgctataactacaacactagcagcaccatctgacgtcaaaagtccacttgaacaattagcaattggaaataaacaactaacgtcaaatctgtacaaagaaattcttaaaactaagaacggaagtattattttcagtcctttttctgctgaaaccgtattagcgctgacctctgaaggagctaaaggtgagacgagaagcgagctagtatctgcactacaccttccagaatcacaagagactatccaacaaggatttaaggaacttttaccacaacttaaaatcaacaataaggatgcagtattagcttcagctaataaaatatatgtggccaacggtatcaagctagaagacgattttaaaaagaccgctgaaagtatttacgcatcaggaattgaacaagtagacttctcaaacagtgcaaaagcagctaacataattaatcagtgggtggaaagccaaacaaacaataagattaaagatctgattaaacctgagtatatcaacagtgacactgtgatggctttgatcaatgccttatatctaagcgctaaatggtctactgcttttaaaaattttaacactgtaacagataaattctacagaacagcttcagaacaaatagatcaagcaacaatgacaatgactgaagtgtttaaacattataaaaatgaggaactcgacactcagtttttggaaattcccttcaaaactaatggtcttgtttttagcgttgctttacctaacaaaaaagatggcatagctgccttggaaaataacattgaaaaagtatttgaaccgcagccatacaccgatgtacctgtagaattgaaattaccaaagtttactgttgatacggatttgaatttaaaaaacattctccaatctttgggtgttcaaaaaatcttcaactttgacgctgatcttagtggattggcaaaagacgccaaagagttacgtgtttcggaggtaattcaaaaagctttcatcaaagttgctgaaagtggcgtcgaagcagctgctagcactgctgttttcgttgcaaccaaatcggcacgtttctttatcgaagacccaatagagtttttcgcagaccatcctttcgtatact

SEQ ID NO: 8041 - DNA, 1181 bp, Diabrotica virgifera
tgaattatcactgtacaaatttctagccttaggaagaccgttagtcgaagggttcactggcccttagactataatctgttgtagtgcgaccgattttcgacgagtcattagtaagtggggtctaatgagggttaacaactaaattatattagtgaaattaaagtaatcttgcatattaggtatgccttttagttctataacttgactttcatattacatgttggacattatttagaaagcataggactgtgttacttttataggtttttttatttaaatgtggattgttttggtgaaccaaaacgatgatctacattcttggacaaaaatatcgaatattttaaaactgaaattgtttgtgagtgaaattatttgggctgcagtctttacctctcccagggtcatagggatatgatttcttttacaaatgcgatgttttaagtgctcgatcgaaatgaaatctgttatgggctatactgtggccaatgaatctcatcaaggtaagtgttcactatctcttagtcttagactataagacacgtcttcatgtcgctagaatggttaatgtttaccttgatgagattcaatttaaaaattatattgcccaccatatagcctctatcggagttaaatccgatcgagcattttatgacactttaaaacatcgtattcggaaaataacaaacctgagacacggccagggctaaggattgcatcacaaaaatttcacttaacatgatattcaaaatattcgatatttttgtccagcagtgtatttaaaatattattcttggttttaggttttggcagtaagcattcgtttatttgaattactactttatacttgcctactcataatttccaacaatagtgttggaaaaactacttttacttcataaacctttttctaacgtaactctttcgtattttgttgctatttcgtcattaacattaaacagagaatagtcaaaataaaaaaaatatttaatatgatattctacagtcctatttactattaatgtcaaagagctaaatggctttgaactttgattttcgaaatgtattgtaaaaaaggatgaactcattcctctttcaagagaagcataaaaacagttttattagttctatggaaaccatatcgctcgtccagaagaaaagtgacacaactaaaaaaatgcaaa

SEQ ID NO: 8042 - DNA, 1187 bp, Diabrotica virgifera
  SmartBlast Evalue=2E-13; Info=Pol-like protein n=1 Tax= Biomphalaria glabrata RepID=A3FMR3_BIOGL
gcactgcgattaatgtctttgagtttaaatttttaaacaacacatcagttaatgtcggatcaccttctagttcccttctaagcaactgggactctctttggaacctagtacattccaataaaacatgttgtaaagttcctacactgccacataaacactggtttgaattcactaccttcaatctaaataaatgtacaggaacactacaatgtccacttctcatacgacacatttgtgtgattatacctctccccaggttgggaaattttgtaaaccatgcctttttatatggaactgtaacttgtgagcaataagtaattccttttgcctgtcctatttgttggaatcgattttccaaaccaagccataggttttctttatatttaatttgaaaatctttaaagggggcctttggttcttcactaataggcagcgttcttccaagattcgcaagatggtcagctccatcattcccaataattccagtgtgacttggaatccatgcaaatttaatttctctatgttcatcaaattcacatagtttttgttttagttggagagttcgtgaatctattgccgccttgtagcttggccttgtgattttttccagagcacagaatcactacagatgaggcactttgtaaaattattctgttggattaactctaatgcttttttaatggcaaatacttctgctgagcaaattgaattagcggatggtaatcttgctgttaactgtgttctctcattaaggtatatcccaatacctacattaccttgtttatctttggatccatctgtgaaataagtttatattccgaccagttattgaggtaccattccataaacttggtttggttatttgcttctttgcccatattgacagtttcataagccataggagaaatctgaatattaagtggaaaggagtgacaaggaaataaggagctatgtgctacctcatgaatttcatgtaaagtattctggaaagcagccagtattggtgggaaatattttcttctccaaaaactaaagtaacccagaaagacattgtgaaattgctcaattgaggcatatattgggttgtcataggctactacttttaaaatgaatttagatgctagccatattcttctgagatctaacggtgtttctccacactctgacaaaattatatgaactggaga

SEQ ID NO: 8043 - DNA, 1187 bp, Diabrotica virgifera
  SmartBlast Evalue=2E-58; Info=10G08 n=1 Tax=Ips pini RepID= Q5FYF7_IPSPI
acaacaatctttggagggggaaactccatttctgtattttttctcccgtgtacaacaaaattgtggaaaaggaacgcatgctggaattcgctatttcccactttatctatttcttgcagaaatttttcatatgtgtatgaactgacgtcaactttatgttctttaagtacattcacgaagtgttcatagtaatagtttaggagtaaatctaagtttggttctaagacttcctggggcactgaagaccacaagaagaaaaatacatcgtttgctggtgatccgtagttataaacttgaaagtcaactaatttgttgttaactgctctgtcattctcaaacttttgcatagtattgtttgtccacatgtcgttgtgcataatggtaccaaacaaatcgctaactggtaactctgtttttttccatccggttacttttgaagcaagatgggctatttctttattttgttcgatgattccttttaagacaggcaaaaaatcatcatcgttcataggttcaaaaggaacgcagtacggcttaatcactttctcgaatacttctggttttctcaatctgagtgccaaaggcacggcgtgcaaacttgctagatcccttaacaccagttttgttgtttctaaatcaaaccctatatggcggtctatattttggaaacctgctatttgtaaattttctaaaacaattacagcattgtcgtcaataatattagatgcgtttaggttcttcctagtggcatagcattcaggaaagcagtcaattaccttcttaattcctagttctttttgaaaagcttgtaatgtcggtattattaaatcgtaaaaggccatttcatttgtatacgtgacctgtactttgaatgcttgcctcatcatctcatgttgtggtaaggttttggcaacaccatgtaaagtctcttctttgccgttttcgtctaatgttgtgacatctagtttgatcatttcactgccaaaattctcacctttcgacattaagtttgtcaatttggtatcttttattttcttcgttcctaacttggaacgtagaagacccggtaaatctttgatggttatgtctgacatgataatattacaatcttctttcaaacacaactatactattagttttctattatatacctaatgaaaaatgtaatttatctgtgacgattaaat

SEQ ID NO: 8044 - DNA, 1188 bp, Diabrotica virgifera
  SmartBlast Evalue=5E-52; Info=Smoothelin-like protein 2 n=2 Tax= Formicidae RepID=E1ZXB4_9HYME
gcaatgctgtagcaagttcaaggcatgtgcgcatgcgcataccatttttcaaggatttttgttcagattagaattgattgtcaaatattctcgaattgtagtctgatagtgctaaagattcaagactaaactgtttttatcttgtagttttagaaatacttctttttgtcacctcacaacaaaatattctctttatcggtctgttctctttttgtatcttattattttaccaataatgtttgacggcaacttctaatatctacatttgtacaaaaacaaacacaaaacacataatattgtaaatatttttagatttcttcatctttgaagcgtcggtaaatggactggacatatgtgaagacgcatttccaatcaggccttctggtggccatcatatcgtcaacgtcaaggagaggaaaaatgtccgccttgtcactggcaactttgaaggcaagttcgaaattgtgtcttcgttcttttggcgttaacgcatgatagtcgaaggcgtctggcaggaaatggtggatgagggcacaaaatgcaagtccgtccgcccagctggtggagaagttgtctagttgaacgttctcatactccttagtcttcactttacaccaatacaagagacgatccttgatggtagccgctgaaaggctgagtgcaggatcggtaaatttaaagagagggccgtttccaggagtctttggggtaccgggggtacctggtggagtagtggtactgttttgtttgtccaattgttgaaatttagcgaatggcgatagaggctttttggttacctgttgttgggtactaattttcgtaactttggttgtggtagtagttgtcggtgtctcactcgacgatttttcaacagtcacgctttcctctatttttccgctggcttgttcctggcttgccttctgtaccagatctgcacaagcttcttgttctgccattacgctgcgtaacctattcctgatgattcgcctttcttcgtattctgtgctttgttcaagcaataatcgaagaattttttcgtcccagatgttttctaattcctcttctgtgatgggactttgaaagactaaggttttggttttagtttttccaccctcttgaaataaatttagtaatccacataaatgtaaaagtttcttgaaataatcgactgagtgttaagaatttgcg

SEQ ID NO: 8045 - DNA, 1188 bp, Diabrotica virgifera
  SmartBlast Evalue=4E-87; Info=Rieske iron-sulfur protein 1 n=1 Tax=Graphocephala atropunctata RepID=Q1W2B9_9HEMI
caaacgtcactgtttgtcactagcgctttcagaaaggtggtcttgttgcataataacgttaaatctttaagatcaaaatttcaagatgctgaagcctgctaacgtccctggctactttagagcagttagccaagtagtaagtaaccaactcaacactggtaaacaggttgcgatactcccacaaaagtcagtggttcacataccatggtcgagcagttcaccctctgcccttagcaaagccctaccaacaggaaacatcgcagtttcagtaggaccagcagttagcagccaagtgaggtgtgctcataccgacattactgtaccagactttagccattatcgcagagatggtactaaagaccccgcaaaatcatcccatgatagtgaagatgctagaaagaattttacctatttgatggctggaggacttggcgttggtgcagcctatggtgccaaatcagtggtctcacaatttattagttctatgagtgcatctgctgatgtattggctttagctaagattgaaattaagctttctgatatccctgaaggcaagtctgttacctttaaatggagaggtaaacccctattcatccgccacagatccgcatccgaaatccaagcagaacaatccgttgcagttagttcccttcgtgacccccaacacgataacgaccgtgtccaaaacccatcgttcttgattgtaattggtgtatgcacccacttaggttgtgtcccaattgccaatgcaggagactttggaggttattactgtccatgccacggatcccattacgacgcctctggtcgcatccgtaaaggacctgctcctttgaacttggaagtaccaccttacaacttccccagtgaagatctattagttgttggttaaacgattttttaattaatagttgaattttacttgagtgacgtattatgaaactggaagaagaagaatttttggcaagtttttgttaatttctgtttaaaacatttgtcaaaattttgagtgatagcgcgaacagttttacaatactcattctttgttgggttcagcttaagtcaatttatttatttgtatgtcgataaaagattccacaatgtaattgcaggtatgtacatatatcttttaaatcaaatatttggttaatgtacccttacagtgacattaaataatttagaaagatt

SEQ ID NO: 8046 - DNA, 1187 bp, Diabrotica virgifera
cttttctactatgtatcagttaattcagttaattctacgcatcggtggttaataacacgcaatgaagctatttttctttttggcaatccttacaatcgtacattcagatcaaataacaaaagtgagaaaattgatacagtcatttaactatgaagacgaccagactgaaaaattaatatcagaaacccgaacactgatagcaacaacacaaacagaaatggagtcattacaaaatactgcacggatcttaatgcaaaacagtatccaggttctaggaacaaatattcgtaacctatcagattattcaaacgagaaaactgctgagctaattattttttaaaaaatgaaattgatgtagctgtaagtcacaaaagaactacggaccctgtcagtgacgaatgtttactagtctatgactatttaggcacattacaaacaagttttggccaacggcttgaggtagctcttacaactgctgtccgtaatgccaaccttaccatacgcagggatttggactcgatgggtgctaaagtatcagaacttgctgttttaaacatgactttggatctatgtgaagaggtcagcgcatgcgtattggaagtttcacaaaaagccgtagattacaatacagaattcattgcagactttactgaaattaattccaaaatgaatagtgtacctcaggatgctctgaatgcagctattcttattgctaactccaccgtatacgaagacgaagattatgcctgcaattcagccataatcatgctgtcatgtatagaaagtttcgacgacaatacaactgatacaacaacgacatggttgccaccggacctacctatctctacggaaccagctccttttactattactccggaaccagctactgttagtgttgatactgatactccaggaccatatactgcaactagtgatactgatactccggaaccagatcctgatactagtaatgctcctgatatcgattctactacaccacaagtgacaactccaacccctatacatatcagatgtagattaactacacgttctaatgtatacttaaacaattaagaatttaatcccattattaatttgtaacctatacaccatatttaatttacaggattacttgatacaataatacactgtaaacattaacttatttaaaaataataaaaacgtaa

SEQ ID NO: 8047 - DNA, 1185 bp, Diabrotica virgifera
atttggatccagcacttttcagaaatcttagtctcatatctatattggatttatcaaacaatgctttagaaactatagatttattgtctttaactaatgaactaccatacttaaaaaagtttgaatttaggtcattgtcaactgaaaaaatttgagtgaatcaaataagatactgcacaaaaacttggagacgttaattttatcaaataatatgttaacagaaatatctgaaattgttattcagtcgtttccaaacatacggattttacatatgcaacaaaatatgttgccagatttttccagtctatattattccacaaatataaaggaactaagagtagatggcaacaatttattatatctgcttgatatgaataatggaaatcgcttacaatttttaaatatctccaataacccaaatttgggggtaaacgtgcaaataaattattataatggatattcacatgtggagacatttttaatggataatactggcataagaattacatatactggattgatagatgattttggtaagcactttccaagtttagaacaagtaggaattaactataaccaatacaagtgcgatgatttaaaaaaaattttagaaacaatggacctacgaaatgtaaattatatgccagataatcctaggtatgacattgataatatcgatggaataacctgtttaggcgataaaacatcatcaatatcgtcatctactatgaccgcacccactgcactctcggccagagacaatacattataattatcagttcctgagggtttaattactatcatcatgtccgcaccagtgcgcattaaaataagattttgtttctacaattattattataggccagaaatgaagctgaaaaaatggcaaaaccgcgcaattttttcgtccagcatcgatttgtacaaaaacttgggatttggctcattttaaactctagttcattttctgtattgagccgttgtacacttttggttttttaggggtgaaaactacccctaattgtaaaaaattataaaataatattttaaactttattatggtcaacatttggttttcattacttaaataatgattgttttatgctttagaatataatatcataatatttcaacccctaaaaccacccttgttggagctatgtataaagaattgatttatcctaa

SEQ ID NO: 8048 - DNA, 1184 bp, Diabrotica virgifera
  SmartBlast Evalue=1E-106; Info=Cytochrome P450 n=1 Tax= Leptinotarsa decemlineata RepID=Q3I417_LEPDE
aataccatatccagatacttcattttcaacacagcgtcatatgttagttttccaccagactcttcaagggttttacgtatctctacccgtgctttttcttgtatgtcaggattacaagctaactcataggccataaagcacatagctgtcgaaaccgtatcaaagccagcaaagaagaaaatcagtgcttgagcggtaatatccaagtcggtcatgttagtcggaactgcttttgccaaattcgattcttgtactacagcaaatccagcatccataaccttttcttcgttttggtggattccttttcttgcctccatgagtagatgaatcaaatcaggacgaagaattcctttctcttctctgacttttatcgtgtcacaaactaattcagtaaaaaactttcgaacgtggttatcaaatattttcagtttgaataactcaaatacttttggcataatcgaatatccaaaaaacttcatacttttccagaaaccagataaatcggttgtttcctttcccataagatagaattcgttttctggtttcctcaaagaatcgacctctactccaaaagctgtggtggcgatgacgtcattagtgaaacgagtaaatatgtctttcatttcaatttctatagtattcttgtcattttccataagaatttgaccaaattgtcgccacattgggacatcagcgaaaacataattttcattttgctgcttgtgaacgatgggctaagaactggacgcatgtccttccatctttgtcccgtaagagcgaacaaatttctactccataggggatcacatttctccgggaggatagggcgatgatccgaaaagtgatcaaaatcctttactcctaattgtttgactagctttacatctcttatcagtaatgttgggaaattaaactgatatataccaatataccttgcttcaggtgctgagttgtatatatcgacaaccatatctgtgaaagcctgccttagaagaatcacgttccagttatctccaggtatccatgattgcttggtctgttttacacctctttccgtccaaaagcttccagccttaattacgaagtagtaaaacaaagctccgatcaacaacaagctgctaatattaattgcaacaatattggttttaacttatcctaaatcaaatctatatgtataatattag

SEQ ID NO: 8049 - DNA, 1177 bp, Diabrotica virgifera
aatccattattcattgcggcttatgtttggaaaggtatcttcttagtgtgtctgcctgttagtgaattaaaactggatataaaatgatcaaagggaaataattcgatggagtatttataaatacgaaaaagaaaatcttagtttttatatgtatctactttccgggtggtcgttgtaacctacattggtatttgtgtaataaaataattttaagggtaattttattcatcttactacaacgctactagtctactattgaaaaaaagataaggtaggattgtttttatgtaataccacagtataatgctaaagaatcagtaaggttactctgcgaacatcctttgttctctatgttccattttggctacggcgcataaaaattttagtcctttgcgcagatgaatgacagttaagggcatccaagtttgccgtgattggtcggtatcgtcgcgcatttgccgtgatttgtccttatcgacgcgtattcaaaattttgtctcgggagtgaattgaaaattggaaccgtcaaaattcgagagtgaattaactgattctttggcattaaactgtggtaatacttcaaggttatcacgtctgacatttgtttataaaaagagcgtgtgactatagtataatagagcgacttattttgtgaggcgccctcttagttgaaatagaatcaggtattcctacaacagttcattgtaattttttatatatttatttttttatttacaataactcattgagattttcaaaggaatagataaaaacgctgaaaactgctgtcctaaacctatttccttatggaatcttttttataatggtggaaaactacaattttcaaatacataatcgcttttttgacattttagcttcctgatctattttattttttatcatagctacataatcataccatgcattttgtcgatgatttccattattgttgcagttttgaacgtacttcgtattggtcatcttacacactttcacgaccatctttaaactactatagttaactgctggcacctcttaactcgttccaacttaacgggaaaaagacaagagaagtagtactatttctagacggggccgagaacttgtcaggccatattagcctctttttttatttatcttctacactataagaaatccccacaaaaaatcgccggac

SEQ ID NO: 8050 - DNA, 1184 bp, Diabrotica virgifera
tccctttttgcctgacattttgctcaaaccggaccatatatatctggtgggcgatggcgtagattttttcctgataccgttgttcctatacacgtgcagtgttggatttttctggatactgattgtacttttcagtatttctttaattgccatggaatctacagtacacaaactttcattaaagttgttggctcgtagtgttagcttcaatatggcgtggtccgactacctaatgagctatttacataaggtacccgtcgtggtagccctaacgttaatttctttgtctctaaccacatgtggagggctcgccctatgtttaggagccatgttttactttttaaggttaacacagatgtcccaagacttcgtggaagaaatcgtatggtttataggaaagaaaatagctagaagaatcaaaagtttctttagccgaaataagaataaaccagagaatcaaatagtagcattaacgccagtagaagataccaataaacatatatcattaccacataacatcaaacaaataacaggagctccagaaaatgaatcagacgaagacgataccgaagacgatacagaagaaaaacttttggaatccgaagaaacggaagaaactgatatagaggttttggagccagatatggtagacaagaatatggaaaccgatgaaggaactgatcaaaaacacaagatagttcaagcccagtgtgaattagaagacaaagagacagaaactaatccagaggttggagttcaagtgaaacttgaagaaaaagtacaaaatatgggcgatggtgatataaccaaagatttaaatctaaatcaaacctcaaatagtagtgagactgaagagaaaactaatatagatagtcaattattacagataagttcagtaagtggtgttaaacacgaaaccagtgcgaatgaagttgaagacaagtctaaagataagaaaaccgaagatcctgaactctcttcggcatataatgccatatttttccactcaactttattctttttgtggtgtattatcacggttatcaacgttcctgcagttttaacgtgggcacacagtttcaagtatagtacggttctggaagctgattcctcttttataccagggtttacgttaagtatttgtgccctaattttatggcaatttgagtttcccagaactaaca

SEQ ID NO: 8051 - DNA, 1184 bp, Diabrotica virgifera
  SmartBlast Evalue=6E-98; Info=Mitochondrial 39S ribosomal protein L3 n=1 Tax=Aedes aegypti RepID=Q16K51_AEDAE
ttttaacaaatcaactagcgcaatatttattatatacatttatttactttctttaaaaataatagaaggatcactaaaactatggatactatcgtcgtaaatatcttcgggaacactatcgtctacaccacccaagtacgttggaaaaggcaaagccttctctggcttccgtaaaggcaactttgaatcataaataaagcaaatagaattcgtttcaccgggtatagcttgacctgtgacccaaagcacgttgtgcctcgtatttattcttaatatcttcaagcctttagctatcctaaaacggttgcccatatgcccgggcattttcgttccaggccacactcttcctttctctccacctccacctatattacctcctcttctgtgggtctttgtgacaccgtgagatgcgggcattcccttgaaaccatgtcgcttcattactccttggaaaccacgatcaatcgtctttccacggacatctatggcattgcctacttggaagtgcatggctgagataagcgtgcccaagggtagcactgcatcaggactcacgaaaaaccgagcaagtacttgctttggaatgaccccagactctttgaagagaccacagtattctttagtaaacttagaaggatctgcaccttcagcacccaacagtaagcaagctttcttgttgcgaacttctaatactctttttctgggagagtcgtattcgtcaggggctatttttttgatgacgtgattatccaatacttgaagtaacgtggtctgtataggtttaccattctttagccaaagaggatataccccaatctttctggctatcactccagttctttgcagctctggtgtccactcaatatttgtggcaacttcgcctttaggtgttatgttactgtacttatcctgtattacttcttggacaaacttctcattttctttggttatttcttcatctcttgtaaatatcattttctttgtaaaccatgtaggatttcttagtctaggcggaggattaagtttagccatacatcttgtttgattgctattgcagatacttaatgcaaacaatttttcttctataacttttaagttagatttagtcgctatattcgacaacacaagagccatattaacataaatattttaattttatttgtgcaataacataaccattcctg

SEQ ID NO: 8052 - DNA, 1184 bp, Diabrotica virgifera
  SmartBlast Evalue=3E-66; Info="Peroxisomal membrane protein PMP34, putative n=1 Tax=Pediculus humanus corporis RepID=E0VAP9_ PEDHC"
aatattgggacatattttattagctacctagctcaatagacagttaaaatatcacattttgctgacatatttccttcacattcacatctctaatttacatttaaaaattttttcgcctcgccgttcccaacaataatttgaacaccaaacggacaactttttcgtaggtagcgaacatcaatgctgtagcgaacacagtttgccataatttcgattctaggcctgtgaataaggcacccgggccgtcttttcggatcaacgtaagtaacagcgcagctgtgctcattctaggtcctttggtgagtcgttgtctggtttgagcgacttgcagagggtacgtgaggattgtggcgatggttttcgataaggcacctaatagaaagtatgcggtagcagttttaataggaactctcctcttcaacgcttcatataacgtgaaattaataactggattggaaactaataacagtgatggcgctactccattccataaagtggatacaccttctgtggtagctatatgaactagtccatccaacaagccagtgaattggagctcttcttcctgtctttttaatcgattatttactacccacagaggatttgtagttagaacgtttaaaacaccagcaaagagactcaagagaaagtcgtttttggagttgcgcatttcctgtggtaaaagagatttgactccgtggaatgcataaaaatatacgaaagatgagactcctaatgtttttagaacaggactaattccacaatataaagactgtatgccttcagtcttaagtaggtgaattataccttcaaaagtagatttttctgctagttctttatcttcaagttgctttctgaatttgatcatatccaaagggtacacgctgctcatagcaaaaatgcttgcagcggctcctgcagtggcatgtaccaaagtctcataagtgaaaatggttttttgtggcagcttagacatcttaatttattacaaaatactgaacgtttataaaaacgaaatcgaacaggtacaacaccaaaaatgtcggaaataaatgttgaattcaaaggtcatacagcatacagcatttaacttgtggccccgtcaccttctaaaagcagactgttattacatttgtgggaatatttacattgtgactgattttacaactaaaccacgacttgtt

SEQ ID NO: 8053 - DNA, 1179 bp, Diabrotica virgifera
  SmartBlast Evalue=1E-112; Info=U2-associated SR140 protein n=1 Tax=Nasonia vitripennis RepID=UPI0001A46D6D
cggaagatttggtcccttagcgagtataaaaaataatgtggccccgctctgatgaagaaaaaagcaaggggtcggaattgtggtttttgttgcatacatgtcaagaaaggatggtgagcgagctttgaagaatttaagcgggaaagatgtgtttggttgtgaaatgaagctcggttggggtaaagcggttatcattcccccttatcctatttacgtccctcccgtgttattagatatttcacaacctccaccgccttctggtttaccattcaatgctcagcccgctgcaagagataaagatgtgttgccaaaatcacaagaagagcttaatgagatattatccagagcagttgtgaaagtagtgataccaaatgacaggaatctgattatgctgatacatagaatggtagaatttgttgttcgagaaggtcctatgtttgaggcaatgatcatgaataaggagatccaaaaccctcaatttaggtttttattcgaaaatcaaagtccatcccatatctattatagatggaaagtatattcaattcttcatggcgattctcagaaagaatggtgtactaaggaatttagaatgttcacaaatgggtctatatggaaaccgcctctcatgaactgttacacattaggtatgccagaggagttaataaaagaggacgattctaaagaaagttcaaaaggaagcctttccaattcgcagagggataggctagaagacatattacggcaattaacccacgaaaaaaataaaataggtgaagcaatggtgttttgcatcgagcatagcgaagcagctgaggaggttgctgagtgcatagccgagtctctatccaataaatcaacactcattaccaaaaagatagcacgactctacttgatttcagatattttacataactgccaagttaaagtctccaaggcatctttttttagaaaggcgtttgagtctaaattgatagagatattcaaatgcatcaaagaaacttacgataatttagaaggtagactgcaggcagaaggttttaggcttagagtattgcgggttttaaaagcatgggatgacacaatatatccaaaggaatttttgaccagactgaacaatatatttttgggttatatctgtaggaggaagagaaaacttctgataaggatctggctgaagat

SEQ ID NO: 8054 - DNA, 1177 bp, Diabrotica virgifera
  SmartBlast Evalue=6E-16; Info=Mariner transposase n=1 Tax= Bombyx mori RepID=Q1HPJ3_BOMMO
aagtaagatttaattaataaatattggaattgattactctcaacataactctcattttatgcttaactggtccaagtacagctggttcctaaaaaaactgatacgactcttaaagcgtattttgtagaaaattgagcagtgtattttgaaggataaatacttattatttacctactgtcactgccaaatcttaaaatttgtcagataacttattctgttcaacctaaaaaaataacaacagccctattttatgtaaaaaccatcatttataggtaggtatactctttataaaatacaggaattcaaaatatgtaatatcaaaatttagaccttaataattattacaatttttcaattaacatatgtaatcagttgtttgtttgtttattttagtatttctctgtcataataaatttaatataatgtcagaccaatcaaatacactgctcaaaatgatcaaatcttactaatagtcgtatcagtttttttaggagccaaccgtacattttcaagttcgaaggttgtccttttagttttgcacataaagacaaacaatatgcaaacttaaagtactttagtctactattgcgccaagatcgattcacttttgcatacgttcaaaccaattggtaaaacagttatttcagtcttcagttgacacctgacaagtcgctgttttaaaggcattgatttcttcttctggcgactggagttgctgcccacgcattgaattcttgatctttgggaacgtgaagaagtcgttgggacttaggtcggggctatactgtagatcagcggtgctcaaacggtcgatcgcgatcgaccggtctatcgccaatgtttttgaagtcgattgcgattcacggaaaaaatacacatggaaaaggtggagactgcgctaacttgtggataatatgaagtgccatgcacttcatgaagtgcattaatatccatgtaaaataaagatgaaaaacatctttaattacaactctgtagttacaaccttgttactacaataaatacaataaatagaaatgtgaaataaagttttttattttcaaatttttttactagcagtcgatcgctggatgcttagagtttatgtggtagatcccatgcagtgtaagtctgagcaccactgctgtagatggtttaacattcgatgttttgaaggtcc

SEQ ID NO: 8055 - DNA, 1185 bp, Diabrotica virgifera
atcatctaatgcattttatagggtttttcatcgccgccatgttttttatacacttatgatctatgacgtaggtataatatacgtcacacgtcattggtgttagtcaacagtggctgggaacgtggtatctcttcaattaaatgaattattagaagacattgttgatcctccttcagttatttataattcagtttgaagtccataattgtatgtaattaaaaagatcaactatttcttccaataattcatataattgtggagatgctgcgttctcggccattgttgactaaaagcaatgacgtatgacgtatatattatacgtcatagatcatgtatacgaaaaacatggcggcgatgaaatattacagaaatactattacagaaatatagtttatagtgatatacataaataagacaaacagtaaaactcctacctcatacctgggattgtcaccagagatttcagccttgaagaccatcctagtgtgtggtacataaatgcttaaaagtgtataataccgttaagtttgaaaaaactatttaaaaaaaaactatcaagtcttatgggcgtttttaatgaattgttgaaaatttttgatttatcaaaaaaagaaaaaaatcgcgtaggattagtatatatctattctcgtctctgtttttgagacgatgttgtatttcttgtgctaaaatagtttatactaattttaatactattatcattgcgttcatattgtgttccaccgactatttctacttattcatcttgattttcaagaaatcccacacttaatcatgatagattactgggacatacggaagtacgtacctaatatttttctgtttggtatttgatgctggtcataattatgccagatcgctcttcatttgtgagaccttcaggcacttaaacctccgaagtcgggtccattatatcactcctatcattcggactagacctgtaggcgagcggcagcaacccctctaaagttacgttataccgttgattgaatacacggttgaaggaatttgattggaaatagctggtacagcataaaatatggaagaaacattaaaattattaactctggaacatattgtaatttgacatatttttggtaatatttgatattgtttgatttataccactaatggctaggttagtaggactcgcagatatattaaatt

SEQ ID NO: 8056 - DNA, 1179 bp, Diabrotica virgifera
  SmartBlast Evalue=6E-21; Info=Endonuclease-reverse transcriptase n=1 Tax=Bombyx mori RepID=D5LB38_BOMMO
ttaatgcatttacttattttttgttttgcacagatttttggtgtgcccgtaatttaagcagttataacactgtataactggcattgtgtatggcaagattatatgttctataccgcaaattaatactcccctcggtaaagtagtacctgtaaaggtatagcaaacagttccagttgggaaaagtgttatcacctcttcactttggctgccttgttgagatatctcatctgttttatagcttaattcttctattaaataaatagaaactagaagtaaagattaaataccaggagtgacagaacacatccctgtctaatacctctcctgatttctacttctgcggacatgtaattttgatcctaactgtggcgttttggttgcagtacaagttttttagtagtttgatgtctttcccatgtaaaccgacttcttacaaacgttctaatagtaagtcgtgtctaactctatcaagtgctttttcaaagtctatgaagcatataaatatatctttctgttggtcgtagcaattttgggcctgaactagtaaactgaagagggcttctcttgttcttatgccagccctgaatccaaactgatacataatatgtactgatataattgtccgagaacagtatgtgtccgtagtcaaaatagcaattactactatcttagtctgcaatagcctgtcaactcttttagttattgcagaccaagagagatatagagagttttcgggtagttatatccattttcgtcggcttaatgacgtttaattgaatagttttaagtaaccactgtttggtgttgcagttattacttcaaagttcactgaggatggaagatggaaaaggttggttctgaacaatcaactactgtaatcaatatgaattgttaattttgaatttttgattaaatatttacaccaattacaaccgaggttttaacttcgatgttagttatttatttaaaactcgtttaagaaattatagaacattgacgcgcatttttcaatacgtactatattattatgtcaccaaatttttgtttttttttaacgtaatatttttttgtgcatgtttattgatcaacaggcagccaattactgtattagtttgtcttcatgttgagaacaggaaaagagaaaataagttcaaaattgaagatttaatttttcgctgt

SEQ ID NO: 8057 - DNA, 1179 bp, Diabrotica virgifera
  SmartBlast Evalue=2E-28; Info=MKL/myocardin-like protein 1 n=1 Tax=Harpegnathos saltator RepID=E2BV92_9HYME
ggctgaggagctggactcgttgggtccaaatccatctgctcgggtttctcatcttgtgatgatggagaatctatattctgataaataggggaattgtgtgcttgatccatactcgcattactgtgaatagatgagtctattgatgggggattgtggttaataatatcattagaagtagtgaagggtttaagtctttcaataagttgtggcttggagcctgaaaccggcaggctacggcgctttaattcggctttcaaatcactaactttcatatcttctaatctgccagttattctggagggtgtcgaagattctgaagatgtggaaggagaaggtgacggctgttggatattaatattattattgctattactactactatctgaagaaattgacttttgtgaagctggcaagatgatttgtgggtacttgtgctgcaactgtaactgaaattgtagaagcaacgtctgttgtttgagtaataagtcatacgaactttcttcttgggatgaactcgaattggaatttttctgagcattaggtggtcctttatattcatggaatttaatagtgcgggtttttggcattgatttcgttttggactttttcctattttatccttaacggaatcacttcttaccggcgattgcattgtacgagttattaaggaaatgggcggcggaggagggggagcaggtgttgcaggttgtgacatgattggactcgcaacactggaaagagggcttaaggttgaggtggaagacactagggaggcaggggaagaggcggatgcctgtgatagaagcggcgctgccactgatctacacagatccgcgaatataaggtcattattgtcttttttcaatatggggctcgacgaagtcacgaccacagtctccgttggttgtaaaagggacacaactattccggcggatttcgctgctgtttccaggacatccgaaggacccggactgactctgttatcaccttcagaactttgggaatcttcttcgggattaacatagttggaaggtagttgtggcctgtgaagctgaccttcactggtagccttatatgatattctaccggtttttacagcctcttctattggttcctcagtatgaagaatattcttttgaataagttccaacggtccgggcctatgtgataattgatcat

SEQ ID NO: 8058 - DNA, 1179 bp, Diabrotica virgifera
  SmartBlast Evalue=1E-106; Info=Quaking related n=2 Tax= Tribolium castaneum RepID=D6WQQ8_TRICA
actttttattttaaaggtcttgagtaaggggaagctttataacgatgcatgtccccacctcgtgacgacgatggcggacctggagccgatttagaatatgaagagctcgacatcctgggcttccaagaacgaggtgcagattcaaaactcggagaaccattatctttgtagtaatcagtttcataatcttcatagtaccctgatgtgtaatcgttaacttttggagcatacatgttaccgtaacgagggggtgacgtggctccataatcatcttcgtatccataactttcctccatggctacacgagctctatctaatatagacattattttagtcttggctggcattactctcggcgtgtgaactggggctctggttgctgtacgcattgcatgaggtggaggtggtcctcgggatatcggattagatggtcttatgtgatgaggtggaggaggtcttcgtggctcgggtatcatttctctatcggaaaataattccatctctctcaattgctcttgccgaatattatcgttgctatctggtataagatattttctgacctctgccagagcaaaagctacccttgcatgagcctcagctggaggaccaagagctgagatttctacatgaagatcgtccatcaaatggctgtatttgggatcaagagaatttctcaactcatcctctttagctctatctttcattgatcctcttcctaaaacggccatcttgcacatggtttcttcctggagccgtttcatagaatttcctttcggtcccaaaagttttccaacaaaattaaacttagggtattcccgaacaggtactaataccttaacagtaactttgatcggtttttccctgtaaatatcaacatattttatgtctctcacgggagctcggcctatcgattgtgtcttggtgacctcttgttctaataacctaacggcattaggtagcttatgttgatcaatcgatagcttttccgctaacaattctttgacatattcgcttgctctttggcttgatgtgttttcttcgttgtcgccagcagcctcagaatctcttttaatcgactcttctccaccttttcttttgtcgccataatagtcctcgccgtttgaattatatttgtccgtcatttttaactacttttaataataacaacaccaaatgatg

SEQ ID NO: 8059 - DNA, 1180 bp, Diabrotica virgifera
  SmartBlast Evalue=1E-174; Info=Cathepsin L-like proteinase n=1 Tax=Diabrotica virgifera virgifera RepID=Q70EW9_DIAVI
ggaatataaaagaccgtttcggttatttggaaaacataaagtgtttcgttgtgtattcgaaaaattccactgactattagaagtgctacacttaaacaattttttcatcaaaactttgtaaatatacttttttttcgacatgaaggtttttgttttaatttttttggttactgctgcagttcaggcattaacagacaaagaagaatgggtgaagtttaagattagacataacaaaagttatagaaattacattgaagaacaaaagcgatttacaatttttcaagataatctaaggaaaatcgcaaatcacaatgaccaatttgataagggactgtctacttttaagttgggtgtaaccaaatttgcagatttgactgaaaaagaatttttcgatatgttaggactttccaaaagtaacaaatcgactagaactcgtgttattcactcacttgctccagtaaaagatcttccatccaagtttgattggagagaaaaaggagcagtaactgaggtcaaggatcaaggatcttgtggatcttgttggagttttagtacgactggaacagtagaaggagcttattttcttaaaacaggaaaactggtctctttaagtgaacaaaatcttgtagattgcgcaaaagatagctgctatggatgttcaggtgggtacatggacaaggcattagaatacattgaaacagctggaggaataatgtctgaaaatgattatccttatgaaggcattgatgataaatgcagatttgatagctccaaagtagctgcaaagattactaactttacttatattaaggagaatgatgaagaggatctcaaaaatgccgttgttgcaaagggaccaatatcagtagctattgatgccagttttaattttcaattatatgattcaggaatactcgatgattcatcatgctacagcgagttcattaatttgaaccatggagtattggttgtaggctatgggacagaaaaaggtcaagattactggatagtgaaaaactcctggggtgctgactggggaatggatggctatatatggatgagcagaaataagaacaaccaatgtggtattgccactgatgctacatacccaactatataaattgtatcttatctacattactttataaatttttagagaattaaacatatcattacaagc

SEQ ID NO: 8060 - DNA, 1179 bp, Diabrotica virgifera
  SmartBlast Evalue=2E-80; Info=Transcription elongation factor SPT5 n=2 Tax=Formicidae RepID=E2A5T8_9HYME
gcagtttgaaggttttctgtttctgtggttttggaaatttaatagaaacaagagttgtattcttgtattaataattatcacagcttcgctttacttaaacttaatttataatttatagaagacacgatgaatactcaaaccgcaacataacctattcactaatattcagtgtacaaaatagcaaatatgtctgattcggagggtagcaacttttcggataacgaaaatgcgtctgcagcggggtcggtaaggtcccgcagctcaagaggtagcgttcgaagtagatctagatccccgtctagatccaggtcgagatccatgtcgaaaagtagatcgagatcaccatcaagaggctcaagaatgtccagatccagatcacggtctccctctcgttcaagatcaagatcaccttctagatctcggtctcgttcacgctcccgatcgaaatctagatcacgaagcaggtccaggagcagatcggcaagatctggatcagaagcaaaagaagcttcaggtcctgaggatgttgtggaggaagaagaaccagatggagatagtctaaggtcagacgaatatgacagtgaagaagatgaaagtgatgatgggggtagagcaaagaaaaggaaaaagaataaagacagatatggcggatttattattgacgaagctgaggtagatgacgaagttgaagatgaagatgaatgggaagatggagcacaagaaattggaattgttcctaacgaagttgacgagtttggacctacagcaagagaaattgaaggaagaagaagaggaacaaatttatgggatgctcagaaggaatcagaaattgaggaatacctaaaaagaaaatatgctgatgatggagcagcaatcaaacattttggagatggcggtgaagaaatgtcagatgaaatcacacaacaaacattattgccaggtgttaaagatcccaacttgtggatggtcaagtgtagaattggagaggaaaaatctacttgcctcttacttatgcgaaagtttttggcttaccaaaataccaatgaacctttgcaaatcaagtcagtagtagcacctgaaggtgttaaaggatacatatatattgaagcctacaaacaacctcatgtcaaggctgctatccagaatgtgggaaatttaagaatgggtatctggaaacag

SEQ ID NO: 8061 - DNA, 1179 bp, Diabrotica virgifera
  SmartBlast Evalue=3E-48; Info="Z band alternatively spliced PDZ- motif protein 66, isoform N n=1 Tax=Drosophila melanogaster RepID=E1JI73_DROME"
cgatttctaaatagctagtagctatctaacaaagatggctttacgtgctcgctaatttaaaaattgattaatttgacggatattaaatgaacatttgtgacactgttccatattcgaattaaatattctcgacgtagtatttcaccgaaaaactgtttattactaaaataattgtaagttcgttcatttaaaattgggagccaggaaggacactccacatcaatcttttgaaagatccgctttgttgaatcacttctgggtcagtaccgagtgcgttgccatattgagattgaggattttggtttaccacataggccattttcttgctgggaatagttttgtttggagcatacactttactttgtggtggaacagtcacttcttggatattatcacattcatattcttcttcttgtagagccttgtatgtttcgctttcggcaggattaaactttacttgtctacgtgtttgcgatttatttctcgtttggttctgcatagtatcgatatttgattcacggtacagattacgaggagaactgaaatttgtatgtccaagcatatttagaggaggagctctcaccgaagggttaggatgatggcgaaggtaactttcagtgggtccttgatcacgtttcactttagcaccgggaagtaccaggggggtagtacgatacggctgttgtgtaacgtgaacatccttattgtcttcttcgtgtctgcgttttgggtcgtgttcgtaaacttcaaaataattattgtcaataggggtaaggggagtggagtagtatggcgttagggttgatccagctggactgtatcccgatgatacagtataaccttttggagagagatggggggaaactgacagtgggctgtaattgtgcgagctcgtccttgatgatccggtactgtgaggagcgttttccctctgtactacaacttgaatattatttccagcatttctgaataaattttgcgcatcttgatgacgaatatctcttgaatcatagttgcctactttggtaataatatcacctctgtgaaggacaccctccacaggagatccgaatcccacttttttcttattgttatctgctcgccattgccaaaaagacggtcgttggtaggacattcttttttttttatagaaaaagcactctcagtctcacaaattgc

SEQ ID NO: 8062 - DNA, 1177 bp, Diabrotica virgifera
  SmartBlast Evalue=1E-125; Info=Prohibitin n=1 Tax=Aedes aegypti RepID=Q16MJ2_AEDAE
gtcacgtcacatgtcaaatgaacagacattttcggcagtagcattaattaccgcatgcttttgattaaaattacttttgcttgatttaaatattagataactatggcccaaaacaaattgaatgatttagcaggtaaatttggcaagggaggtcctcccggtcttggaattggtttaaaattgttagctgttggtggagccgctgcctatgggatttctcaatcaatgtacacagttgagggaggtcacagagcaattatgttcaacagaataggtggtgttcaaaaagaaatatatacagaaggtttgcatttcagaattccatggttccagtatcctatcatttatgatattagatcaaggccaaggaaaatctcttcccccacaggatccaaagatctgcaaatggtaaacatttcccttcgtgttttatctcggcccatggccgcttccttgccagtaatttacaggcaacttggattagattatgatgaaaaagtccttccgtcaatttgtaatgaagtcttaaagtctgtagtggccaaattcaatgctgcccagttgatcacacaaagacaacaggtttctttgttggttagaagagaattagtagaacgagctcaagacttcaacatcattctcgatgatgtatccatcacagatttatcattcggaaaagactacacagcagctgtagagtccaagcaggtagctcagcaagaggcacagagggctgcttttgtagtggaaaaggccaaacaggagagacaacagaagatagtgcaagctgagggagaagctgaagctgctaagatgttaggagaagccattggaagaaatccaggatttttaaaactaaggaaaatcagagcagcacaaaatatttctagaaccattgccaattcccaaaacaaggtatacctcagcggaaacagtttgatgttgaatatctcagataaggagttcgatgatatgtcagagaagttgcaaagtaagaagtgaataaaaccgttataaatatcaaatcaatcgcagaggaactacatactgatactaccataagtgtagactccgaatttttgttaataaacttttatacttagtatattttactttacattgttgaaaaatcggcattttgggccccaatacaattgttactatgtgtaaatattca

SEQ ID NO: 8063 - DNA, 1171 bp, Diabrotica virgifera
cagcagaatattgctgcgatcgtccatctccaattaaatctacaatttgggctaacgctctgacgttatattagctcattttttgtgagaacgcaccttctcattgaggactcaagcagacgtggtacacatatcagggtctcgaacacaagcgtccaagataaatattttcctttaacaacgttttatttactgtttgttttttcggcaaaaacacgcttcaatttgaaacgttatgggtttgtagacaccttaaggagacgacagccgagtattataacaatctgctaagaattaaaaattgtttttaaagttttttctgtttcagaggtatgcgatactttttgtgattagcgtatattaagtgtttgattgattcattctcgcgtattttttattttataaactcatacatttgtattatattaattaattaaatacattcatgtctaaataaagacatatttgttttaattccactccttattaaatagttgtcttatgagattatgactaattcgaatgcatttattttattaattcgaaagcatttatttgcacaaaaacgacaatgtttttctctcgtgcggggaaaagttattgtttctggattagttgttaagttaatattaagttgagcagaaggaccaggcgggcatgacgagattaaactctgcagcccggacaatgctgctactagtagacgtgaggtgccagatgtagcaaactatcccgaaaaattccttttaccgacagactatccaaccaatttagccactagcttagcactagatagtgtaaacttgaccagtacccagtttgtatcttatgtacatactatttggttgcttaatgtagtccagctgtatgtatagcattttactcttagtattagagatgaaggttagtggtactgaaattaaacttttttcatcattttttaccgcatgcacactaactaagagtcaattgtattctgtgtcgattgccaacgacatgtatattaaaaattatttacataatatatacgatgtatatgttcaaatgtgtatatccctataaaatgcgatacatacaaagtaatataattgttgaactgtttgtaaaatgaatattgtgctgtgctctagaaatgcgctgcgtctgtgggttagtaggccacattacttaa

SEQ ID NO: 8064 - DNA, 1179 bp, Diabrotica virgifera
ttacattgtaataatttggtatgttcttagagctataaatcaacgataatgaaactattaaatatattcaccaaacaaattctcaagtgtccgaaattatcactttctttcggatttaaagtaaaaaaatcaaaaattattgtcaatttcctttcacttgttgattagatcaacaatcttaatgcatttacaaatatctgataaaatcccaccataatgtttctgtaattgcataaaaattcgactaatcagtattaatacaaaaaatcaaataacatacatctatacatgtccaaaaacgcaatgttacaaattttgcaaaacaattacactattatgccacaacactgatatattatttcataatttagaagtaataacgacagacctactaagagaattatgtaatgaacacaatgaaaatgcaataaaagtcgggagttttaaaaacgttttttgttgcgtaaacagtcgttgagacgttattaaaagaaaaagaagcagagaggtggaaaatagtggataaattttcattatacacagtaaacttcatttaatgcggtacttttgggccttgaagattgccggattatcaagtattcccaggaataaattgcaaaggaggcaatggattgcaattgagacaattaaaaacgataatgatggaaacattgccagaaaagccaagatacaaagaagtgcttagtgtatgctcaggatggaatggaaaaaaggcttaataaacttcaaagaaacaccagaaataacagggaaattattaacgagaagagaatacaagcgactagaacatgcagaagaaaaagagacgctttgataaaataagtacaagaaattccagagcacataaacagacaagaaagcagaaaattatataaaataataatagagagtcatttagacaaaattgacaatatgcaaaaacagacaatgaaaacgagacaatatattataaggcggagcagcacattgaaaatccgagttatgaagaagtagtacaaataattacgaaactaaaaaccaataaagcgctagagacggacagaatttgggcagaatatttaaaacatgggtgatccgaactctggggaagaattcattatctaataatattaatatggaactatctaataatattattatttgagcagttgaacttac

SEQ ID NO: 8065 - DNA, 1176 bp, Diabrotica virgifera
  misc_feature (630)..(632): n is a, c, g, or t
  SmartBlast Evalue=2E-15; Info=Polyprotein n=2 Tax=Pectinidae RepID=A2TGR5_MIZYE
ccagttcgaaatattaaattgtataatacaaatgaccaagtatatgtcaaaaatactcgtacacatgtatgggacttgggaaatgtagttaaagttttaagttattgtacttaccttgtgaatgttaataatgttataaaatttgtgcatgctgacagcatacgtctagctaaggaaaaacctagaagtgaagtgagtgagagtgcagtgattcaaaaagcgcctttaaatgttgatgagagcacatctgcacccacccgcctgcctaatattgatgtaagtgatgacatggaccttcaggtggaggaaaataatactgcaattccacattctagtaataatgacactgttactagtagttcacctaggcatagtcaaattgatgcgacatctagaagccccgtttcccctcttctagaatctgagcagacacctttgccagtggttaccagatatgggagagctgtgaaaccacccaacaagctttctttatagaaggggagaaatgttgtgtataacggaacccaccttgcgagtcgtgacagatgacagatgtcgaggatgaaaggcagaaaagtgcgcttacttcttggtttttaggttaagaaccatgtatctcttgtaatctannntaaagtcaatttcatcatagtacgctatttaattcaatacatatcatattggcgacgaatcggaaagaacaccacgttggtataagtcattgcaaattttgtgttcagggcagtagtcaatatgccaaagttcgacgagtttaatgctgtgaaggaatcgtttgaagcctgggaagagcgcttgcagcagtatttcatagtgaacgacactgaaaatgaaaaaaaggtagcaaatttaataacatttatgggtgcgaaaacgtatgatacgttgaaaacatatttattcccagatacccctgcaatgaaaacatacggatacttaaagccagatatgcaccagctacaagtgtaatctatgaaagatacagatttcatagtagaaaccaacaagcagaagaatcgttagagcagtatgtaaaagaagtaaaagcactgtcaaagtcttgtaaatttgagaaattcctcgatcaagccctacgagacaggttagtttgcggtattagtaatactaatattcggactaagttacttagcgaagctg

SEQ ID NO: 8066 - DNA, 1177 bp, Diabrotica virgifera
  SmartBlast Evalue=7E-78; Info=Transmembrane and coiled-coil domains protein 1 n=4 Tax=Apocrita RepID=E1ZYH3_9HYME
cttatttcttggattattggatgtccaaaagtttgtaaaagatgtgggcagatacccttttaatagtatttatttctatatgcacggcattcttaggtgaaggtttaacatgggtgatggtataccgcaccgaaaaatatcaaaaattaaagactgaagttgaaaagcaaagtaaaaagttagaaaaacgaaaagaaattcatggagattcgttagataaacaacataagaagaaaatagaacgtgaagaagaaaggcttaaaaacaataacagagacttgtcttttgtcaaaatgaaatcaatgtttgcaataggttttgcatttacagctttattgagcatgttcaatagcatattcgatggaagagtggttgccagattacctttccaacccctgacttggatccaaggattgagtcacaggaaccttcctggagaagattactacgattgctcatttatcttcctttacattttatgtacaatgtccatcagacagaatattcaaaagttgcttggatttgcaccttccagagcagcttccaaacaaggaaacagcctatttgggcctactccaggacaatttaaataggatatgtggtaattgtttactgtctccactactgaggaaaaatgcatattttttaccacaatgctggatttggtttagatttctttttattagtaatggggttctcaaataccaaaaatcaactaatatttggttccttaaagttcttgagatgtctcttaaagaaagaacttaaaggaaagtatttgaatcctagctgatgattggtattttagaaacatgttggctgcgttacgagacaaatagacttcatattacagtaacagcaagcagagaacaggctccataattggagatttgtatctgcgaaaattatggtattataaggagtttgaatttctgtacaatcagactcgctacttgatcaacaccaatgagtcatgagtaaaatcgtcgttgttaaaaccggagtcatgagtaaaatcgtcgttgttaaaaccgcagcattatagtgcgtatgttaatcacccactttagcacttactagagaaagtatcctaataatacatgttagccatttagcagaatactcatacacacataaaaagtatcattttatcttagttagaacggaaagtaaacaa

SEQ ID NO: 8067 - DNA, 1178 bp, Diabrotica virgifera
  SmartBlast Evalue=5E-28; Info=Caspase-3 n=1 Tax=Culex quinquefasciatus RepID=B0WPG1_CULQU
gtgtgcgaatgtacatacatgccaaataactatggctacggaaagagacgcaggcgtctttaaacctcaaaaacttctaacaccacctccaccggagactccaccggcgacaagtagaagtccattcagagttgtagatgatttacccgtaaagaaatttgttgaacgtaaacatttacgtacagatcgatttgaatatgagaggaaaggagatgatcctggatacataataatttttaatcaagaaacattctacgataaagaattgggtacaaggagaggaactagaagagatgttaacgagctaactacatgcttacagaggttaggatttaatattgataaagaaaatatattaacggataagacaactgaagaagttgagcaagtattggagaaagcttcccagatagactttacaaattataattgcctaatactgtttttcctatcgcatggcgaagaactgaacttcttacataccaaagatggccaaatattagcaaaagatatctggttaaaatttaaagatagtccaggtctcaacggtaaaccaaaaatgtttgtgtttcaggcttgtaagggagaaaactttaccaccgttggaaatgaattaccaaaatcagcggttttaacaccctcttcaacattctcaccggattatctatatgatgatctcttaatagttcattcatctacagaaggtaactgcgcattcagaaatcaatatactggctcatggttcattcaagaactatgcaaaaatttcacagcctacggaagaaaagatgaggtcataagtttgatcatacgagtcaccaaatgtgtttctaataactttactaaaggaaaagatccaactactaatttggagtactctaacgcgaagcaaatgccgttttttatatctacattaagaaaaaagttttatttgaatagaaccaaggaaagagatgcaattttaagaatagccgaaactaacgaacatatacttaagactttagttgaaattaaaactcagttggatcatattttagcaaacgatgatgaaaagaaacacaaaaaatgacataacttcaatttagttttttcaattgtttatctttataattacgtagatatgtatacattatatattaaattattttttaacttaaaataaaagcctatgctagtgt

SEQ ID NO: 8068 - DNA, 1175 bp, Diabrotica virgifera
  misc_feature (1057)..(1057): n is a, c, g, or t
  misc_feature (1112)..(1112): n is a, c, g, or t
  misc_feature (1136)..(1136): n is a, c, g, or t
  SmartBlast Evalue=1E-113; Info=Myosin-Va (Fragment) n=1 Tax= Camponotus floridanus RepID=E2A5K9_9HYME
ggggagagtggtgctggtaaaacggtatcagctaaatataccatgaggtactttgcgacagtgggtgggagttccacggaaactcaagtggagaagaaggttttggcgagcagtccaataatggaggctataggtaacgccaaaaccacccgaaacgacaacagttcgaggtttggaaaattcatagaacttcaatttagcaaacaatttcacatcagcggtgcctcaatgcgaacttacttgctggagaaaagtagagtcgtgtttcaagctccagaagaaagaaattaccatatattttatcaactatgttcggctgcaaaacagttacctcaattaaatctagatcatccaagcaaatttcactatttaaaccagggaaagagtcccaatgtagcaggagtggatgaactacgtaatttcgaagaaaccgtcgatgctctaaatttactgggattttcagaccaggaacaagaaaatatgtttaaaattattgctgccattctccatgttggtaatattgagttcgtggatagcattattcaagtggagaatgaacaggatcaagaaggatgcatgattagaccaaatgataaacatttaaaagctgtaacaaacctactcgaaataaacgaagaagaaatggaacagtggctgtgtacaaaaaaattgatctcaatgcaagatatctttctgaaaccaatgtctgtccaggacgcaatagcatccagggatgctctagcaaaacatatctattccgaactcttcaattgggtagtactgatgatcaaccgaaccttggaatcagaaatacccagacataggtttgttggtgttctggatatttacggttttgaaactttcgaaatcaactcttttgagcagtttgtataaactacgcaaacgagaagctacagcagcagttcaatttgcatgtgtttaaactggaacaagaggaatatatcagagaaggaatagagtggaagatgattgagttttatgataatcagccgtgtatagacctaattgaagctaaattgggaatattggatttacnggatgaagaatgtaagatgcctagaggttccgacgcttcatggactgaaaaactntacacgaaatgttcaaagtccctnattttgccaaagcacgttttggactcttccttcgtagtc

SEQ ID NO: 8069 - DNA, 1171 bp, Diabrotica virgifera
ataaataatctacaactggtgttgcagtaattgttagctttggaatatatgcttaaggcactacataaatgtaactatttcttacggatgtacatactattttcatcgactcatagatggctaaaaaaaaaattccacaaatgcctacataaaataattattacttagtgcattcaatcattccaggcatacctaacctaaaaatctaatactacataataatattttacaattcaataaaagaatataaacattaattcgtgctaagagctagtcaaagtaaacttaaagaggaagaatttgattttcacgtaaaagtttagggtatgtgatgttaacaacggatacccaaaataaaggctaggcgacttcaaaatgatttggaagggattgctgaattccagtaaagaactatgtagagtacagaaggaaaaagtagaggattgtagagtaaatgtaggacgaattaaaattgtttgtaatttatagtagttaaatatatcacataagaataattaatgagaaactgtaacaaatctcctatatacccttgttgcagtgtatgcatgtgtatgctaactaccccgtagtcaccctgtgtcccttgtgcttatagacatttatatgcccagccattggtaacactgaggcaatggcattattggcagttacagttatgagttatgttttaggttacaacaatgccctgtgcattcctcagaagattttataacaattttacttgttggttttgaatatacatttcttcattgaatatatttctctctctaagaagagtaatcacgaaccttacagtaataattaaaggggaaagaacacccaacctcctttatatttggcgcccaacgttggtcattagttattgtatggttcgtgataactcttcttagggaaagaaatctatattcaatggtaattgttgtatttggttactgcacttaaaactatttttacaatgaaaaaacaagtaagattattataaaagacttctgacaatgcacaaggcacactataacgtaaaacatatctcataacttgccgataatgtcattgtatcagtcccaccaacggctaggcatataaacatctataagcgcacagaccacaaggcaactacagggcagtcaccacacacacatacactgcaaca

SEQ ID NO: 8070 - DNA, 1172 bp, Diabrotica virgifera
  SmartBlast Evalue=5E-91; Info=Bumetanide-sensitive sodium- (potassium)-chloride cotransporter n=1 Tax=Manduca sexta RepID= NKCL_MANSE
cgcgattttccgttcaagttcgacaactgaaattgcattgctcgtggtatcgcgggtttcccaacatatttcagtcacccacgccagtattccactatcacacaccgaagcagtagcttctcatgacctggtctagcaggtagaactgttcgcaatcgaaaaacccgtgtttcgaagcatgataatccggtaaaaactttttgtattttgttcggacaatggaaggccggtttacttcaggggattacgagaccgagcgcggtatcgaaaataccgggttccagctgcaggaaagtggtgaacctatcaagaacggacacccggtggtgaatcaaaacaattcgttgcatgtgcccaagaggaaaaagtctttggtgcagctgaccagagaggctctacctaggttagaaaattacaggaattcgaggaaggctgtgaaaaggcccagtttgggggagttacatgaaggagaagaatctaaggaaaacaaccatgccccagacaccaacatagcggtagaagaccactcagagtcgcacgcaggaataaagttaggatggatacaaggggtcctcataccatgtcttctcaacatctggggagtcatgctgtttcttcgcctgtcttgggtagtggccgaggcaggtattggacaatcgttgctgataattgcaatttcagctgtagtatgtataatcacgacgctgtccctctcagcaatttgcaccaacggcgaagtaaaaggaggcggtatctactatatcatttcgcgatcgctgggtcctgaatttggagcatcggtgggggtagtgttcgcttttgcgaatgccgtttcagcgtcaatgaataccatcgggttctgcaactccgtcagcgatctgctcagtaattacgacctatacatagttgatggaaaagtcaatgatactaggataataggtaccgttgctactttggtaatgatcctcatttgtgccgttggaatggaatgggaatcgaaggcgcagaatttcttgatagctgcaattgtgggagcaatggtagattttatagttgggactataattggacctacaagtgatctgcaaagggcgcaaggtttcgtaggatttaatacaacaacattttccgaaaattggggccctatgtatagatcgcaggatggtatcgac

SEQ ID NO: 8071 - DNA, 1177 bp, Diabrotica virgifera
gcctgctagtctttgatttttcattgtactggaataaaccactgttaaatattaatgtttcattccctggcatttccaaaaaaatttaggagatactaatcaaaacttctggacttatacatttatttatgctatactttttgtgacgagcatattctatttcactgttaatttttgatttaaaatgtctagcagaactttcctacttgtgtgcattggcactcctatttttcttttctggatcttttatttacttacttaaactactagtaacagtcaaatgagtagtagtttcagtaattatttttgggcatagaataaacagatatagttatgatttttgtgtgaaattagacaaatacttgaaaaattcaatgcatcgatttcgttttgtaaggaaataacaagtcattaagaattatcgcatttagaaacaatctacaactgttgtaaagaaaaattgagattagtgggaattgagaaaaaccaaatttgtgtgaactgcatcattgcatggcctgtaatgaaatagttatttcacaagaattgctctttgtctgcagaatacctttcaaatcccactgcctgtgttgagaacttttttgtggattgatatatgtaatataaaatataattaattttcatcattaagctctagcagaatttattcaaaagaatagaggataatgaaacttacttctgataatagcttaaaatcaaaattaacttgttttgtttcagtagagattaaaatatctaagcgtgccacgttgctcatatatgagagacatagatgttctgccagcggccacgtcgctcatttttgatattcaaaggctggaataatcttccatccatttataattggaatttatactttagctggtataaaaaagagcatctactgtttaatttagaacaagaaattgaatagcataatcaagtattaatccactatcatctcatctatcaccctatcacttaaaacatattttttatcttttctataaatttccctattctttatagggatttaatataattttgacagcttatctcatgctgctatatggacaattttagagctaagaaacatccagcaaaaaataattcccattaagtcactgtacactgagatgaaatgcagcgtgacacacaatgggatcaacagtgacga

SEQ ID NO: 8072 - DNA, 1176 bp, Diabrotica virgifera
  SmartBlast Evalue=1E-113; Info=E3 ubiquitin-protein ligase MARCH5 n=1 Tax=Harpegnathos saltator RepID=E2C3C6_9HYME
catttctgatgtgttttcaatataaattttgcaatatttggacaatatgatataatttgtgtttcatatatttcatttactaaccaattgtcacggattgtctctaaatcacttgttatgaaaatatagcattatggactctgttactgatgaacaagctccaagtaattcccaagaagatagaggtagcaatacagagacaggggttcaagtacacactaaagactccgccagatactgttgggtatgttttgcaacagacgaggaagacagaaccgctgcatgggttcaaccctgtaattgtaggggcactacaaaatgggtacaccaagcttgtttacaaaggtgggtagacgaaaaacaaaaaggtggcaatcttggaaaagttacatgtccacaatgccaaacagaatatataatagtttttccgaacatgggtgttttagttttggtgttggacacagtagatagttttatttacaaaggatgccccttcttagcagcagggatagttgtaggagctatatattggtgtgctgtcacttatggcgctataacaattatgcaggtaattggacaaaaagaaggtttggcaataatggaacaagctgatcctctagttttattgataggtttgccagctataccagtagctttagtactgggcaaaatgattagatgggaagatgctgtgctcacctttatgaggaagaacctatcaaaaattccaattataagaaatgtttttccatttagcgaatgtaccagactagaaatgaatgccagctcttcagaaacatcgaataacgaagacatcccgccactatcaaatcctgtatctgccacgagagttctctgcggtgccctgttgatgccgaccatcgctaacatgttcggaaaattcttcttcgattccattaggtcgaatttccacaagacagttctgggtgggtttacgttcatcgccatcaaaggctgcttgaagatctaccacaagcaacagcagtacatcagacagtgccaaaggaaaatcttggattatacggaatctaacatttcaacttatctccataggagagaagaataagataatgcttttaaattttactacggagtatgtttacacctctggctcggaataataactgttttaataaactattcagaacataacgt

SEQ ID NO: 8073 - DNA, 1172 bp, Diabrotica virgifera
  SmartBlast Evalue=1E-113; Info=Exosome complex exonuclease RRP4 n=4 Tax=Culicini RepID=B0WN41_CULQU
ttggctaataaccacttattttacagtttattcaattcttacaatatgcattcataccgcaacaaaaaaagaacaatattattaattgtaaaaaaaagtgtacgtggcggaaaataaaaaaaatagagttgtattcattctcattaaaacttcactattcaatttccagcatcgacagcctatgttgtgttaaaaaagcgacatctaccatcgcttctgggatgagtagttcggctacagaatatttcaaggattcttcgtaagcatataaaatgctggtatcatacaacatcattttgctttgtgttaacgccaagacacagtttcttaaacgtcctattatttctctctcttgccttggaattacctcttccaaattttgtatgaagcctccgacgctatcttcagaattaacaataattggagatatccagatgaacccattgtttcccaatatgatgcttgctcctatgggtagagtgtgaaaatgtgttttgcttctcttgatcaaagatggaaatacctttaccaaaacaccttgtccaagctttccatatctcaaacttcttgtatgtaaagacaaagctccatctgaaaatacattttgtacttctgcgcttataagatcaccttcttgtaaaaactgcctcatcatgtgttcatcctccactgatcttctcctcaattcaccacctggcaaatttactgaagataagagcagtgccgagtccagtcttgaattggtatctactttccaccttttttgctgaacctctgtaatccgtcctactacaacatcacctatttctccattatatctactttttagaggtcttactgatatcagattattaacttgttctcttacacctgctactgaagctttcagttctccattctcttcatatgttccatgacctctcatgaattcatcttgagcagtgataacttctcctggagtaaatatctttggataccttttatttggggcaactgatggatttactctgtgagtagcgagacgtatctgaattttttgtggcattttaatgaactgaaaacgagaactaataattaatttataatgttttccatgtttctgttatattttaaattaaaatgtttaagttaggacttaggttaggtgttacgtgttagtaagttagtaggtt

SEQ ID NO: 8074 - DNA, 1167 bp, Diabrotica virgifera
  SmartBlast Evalue=3E-15; Info=Transposon Ty3-I Gag-Pol polyprotein (Fragment) n=2 Tax=Camponotus floridanus RepID= E2AL46_9HYME
gcccgacaacacatccagatagccagtgacagaatgaaagatcaatatgattctcgatgcaagaatgaaagcttcgaagtaggtgatcttgtctggatttatagtccgcaacgtcgtcgaggcttatgtcctaaactgcaaagacaatgggaaggtccatatgaagttaagaagaaaataaatgacgtaatatatagaattaagaagttgccaaacggtaaaccaaaagttattcacataaatcgtcttgcaccatatgctggctcaaatgaaacagaagaagcacgagtcctccaacaggagatgaaagatgtcgcacagccaagttttaatcaatttatgtcaaattacgcagcgagaaagagtgctagattcggcgtgaccacagaagttcagcaagatctgtttggtgttccagaaaacgtctctctggcccactgtgttgcccaagacctcgagatgactaaaggaatatcgtccgtattcaatagaaagttcggccgcctggacgagttaagaaatcagcagcctaaaattggaagagtactgcgattggaagatggtcctcgatctttgctgtatatggtgaccaggaagtcttatacggacacgccaagctacgagaacatatggcgtgctctaactaatttgaagaaaatcgtgtgtaattatgacatcaaagatttggctttaccaaaaatggccatgcagtagaaaatctggattggaagattgtgagaagcatgctggaagtgatcttcagagaaactggcgtacgaattaactgtgtgttgcatgaacccgaagatgtcgtacccttcaaagacagtagactgttatttcttcttgaagggtgtatgcagagctggagagtcgtgtagattccgccatcctgggccttcatttagagttgctgatcgagacgctcagatcttaagaggggagcagtgtagcggaagagaaatcttggccgatccccgtataacagtaaacacctcgagaatgacgtaatcggatgtgctaggcctcgccggagaattctggaaggtacgtcacgtaggcggaacaagctgatagctagagatgggagtcgattgttccagaataacaactgggtataaatacgggcatatttgtaaatagagtttagtcttaagctaaagtttg

SEQ ID NO: 8075 - DNA, 1172 bp, Diabrotica virgifera
gttattgatttagaaagtaggagagaagaaataaatccaaagctagcgaaagtgttaaaaaagttgttggatccaaagtttaaactatacaacaaagattatcttaatctattgttaacacacttaaccagcaaggaacaggaaagtaaatttactccacaacagatagaaacacacaaaaaattcctgacgatatggctgaaaggttacattgtacagtgcgaaaggcttcaggaaccgccaaacgccagtctcctcacgttcgtcctaaatatcacccgatatctctgcgaatcagaacaaatattcgtccatctcaacagcgatgacatcttcgaaagattggtcaagataataaagaaggtttctcaacctacagtaactggagcatttataaaactgtttggtgactttgtagaacacaaatctggcttgcagtggatgatatccactaaccattgggagcttctagtggatatcatcttaaataatgagactgttttcgtctataaggaaggaaacaaattcgtggccaaaatgttagagaaatcacacagtttcaatgtgccattctgtaaaaacgtcatccaacacattctggtacctttagatgaatgctacaaagctattgttgatcattccttcaatgaaagtcacgagaaatggttgatttccaccttaagacttatcagcgagattttgtatattcttctaggaccagaagctgcttccacagatagcgcggtaatcgcggtactagtagagaccttccagctgaataagaggttaaaagagatcctagctgtcacgactcattccgtaattaaaggctgggtctacagaacagtgatttacctgagtctgtatgaactgaagattaaattcatcggaaatcagcgagctgggtcccatcagaaagcagaaatatctccggtggtcttcaacgtactgtacgatgccgccaatgaaatatcagtgccttgcatgcttcttctgttattcaccaccttgaattgctggaatacaatcaaagcaagtttgccagctactttgcttgctaaccctaaggtggtaagcttcgaagatcagttgctagccatacaattgatgcctatgtacacggtttttgttaaaactattggatttaacgtatataccagtgattcaggtaa

SEQ ID NO: 8076 - DNA, 1176 bp, Diabrotica virgifera
gaattttcgtctataagttacaacattttaccaaaatactgaaaaagaactgattagtctattgaaataactttaaaatgagttgaagtaaaatagaattggagctttgtttatcaataaacatcaatgaaaggtatacatttgcgatatgccccgtgttggcttaatccgttactgtttaaatttatttcttacgttttaacctaactacctgaggtattagatttaatccatggtttcgaattcacctgtagaaggtttcgagttggcagattcaggtagtagaaaagttacgaattggccggtgttctttgtataccgtagtccctagagatagcggactaccctgctttaatcccaaagccgcgatagcgctataaaagggagactattattattatcattttttatgttgcgtttcctttccgaaccataaataccaaaaaaatttgctactttttgttcaatcgtaaatcaatcaatcagtcgtaaatcagaaaattaattaatgccggtacatggacttcaaggattaaagacaatcacaggtaagatatcagtcattgaaagatagtataggagtatagcattgcattctgtggatgaggcaacagatttggggaaatataagtttctttttattcaattgcgaacaatttaagcaacattttagtacaaacttttttcttgtagaaaattagtatacttctccaaattccttgattcgcactctccttttttagttttgacattgaacgacagttatatgtcgcatgtagctagataagacaaatttggaagacttatattaacaattttacgaactctttttactttatatcgagaatgttagacaatattatttgttagtgtctagaagattacacagattacacgcatgtagaagattaaaagatagcattctgcaggtccattctggataccataaatttcgctagttagttgccacacgcctgctatagcctattccgcgaatgtacgcctgttttggattgtcgcgacaacgaatattttagtgtgcaacataagaagtactaaagtatattgctctaataattattctaataaacaacaatgtaatttgcaatttactttcgttctttatattttgcacagtaaaatattcgtggtcgcgatggttcacaacagtcgtat

SEQ ID NO: 8077 - DNA, 1169 bp, Diabrotica virgifera
  SmartBlast Evalue=1E-64; Info=Serine protease P98 n=1 Tax= Tribolium castaneum RepID=D6WPH3_TRICA
atatttttttttcagtaaaaagtgaatatatgtgccactgaattgaaccactggatttataaaaatgggtaactttgggactctggtgggtgccacactactcattttatacatttcaaggatggcctcagctatagactctgtttgtgattaccgacaacagttaacaacgggtgcatcttatacctttaacaactatggtagccaaacagctatccagctggaagtgattgccggtggtgggtccaaggtgatctagatactagaatctaccttacttgcacgataaacattccacagacaagtaactgtgctggagacaagtttagagtctctcttataggagtatggtacctatttttctgatgccatcaactactgcggttatcaaacaataaatcaggtctctacgaaaaatactctcgctgtggaaatgtggaccacgtattctacatccggagggattttcagctgttcgatacaagcggttcgaaatccggttactacaactaccccagcaccgagttgtgactgtggttggaagcaaccaaccaggattgttggcggggatgatactggtagacacgaataccctgctatggcagctttactagatataagtaacctccccgacgattgggaggtgatatgtggagcaactattttaaatgagcggtatcttttgactgcagctcactgtacgaatatagttccaatgaatcaaatgggcattctagtaggagtttggaatgcatctcgtgacgctcctagtgacactacggtgggataccaagtatcaaatttctggaggcatccccaatatgatgccaacacgcaaatcaacgatatagctattgtccaatcagctacaataatgaagttttctttgaacattggaccaatttgcttaccatttgcatacgcagagtacaattttaactaccaaagtgttactttgttaggttggggtcaactattttacaatggtcctgcttctgatattctccagaaagttaacgtccaagtaacgaataacacatactgccaaaagatgttgcccggtaatcagattacgcaaggtcagatgtgcacctacgccactggtaaagatgcctgtcagcatgattctggaggtccagttatctggcaagatcctaatagtagaaggc

SEQ ID NO: 8078 - DNA, 1163 bp, Diabrotica virgifera
gcaaaggttttgaaattttgactgcggttaagaaagttgtagattgtactcgggtgaagtttgcatgctagccatcaagatgtgatatagcagaaatatgagggtcaaagccctgtataagtaatccgtcaaggaaacatcgattgaaattgctaacttaagcttggatgtttgaaatattttactaatatgccccaggtaacatctgagctgtgatttgacttgttcacatggtggaagtgtggcagcaagtgacaatgaaatggatagaaacctccgaacgatgacaagacagaaatgacagttctacaggaagttgaaaaattaacctgtcatatttaaagactatggtgtacagattgttaaaattagaaatgatgtaacaacacactccattgtgaaaattatcatttaaaattcagtaaactagatgttgtagttaaaaatgtattcacgtatacgctctgagcttcgctggtgtcgctcctggcggattactaatgcaactttcaccggtaatttttaaatttattatttaattgttatcgcctaatatttacaacgcaaaaaaataattaaattgtaatcgattttttaaagattttgctaattattttaacgttctattattgaaatattaatttcttacttcggatactttcacaattatcatgtagatggcgcttagattaatttataattacatattacgaaatattaaaaaaacttaaattcagtatttaaaacgtaagtatatttaaggtaaaaatatacaccacagctttgaccaactaatattatttcctattaatgtttttaatttcaatgttttaaattaatcactttgacatttatttcaaatttccagtaaaagcttacagacttgtcactactggtgctcgcgaatttttaattatcccctctacctacgagctcagcgtataggcaaaccacattacacaaatgtttgtattctagaactaaagtcagtaaacaaatcttgttgtcaagagacctaagatttaaaaaagcaattttgtgttgatttaaagctatcgaatttatttaacttattggtagctgttggaattttgtgtaagtttaaaaagaaaagatatcacaatgggggtgactgaggtgtaaaaagtcttaaataatctagg

SEQ ID NO: 8079 - DNA, 1171 bp, Diabrotica virgifera
  SmartBlast Evalue=1E-169; Info=COP9 signalosome complex subunit 1 n=2 Tax=Aculeata RepID=E2BWT6_9HYME
aaaagaattcgctgttacactgaatataatgaaactgctatgaatacacaagaaaagaaaataggtagtcgattttcaaaatggtaccacagttatttctcctgcctgacttgaatccctctgagggctctttacatgaattttattctttaaaattgctgctcttaatatcagcattctagttcttctctgatattcttttcccatcaacaaacccttctcgaaagtggtacttcgttgatcaacatccttcgcaaatagaattttattgtgagaatctattctagcttggatctgtccatctagaataagctgcatcagctcatcttctaacgcaggtacagttcgattaaaagctacagccatcttgtgcatatcagcagataagtatgggctaaagtattgaatcaaggctctatttctaatctgagtgtacaaggtgttaacatgaggagcaatatacatgtcaagaagcaaattatccttgacctcatctaatagttttaaacaagaagcatattttgattcatagaatttgaaaattatgtcgcgtaattgtggttctagctccaaaaataacttaaacgatccactaccaataacattcttctgcaactcatgtctatcaaatgtagcaagagcgcaaagacctccatacatggcaacgttatttggtgaaagcaattctggaaaatcgcaatggtccaaatttgcttgcaagaaatgttttgctgcggatttatatttctttgttgccagttctgcaagaccagctgcacactttaatttagtgactattgcttgattggagtcttttgtttgtgtttctgaaacgtctggagtgctttcagcttttgaaacatagcttaatacgtgtgaccagttctgcaaataaaccgatacttttataacatttaagcacatatttaccacatgtttcccacttgtgcaatagtctctagctcttgagtaacattttaatgcattagaaagatctccacagtccaaatagtgatcacccaaatcatcatgacctcttctgatactttctttgattgaatttgatttgtaattttttagatcgttgtcaagttttctaactttagggctgctctttttgaccttgtttccatccacatattgtcaatcgttggtatatcttgagaggtgg

SEQ ID NO: 8080 - DNA, 1173 bp, Diabrotica virgifera
cgcacaacttaaaacacaggtgaaaatatatgtatatataatttatgaaatatgaaacttttggaatgcttatagataaaagcaatctgaatctcttttgcaatacatctagtttgcaaaatctggtcattaacatttgatacatgaatggctgtaagagtagaaaatactgtccaccaattaggcaagaataagatctaaacaaaaggtacctatgggctttttacaatatttttgatgactaataattttgatgcaatgataattattattcacacaaatatctgctgatcttatcatcactagattatagaaatgtgatgttgaacacaggcatattacaaaaatttgtcttcctcgatttcgcagaaaaaaacactaatataaccaacaacttatgatgaaaccaagcagctaaaattatttatggacttgatttgacctctaataaaatttagattcaacaattaaatgtatttgagccccctttcaactttataccacaaaaattccttggaaagtgcgaacaaatgtattaagaggaacgagcactttctctataatattgtgtagtaagtcgacgatacagtaggaatgaaataaatggagttcagttagaactcaataaatatttaaaataaaggacggtaaactaaatttaggacaaaaaccatttagaagtagcgcttcgatttcagtacctaaacgataaagaaataatacttgctaccaacttacaaacaagaaagaccatatatttcaaccatgtatccgggaataaatgattttggttagtactggaaagctaaattatgggaacacaaggaacgggtagcttatggctacctttacggacagtttaatgaattatgtaagatattcgtcagtattcttaagattaagaaaaatataattttgtgaatatccacaagaattcaaatttatttaatttttgagatccttgatccattgttttcggtaactaaggcactgctcactgctaaggtacgtcatctggagtttcgagggttttcggcactaatttgatagaatcagatctctctgggtgtttttgaggtcgctgaataagaacacgccatcaaagccgaccccccggtgctcaaaaaccctccaaactccagaaggtaacaggtcttagcagtgaccgtgggc

SEQ ID NO: 8081 - DNA, 1171 bp, Diabrotica virgifera
  SmartBlast Evalue=3E-88; Info=Alkylglycerol monooxygenase n=4 Tax=Murinae RepID=ALKMO_MOUSE
cttaacttgttacacttcgcctatttttgtagaccgattgattggagtgaatccaactgatgttcaccaacgagtcgtttttcctttagttcccagttaaaaaaatacatcgcaatgaattcgacgtcttttttgcaaaacctaaatggttctgatacgactatcacctccgtttacatccgtctgttggataaggatatcgtcgataatgttccgtttgatcgagatatgcttaaggactttttcaaaggtttaggtcgaatgttctatatagtgcatcctgctgaaaccacctaccaagaccctcaggctgtgccagaatttttccaaaatgcctggccctacttcctgttgttcatgttaatcgaaaatataattttatttatggaaaataagccgatttatagacttaatgatggactaaccagtatttctcatggcttaatacaacactccggaaaattaatatttagaggcagtgagagttatttgtatttttacatacatcaacatttttgccttataaatcttccttggaacaattcgatgacatggtatttagcagcactaggagtagatttttgttactactgggtccatagagcttgtcatgaggtccatattttatgggctcaacatcaagtgcatcacagttcagaagaatttaacctggctgtaggcttgcgacagtccctctttcatggatggtgtggatttttgttctatctacctttggcgtttgttataccaccagcacattttgtgactcatcaacagttcaacctactgtaccagttctggatccatacagtaactgtcaccacccttggacctctagagtatatatttaatactccacagcaccatagagtacatcatggaagtaacatttattgtttggataaaaattttggaggcgttttaatcatttgggatcgtctatttggaacttttgccagtgagaagaaagacgaggaaattatttatggtcttgtttttaatcaaccatcgtttaacccacttcatcttcagagtttttacacaagatacgtaattgaaagattcaacagtatgaaatcgtggaacaataaattagctgctatattttacggtccaagctggcaacctggtaaacctcgattgggattggaagaggataaagtaaaagtaa

SEQ ID NO: 8082 - DNA, 1174 bp, Diabrotica virgifera
  SmartBlast Evalue=1E-129; Info=Cathepsin L-like proteinase n=1 Tax=Diabrotica virgifera virgifera RepID=Q70EW9_DIAVI
attttacactaaaacgttctccagttttcaaacatttttaagctataatctattacaactattttgaagttttaaaatatgaagattcttgttattatttttctggcagttgttgctgctcaggcactaagtgatcaagaagaatgggcacagtttaaggtgcaacacaagaaaaattatgtaaactatgtggaagaacagaagcgttttgaaatttttcaagtaaatctcagaaaaatagaacaccacaatgaaaaatacaacaagggactatctacttacgaaatgggggtgaccaagtttgcagacttaactgacaatgagtttatgagctctttaacactgtttagtgaacctataccagacagtatcgttcacacattacctcaagtatcagatctaccatctgagtttgactggaggcaaaagggagcggttaccgaagtcaaagatcaaggaacttgtggatcatgttggtcgtttagtacaactggaacggtggaaggagcttatttcctaaaaacgggaaatttgatctctctaagcgaacaaaatttggtagattgtgcaagcgacttatgtaatggatgcagtggaggctggatgtataaagcgcttgaatatatcagaaaagctggaggaatcatgtctgaaaaggactatccatatgaaggagttgatgatcaatgcagatttaatgtttcgaatgtagctgctaaaatcagcggctttacgtatatcaagaaaggtgatgaagatgatcttaaaaatgcagtttatgtgaaaggtccagtatctgtagctattatggttactcccaactttagtcgatacaaatcaggaatatttgacgatgacgcttgtattaccgattatgtgaaccatggggtactagttgtaggctacggaacgcagaatggaaaagattattggatcgtaaaaaattcttggggagatcagtttggaaataatggatacatatggatgacaagaaataaaaacaatcagtgtaatattgctagttttgcaacttatccaaatatttaaatttttatttggataatttttgctagtctatgtaaaattaggtttttatttaaaacgcagaaacgtcaagagaaatttgttaaaacatttttttttgatcagattataatataattaaacaaaaaca

SEQ ID NO: 8083 - DNA, 1167 bp, Diabrotica virgifera
  SmartBlast Evalue=1E-180; Info=Groucho-like protein n=2 Tax= Tribolium castaneum RepID=D6WCN6_TRICA
gcacgctagggatccccaagatctcaaaaggcctagcagcacaaatgccgaagaaagactgaactccgtttcacctggtgatagagacaaatataggtcaagatctcccacagaagtcgatactgtgaaacgaagaaaagaagacaaattaggtcatgaaagtgatggagaaaaaagtgatcaagacttagttgtggacgtagccaatgaggaagcagcatcgccccatacgaatggagaacacgtaacgttaggaaattccagtgaaattagagaaaatggcagtaccaatggtgataaaatcaaagtcgaaagacctcctagtagaagcggctcatcatcttcgaggagtaccccatctttaaaaagcaaagacgaaaaacccctcacccccggatcgaaacaacgctccacgacacctaatctcggagcaggaccagctccaactgccaaagtgggtcatgcaggtcagtacccgccctatcctcttggagctgctagaggaccagagcatttaagtccgtacaacaacgtcgccccttcgccctacagtcgacccgcaatattaggatacgatggacacccccacacgagagcacccggaatagcaacgaatggtatgggcgcaatacctggaggaaaaccggcctattctttcacatgaacggcgaaggccaacttcaaccagtaccatttccgacggatgctctaataggtccggggatacccagacacgcacgtcaaatcaatacccttagtcatggcgaagttgtttgtgcagtgactatttccaacccaaccaaatatgtatataccggcggaaaaggatgtgtcaaagtttgggacatcagccaacctggatcaaagagtcctgtttctcaattggactgtttacaacgagacaattacattaggtcggtaaaactactgcccgacggcaggacattaattgtaggaggagaagcttctaatttatcaatatgggacctagctagtcctacacctagaataaaagccgaattgacatctagcgcaccggcgtgttatgccctggctattagtccggactccaaagtgtgtttcagttgttgttcggatgggcatatagcagtatgggacttacataatcagacgctggtgcgacagttccaaggacacacagacggc

SEQ ID NO: 8084 - DNA, 1160 bp, Diabrotica virgifera
aaaagggatgaaaaacagttttacttcaagcaatagcctttatatttgtttattacagtttacctgatcgtataacatgaaatacgattttttaaaatgtagtattaagtgacccattttgaagattacttttacacattcttgcctttcaacgtttcgattttttgaccaaataactggtattttaaacagcgttgttaataacgaaaattttttaataaatatgaagtcctttatcatttggcacaatgttattgataatagctcatgaaaaaaaattaccaaagctcaggaaatactcaagagtacctacctctacttttaaaaatactctccctttaaattttagtttaaatattcggaagaattgcattttattcaatttcttcgtaattttgtagataataattaacgggagatatagatcaaatgaaccagtttaattgtttaggcaccaaagtatccagatttaacgatttataatttttacggaagaacttaaattaatggtctcgtttagttacaccagataaaaatacaacaaaacatatttgatggcaaaattagaatgcctgataatcttttttctcctataaatgccttttttgtacatatttgaggtgtcctcctacaggcaaatcataacttacgaatatatcttaaacacgaagagcttaggtactcttcgtgtttgtattttttgaataattctaggctccacgagtcacttctttctttttctccttctttcaatggccatcaccatgatttatatagttcttccattatatctttgcacatgcatgaaattattcacgaataattgatggattcgaccgttacttgatggaagttcattttatctaacaataaaacactgaaaacgtttgttttctatacttccacaaaatttattataactatgtgactacagctgtttcggcagagagcctttcttgagtgatttagtttactagtttactatgtgtttgcctttttaaagtctttaactgaagaggttgaggagtggggagctgtttgtctcgagttggtcattcagaattatatatgtattttccatttattaatttccatagattctaataatcacgaattaatttttatctagattttctttttacttaccgaaactagtatcg

SEQ ID NO: 8085 - DNA, 1153 bp, Diabrotica virgifera
  SmartBlast Evalue=4E-98; Info="Succinate semialdehyde dehydrogenase, mitochondrial n=1 Tax=Culex quinquefasciatus RepID=B0W8K1_CULQU"
agcgggcatctctttcacaggctctactcaggtgggaaagattctgtatcaacaatgcgcatctggagtcaagagagtgggactcgaattaggcggaaacgctcctttcatagtatacaattcagccaatgttgacaaagctgtggaaggtgctatgatgtctaagttcaggaattgtggacaggcttgtgtagcctcaaatagatttttaattcaggatgagatttatgacaggttcataagtaaattagtggaacagacgaagaatttgaaagtaggtaatggagttgattgtggcgttaacataggacctttaataaaccaaacccatttcctgaaagtatctgaattggtaaatgatgcgatatcaaaaggtgctacagttttggctggtggaaaacctgctccaaatctaggagatctattttttgaacctactgtattaaccgatgtaaatgataaaatgaaagtataccacgaagaaatattcggacccgttattagcattgtcaagttcaaaacggaagaagaaagcttaaagatagctaataattcagaaagaggtcttgcagcttactttttctctgaagatgtcaaccagatctttagggttaacaaaaatttggaggcaggtatggtcggaatcaacgatggtttactttctgctgtagaagcaccatttggtggtatcaaggaatcgggtattggtagagagggatcacatcacgggacagaagattatacatacctaaagtatacctgtataggtaatttacagtagataatatttgaaaggttggctttgacacttacgtcatcatggattctttttatctaattttaatgtatacacaattttaagaatataattaaatgtttttaattttataaaattaaaacaatttatctcaattactcatttatattttttatgtatataaaatatttgttgagattgaagataattaaaaggagcaaataatgttaaaaagagcatagcagcctttaacacgttaactgctacatgaaatttgtaagaatcaaaataagaaacaagtggtaaatgcgttaatggttgttgtaagtagaaacatattcttaggattgtaattgtttacgatgaaataaaaattgtacgagaatttataatctt

SEQ ID NO: 8086 - DNA, 1169 bp, Diabrotica virgifera
ctgatgctgaagctgttgaagctgaaggcgttaatatggaacatacttctagttctacttcacaaaattctttgacactttctaaaagcactggttctggtggcactggtaggttacttcttgtaaaaaatgtatcaagcttcgcagttttatttacaacttctgtcaatttttttttcttctcttcggctacttttttgtattgccacccactgagccgtttgcgtccatccattggtacagctgcttgttatagcatcaatgacatcggaagtaaaggtctgactgtaaaaaaaagaatatctgtataattcaaaactgtagtacgatacgacaggaaaaatgaagcgaaaaaatgagggaagcgaatttccttccattacttattcaactcattgtgaaacctatacgtatggcaacatgccgaattacatttttccttatagagaacggaattagctagaaaatcgaaatttgccttaacattttcagaaaatatgctctacacgaatttaaaacataaagaagaatttttcccatacgggccccaaaaaccaaaattttggggtaaaacccccccaaaaagggggtaaatgttatgggattcttttgactaaataacttagccgagatattgcaaaaaggaaagtgtgtgcgtgtgccgaatttgaagaaaatcggtcaaaaattgcgaccgctacagcgcggtctatattaacttacattaccattactataaacaaataaatatttcttacctcacaagttacaatttcaaaatgttactccgctcaaaacaaattacaaaaacgttaaacctaaacagttagacagactgcagtacgtggagttgagaccagacaaccgaatgacaatggcgcgtggcggtgatggagttggtggggggagggaagcggcaaggcgacaagacgcctgccatcagccaatgctagcaactactacgatcccacaactaaatttcccgtgcgtagcgtacgatacagactgccgcctcgccccttcgactcacttggatagagtggcgtagcgtagtgtactgcgacacattacaccgcgcagagtgtcgcgttataaataaataataaacaataaatagttttaatatttaatgctcaggttcactggtcttgataatcgataataaagct

SEQ ID NO: 8087 - DNA, 1159 bp, Diabrotica virgifera
atatcgcctggtgagagcaatagtgacgaagcttcaaaatgaacatttagagataatcgtatttgaagttttgatgaaactgctaaacagtataactgactttacaggtaatcattttgctaaaatttttctaataatgtgctttctagatatgtaaaccaattagtagaagtaattttatttgaagaaaagatggatattgtatttatttttgatttttttttctgcgttacgccattattgcattatcgaaggatgtttaatttgatgtttcgccactatactttaatactactatactacaacagtttagtttctgttttaaataattaaaaaatttacttttaaaaataaattaaacgcatcaaataaaatattttattgtacacaccagttatgcgcaaaatgaaactaaagtacaatagaaaaataacaaaataagatcttaagtaataattaatgaaaacgataaacatgataaaagataaaaagtaagcaaaagaactatgaatagtaaaattaaattcatcatttcactcacgtatgtttcgtatttcaaactactaaagaaatgattgtgggtagaaggaattgatttattttgtaagacttctttttagaaatgaatattggttctcgatagtgtggaattaaacagtactgatccaaagtggatagacgctttcttgatttgctatttctaagtacctaagaacgattgaaactgagtttctctgtaagaagttttataaaaaaaaacacaaaagcaaaaacgaccacacacacaaaagtgctcattcgccactattgcacattgtactactatctttaataaaatatctaatatttcaaatacatgcaggcacggcgtaattacagattcgccagtgttgatatgaaagtttggtgtgctttcgtcattaatgcatcaaaatatttgacaaattcacaataccataaagacttgtaggcgccctctagtaataaggaaattaaataattgttagccgatattgcacataaaagagggcatatttagatgtcgattgatggacttaactcaaaaacgttattttcgagtttcgccactattgttctcactaggcgatatataaataatattaccgcatctctctcacactcacgctaagcatacaca

SEQ ID NO: 8088 - DNA, 1170 bp, Diabrotica virgifera
  SmartBlast Evalue=1E-94; Info=Forkhead box protein K2 n=2 Tax= Formicidae RepID=E1ZV95_9HYME
gttacgcaaaggtttactcacttcttttttgtacttataccgggcggaagaaatgattttcttgtgttaggtttgagacaccctatagggagaacaaggtgcacctttaggtttcccagtacaaatatccgattatcgtttcaatcgttggtcgacgacaattcggagccacctcctaaagtcagggaggtttcgccgagcaggataagggatcgttcagggggtggaagcgggtctacgctccaccctctgagaatcaatatccccgatggtgtagactatggtagtccattcccttcgcctactggtaccatcagtgctgccaatagttgtccagctagcccacgtggtgggcacggatctcacagcagtaaccatggtaaaagaaacgttcaagcagatctgcaaatggtagcccaatatgctgctcaagtcgcccatcgagatgacactcatcatgttcctcaaagccatagtcctgactacagacaacctacttcaaatggaaactcgatgccttccgtcgtggtaagcgaagtaccatacggagcaagcagtagcagtaaagatgattcgaagccgccatactcgtatgcgcagcttatagtacaagcaatagcaagtgcacccgataagcagcttaccttatccggaatatatagttatataacaaagcactatccttactatcgtacggccgacaagggttggcaaaactcaattagacataaccttagtcttaacagatattttattaaggtaccgagaagtcaagaagaaccaggtaaaggttcgttttggagaattgatcctcagtctgaatcgaaattaattgaacaggcatttagaagaaggagacagcgaggcgtctcgtgtttccgagcaccatttggtttaagttccagaagtgcccctgcttctccttcacacgttagcatgtcggacataatgacgccagagtgtttatcgagagaaggttcccctacgatggagcacctcgtcgacatcagtcagtctgcaccaggaagtcccggtaatccggtgaccgcatacgctggctctggaggtatgataggtcatcaacaaatgtcggcattggtaggtgccactaaggctagattattgttgcctcatcctgttgacaatattacagaagttactacttccaat

SEQ ID NO: 8089 - DNA, 1171 bp, Diabrotica virgifera
  SmartBlast Evalue=7E-67; Info="28S ribosomal protein S27, mitochondrial n=1 Tax=Camponotus floridanus RepID=E2A4F7_9HYME"
taaaaatatttgtgttccttgtcctagtatataaaaatgtttaaattaatacataaaactttattacaacgtagaattaaaggcactctaaatgttcaaagcctacgaacatttttatctccggcatattattgtcaagaagtatgggatcgcagactgaactccccaattttacagaaagtaaataatgatgaatttttctatgaattagatcagaagtatcaaagaacgagagaattaagtgctgttgacgtagatatattcgtaaattcgattaaaaatggtcactatgttgatgaattgttagatattgttcacaaacttcgattgactgcagaaacttgtaatatgttaagttccacaaatcatgctgtactacggacattactacagcattctagcatggaaaccatagcaaacgtactagacgataggttaaattatggaatatttctcgattactacacagctaatctattaatggatatctgctggaagaaaaatgattttacctctggagccaggatagcgagtcagttaatgctgcaggaagaagttgaacatcccgttagcaagaatttgtctctgttgcattgttacaattatctgttaaaaccagaaggttggccagaatatcaaaaacccgaagaaccagaagaagaggttaaagttagagttaaattcttacgaaatccctatgacgatgaacattttgacttaagggatccaaacaaaatcgtaggtaaaacgttagcgatgtttaccaaaggaaatgatgatcctttaaataaatcgttcaatattttgggtaatactctttttggtaagattgataaagttaacgccagtattaaagattgccaaacaaagaatattgcaataataaaggaagtaatagagttgttgccctcagaaagcgaagttaaagaattggtaaagagtttaaaacaagaatccttgaatgtacaagaaatattgaaaaaaaatattgaaagcgctgtacaagggtcgtctgaaagagatatagctgagcaatgtaaaattttgaacagtgggaagaagatagaatgaaagccctggaagacgcaaagagaaaggttatcaaagatcagaaggcttaaaaatatagaagacatacagaaagagctcagagaaaaggaactaggctgtg

SEQ ID NO: 8090 - DNA, 1168 bp, Diabrotica virgifera
  SmartBlast Evalue=1E-108; Info=Serine protease P55 n=1 Tax= Tribolium castaneum RepID=D6W808_TRICA
attatatacaactattaattcagatttttttctatccagtcaacaaaagtagtaactctggtgtagacaccgggatatcccttttcagcgcatctaaatccataggaaaccactccaatcagataatatcttataaattcaccatcaaacttgccccaaattaatggacctcctgaatctccttgacatgcgtcttggcggccatccgcccgtcctgcacatagagttctctcgtcaattgttgctttagccccaaaggcggcagcgcattttgatgtgtcaactactggaatctgggctatttggagggccgaacttgaaggtccattataatatgtggctccccaaccagcaactacagctgcatattttacaaaactttgttttctgaaattatcgtcaattggtagacatacaggccatacccaaggattggtgggggctctttccaaagtaagaattgcgatatcactggtgtatttcacgggactgtagtcttcgtgaactttagctttgatcaatggtatatcttctggttctgctccatcattaggattgtttaaatctaagtctcctaaacgagcgacatataagtctttcttgttgtgtacacagtgagcagctgtgagaatatgtctttctgtaatgagtgttccgccacacaaccatcttggctttgaagggtccctgctatttctataacccaaattaacaatgaatggtacctcatgtaatttggctggaattccacctacaactctaaagtttgttacattactaacaccacatttctcgttatttaaaacggcaccaatgatttttgtatcggttgctggttgtgtaggttctggttctggttctggttctgtattgtctgttgggcaacaaacatatactacagctccaaatttacatgttgaacgttgcagatattggcgcgtttcctgattattgcttcttgttttaagcaaattgagcatgtatttacattcgtatatactttgacaaattccatattcattcctagctgtgtaacagggctcaccttcttcaacagccgcgtgagcaacactaaacaaataatagcaacaaatacacaaccacaaattcatgctgtacagtacaacttttgacgaattcaaccataaactactttcttgtggtttgg

SEQ ID NO: 8091 - DNA, 1169 bp, Diabrotica virgifera
cgaacacattttattgtaggtatagagaattatttataatctattttgaaagaaaaaatgtgatcaattgttttttttacaatgaaagagaaataaagaaacgccgctctttaaagaataataaaatatatttaaaaaatagggaaatttactaacgaagaaatcttgataaatgtgcaggatttgcatgaattttggtcagtttttttctgatgcacttaactatttcagaaatttctaaaatgagtaatgcacatatcccaaatattataatgcataaatttgggaatagggaaaataaataatatttttgaagtgaatacttcttatcgttcggtataaaattttggcgggtgtaaaatcgtattgggcgtacctcaaaaatcgtgacgcgatagtttatcttgaggttagcccctggcggtataggttcgttacttaactacttgtattatagatacttgaacaaattatataggaacgctatattaaaataatatttttaaaattgaataaaggaattatattgtttgatcgtgtcatgaacacgttcgttttatcaaaggtaccgatgtgttactaaatgaacgatttaagtacgcggtaccagccaagtagcgcttgttcaagatgggcaccgaacgtgttaaacaaattttgttataggtaattaaatttttcgccaaattaaaagaaaatattagttactttattaagaaaaataatttaaagctttatgtaactttatatttacttgatttagatgtaagacgtttattattttaaaaaattgaaataaaaattattttgaaagtttgttaatcctaaaattaacggataaaatcactagtatatattatgtattaaattgggtatatattatattatattataggcataataaatatattaaataaaattaaatctaaccgagtggaaacgaattgaatcgaaccgaatataatcgaatctataggtattcacttctgttggcactccgcaagtgccacgctctaattttttttaaataagcttctaaaagtatttttcttataaaatttttatattgatttaaatagattacatttttaactaaaaaattttttatttgacgtttcgatctccacttcaaaaatcgttaccaaaaattcaaactacatatatataca

SEQ ID NO: 8092 - DNA, 1168 bp, Diabrotica virgifera
  SmartBlast Evalue=3E-29; Info="Succinate dehydrogenase, putative n=2 Tax=Perkinsus marinus ATCC 50983 RepID=C5L9K6_ 9ALVE"
aagtcttatccacagcagtatagtctcccgaagacacaaaagtataaaaaatggttgaagataaagaaactaaatattttacgcttgaagaaatagccaagcataatggtaaacaaggttccagtgtatggattattatcaaagacaatgtatacgatgtgactgattttatggaagaacatcctggtggtgccgaattaataatggaatgggcaggtcaaaatgcaacaaatgattttgataacttcggtcattcattagacgccaaacgagatctgaagaaactaaaaattggtgaagttgatgtagaggaacgtaaaaagaaaatcaataaagaaccaaaagtaaaatctaccaaaataactagtacaaacgacaccaaactatacaatgtcagtgaagttgcaaagcacgatgggatacaagatactagaacctggataattataaagaattgtgtatatgatgtaactgaatatatggaagaacatcctggaagtgcagatgtaatcagagagtgggcaggaaaagacgcaacaaaagcctttgataatattgggcattctactgatgctaaacgaatccttaagaaactaaaaattggtgaaattccgaaagaagacaagaagaagaattccgacaaaattacaccaatccatcaagaaaacaaagaaaatataaacaacaaagaagcaaacaccaaattttattcttatgacgaaatttcaaggcataacggaaaagacaatcctagggtatggatagtgattagagatgctgtatacgatgttactgactatcttgaagaacatccaggaggagcagaagttataaaagattgggccggtaaagacgccacaaaagaatttgatagtttaggacattcctctgacgccaaaaataagttaaagaagttgaagattggtgaagtcgtaaacgaagaaagaaagaagaaacttaagaaagttgaacttaataggcagatatctattcaaaaaattaaaattcttgattcttctcagtttgttaatagaaaaagttgcatttcaatattaacttgtggcatattgtgttaaaacgatgtttttgaaaaaagtaatttttaaaattggtaatctcaatattttataatttatttgtgatatttatgtctaagtataattctata

SEQ ID NO: 8093 - DNA, 1169 bp, Diabrotica virgifera
  SmartBlast Evalue=1E-139; Info=Ribonucleoside-diphosphate reductase subunit M2 n=6 Tax=melanogaster group RepID=RIR2_DROME
ccagttgtacaatttcgctgagttacaatgccggcttacgataaagaaaatttgagtgacgttttggtccccaaaacggataaattggtgttatccgaaaacaaagccaacatcattccagcagaccctcccgtcgagtctaaatcgtctgtaaagtctaagaaacagattcaggatggagacagcagtaatttcgatcctgaattggagccgttattgcgtgaaaatcctaaacggtttgtggtctttcctattgagtatcctgatatttgggctaaatataaagaagcagaagcctcattttggacaacagaagaggtagatttatccagagatcaggaacattggaataaactcactaaagatgaaagacatttcgtctcgcatgtcctggcgttttttgcagcttctgatggtattgtgaacgaaaatttggtggaaaggtttagccaggaggttcaggtaacagaagcaaggtgtttttatggttttcaaatagctattgaaaatattcattcagaaatgtacagtatgttgatagaaacgcttattagtgatccagctgagaaaaaattcttgttcaatgctatcgagactcttccttgtgttaaaaagaaagctgattgggctattaaatggattaattctaaaaatacagcttttggtgaaagaatcgttgcttttgcagctgtagaaggcatatttttctctggtagttttgcttcaatattttggcttaagaaaagaggccttatgcctggtctaactttctcgaatgaattaatatctagagatgaaggtttgcactgtgacttcgcttgcctactctttactcatttagtacaaaaaccttctgaacagagagtcattgacattattcgtgatgctgtaactattgaacaggaatttttatctcaagctctacctgtaagcttaataggaatgaattgtgacctaatgtgtcaatatatcgaatttgtagcagatagattgttgttagagcttggttgtaaaaagatctataattctcagaatccatttgattttatgaacattatttctactgatggtaagacaaatttctttgaaaagaaagttggcgaatatcaaaaggaaggtgtaattgattctggtgatactaattttaaaattgatgctgatttttaacc

SEQ ID NO: 8094 - DNA, 1168 bp, Diabrotica virgifera
gaagattcttactttacatatttcctctaatcgatttcattgggcagtgattgtactcatgtaaagtatgaaaatgtgaatactgcttcacaacataaaacgttttagtttttaacccattacacccgtttaaaacataatgttttaatatactaaacagtaagtagtaggtaatgttaaaaaaaatatttttgctgcattctcaacagttgatttttgtagtattgaacctgtacatgttacaatacctattgtttatttaggaaatgctgcaatgttgtatgaatgattaatagcccaaaatgtttgagttaagacgtttttagacaaaatatactataaattatatgagaataaactataagctgagacattgttgaaaacaaccagtgaggaaggatggtgaataaaagtggacttaagaaacaatttgaggtgaagtgtgcgtacgaataaatttcatatttgtagaatattagtgatatttgtgactaatttcagtaacatacaaaatgcttatgatttattgcgtatttttgttaaaggactatacacatatattttttttgttgttgttatttgcagtaataaaaactacattccatacattggtttagcaacaaaaacgggttggataaggttgtgtaccacaaaattgacaggcagcttgaactgaattctcgacaaaaatggaaaatcccctgatatacgtgttgtaccaaattttggtcttggatgattgtatggatattaaaaatacgaacatattttgaaatagacaatgttcaaaaagtatctataaattaatatattcacagccaagaaaaagtgagtgaaatgcacgactaccatgtaatcatctttccaacgacatatttattgatcgaaggatgatacatttatggtagaggtttgtttttacttgcgtttcagccaatttgttaacgtctaattgtttaggcgcgctttttctctactatgagttgattatgagctacaaaaaatatgttacaaaaaagtattacttaaataacattgttataatatatgatgtaagtctacttttatgaacagttgcctgatatttgaaagcctcagtattaaatatatgttagtcagtaataatttgaggtatcacaataaagggcctatagctgggtaagatgat

SEQ ID NO: 8095 - DNA, 1163 bp, Diabrotica virgifera
  SmartBlast Evalue=1E-158; Info=Chromodomain-helicase-DNA- binding protein 1 n=1 Tax=Harpegnathos saltator RepID=E2BBM7_ 9HYME
ttgattaatctgttgaagagtttttcgacttcgcggaggaagataagatcttccatttccttgtcttttctcttctctgccttgatacgaagtttttctggaataatttcatcccagtctttactttcatcgtcgttaacaacattgttgactggtgagggctcggcatcttcgtcaaaagcggcgaaacttgctactttaaatgccgaaagtagttcatctccaaccaatgaaggagcttcatctctggtctcagctcgtcgaagaatttcgtcaatatcacagtttggttcctcatcgtcatcttcatctttaaataattcctcagctccaaatttcaaaatcgccgtcagatcttctttgttaaacggattattattagaagacccctttttgtccaaaacggttcttcccgtcgtgtccattctctgaattacaagatgatccagtaccattttttgttttgccctttctacaatttcttcctctacagatctagcagtaactaacctataaatgttgacttggttcttttgaccgatcctatgagctcttgcctgcgcttgaagatcgttttgaggattccagtccgaatcaaaaattatcacagtatcagcagtagctaaattaatgcccaagccccctgcgcgagttgaaagaaggaagcaaaaatcttgagacccttcagcattgaaatgatctaaggcttgacgtcgcagctctcccttgatgccaccatctagcctctgaaacgggaaatgtcgaagctgcaaatattcggcaagaatgtccaacatccggaccatctgcgagaagattagtactctatggccagtattgcgcaaacggataagcaatttatccagaagcactaattttcccgaacctctgagaagttgctgcaaaacgtcgtgttgattgtattgtgtttcaatatctgggggcttgatcaaagacgaatggttacaacatttcttcagttctatcacaatatttaagaaggttgttgtggatcctttgactcctcttctcaaggcattataattttttgttaatatccacttatagtattgtttctggatagacgtcatctctaccctaagaatttgttctactttagcggggagagatttttctacatctttctttacccgtcttaaaat

SEQ ID NO: 8096 - DNA, 1167 bp, Diabrotica virgifera
  SmartBlast Evalue=1E-164; Info="GDP-mannose 4,6 dehydratase n=6 Tax=melanogaster group RepID=GMDS_DROME"
aaataaaatatgtacatgttcaagccataggattctttctcattaaatccaaatcggagtccatcatatctttcactagctctaaaaatgtcactttgggtgcccagttaaactttgctttagctttagaagcgtctcccaatagaagatccacttctgtaggtctgaagtatttggaattgatcttaatcctaattttcccagtctctttatcttttcctacttcatctactcctttaccctcccacacaatttcattacctacgtgtctaaatgccgcttctacaaattctctaacgctgtgtgtttccccggacgctattacgaagtcttctggcgattcttcttgcatcattaaccacattgcctctacataatccctggcatgtccccaatctcttttcgaatccaagtttcctaattctatatactcagagagtcccaaatgaatttttgcaacttctctcgtaattttcctagtcacgaatgtttctcctcttctggggctttcgtggttaaataaaatcccattgcaggcgaatatattgtaagcctccctgtagtttacgactatccaataggcatacaacttcgctgcagcataaggagatctaggataaaaaggcgtcttctcattctgtggagtctctacaacttttccgtacaactcggaagtagacgcctgatagaatttggtcgagttttccaaaccacaagtcctaatagcgtccaacagtcttaacgttccaacagcatctacctctgcagtgtattcactcaagtcgaatgaaactttaacgtggctttgagcggctaggttgtaaatttcagttggtttgatttgtccgatgatcttaaccaagcaactagagtcggtcatgtcgccataatgcagaaaaaatcggccccctttgtgggcgtaggggtcagagtggaggtggtctattcttccggtgttgaaggaactggctcttcgtataatgccatgtacctcgtagcctttgtttagaaggaattctgataaatatgaaccatcctgcccatttactcccgtaagaagagcaactttcctaatttcaccactagccatttttcactaaaacatcaattgctaatggtaatggtactaacaattgaatggcacgcatgtatacgaaacctcgtaat

SEQ ID NO: 8097 - DNA, 1165 bp, Diabrotica virgifera
  SmartBlast Evalue=4E-14; Info=Histone-lysine N- methyltransferase SETMAR (Fragment) n=12 Tax=Harpegnathos saltator RepID=E2C6C7_9HYME
ggccatcttcttttgaaggctaacgccattataattcttgccttattaggggtatccaaaaagttgacttgatatactgataatccaatacatatatcaatttacgaaacctattcttcattctctctgctgcgtttatcttaaatttcgtgttttagatcattataaatatgatagtatattaatgattcgactattaatgttttcgcagtgaccatattttaaatgagaagcaagaacacatagataagctagtcatttgatatgtgatgttacagaggaaaaacagacacggaagtattttaagaaatgtgcaaagaatacgaaataataaacccaataaaaataagaaagttacaatatctggactatcttacatcgactacctggagaagacgaccccacgtgttgaagaaaaaagtgctcttccatcatgacaacgcactggctcacacctccgcagtggtcataaccaaactggtcgaatttggctacgaactgctgccccatccacagtattcaccatatttggccccatgcgatttctttccaattagagagatattcataaacttaattatgtaattaggaaaatttaaaaccaggtctaatgtaggacgtccaaaaatattctagttgatcaagaggaatgacataaatattgcattttgaataaataaaaaaaataatgtgaatattaaaatataacaccaagaggtattcttgatcgattacaatttcagttacacaattacagaaataaaataacaattttataaaacaaattttatttactgatgaagctactcaatgacaacacaaggtatgcagatgatacgacgatcatagcagaaaataaagaacacctcgagatactaatgaatatacacacagaagagagcaacggcaaagacgtaaaaagaattttgtttgtaaattacttgcaaactggtaaaacaataaattctaaatattattgtaaactttagaacagctgaaggaaaaaattcgtgaaaaaagacacagttttcagaagaatcattttcgtcaggacaatgcatcgtgtcatatgagcattttgacaacggctcaaatctatgaatcaaagtttgaattgttagagcatccatcgtatttaccagatttggctcctagcgacttccaa

SEQ ID NO: 8098 - DNA, 1166 bp, Diabrotica virgifera
  SmartBlast Evalue=4E-15; Info=Poly polymerase 12 n=1 Tax=Salmo salar RepID=C0HA35_SALSA
tcgtttgtgctggtatcaaaattattcggtggtatcaccatgtcaatatatcctctacagctgtaaccaattaaaacatgagctattatcatcacttttttacctccacagtcacagaaacgtgttgcaaagtaagcttcagatgcaaagtttacgccttgtccgaatctggaaccaaaagcggtacctgttaatctccagttaaaattatttcggcaaatatctttaataattgctctccttgttccgtggaacagcattgtttccatgtaacggattcctttacgaatgtattcatcttttttaagtgcgtaatgtagttgaagataaggattgtgtactttctcgatgctatgtaatttacagaaacttttattagattgaaaaaatatgctcttaatacgttgatattcccaggactcttctctcagactttctaattgaaatacatcattagtcaattttatattaaaattgtataaaatattgaatacatgtgttaatatttctggatttttgcgtactggtataagggcggttgtgttcgtatgtttcataaaatgttgatttatcattcttgatgaacttgaatctcctccagatgatgccagtgtttcgttattatctcgtctagtctctgatctttccagattagttttagagcttgtaacaccacaaccaggagttctggtagtattatctgtaatagctttaggatgaattgatgcactgtctgtggaagctttatcggggattgacgatctatctaaatcatttctagaactagttagtgctatatcattaaagatattcaaagtgcaggaggagcaattgcggtagtaaagtagtcgtaaagaactagtggtagtaagattaagagtattataaccagaagaaccatttcccattttttttaaatcttatcaaacaaaaatgaatgattgtcgatgcactttaataatagtaaaaataatacaaatatcgtctatatccagattaaacattcgaacaggatataagtgaaaattacatacacacatcaatatcaaataacatcactttttggaacttttgttccattgcaactatcgacttcggcttctgaatcaatgggtgcgttcggacgaccacagcggctggacagctgagccagcagtagctgtcag

SEQ ID NO: 8099 - DNA, 1167 bp, Diabrotica virgifera
aaaattcgcttcaaaagcaaaggttaatatagttattattttattgttagataaataacacaaatgttaaaagtttatcaatattgttaaaattctgctacggaaaagaatttgaaaatatggattttaatgatatttcgtcgcaagattatgtggatctgttacttagagagggtagaaaaataagatgtgataatactagtgaagcttttaaaacacaaacaacactaccttcttattacgacaaacgcttatttaaaaggggtcaaaaattcataaataagcatctatatgccatgggtctatctcagacatttggtctgatatctatttatgctatttcctccataataaatgttttacgaacaactaccaggaatagcactgctttagcaatgtacaagcggcaaattcccgctttctttatcatggatgttttatacacatctgattgtgagccaggatcaaaattttggaaagcaatatcgtttattaaacacatgcacaactcatccagtaaaggaagtatacgagcaaaatcgaatccaattaaccagaaggatatggttctgtctcagtttttgttcctgggatttcctctagtgaggggtgaaatgtgcggtttccacggaatcactaaagaagaacgagaaggctttatccatttttggagagtaattggatacttattaggaattgaagagagattcaatctctgcagcttcccaactcataaagtaatcgacatatgcgatcttctaatagatcaagcattcagaccagaaatagagaaaaaattaccattaatgctggaaacatcaaattatatatgtacagctgtttcaacagtcataccagaactgaccaccacatttgccctcaaccatgtttataacatggtacagaaaatgcgtaccatcaagaaaataccagatcccatttatttggagacgaattttattgtaggattctactataaatgtatggtttttatgatggtttacctcatgagttttagtattttccgaagtattaaaaacggaatatatgtactgaatattttgattttgagaacatttccaatattttcattctttaaatatggaatcgcagatagttttataaacttcagtatgtagaaaataaacgcttttaatcattaaaaaa

SEQ ID NO: 8100 - DNA, 1166 bp, Diabrotica virgifera
gtgtaccactccaaataatgatattatgtaccaccagtggtacatgtaccacagattgagaacccctgatctaaaacataacaatagctcaatgttttaatctttgatctagaaattgaaggaatttggagtctgcattttcatgtttggagtatattatgagattatcgttcacttgtcccataacagcaaacgacacaatttcaatctgtcagcaatgctacacagcgaacgctgaacaagtaaatgcgcatgcgaatctgctcctcgatcaaatctatatggttcttcgatgtgatcatacgtaatatagaattcaatgttaggttttgaacaagttctttcttttgtgtctcgacagtactgggtctaatatcaggaaattaaactttataatacagggttactcatttttgtaaacagctacgatcaatgtaggtttttgatattcgactgagtacagtccgtttctaactacactcttcccaggtgtttttcccgaatgcgcgattttactacgggcatttttgtatatttctttttttgtattatttttactttctagttttttatttatttattggagtgatagattcatatgattgaatagagtaacaattgagtgaatgtatacatgaaataagtaagtgtaagtgtatggtataccaaatatgtcacgtcatacgttaagaacatttagatttccttcatgtcatctacctgtgtcagcaatagatcaggttggcaactggtttgctactaaatttaaccaagttactcgattcattcataaattacctgtgatacggttagaaaaaatgtgtgcctattctaactggatgtgagcataatcacattcttgaacatttaaaagttatttgatataacgtaacgaggagctgtgactgcaacttattgatatactgttacctggaggttgttatgatacaaacttatccagctaagggtattttttattgaagtttgtctcatttcttcaggttggtttcgttgatacaatgtggaaatatatgattttaagggatggcaaaatgctccattatcctttataaaattgatagagcattataattttaatgcatttacacaatttgttctgttagaaatgctgttacagcatttatcaattaataaatatttaaagt

SEQ ID NO: 8101 - DNA, 1167 bp, Diabrotica virgifera
cttcggcatcagggtcctctgcatcatcacccacatctggtagcgatgatatacacggtttagtcagttatattgaaggaaacttagctctgactaaaatggagctggctcagaagaaagcggcgaaaaaagctcgacagcgccaaaaaaaggaggaagaacgaatcaaagctgaggaggaacagaaaagacgtgaagaagaaaataagataaaggaagcagagaagaagaaagaattggcaagaaagcaggctgaaagagagaagtcaaaagccgaagctgaggctgcagctgctcaagctctcaaagaactaaagaaaaagtccaaaaaagaaaggcaggcggagaagaaaagactattacagcagcaaaaactcgaagaggaagaaaggaaaaaaatcgtcgaagaaactatacctgccatggtgacaataaaaagggttgctgagaatggaagttcaccaacagttacaataaccttacaaggttccactccggaggaagaaaaacttatttacacgcttgtcaagggagatgacgataacgtgagcgaagctgctgtagctcaagaaccaaacaaaggatctaagaagaaaaataaacaaaagcagccggttcaaaaaccaaaaccacctgatgaaattccgcaagttgtcacaaaagaactaaaagtaacagtaggtctaggcatgaataaacaacaaaattctgaatcagctagtaccgaatctgggaagttttctaacattaaacaattagtagagagtaaaaagggtacaaaattgaatgacaaaaagcagaatgtgagtcaagatgatatgcctattcctatgttccgcttaccaccaggtattacaataacaaagatagacggtccagttcaattaaaaatttccaagcagcaaatgcagaggaacaaaaaggttcatcactaaatgccaccaaatcgggagtaatagttgtcgataccgaaaaacttattcacaagaaacaaaataatgaagctactaatgggaaacctgttagtaaaacttcaaagaaaaagaagaaaaagaataatgcagctaataaaaaagcccaagatgcaaagcccactaacgcgtccacggaggtgaagaaaatggtaactttgaagaatccaatatttcatccttttcagcaacaaaa

SEQ ID NO: 8102 - DNA, 1164 bp, Diabrotica virgifera
  SmartBlast Evalue=4E-36; Info="CG7071, isoform A n=3 Tax= melanogaster subgroup RepID=Q8SXS0_DROME"
tctgcatgagatactggaaggatgtgagatcgttctacctaaaaatgaggaaattccaaggaacgaagaactgggataggaggtgtaaacaactaaaagctgagcaagaaaaccagagctacttcgatatgacaaaaaacgtggatagcaggagaaaagtttatcctgaagacactataggataccaaataaaggaaatgaatcgacatctgatagcaattttccagttcgttgtgtcagttgcagctggcttcctttttggttttattggagtggagatcataatcggaagtctagattttggattcaggctattgctaggcatcatttgtgcattgacagtggctttagcagaactttatttcctagcgaaaaaactcaacgaggatctacaatttgagcattccttggaagaacataataaaagggaattaaattagattagaaatgatcgatttatcgaatttttactatatgtaattaagtgataaagtacaggtttactgaacaatacacacaaatacttgtttattaacaattgaatacttttattattagggttgctatttttactgttactcgcttagcattcgaagttttgataaaatatttatttaaaatactgtctgagcatgcaatatttactgattgcacataaaatctcacaactggtcattaattccggagaattctttaatttctgcatagagagcacattttttcgtagtacccgctgataattatcacccaactagaaccaaacttgtcccataatgacaatattttcaaaattgtctttaagtgtcttctcagcatttcttttgtctgtaaccagtatttataaatgccttacaaacggtttcagtagtcataagaaggcccatttgtcttataaacgtttttgctaaatttctaaaacccacttgtggagtattacatgcccactgctttaggccaatcataaaaatacttcttaaagtttgtttagcagtaaattgttgacttcaatggtcagtacttgtactggtacttcaatagtataaaaggcccagtttcgggtaaaatttaaatatgtttaattgtttgtttttctataatcttagcaattaaaatagatttaatttattttaaaacccatttgaaaacattaatttcgggtatatg

SEQ ID NO: 8103 - DNA, 1159 bp, Diabrotica virgifera
gcaggtcgtggaatcgttagggggggggtaagagggtttaaagaagactaactaccataaccaaataagcaaaggatacttacacagacttgaggactttcctactatttaaagaaatttggacgccgtttgaaaaatcctcaaattcacatatcgagtacttactggacatattccgtacttatgggaaccaatttagggacattcatcttagattcctcattgggtcaaactgggctattatttaccatcctatggcttctatgccatttctttttctttactctaaaacttatttcgtttgtattagacatctgattaataattctccaaaaaaaaggttacagaaataaaaataggtacattttataatgtttatttaaacctttagactttatttttactctgagaataaacatgttctcaaacaggaaatgaataataaaaataactattaatttttaacaagactttaccattgacaataaagattttacaatcttttctatttccaaaaatacacaaagtttatttattatttcacattatttttacatacataataactctttagagcagtgtatcaaaacaaagtttgacttatgctgtcaagtcaaacgtcactgccattttatctaatttacataaaactttccgagagtccatgttgaaaacaaactattaaaatatttaaaacctttaccaaattgatatccacttgtgaatttaattaaaacaaatattatttcataccttttttaaaacaaaatccatcgtcacacgtcaaacttggcacttaaccaaaattttccatccaagattaaggaagcattcaattctaaccaaacaggaaacaggaccaaagttgagaccaaatcagaaatcgcatccgggaatcaggaattgaatacaggaatattaccataacatcataaaaatagcaacagctacacaaaagacaggaaccgcgcacttctttaccggcataccaaactgcatcataataatactgtatactcgattttcacatgaatatatccaacgtaatgctgtgaaattttgaccaatattccttaatatttactggacaaattgcaagtccttcacttcgtttatccataacgaaaaaagccattttaaaccggaaagtgcgattctc

SEQ ID NO: 8104 - DNA, 1166 bp, Diabrotica virgifera
agtcaatggaccgtgatagtgtgacgtcaaaacgtgaaaaaggtttccaaacaaagcaactgtcaattgattatacacgtggtttgtgtaatcatttttaattttatttggttttaacaaacatctgcacattttttctaaagacacaatccttgttagtcatatcaatcatattgcttttaattttataaatgtccttacacataatcaagaatttacacgctacatagtacttactgcgtttcttcaggtttttaaccagtcctatttggaattatggtgggaaatatactatgagcattgattacaatcacgggtacccaacacattaccattttgtaaaaattaaatatcctacaagcaatatattccaattataaaaacgaaaacaaacaccacgtgtgaatttttgacagatttttgctttgtttggaaacctttccagagtagccaacgttgatttgacgtcacgactatcacggtccattactatacttaaacccatctagtttaagatgacagattagatgtcgttcagatactctaccggtcttctatgataaattatatgataattaaataatgaccggtcaatgtagaatcaggaattactaatgaggggttattataaaattgggaggattataaaaaaatgatgctggaaatacgtttttcaagaatatttttagctaactgaatagtagacctttaatggagttttatatttgaacgaaacagtttttaactttggtatatttggtcctgattcagagattattgcatcccaaactgcaacagatacagaaaattgttgatgcgttgaaaattatgtgggggagggggaatcataaagtcggaaatattttacttcttgttacgaaaaaattggaaaaattcatttactcaaaaaatatgattaccattttcgaattaatagcttcaatcacttcaaggcgcttatatttcacctttaagaaattctctacttaatgacttaaaatataatatctgtaaaactaaaataattacacttttataaaaaaagaacttattagaataccacgtttttattatttataggactcaatataaaaagtataataaaaacaatcatttttcaaatcaaaatgtcaattttaaaaacaaaaaggattttcgaagccggg

SEQ ID NO: 8105 - DNA, 1150 bp, Diabrotica virgifera
atcaatctatttctaagtaaatattgcatatttatttcgctgtgtgaataatttgagaaaataaaatgcctcaatgttgtgctgtgcctttgtgcttattgagaacatcaggatacaggtttcccaaagatattctgatgagaaaaagtggattgtagcaatgagaagggataaatatctgacaataaatgcacgtatctgcaataaacattttgttgaaacagattacgtattgcccctggattcgactgtaaaaaatcgaatacttcactataaaactcagatcaacataaatatttttattttgatctgagctatagaaatataatattaagacgatgattaatatagcttactcttcgataagggcttccttttttccagtaagtctcgcattccagcaaaaagaatatcgaaaaaaaatggaagaactgaaacttattaatgaaaaggcgcttcaagatattaatcaattacgaaatgaattaaagatctccaacgaaatagtacaaaaattagaaagagagggaagaaggaaaaatattgtgattcaaggactgcagattgacaacgatcaaccactcttgctagcgaatgaggtagaaaaatttatagaaaaggaaatgcgagtaaaagtaaacggtaatgaagcaagaaagctgggagacaaaatatatttggtagagatggatagcaagacagaaaagaccaaagtaatgcaaaataagatgaaacctaagcaactgagagaaataatatacatagggaaataatggccaaaataagaagaattgctaaggaagagaaaatcaaagaaatagcccaaacacagggtaccaaagactgaaataaacaatgaattatggaaatggaagaaagaaaaggagcagctggaaagaatagagaaagacattgcaaaatactagaattgaatacagtattaggagacccaacagagatgacccggcaaagaaaacggaaacgagaatcgaaaataataaacgagataatggcaataaagaagaactagttaaaatagcgacgtggaatataagaggatcatccaaggaaggagaactgaagcatctagtaaacgaagccaaaaaatataaatttgatcttgtggcaacaagagactaagcaactggga

SEQ ID NO: 8106 - DNA, 1166 bp, Diabrotica virgifera
  SmartBlast Evalue=4E-58; Info=Zgc:153441 n=2 Tax=Danio rerio RepID=Q0P435_DANRE
aaaatttataaaactttattttcatatcatatcattttgatcagtcgttataatttaataatttcatagtttcatcccaaagctgttgtgctaactgtggatctctagcagttttataatgtttctgataacggcactctgagaaaaatcctcccgttaagtgttctatacctggttcggtagcagcgtagattgttgtttgggcaccttcttcaggagtttttatcacaactcttgataaaggaatgacacatgagttcacaataggccatagatgtctagtcattatgtcagtagctatcatgcctggatgaagcgcaaacacactaatgttaaactcatttaatttcttggccaactcttgagtgaacaatatgttgcacaatttagtaataggatagcttggctttccattaagattttttacatcgagtttagcatacttagctactactgaagaaacgttaattattctactgggtgcggatttttttagtaaattaactaacataagtgttaataaaactggtccaaagtaattaatttgcatctcaaactgaagaccatcttcagtcaattgatcaccaagcaataaggcccccgcattatttattaatatatccagtttttcctctgttcgtagaatatcattggcaaagtttttaacggatgataacgaagctaaatctaaaatttttagaactacgttctggtttttcgttaaagtttgaatattttggacagctacagttcctttaagatgatccctacatgctaaaattactcttgccccccgtttagcacaatctaaagctgtttcaaatcctatacctgtgttggctcctgtgactataacagttttccctacaagacacaccttattcttacacgacatagtatttaacttcacgtaaattttgaagaccagattaaatattaaataagcccctatactataaagtacaatgtataacattgccgtgaataaacagtccctcaacactcatgaaagctactaaaagaataatcaaattttttaaatacaattcagtataacaaatactcaacaaaccgtaacaaacaaaaaacttgaaataaatgtttataaataataatttcatctcatcgtgtattttgtttttttaacagagttgtttgtttaaaag

SEQ ID NO: 8107 - DNA, 1164 bp, Diabrotica virgifera
  SmartBlast Evalue=2E-17; Info=Neurotrypsin n=1 Tax=Camponotus floridanus RepID=E2A6H3_9HYME
gattaacctttgtttcacttcgattacgttttcaggttccaattctaccggctctccattgtcgtaagtaaagacataatccgtttcaccaagatcgttggaatccgcagtttgatatggtggaatccaagcacttcttggggtggttacttgaggtcttcgttggtagtggttggagttgtagacatcatcgtaatcgggagatttttctactggtttaattacgtatccaggtttaccgcttcctgaattgtgactcgattcttgccagtcacctccattttgattgtgccactcagtatagctttccgtgtaccgctcagttgtaccacgtcccgcattgtgacttgaatccacatacgtattcacttgagaagattcgccgtctgtacagtcaacattggaaggatagtcgcataccgaaatcttcggattgaacacagtcccaggaccgcaatccatcacgaacgtctgaccattagcacagttcaaatatttcttgcactctgtagggtgcttgtgtagacccacgaatccactgggacaaacaggtcgagaattcgttgttatcttctgactagctggttgttggggtgtaggttggtttcgtctacagctgggatcgtttacgttacagatgttgttgtaattgggacgttgttgttgagcactcgaccattgcgtagcctgttgttgtggagcagttgaccattgggtgactgtactactttgtcctgagtattggtcacagttgtgtgtagctggattacagttatgcctgttgagttctccatgaccgtttcctaagtattcgttgttttgccaactgctcgaataggtctctccgtactgaccacaattttggactgctggattacacttttggttaactttataaatttttttaactaagccttcagtatttccatttattggactaccatgttcaccaggaaggaaacactttaaagtttgtagatcgcatcccacgtactcagtagaagtactgatttgctcttgattatcagtttgaccatatgtcgtggagtgagtataagctgggttttgatttgaatattgtcctgcagtgttttgtccgtagcttgacgtttggtgctgatttgaagattgtcctgcggtgttttgtccgtagcttgaggtttg

SEQ ID NO: 8108 - DNA, 1152 bp, Diabrotica virgifera
ctttaggcctgtaagaccttatgcaagtttttcatatttttgaataatgtgttcaagggtgatttaatatacagggtgttccatttgaaagagtacaactttggttcataccgtcgttctgactcaccctgtatagttgagagtaattttgaattatagacctctttgatacacattggttttgttgtaaacatttttttgtatatctcatggtttagccgtagtcagggaggaccagaggtttggcgcaccctgtatataactgtcaaatacgtgttcaattattaattatttttctccaacttctgtactttttcttctgtggttttgcggaatttttgtcacaatcgcaaaattttggcttagtttatgtaatacactttttctacaataatgtaagaatttttgtaaataatacttacataatccacctcttcttttcaaccagatcctttggaaacacaaagaatctacatatccctctttcactgtagtgtttacaatccggggtaaagcacattaccatttttcttatacaaaatacaatggttcacaaaagttcctaacctttgcttggataatatgactagaaaactatatttcatagaaatttaagaccgaattatggtggtattatcttaaaaacactacacttaagcagaaaaagcagcagaggaagcaaaatgttaaccttataggaattaaagtcttgagattggtaaatcgtagcttttcaacctttgtttacaacgtgaacaatatgacagtcgtgacgtcatacttcgtagtcttaaaatcacttcgtatttttctgaactatatttatgtattacatcagatattttctaccatatagaatatttatagcaaattggtaataatgtattgacacatagcaaaaattaatagtaaaattttaatctcacgtttttgtaaatcacataagatcgtcccccgcatcactcgagtttaccacgtaaactataatcatagttaacgctcatagcggatagactagcatgtcaaaccgaaagccttttgaagttatacttctttaggcgcgattgagagtgaatttttattatcctgggcgcatgcgcacacagacagtatgttggtagttgctaaatcatttaagttatgtctgtatca

SEQ ID NO: 8109 - DNA, 1166 bp, Diabrotica virgifera
  SmartBlast Evalue=1E-121; Info=Prohibitin protein WPH n=1 Tax= Bombyx mori RepID=Q2F5J2_BOMMO
attgtcacaaatctaaatcggcattttgatcatcaattttgtggttttttattataaattcagctgttaggtcaggttgaaaaatatttcagtctaaaaattacgttataaaagacatcgaaatcttcgatcgattataaccataaaagcattttagtttgtttgcatttttacataacttaacctctcatagtgaacttcacatgtaaagatgtctgcagctcaaattttcaacagaatcggccaagttggtctaggaatagccctcgttggtggagtagtcaattcagcattgtacaatgttgatggaggtcacagggcagttattttcgacaggttcgccggtattaagaaacaagttataggcgaaggtacacatttctttataccttgggtacagaaacctattatctttgatgtacggtctcgccctagaaatatcccagtaataacaggtagcaaagatctgcaaaacgtaaatatcacactccgtattctcttcagaccagttccagacgaattaccgaagatctacacaattttaggccaggattatgaagaaagagttttaccatcaatcactaatgaagtcctaaaagctgtggtggcacaattcgatgccagtgaactgattactcagagagatgtagtttcccaaaaagtcagtgaagatttaactgaaagagccactcaatttggtgttatccttgatgatatatcattaacccacttaacctttggtagggaattcacacaagctgtagaattgaaacaagttgcccaacaggaagctgagaaagctaggtttttggtagaaaaagctgaacagacaaagaaagcaactgtaatctcagcggagggtgatgcccaagctgctgtgcttcttgccaaggcttttggtgatgctggagaaggtttagtagaactgagacgtatagaagcagctgaagatatcgcataccaactatcaaggtcaaggcaggtttcctacttgcctggaggacaaaatttgttgttgaatgtgccaacacctggtaattagatggatagagtaacaaacaaaattggagctagttgattatttggctctatgaatgagagagttgcccatttagcttttatggttctattatttttataaaagtatgttaataaattgttgataa

SEQ ID NO: 8110 - DNA, 1164 bp, Diabrotica virgifera
  SmartBlast Evalue=1E-69; Info=Sodium-independent sulfate anion transporter n=1 Tax=Camponotus floridanus RepID=E2ALF5_9HYME
taggtttcaaaacaacgatttccggaatatcctccgatctgctgcagtaattgaagagacttggatcagccaaggcttcgagagtttttaggtgatcttctttaacgttgatgagagcgaggttcttttcagaggtgttgtacatctgcagtagcttttctaaagtctttgctgctgaataatccaaggtcagtatagttgagcagtctaaaatgatggacaaattgggatttttattgctgacctctttgatatattcatagacgtaatcagcacctgggtatagcaaacctaactcaggttttatgtataaatatttacccttgtcatcgaagtcttgtttcgtatcaatgtgtattttggcctcgcccacatcttaagaataaacataatattaaagatagctccaagaaatatagctgcttccacgccgaacaaagcaccaaccatcagtgttccaagggtcaaaaagaaatccactttactgcatctccataagaccgggaatatggcataatcaaacaaggaacttactgccgtgatcaacacagctcctagagcagctttggggatgtagaagaaatatggagcaagaaaacttaaagccaagatgatcacagtacctgagtaaagtccttgcagaggcgttcgtacgtcactgctgctagcaacggcagatctcgagaaggctccggaactgggcatagctcgaactaaggaaccaaagatgttggctaaaccgagagatatcatttcctgtgaagcatccactactgaacttgtactatatgatttagctatggccacattgctaagcactgccaccaaaggcaccacaaaaactccactgcccaaagattgcaccatctcgacagtttctacagtccggtttcctacatgagtgctgagagaaggaaatgctaaaactggaacacctttgggaacatttccgatgatcttgaaaggagtactgccagttttgctccaggatccggctactatagtagctagaaggacaacgatagcatttttggagatggaaagtaaccatataattttcttaactgttttgttttctgtcttaactaatcgattaaggttcttaaaaaacagaagtacaacaatgcaagttacacccagtatagtgtcaggcatccttatttc

SEQ ID NO: 8111 - DNA, 1163 bp, Diabrotica virgifera
  SmartBlast Evalue=1E-66; Info=Immunoglobulin-binding protein 1b n=1 Tax=Harpegnathos saltator RepID=E2BYW2_9HYME
atctaaccgaaattaaaatatcaaacggtaaaaaatatttataacaatatggcccaaaatgcgaaagatacaggggaagcagatatcgaaactctatgttcgatgttcaaggaaggtctaaataactacaattccatacttaacagtgaccagcctacaaatagcaatgaattgcagactcaaatcaagaaaaccatgaaaacttttgaacaggcaacgagactggtatcattatcaagcatatttagcacaaacgaaggaatagaagagataccaacaaatgatctacagtacttactccttccagcatttttaggttcactaagtctaaaattaacgtcaggagaaaggaaagatattgtagatgtagcagaaatatattttaaggattttttaaagaggtgcaatgattatggtatgagtaattatcagtttaaagagaaacataaaaatgatgagaaagaacagagggagaggacggatttggagaaactggagtactctgtcaacactagagctaataaaatacaaagatttaaagaacaaaaagaactaaaatccaaattagaggacctaaagacaaacatggaaaacgaacatgttgatgatgaaatcaaaagaaagtactttctaactatgattaaactttttatctatgaatctattgatgaacttaacagtattgatatggaaaagcctattttagagcacatggctaatatgaagaaagaagaaaaacctcaaccaaagagaccacctcctccacctctaagacccattgttataacaaaggatgaagtacagaaagctgtgtttggtgctggatatccatctttacctgttatgacagttgaagaattttaccaaaaacgtgttgaagatggcatctttcctgatccaaataaacccagacaaggtcccatgtctttacaagacgcagctacttccggtgtgtctctaagtcaagaagaaagagacaaggaggaaaacgagaaactagtggaagaagacaacgaggagtacatagcgagaatgagagctaaggatgaatttaaggatgatcacagaagaggatggggtaacagaatgaatagaagctaagacttttttggaaatacacgtggggtgtaaataactttaaaatatttttaacatcaactggg

SEQ ID NO: 8112 - DNA, 1163 bp, Diabrotica virgifera
  SmartBlast Evalue=4E-80; Info=Putative rRNA methyltransferase 3 n=1 Tax=Camponotus floridanus RepID=E2AKJ6_9HYME
ggttaattcagatgatgagtttagtgaactaaaaccaatgccaaaatataagaaatatgagaaaggcgagggacatctagatagcacaggtacattctataaagattctgattcggaactggaaatggagagtgacgatgaggaagatgaaattaaagaagggttaggttttgatgaagaagatagtgacgaacagccttctaaaaagaaaaccaaacgaaaagcaaatccaaaagataaagaagaccaatccaatccattaattacagatctagactatcgagacaaagacaagaaaaaagcccataaagcagaactgtggttcgaaagagacatttttaagaacctaattgatgaaaaagatgaagacgctgatctagacaaaatggtagaaaacttcaagaagaaaggagcaaaaatctatggtgaagaagatccgaaagtagacaatattgtcaaagctggaaagaaaaaatcaaagaaagagattacagatagtgcttatagttctgatggaaatgatacagatactgatactgactccgacacagattctgactatgatgtagagaaggaagtaggcgctccagtgaataattctaagaaggatggatttgaaattgtaaaaagtgtaagtacaggtaagaagggaaagaaatacaaactaaattcagaggagctcgccatgggtactatgatggtaaacagcaaaaagccaaaagagatttagttgatgctgcttggaatcgctatgcatttggtgatgaaggattgccggattggtttaaacaagatgaggagaaacatatgaaaagggaagtcccggttcctaaagaattagttgatgaatacaacaagaaattagaagaaataaatgtgcgacccataaagaaggttattgaagccaaagctagaaagaagaggcgcgcaatgaagaaattagaaagagctaagaagaaagttgaatctgtcctcgacaatgcagatatatcagaaagggagaaggccagacaggttcaacaattatacaagaaagccaggcaagaacccaagaaagaagttacatacgtggtagctaagaaacacatgactggcaagcgagtagccaggccaaagggggttaaaggacactataaagttgtagatccaagaatgaaaaaaga

SEQ ID NO: 8113 - DNA, 1159 bp, Diabrotica virgifera
  SmartBlast Evalue=1E-20; Info="Major epididymal secretory protein HE1, putative (Fragment) n=1 Tax=Ixodes scapularis RepID=B7P1A9_IXOSC"
aaacgtttatttaattttaatttataattatacattctactattagactacgttaagagttgtaggctattattacacagtttaattagtaaggcaaatagattttttaatatactaccacagcttctctgatatattttttagttttccttcatattccgaactatacatttttttattcctactatattaaccacataggtacataaacgctctaaataacatttcatttttaatctcatttttactattctttcttagatttgtttagttcttaatgctaacatcagttttagcctatgtgaccctgaccagctacctaattacatatttggtaacgaaatgggatctattaatattaatttaccatgtctttctattaatttttcattaaaaaatactatttctacatattatgacttaaatattacctgtaatgtatcaaccagttattcttaattttaagtcttaaataactatatatattatttttctacttatttaaaatatatataatacaaaaaggtgtgaaaattaaaaaatatagaactgtgttagcattgaaactttaaaaggattttagactaggtgtagagagttatcctgatcgtatccttgtatcgtttttcattttgaggaactatgggaattttctggctcaagctacaatcttagctggtatcaaagcacaaattacgtctttgtcattttcgtcaattaaatgtagctcaatatctactgttaccctgggataattttttttttacaggcatgctgacggtataggtgtaggtatctccggagcttattggacacgtcactcccatttcacaagcatttggatttggcaaattaaatttttgtttaagtagaccaagtttaccaatgacgagggtctttaaggttttagagttggtattcgatttaaacgtcgccaccattgatgcgtttgtgcctcgttttaatgggcatcgatcttcgccttcacaacctgccagctctactttgactatttggccagtcacggatccacaatcctcaatatcgtcagtatctgctaaacaggatgatatacctaaaactaaaattaaacacatcgcacttatcaccacttttttcgatcccattttgaagagcaaagacacaagaccgtccaact

SEQ ID NO: 8114 - DNA, 1163 bp, Diabrotica virgifera
  SmartBlast Evalue=1E-80; Info=Cathepsin L-like proteinase n=1 Tax=Diabrotica virgifera virgifera RepID=Q70EW9_DIAVI
agaaaacattcatttcaaataacttataatgtcgagtttcctatagatggcgcaaggtatacagtaaatcaattcttgtagtttccaaaaagctgttaaaaattaaaggttttcttaaattttttaaacattagcaaatgggataagatgctaaggtggcaatcccacattggtttttcttatttctggacataaatacgtatccgttcattccccaatccgcaccccaagaattttttacgatccaataaagtactccagaaagatcaactccgtagccaacaataattactccgtgatttaaacaattcattgcgctgcagcagtatgggtcgttcatgatacctcttttatagaactgcattgtatgtgacgcatgcatgccgatgcaaacaggtctctgtgctacagcaattagtaaattagcttcattcccttgcggcagattaacataaccaacaatggtgacagttgttttagtattattaaacctgcagattttcctcctcgcttcatatggatagtcgtcttccgtttgtattccacctctttctagaatccaatcgaaagcgcttgtcattagccctccatcgcaaccactagaatgggcatcacaatccatcaagttttgcttacttaatttaatcaattgtttggttttgaagaagtaggctgcttctataccatatgccgcactaaatgcccaacaggaaccacaatccccttggtcgcccacttctgtaactgctccttcttttctccaatccacttcagaaggtggatttgctttgatgcttagatccgtatgtagcgactgttgaccttttgaaaaaaatctgttgtggtcgctttgggagcgactaacccatcgagaaaattcctctgctgtcatgtcggcaaacttagtaatgcccatttcaaatgtggagagaccactttctgctctggcattgtgttcttctatttggcgtaagttttgttgaaatattataaatctttcgttgtctaccgatctaaatttgtagtttttgttgtactttttcttatattgcatccattgttctttatctgttaaagcttcaatcgtaacaaaaattgcaattaaaattatcacaaaatatttcatttttatacctttacacattttggacggaagtatttac

SEQ ID NO: 8115 - DNA, 1158 bp, Diabrotica virgifera
  SmartBlast Evalue=8E-38; Info=Endonuclease-reverse transcriptase n=1 Tax=Bombyx mori RepID=D5LB38_BOMMO
tttactattgaattactttgtcaattaggttactgaaattgacatttttagaagtgtcaaaggctttctcaggccccttgaccaaaataaaaaatactgaaatctagaagcttgtcattgaatctgaagtttcattactcttcaaagtctacagtgaagatttattgaaagaagcgctctcagattcaatagaaggtatagctataaatggagaagttttgaatagcttgcgttttgcagacgatacagtaataatgacggataacaacaatgatttacagaacgtaatgcaccgccttaatgaatgctgccagcaatatggactgaagatgaatttgaagaaaatgcatggtcatgactaaatcagcagatgtaaacatccaattgaatattgaagatactgtaattgagtgtgaatacctacaaatacttcggaacatggataacatcaaacgtagaataaacgaaagatacgttttgaaatagcatgtgcatcattcattaaattttaaagtttttttgttgtcgggatgtaagcttaaatctacgcttaaggctgttttggtgttacgtgttctcgactcttatttatggcttggaaacgtggacactaaaacaagtagatctgaataagtttgccgcctttgaattttggtgttacagaagaatcttgcgaatatcatggattcaaataatgtcaatcaggaatgtaactagaataggaaatgaagcggaaataatattaactatcaaaggacgaaaacttgagtacttagaacgtgatgagaggcaaaaatattattacaacttactatgcaaggcaaaattcgaagaaagcgaaatgtggaaagataaagaatatcctggcttaagaacttaagagaagggttgaatgcagtagtgcaggactatttcgagcagcaactaacagggtccgcatagccatgatgatttccaaccttcgatagaagatggaacttaaagaagaagttttaaaattctttgaaacactagataaggtgattatagattcttaaacaggctggtggttctgcgtagaaaacaaagaataaaatatggaattaaacaagaaaagttgtaatttctagtaacaaatgcccagagttcttcatcatgtatcgttatttgaatactaca

SEQ ID NO: 8116 - DNA, 1162 bp, Diabrotica virgifera
  SmartBlast Evalue=1E-124; Info=WW domain-containing oxidoreductase n=1 Tax=Culex quinquefasciatus RepID=B0WCM6_CULQU
tttagccatgggactttcttggcactggtagcaattgttgaagtaaacaccagtaactccagccaattcaatggcagtggcgcaataaatgctcgtactggccgcttgttgaaggctcttcgtgaacggcctcacgatggcgaacaggaccctgtacagccaccaattcctggccagtttggaagacaccatgttgccggggtgcaggctgaacacagatatgccggccgtttggaggttcttggacaactggcggccgaagaggacattgcatagtttggagttgttgtaggccatcatgtcccagtatttggcagcggagtccggcgagagggtcagaggggtaatgttctcgatggtcaggttggcaaacctgtgtgattcggatgagactaccacaactctagaaccattgaccagcagtggtctgagcaggattgtgagataaaaatgtgacagatggtttacttgaaatatggtttcaaaaccatccagagttttactgaaaggaagaccaaaaacgcctgcgtttaagattaacatgtctattttgtcgtatttgcttttcacagtgttggcaaactgtaccactgatgacaatgaagttaagtccagatatatggctatacagttctcaccagctgctggcttatcttccctgatttgattgatagcttcttcggcggcagctaagttcctacaagccattatgacactgcaaccatgtttggctaaggaccgtgcagtttcgaaaccaatgcctgcattggctcctgtcactaaggctgttttgccatttaggtctcttccatgtaaaacttgtagtgctgtgctggaagcatcaaatctctgcctgtaatcgttgacatgttctttttcctcgactgcaaaagctaatctgggatctgtataagtagttctgcgattttcgtggtccacataaattacttttcctgtgtttttgtcaacacatctttgccaaccgaaaggaagatcacctgataccttctttttctttcctgttctggggtgagtccactgagtattcttcgttaaatgattcgcgtaaaaaaacactaccatccactgtaaccctttcctcccagccggggggtagttcgtcttcactatcagattcaggtagattcatatttaggaaaat

SEQ ID NO: 8117 - DNA, 1150 bp, Diabrotica virgifera
  SmartBlast Evalue=5E-51; Info=Reverse transcriptase family member n=1 Tax=Glycine max RepID=Q1AKH8_SOYBN
acagagtaatggagaaatagatggagatgcatgcagtagaattagggctggatggatgaagtggaaggaagcgagtggtgtgctgtgcgacaggaaaattccaatgaagttgaggggaaaattctataaaacagctataagaccggctatgatgtacggaactgaatgttgggcaatgaaaaagaaagaggaacaacgaatgcatgtggcggaaatgagaatgtttagatggatgagtggagtgacaaaaaaggataaaattaaaaatgagtatattaggggaagtctaggtgtggcaccaattgatgccaaaatgagagagcataggttgagacggtttggtcatgttcaacgtcgagacgctaatcacccaatacgaagaattgctgaagtgcagattcctggaaggagtaggagaggaagaccaaagaagacctggggcgagacgattaggtgggacatgttggtaaaggggattaatattgatatgacccaagatagaattgtatggagaaatgcaattagggaaggaagccgaccccgcatagggataaggcaaagaggatgatgatgaatcttttgattgcttcggttactctagagctacggcgcaattctgtgttagttattcggtctctcagggttaatcccaacataggccgttccattgccttctgtgttgatcaaattttgtttacgggcgtcttagtgagcattagcgtttccacaccataggttagaatcagcagcacatattgatcaaagactttctcgttaagcagatgggaagaactgatttgaaaacatctctcagctttccataagtcgcccaagtcaaccctattttacgtattagttcattggtctggttatctctgcttacgcgaatttcgtgccccagatatttgtagctgtttgttctatacttgttccagccatattgataattctcactcagaacgaggtttgtcatcacttgtgtccttgatttattgatctttaaacccacttttgtagaggcatggtagagcctttcgcacgttttgatggcataatcaatgcgatctgttaccaaggcgtacatacactgaaatctcatgttttctcatctgaaacccgaaacttaaataaagcttttatgaccctattc

SEQ ID NO: 8118 - DNA, 1160 bp, Diabrotica virgifera
gtatctccttgcctctggacctgtctcagccatggcagtctctgacttaataaatcttacaatagcatgaccttcactcatttcattaatcttatcgtttcttccgagtctgcatgttccatcttcctcttgcaccgtcttgtatagtatgaccgtctttgatttgagttgcaacattcaccagattttattcaatcccaatagcccgatcacattttctgtggtactttcaagatattttttagctgaaagaaaaaatacacactcaaaacattgaacatgtgttcagttaaagtggactaaggcaccacttggtatcgttcctcatgttacaaactggcatctttcgccaacacaccaaaaattaaattgcatgttgatcgtgcaatactgtactttaccaaatatgatattcaggctatgtggtacattgcatgaagtaaaactcccattttcgatgccatctatcttatgtaggtactaaaatacaatgctttagtcctttgtaaggttcctctaactacgtgggttgtaccattttgaaatccacgatttacttggttcgtcaggaggtcaaccttagctaaagtatctctcatacaccgactatataatgcagcgcatagacgccatttcccaccggcacctttagaatctctgcactgtacctaaatatttcgcaataaaatcatccgtgggatgttcgtgggaactcacataaatatgttgcttacctaaattttacactagacacagggttgccagatgtgtgtatatatccgaaaatcttcctcacactgacttaccttattcagaaattaattttcttctttagtaaatcagtaagttttaaaatgaattcagcgtactacgtatattaagaacaaaaactctatgattaaaacgaatgtatcaaaaaagccataaatgtgctgaatattcattataattttgtatattttgttttaaaagaaatattagaatattagatatatgatattaatctaaaacgttacaataatcttattatattaaattgtaaagaaaacattgcttttttctgttttgttgtaaaatattatgagtacatatgattggattttatgtaagattggatgtagaaaagcactgttgaatttcattgtcgaatagatgtgtaa

SEQ ID NO: 8119 - DNA, 1159 bp, Diabrotica virgifera
  SmartBlast Evalue=3E-62; Info=Cysteine proteinase 1 n=1 Tax= Chrysomela tremulae RepID=C3UTC1_9CUCU
atttgctgtccttttctataacaaacgtttgttatttatagaaaagcacagcaaatacaaaataagtgattgatgcgatcgctcacgggcacttccttcatctttccgactgtagtcgtattatttgctaatttaatactggataagaattcaggtacataattccacactgatttttattacgaggtatcctaatataaccttcttccccccatgagataccccatgaattttttaaaatccaataatctactccatcactggtgtcatatccgacaacaagaacgtctatatttggaaaaccttcgcactcggcatcgtaaattccacctccaaaaaatcgtaagttagtaccattgataagagaacttattggtccaatagtagccacagcattataaagcgtagtttcatttgcattgagttctacatgctctttagttttagcaagagttggacttgtgattacatcttttaaacagtctgcatcgagacctttatatggatattgctcttctgagcataaaccttgtgcttctacgtcataaaatgaccaagtcgccattccactttcacatccttggttccaactagaacagtccaacagttcttgtgcacttaggttgacaagctgattgctatgtatggcaagttgtccttcaagtgatccgcaagcactgaaagcgtaaccagcacaacagattagatcaaagtcaaaaacacttttaacagatgtaacggcatttttcgttctccaatctatagatgttggaagatcatcatcgctaacttccaaattaactctacgttcaacattttcaagcaactcatttatggaagtattatttctcttaatcaacctattaaattcttcgtcagtccagtcagcgaactcagtaattttcaaatagtaggaggattccccgcgatggtattttacattgtgtttttcaatttcacgcaaattttttttaaatattagaaaacgtagtttgtcttcttttactttataacttctagagaaatttaccttaaatgaattccatacattttgatcggacagtgcataaactgacaaaaagacagttgcaaagataattatcgttttcatcgaaaaattatcagtaaatttcattttcaacaatatgcactaaacaaa

SEQ ID NO: 8120 - DNA, 1161 bp, Diabrotica virgifera
gggctggtggcagggagaattgaacggaaaactggctttttccccgacaattttgtggtacttatttctagtgataacaaaagtagcagtaaggaagagaagaaaactcattcgaaagcattccccgatacaggtgccataaaatcagtagcttcgcaacgaaaatctttagaacccaaatcggaaaaaattgataaaagcgactctccaagtccaggtgatagcattcataacaagactcctccagttccgagcaaaaagcctgtagtctcgatcaagaagtcaccttctggttctggcaccgggttcatttccgaaatcaagaagaagatcgtagacgtcgtagatggaacagcgagcagtcgaatgacgatgcacaaggagaaagaagtagtggtagaaaatacagagaatgcctttgaccaagtcgaaaggagacctttgttgggcgatgttcgggctggcagagtcaaagctcccggtcgtcgtccacccactactataatgcacaaagatgattccacgacgatgtccaacggaaacattgtcgaagcgaaccaccacgactcgcagatgatagataatgaagtcaaacctcgtcataaaaataaaggatctcctcctccatggctggaggaaatgaagcagaaccaagtcaaaagaactatgatgacgtcaatggagggacagccaggggaagtggaaggaacgcctgaaaaagaaaaagagttggattcaccaaattcaatgtctccgatacatcctaagctaaaaacgcctaccgaaccacacagaccggaaaaaggtccacctcctccccgaccgaccactacacacttaacaaaggacattcccccaacacctagtcaacctatagtcattccaaaagaacccattcctcccaaaatatctccaatgaaacccgttcctttaccaagcgctgggagcattagagtcgtaagcaccgctgacatcttggagcgactagaagcactagaggaagcagtaagaaagcaaaaccaaaccatcgaggacttgaggaatcgactgttagtggaaaccgagatgaggatgttgctgcaggagaaggttatgcagaatgtgcaagtttaggtgtctttcatttacgcagtgtctgcgcattttggtgaaaccttttat

SEQ ID NO: 8121 - DNA, 1162 bp, Diabrotica virgifera
  SmartBlast Evalue=1E-122; Info=Aldo-keto reductase n=2 Tax= Aedes aegypti RepID=Q17DM5_AEDAE
ggtgaaatttaaaatatgtttctaaacaaactgataagactgtatgatagcctataattttttctagtaaaaatttataaaaacagtgatttaatttcaattgcttcactttccacgagcacctccagtgttttagatataataaatatcaaaatggtccaagtgcccactgttaaatttaacaatggaaatgaaattcctatttttggtctaggaacatggaagtcaaaacctggtgaggtagctcaagcagtaaaagatgccatcgacatcggctacagacacatcgactgtgcttttgtctacggcaacgagaaagaagtaggtgaagctttggccgccaaattcgccgatggtaccgtgaaaagagaagatattttcatcaccagcaaactgtggaacacttaccacagacccgacttggttgaaaagtgcttgcaacagactttgagcaatttaggtatacaatacttggatctgtatttgatccactggcctatggcatacaaggaagacctcgatatttttccaagaagagaagatggttcaatcatctttagcgatgtagattatgtagacacgtggaaggaaatggaaaaagtacagcagaaaggtctcgttaagtccattggtgtctccaacttcaacgaaaaacagatcgaaagagttctaaagattgcaaagatcaagccagtcaacaatcaggtagaatgtcacccctacctcaaccaaaagaaactcatcgacttttgtagatccaaagacatcaccgtcacggcatatagtcctctgggatctcccgaccgcccgtttgccaaacccggcgatgttgagctcttacacgatcctaaactgaaagatctagctgccaaacacaacaagagtccagctcagattttactgaggtttcaagtcgaaaggggtgtcatagtcattcctaaatcagttaacaagggtagattggaacagaatatcgacattttcgatttttctttgagtaaagaagacttagcaacgttggagagctttgattgtgacggaagattgatccgtcttgatgcggctcttggacatcctcaccacccatttcttccgactcagtaatttataataattgttctttgttaagttaaaatttgaacaataaactatttttagaaat

SEQ ID NO: 8122 - DNA, 1161 bp, Diabrotica virgifera
accaggagttaaatggtggtactccatatttgtcgaagatttgtgtccaaaagtaatacatttcgcttttaggattccatcgaacttccaaccaagcaccaatggctaaatattggaaagcatctggttttaccacaggccatgtaatgttttgcaacaagtcaactcgttctggggtgggatttaagtatttagcaaagtcagtccataatttgataactctcttttgaacagtttgatcgatttctgggtatttggagagatctgtggtatttaagcctccatagtttctcctcagaataaaactaatttcctcaccgtgtcttacatcttcagagaacccaatcactgattcatcgacaaaacttcctaatacaccatgaaacatgaattcatagaaatagacatcggcccatttggaatgtagctcggcactcttgacgagagatcttgcaaaactttggtcactgaagtatttaataagacttctatagtcctgagaaaaatctatgtaaggggaatagaattctttaattttcgaagccacctcagctctatctgattcctttgcgtgaagtcctctgggaattagtatagaatggtctgcagaaatttccgttgctagctgttcgaggtttgtcatatttccaacgtagaacaagttttcttcagagtttactcccatcataagttttacatcagtattaaaatctccgtttttcaaaatttcatacattgattttgtcagaaaagcgttttcgtgttcgtgttctatgactggagcgaaataaaagccttgctgaatttgattatcagcaggtttttccattctctgtataatatgagcagctctgtcgatcttctctgctggtagttgtttcaggtattcatacacctctgaggaagatgcattctctaaatctggattaagcagtttcaccagcaaatatgagatttctgtttgattgctttggtaagcccaggcacttaacgctgaaccactttgactaatagctcctctaaataagcctttggacattggacttaaaacttgatagtgaacggaagctcctcccgcactctgtccaaaaatggtaactttatttggatcaccaccaaagtactcaatgtattcctttacgaatttaagagcctgcactt

SEQ ID NO: 8123 - DNA, 1159 bp, Diabrotica virgifera
aaataggtaatataggtgcagttaatcttatattagtttaaaaggactttttttcgcgtgtaaaaaacaattatgttcttccataattacttcatattcagattttgtatctctgtagcgatggcgagtcaagtctacttaggctgacccattgtgcatcctcccagggagcttccagctcccagctttcgtccttagctcattgtccatcctgccatttccaggaagatagacaaatcaccagggaacatactctcatattgacgataaaaatccagctcagtggctagtaatttatctatgtactttgtggttaattgccagacttcacctccataggttaacactggttttaatattgtgttgtaaattcgttttttttttatttcggttcttacattttttgccacagtaccaaattcagggctatcacctgttttccctttactatactatactttaagtgccatctccgcgacgagggttaacaatcatcgctattttaaccttcgagacagttgccttgagctgcaaccaaaccattcttccttgaattatgagtctcaagatgttatatgtttcgatatatctttcgtgaacgagataaaaacaaatacatataaatattgcgagagcagtcaaggaaggatgcgtcttgtctaagacccttttcaaaacatactcacaggccactttcagacaagccataacggaatgacaaatggagtaagaattgacggcgaaataataaacaacaaaatatttgcaaacaacacggtaattatggctgagagtatgtataaaagggttacaaattttagtaggtgcagtaaatagattgctatagacggatatatgtagtggaaactcgtatgcgtaatcgtctaacacagtggttcccaaccttttatgtgtggcgacccaccttctgatgttttttcatattcgcgacccatccctcacccatgatgttatatatttacggtattcagctactgtaagagccacgccgcgacccacctgaaatccgctcgcgactcactagtgggtcgcgacccaccggttgggaaacgctggtctaacatgttctgtccacagtatttttaatgttttgctaagtaagttgttctatcttacaaatatgttaatttaagagaac

SEQ ID NO: 8124 - DNA, 1161 bp, Diabrotica virgifera
  SmartBlast Evalue=3E-28; Info=Secreted protein member of chemokine-like factor super family n=1 Tax=Ochlerotatus triseriatus RepID=C6ZQY5_AEDTR
cgttggtgcaaatagtaaatattcatttaaaatggattgggcacgaaaccagtggtttcgcaacattgccacataaaatagtcgaatagttgtttatttattgtacatttaatattttttcattatacatgactattgtaagttccgtgaaaaataggacactaagcgcaaaatctcgcgaaattatatacaatgttttaaaatttacacaggagaaagcagaaggagattttactgtaaaatagataataaataaaaaatctaaaaaccttttaaacctattgatctgacaacgtcgcgtagttaaaattttctgaccttgtctgaccttggcggtttcagatatttttgttgatttgtacatatttccgaaaaaatgagataaaaggccaaaatgtttgccatatttatggactaagggagtacctataaaatatttaacaatctgcttcacatttagtcaataatcgaggtagctttaacaaatcgctaacttatctgttggtatgttcgtttatatttaaaaacaacttaaaatagtttagaaatcgcctctccacgttaagagggagtccaacaggaatagggctccgttgacaatagccaatgaagctttagccaggccgaagtctctccattctgattttccgtatttgtcataaattttaatgttcaatgcaccggcggcaacgaagagggcgcaaccgaccagggagaagaagatgtcgatccttttgttgaatggagtactcatgaggtaacctgcaaatcctcctatcaaaataataacatatcctccaaaagctgctgaggataatgtgtcggtgtctaagtcattggttttgcttttgtagtgaagaccaatacatgcgatggcaatggccaattccaaaaatttgatgatagataaccgactaattgccatttttaaatgtaattcacactgatttttagacgagcaaattcaaatattgattctacaaagttttcacacaacgccttcgtctgactcacaagaatgtgttttgattcaaagcaaacacaacgctgaatttgtatttgtcctcgtactcgtactctgccactgtttgcggaagatttttgtccttatgagcgaacagcgaacgaacgaatctgaacgaagatggacagattcgaaac

SEQ ID NO: 8125 - DNA, 1161 bp, Diabrotica virgifera
  SmartBlast Evalue=6E-58; Info=Regucalcin n=1 Tax=Camponotus floridanus RepID=E2AGQ0_9HYME
gcggtgtggaaagtcgagtggcaacatgtggaggtttttgtgtctagtgttcgttattttcagagtgggatctgcagatttgggtccttgcgtccaccaggtgacttcaccagtaggccatgcagaaggacctcactgggatgctcgacgaaatatactatactttgtcaatattccagatggagaagtgtatgcctaccactataattcaaaaatattaaagaagattacacttagtggaactgcatcaccagttgtgccttctcgaaaagatcccaatctcttaatcgtgggtgtaaatagatctgtggtggcagtcgaatgggacggaaaaaataaactgggaggtcagcaagtccttactacactgagtcatcaattcccaggtagcaggctaaatgatggcaaggctgacaaacaaggaaggttgtggtggggaacaatcggaccagaggtcaatttggttgtcgcttccgatcagggtctcttttacaccattaccagagaaaatttaaacgaccctaaagtagcagtgcaacccgtgacgaatagtaacggtctagcatggaataaggcaaacaacaaattatactacattgatacgcctacactaaaagtagtgtcgtttgactatcatgacggaaatggcacaatttcttctactaaccagactgtttttgatcttagatcaactcataacgttacaggtttacctgatggaatgacaatcgataccgaagacaacctttacatcgctttgtttggaggaggttcagtaattaaagttaaccccgcaactggaaaactactgaaggtcatagctattccagctagagatgtatcttctgtaatgtggggaggtccaaatttagatatactattcgtcaccacatctgacagaaacttatctccttctgaaagaattcagtatccagctgctggaagtgtatttgctgttactggtctaaaggccaaagggtttgaagctcacactgcagatattattgacgaattgcccaaacagaaggagtgtgggacatcgtaattaatacattccgtaacttttttccttaattccaatgttatgttttaaattgtgatttatttattgttaccaaaaaatatacaaaaaatgtgttatataataaataaatatctttt

SEQ ID NO: 8126 - DNA, 1162 bp, Diabrotica virgifera
  SmartBlast Evalue=3E-90; Info="Cathepsin L-like proteinase"" n= 1 Tax=Diabrotica virgifera virgifera RepID=Q70EX2_DIAVI"
taatctgataagcttcaacaattttatataatagtttaaatttgtcaaaacacacaatttttgtaattgtcaagaataagaaaggtcacaatgagagtgatcgttgttattgcttgccttattgtggcaatcactgccaaattgaacgactatgatcactgggtcttttttaaggacaaacattcaaaacactataagatcacagaagataagctaagattccaaattttccaaaataaccttcgccaaattgaagagcataacgcaagatatgctagaggagaagtaagatggttcaaaggtgtcactaaattcgccgattggaccaaagaagagttcaaggctttattgggacgccaagctgcttccagacccaagcgtaatgaaagtttgggagtgtatatggccgatccaaatgttaatgtgccatcctctgttgattggagaaatgaagatgcagtactacctgtaaggaaccaaggaatgtgtgggtcctgttgggcttttagtaccgttggagctctggagggacaggtagcaattcaccaaaaacaaaaagttcctttgagtcctcaaaatcttatcgactgctctacagaaaaccttggttgtgaggatggagaccaagtgaaagctttcgaatatgttcagtcgaacggtattagctccgaagaggattatccttatatggtaaaagatcaggaatgcaacaaaaatgtcaaaaaatcgatcgcttccatctcgggatacaaacatctaaatccaacggaagaagatttaatatcagctatagctaccgtgggtccaatcgctgtctccgccgacgcatctgattggccatactacgcagggggcatctatgatgacaaatattgtggagacaatatcaaccacgccatacttgctacaggttacactgatgaatatattgtgataaaaaattcttggggagaagagtggggtgaagatggttacatgaggatagcaagaggaaaaaatatatgccacattaacgatgacaattcttatccgattttgtaaatttaaaaaaaaaattgttattgccatataaacaattagaaattgtgaactgcaaataaaatgaactttttaaataaatgtatattctaataagttttgtaaataaatatcatattatagt

SEQ ID NO: 8127 - DNA, 1159 bp, Diabrotica virgifera
cgataaaatcggcaacattgctgatagtctagtcgcaacatagggggtcccatggacacttttaggtcgccgcgatttgatggtggtattataggttttttgggtcgctgaatccaatggaagtggtctggaagcccaaatatggtgcgtttaattgttattaacaaattatggtaaaattaggtgttttttcaggaattattagaagccctgtaaataaattgatagcgttaaggtcttctctggtgtatttttggtcgctgaatcgaatgcgactagtcgcgttttaagaaaaaatagtacgccactgagatgtcaaattaaaaatcatttttcaattgctcgttaaatttacgacaaaaaatctttcttgcccccttttcacatgcggcaccgtttttatgcaaaaaataaaacatcttaacgtttacaaagtatttgaactaagtttctatacatatattatggaaactacctcgaacactttgtaagcattaagatgttatgttttttcgcataaaaacggctcctcctatgaaaaaaatgcaagaaagatttttgtcggaattttattagtaatattttctgttaatgttccagtatagtattattatattgaatatttctggataatgaaatatctaagatccttcaaatacaactaaccactggttagactttttgaaagcattagatactatagaaattaacaacgcaatgaaaaccttatagattatcggtagtccaaactgatcggaaacatatatacaataatgcacccatgaccgtaagattaggtacacaaagatacaaaatcaaagtatacaaatcaagaaaggtatccgacaaggacacatgttatcaccggttgattttttacataaacacattatttccctgaaaaccaaagttcacctacttcgggagtttttactgagtatcatttgactcattcggctgacttaactgaagtctacatttataatatattccatacatactgcatcttgatggtattgtatgatatgtacaatagtgtttgcgtgttttagggatctcgtttcaaaataaaatgattctattaacccattcgctgccacctgtcgccaaaaggcgtcttgcgtgcgtgagtagggtgccactgtcgccttctgacgtt

SEQ ID NO: 8128 - DNA, 1156 bp, Diabrotica virgifera
gtgttgatagggacctgcccgcttgtagatggaagtatactgtggattctcctatgtccgctatttatcggcatgtgtctttgtaaatttgtaaaaggcccaggcaacagatagttaccagggattctgcactcagacctatagagaattttctatgtctctagatagatgtcgctaacacgcccgcacgcatttaatattttattaatatgcatacttcgacagttcggattcagttcgctttgggatacaccacaggcggctctgaagacgctgaaaagcagaaaccttggtcagccgatggtggtggtccccaatcgaatttaatctaaagctatcgttcctcaaaataataatagacatacaattctgtgcattatgtcaaatagatctgtgtgttatagactttataacaatttttgccgttgtcgtggggttaccaacttcatttattgttccagaaaatctcatttttaaattttatttcagttttaatatacaatatttactattttcgtttgcctatatactagatgcgtcaatttttgtaaggacctaacaattagtatagaattgtctaaagtatttttacgtttttgtaagaacacacgaaaaattatagtttgacaccaaaatgactaagaatatttttagaaataataggattgcacacatttaaaaactgatatccgagttatttgcgcctttgtaatttataatgaaactttgacgagcttgtaatgtctcctaatttaatgttttgctcgttttttataagaacaaatcacgattacacatcagtgtcatcttttttagtgattccagtgagacaattttccagtgttttcattttccagtgttttcctgtttgctctaaacgcaatgctctgtgtagtgtgttgagtaaatgtcttattactaagtaaagccggatagattctaacttaatcatactttacgtaaccaaacttggtttttttttgtaagcatttattaacaatcagattgataacaagtacaataacttacatcaactatagtattgtacactaatatggcgttgaggtacataaatcacccagcggtacctccctttcagcgaatatctatgggccataatcttcgcaatcttctgttgttcagtggctgcagttgt

SEQ ID NO: 8129 - DNA, 1161 bp, Diabrotica virgifera
  SmartBlast Evalue=2E-62; Info=Lupus la ribonucleoprotein n=2 Tax=Aedes aegypti RepID=Q17EQ5_AEDAE
ctttatttttaacctaatttttacaatatctaaacaattagataaagatgataacatattttgtttattagtcccttttactaactttggcatctcttcttccgccaccaaagttgccctttcgttttctgttattagaattttgtttcttatgttttctcatgtttagaatcgaatctgaagttttcttcagatattcctcctcttcgtctccttctaacactctcaatttgactttttgatctttaatttcaagtgtgtcattatcaactgtcttaaagaactcgacagcttcgttttcttctgcgaaacgtaggtatccctccaaatcaccttgattaaaatcaacgaattttacttcaattttgccgacttccttgaccttttctttaagatcttcccttaataattttacaccttcctcgattccagagaaatgaataatggctcctttgggaaactgaagcggtgtgcccgattttgcagctaccttgctagcagctttctcgttttttctgtcctgtatctctttttttttgtcgtcaaaatatacttgttggaatttcctgattagttctgtttctccatatttgatactttccgcttctacgaatttcttgcaggtttcgacatctttgaaaataataaaacaggaacccttaaatttatggtctttggtggatctacgactgcatgattcgactggtccatatgcatctaggaaagtgataatgttgttaaattcttcatccaatggaaatccttttgcgtaggctgtcctccccatgatctctttgcgtctttcctcattcaattctggactcggtttctctggattgcgtctaagtttcttacggtcttcgcttaccatcactaggccattttcagacttttcaactgcttttgcgattaattcttggtcagtagataacgacgaaagacgtttgaacgttaataagacatccagagtgatccacccttcatcttctttgattttctcttgtaagaatttatcacgcggcagattgatgtctccgaagtaatattcgatttgtttgatgatcttttgttctaaatcgttagccattgtgaaaatttgcagtcaatatacttaaaaaataacttatttgctgtaaacacgtgtatctacaacaagagcaa

SEQ ID NO: 8130 - DNA, 1156 bp, Diabrotica virgifera
ctagccccaaatacattttgaaatgcctggcaaatgataataatttaagcaattgcaagaaaaaccttgtatttgttgcttatgggtgcaatccatgagcaaaagaagcatttcttaaagttttttttatattgtttgtgttaaatgagtttttttttgttaattttcatgaagttttaatcactttaccaaaattaaaaattacaattgtgccattttggcattgtaatttgtatttaatgactgaaagagtatatttttgaatcgaacgcacaaaattatatctatgtaaacttctagtatgagaatttaagacaatgattggcaattctcgttaatttcaagattgacttctaatttatataaaaagagtcacaaaaaaacaaacatacttgtttaaaaccaccagtaagttgaaaatctcttctctttcaacaaaaaattacaataattctataatacagcataacccgaacataaacaatactgtctacccgtttgttattccccgaagcatcttattcttcgagtacgtcgatttttgatacctccaagagaaaaagagacccaactactgataattccataaatccatacctcccgcttgatttttttttcactaatcaaaaacagtggggcacctaattcattgcaatgggtctgaaaagcagattaagattttctatatgaatatgttaagaactgtactgcaaagacgacgatttggagataaatatagtggctatacaaaagagatatatttttttagttttgtctttttttaagaagtaaatgtgtcgctcgaagtctttgcagtgagatatattttttggacagctgtagcaacatatctgggagttaaaaatgttgatacagggaatacataatacgctagaaaccttgattctttgtcttagtagatctactggaagcaattatctcagaaaacaaattatttttctatatatctgtggtgacatatttcaaatatgtcctcatgtttgtattgtcagtggtgtgttaactgtcaaacgacagaagtaacatatgacacatgatatagagtttgccaatctttctggtacaaaaagtcaacattttctctctaacatattatttctttatatgtgtgacaatattttccaaaatagtttaa

SEQ ID NO: 8131 - DNA, 1160 bp, Diabrotica virgifera
  SmartBlast Evalue=2E-56; Info="Class B secretin-like G-protein coupled receptor GPRmth1, putative n=1 Tax=Pediculus humanus corporis RepID=E0VM50_PEDHC"
gcatcacatacaatattattctgaaaatcatttaaaaaaatatagtatcatattagtcgtcaaaaagatgtttgtgtttacgtagtataatgttttattaaaactaagattttctttggtgaaagatggctccgaaaagtatggcacaaagaacaaagattgtgaagtatttatgttctgttaagggccgattcttcaggaatttttccgttcttcatatcactaagacggtaatcggtgctgactgcggtggtatcagtggtggagtagttgctggtccgagtgccacgagccgaagaagtagtcatggagtgagcaaggtgtggtttgccgatacatatgtagtacttctttttaagcgatctccagattttttcttaaagacaaagataaggaaaatcagtaccccgtacattgcgtttgtaaagtcagttatataccatacataagcaggggtttcagaaaaagcatagtccacagcccatgaaactaattctgtaatccagtttacacccatagcaaacatcaatttcaggtataagttgaacttttgtttgtcatcttcataggtatgtcttcggctgtcagtctgttttaacattgaagtttccttcttaattttttgtattctaacagtagtgagaacgaacaaggtaatgtttattccgattaaaatggccatgggtagatagaagtagtagaatgttggcatgccctcacctaagaagcatcgtttaactccgatttgaggattccagctagtatctgtcgatccataatgatttataagaaatactataaggacatgaactattggcatgccccaagcgtagatacagtaaataatgaatctttttcgttcagctgtttttttagaaaggaatgttctcataccgctaaaagctaaccacatatcaacgcacatgacgttcatccagaagaacgacaccaggaagaagaatataatcaggtaacccaaaacgtgacatgttgtatcaggaaactgtcctgagtagagctgaatagtgaccagagtaatgtatgctgctaataacgtaaacacgtatgacataagcgctcgcctgtgcaaatttctctcaggtaatagcagataaacgaggaacgtgagaagcagggaatggcatcgatattatcatacc

SEQ ID NO: 8132 - DNA, 1153 bp, Diabrotica virgifera
aatacatgattaccgaggtccgaaagtccctgaaaacttctataatttttatttgagagagtttatataagagaaaattgagtgtgatttttaatttcaaatatctcattcaaaagaaactttttgtttattctacgaggactttcggccctcggtaataatgtttcattccgcgtttacacctttcaaaaatattcattagtcctctcaggattcgaaaaaaaaataatgtatttaaaaagcactggtccgatattttgcgcctacgctcttaattgtaatatgttaattttaaacactactaagaatttttttggaagctttcaatgatttatagaagtgaataaaaccatattaaagatattataataaagtactaagttatccaacaaaaagttccatattatggtttttataaaaatatgtaagtttccaaaaaaaaaagaaagaaataagtttgaaagaaaaagaaattcataattatatcggcaggtaatactttttacactaagcaaacaccaagcattataatggttcattgtaaaaaattacggatccatcagcaacatattaatccccttttaatatctaagagaataatttttattaaagtctttggaagatagttgttaatgtacaaaaaatttagaaataaaaaggataagttagcgatataaagataaaaaccatgaggcgagtaataacccagctttgttctacaatgaagaatttcaaagttcgagtttatgcgagctttttcttggctttgaatcaattatatacgtaggtggtccgataagtacttagcctgtccgcccgatggcgctactatatcaagagaaatatactatcatacaatacattcttgtaaacggcctatgtcaaaatctcagccaaatccgattcgtagttttgttttgaccgcgtgtggaagtgggagtgtctggggattttagaaaaatgaaaaaaaaaaacaatatcgatcggtgaatcgattcctgtttttcgaagggaaattgtgcagtgaaatcagagaacgcttggatgctgtgtacggtgactattctccttcgatggcgaccaacaagtgtagccatgagaccacttcagagcagtatttgaggctattcaaacgtaatccgaaggaatttct

SEQ ID NO: 8133 - DNA, 1159 bp, Diabrotica virgifera
  SmartBlast Evalue=1E-113; Info=Protein phosphatase 1 catalytic subunit beta isoform n=1 Tax=Oikopleura dioica RepID=Q676D8_ OIKDI
tatgaacagaatttcgtaaaaggtcatgcaaataacatgtaaagcatgtaacgagcagaatactttacatttttttttaaatttgttactttacgtgattctgtttttaaataacagtcaataagtaactacttagtacttaaattaatatccataataaatctaattcactttttaaatcacttctttttttcaatatgttttgttggctccaaaatctgaaatgaacacaaaagattttcatttattgacataagcgctccagcgttgtcaaatgtaccacaataatttggagccgaaaatatcgttattaattttctctgagcgaagaattcatagccgtcttcaacaacctgatgacctctgcaaattaaatcaaagtcatgtttccttaaaaacttattaataacatctggaccaaatgagaatgacactcctctgtcattttccgtccaaccaggctcggtactgggatcagaccacaataaatcacagagtaaaccttgaataggaatgtcaataggacgctgaatatttcgaatttgtcctatatgtaagagatctgggctcaagcctccatggcagcagaaaattttgtcgtctatgatggcagccaccggcaatgtgttaaaaacatcggtaaatagtttaaatattttagtgctatatcttcttttgcattcatcaaaaaatccgtatatcttacatactgcggatgcttcatgattacctcgcagtaagaagaaattttcggggtatttaattttgtatgctaacaataagcatatgacttctacagactgtttccccctatctacatagtctccgaggaataagtaatttgagtcggggggaaaaccaccaaatccaaacagttttaacaaatcgagaaattgtccatgtatatcaccgcaaactttgattggtgcttctagctcgagcagcatgggttgtgacataaatatgctcatagacttgaaacataacgcttttatatcagattcagatatgcttattagtttgattttcttgctctcccgaacctctttggaggtgagttttgtaataattttatccacgtctagatgtgtagccattttgaaaacacttgatggatccaaaaaaacttgtgagctgtatctacctagtgactaaattt

SEQ ID NO: 8134 - DNA, 1159 bp, Diabrotica virgifera
  SmartBlast Evalue=1E-130; Info=Transmembrane protein 115 n=3 Tax=Aculeata RepID=E2AFT0_9HYME
aggacttaaatgctactcatctgatttttgggttatgttcatcggaggactgatatcagattgtgctttgggcaaaatttggggactctggtggtggatttgtttcgatgttgacggtgcgtgaagcggtagcaacgttttcggactttgttttggtggtaacaacggttgtttatcgctgtatgacttcgataacctttcgcttagggcttttagggcaatttgtcttcgtctttccatatcatgctgatctgcaatagggacagtaactgtgacaccagttggattggacatatcaaattttctaactacctttctacataatcctattttaaccaaacccgtgtggattacgttacttaaaactgcaattggtggttgaatgacattggggaaaaagcttgcaaatgtaaaataatcagccaaatctcctctggtaccattagaatgtttctgataaaacctcagatacacccaactaacaatcatcccactgaaaaacattgttggataagtaccatcaacaagtcctataagcttaactatgacagataagaaaaatactgctaatggtacatttctattgcttatttttccaaatggtgtcttcaatataactagatcaggcataatctgtttcactgtcacacaaactccagcaatgtatccagctaatccatgtatgtgtacactaaacagaaactccgtgttaaaggtgcaacaatataaaataaagtaaaacgcagtggtcaatacagctacacccagattaactacagcaaagaaagtcatgatttccatttgtccccataaaggttctatcaacttcccacatagtcccacagttacaatgtccactaacacttcataaaaatgtatttccatgaaacagaacgtaaaggtcgtccatatccaaaaggatgggggcattaaatagccaggggtaacagatatcaccctgacagcttcatctgagaatgataacccataacttaaaagtactactccacatataaattttacggaagtactagtattgcctaagagcgctccaaattgttcttttaagaaaggaatatttcttcctaaagccctaaacatagccatcgtcaaatcatttaggttatgttttatgtttttactttttctagacaacttg

SEQ ID NO: 8135 - DNA, 1159 bp, Diabrotica virgifera
  SmartBlast Evalue=1E-92; Info=Zinc transporter 2 (Fragment) n=1 Tax=Harpegnathos saltator RepID=E2C512_9HYME
ttctcaaattatgaacccttttaactccttcaatccttagcaatgtgttcataacttcttcgaaattaactcctcttggtagtgcttccattaaaaccattaacgcatctttgatgatggcaaaagtagttataacaaccaaaacggaaaagaagaaggtacaaattggatccacaatcattagatctggcttaaaataaattacgatagcagctacgaaaactccaaaactttggagaaaatcgcccaagacgtgaatgaaagccgccctgacgttaatattttcctctttttcccaccatgtgcatgtccatgttcaccatcgctaccactgtgagtgtgtccatgttggtgtaaagttatacccattatgatattaacaataacaccgacaccagaggtaatcaacataactttggaatcgacttcgtaagttttgtaaataattctttgtacggccatgtataccaagatgccagtaacaacccaaattaaaagtactgaagttagagcaccaataacttcggctctataccagccgaataacattttttttggttgaaggtctgtttgccatgtacaatgaaaatagagagatcataaaactggcaaaatctgttagtagatgagctgcgtctgatgctattgctaaactgttcgataaatacccccctactatttctcctaacataaatattacgcataatatactggccataataagtttttttcttgcccggttgtccacttcaggagttttatttgagtgacagtgcttgttaatgagttcagttgtgtctgcattttctctggtgtttattgtcgattcaccttccatctctaacacttccccctcaagcactgtacagcatcctgcactaggtttaccatgcacacagtacacaacacctctgaggctggatacgctattttctcgagttcttttccccatcgaaccatagttactgttatcgattttaactaaggaccctgtttctggaccattctgcatctttgctgtttacgaagtcagtggacttcctgtagttggtcaaaactaaacgtaactctatgcgataccactatagtaaacgttatcgatttctgatcacaaaaatgtcgatatcaaaaaattcacttgatatcttagttactcgcc

SEQ ID NO: 8136 - DNA, 1156 bp, Diabrotica virgifera
ttcacatttttgtactccataaagttgtcattcataaatactattagtctagtcactattgaaaacagcttaacccagcgtgagctaagccgattagaggaactatacatgtactttgatacaactaaccaaattatacctactatattaagagtaagcctctgcctttatacccgcagaaagatttatgaactggcgattcacaaaatcgcttttctctctttaactcacgtacatactaatttgattttagatttatttatatcaatttacgccgttattaatcagattcagagttggcgcaacgatatgaattcattgtaatttcgagacgaatctattcatctaaattttattggcatttcagtgatattatattttccataagatgtgtgcggtgtcctttcttaaatttgtttaaaataaaccattattttagctgttaaacgaaacaataaacatattcctcacttacactccgcttgtttattttcgttagtcagcgttagtttattctattagtcagcgcagtttatgtaaaatcaaagtgttaccttttgtgatctcaccaaatttggcgaagaaaatattttgaaatattttaaaaaaaaattcatttcaaaattacattctgtccatattgtgagtttttttaaggtaaggattaaatctcgataaaagataaaatctcgatgaagaagaagtctcgataaaatttgtttttacgcatgtaaatatattttccacaagtgtgttcaccattttccttttacacttgcatttgtagtgtgttgtcttacagaagtacaaaagatttgcacattttataaacaataagtttaaataatgttattttaagcatttatactctaataattaattttaaacattgtttcttgcataaaacataactttactttatgcactttatttttatttactttgataatttgttttttgtaatcatatttttgtagaagaaaatatttaaattattaaaatttcaatattttttctttgttttttgtagttgcttaaaaatttatgcaggaaacaatataatttagaatagtttctcttacaatgaaattggttttaaccttctatattgcccacttgtgtgaatggagaaaaatattttattaaatggtattgc

SEQ ID NO: 8137 - DNA, 1160 bp, Diabrotica virgifera
  SmartBlast Evalue=6E-74; Info=Putative regulator of ribosome biosynthesis n=1 Tax=Heliconius melpomene RepID=D0AB92_9NEOP
aatatatgcttcgtataatacatcgagccgctgaaaagaggccgaattcccaactgttgatccggtaagtgttcttaatctaaactatatacacagcattaacaataacaaagactatcagcgtctcttcctaccacctccacttttaccacctttcctctgtccccccttgcctttaggtttcttgttttttgcagaagaattacttttttttctgctctccgatcttccttgattggaacttcctccaacttcattattaacatgtcttgatacagctttttctatgtctaatttaggccttttgttcaaaatcgaatcaactatggctaatgtttccttcctttctgtgtcaccagatactggtgccagtttcctttttctcgatactccaggtgtgattgctgatattcctcttgcttctttttccttaggtaattccctctgaaacttacctaaacttgctgttgatgcttttgctatagtcactgcggcttgtaaatctttagctgtagacacttcaggatttgtgacaccaactcgagggactttaatttttctagtttttgcaatatttctcaacctctgcaactcatttttggccaccctctcacctttagcttgtgctttcttttggaattgatcctccattggatcagcattggcgggaacttccagaacccaatctttttctttttcagcttgtgttcgcttaaatccatataagggtacccactttttgagttgctggtcccatgataacttggattttttctttttctgtatacctttcgttttggcaaactgttcccactttgttaaaggtttgggcttaggtagtggtttcatcctaggtaataaagttatttgaagtggtaatttcactacaatagcttcttctaggcgttctgtagttaagtcccatatttgatttaatagtaattgggtgttatctctagctaaattaagcaaataatcttccttctgcctccttaataaatttgtatcaaattcatttgtgtcttgtgctaaaaggcttcctaagtcataatttagatcaataagcttatttactacggttggcttaaatttttcagcctctagggctgaatttgccaacaattcatccatgtggtttttagaaaataatgcctaaccac

SEQ ID NO: 8138 - DNA, 1157 bp, Diabrotica virgifera
aacttcattgtgatcaaccgcaacccgttatacacattctgcactacgtgtggcctaacttttacaatactactctggtaaatcgtcggcctcatatgaaaagtgcctaagtccaaattaaccaattttacaggagatgaaaaaaactgatttaaagaatgattttgacttaaaactttatcttatttgacacagttacttagaatagtgtccgtcagccttctcataaaggtagatctattattaaaatattattactttaaaaatggagttaggcaactttcatttttgaaataaaacaaatttggagtttggaatgtggaaacacatttaataacgaaaagcataaagaaatatgcgtaactccataaaaagtcgccaaaaataaactgtgaaaaatgcttaagtcccacaagaaaatcaaatttggggttttgcggataataatgctacttaaatgtagttaacacaaaaactataataatatgatcaaattgaacttaccttcaataagtttacactatttccatgaagatatgttagcttataacacttttcttgaagatgtaacacagcagcgcagcaaaagtacatctaaccacaatgagaatgatggactttggcaagtttcatgtgattcaccgaacgccgtggagttgggtagaattctattttggggttctagcgacatctatggatttttttgtcttgctatgcatgcgtaccataaatattaatcagacggcgcaaaaatctcatttttgcttattttgggacttttcatatgagaccgacgaaatgtattatatttgtgcaaaattttggaatgtgtttaataggtagaacaatgattttaacattagtttatatgtaatacagatttcagtcttctacaactgttttctcttttcataacttttgatgaaaattaattaaaaaagcagagtagaatttcccactgaatttcctatggcctgtttgacgattcactatcgggtatacagtatggtgcaaatgaaaggaatacatttgttatttcgtaaaccggcgactttaaagaaaaatcccacataatgaaaaaaaaacaggtcgactttcatttttaaattgtgatattttggcatgtatgtgatactggtgacgtcatccatctgggc

SEQ ID NO: 8139 - DNA, 1157 bp, Diabrotica virgifera
  SmartBlast Evalue=1E-110; Info=Cytochrome P450 6BQ12 n=1 Tax= Tribolium castaneum RepID=D2A095_TRICA
gtctatctcaaaaatacacatccacacaaaagttcttacataattttgcaacagtattatttcaatttagaaactgacaaccatataccaccgtccattgccagaataaatcgttgggaaatgtattttactggaagtttggtttttgggtgcacatccacttggaaattcttaataaatgtgattaatgccactttggtttgcattaaaccaaggcgggcacctaaacaatatcggggaccctctccaaatgtcaagaaagctgctgggttcctgttggctttattttcatctgtaaaccgatctggatcaaatttttccggatctggataaatctctggatcattctggatagccaatattggaataatgacttggactccctttttaatcgttacattagttccaggaacgggataatctttggtacattttctgggaagatttggagtaggtggatgttttcgaagagtttcataaaccacttgttccaaatatttcatttcctgtatggcctcgtaagtcaattcattattgtgcttatccaacacccttttaatttcatccctaagtttattctgaatatctttgtttctgcctaactccaataatgcaaagctcgttgcagttgacgaagtttcataaccagcaatccaaaatattaaacactgggctgccagttcattgaaagttatgaaattctctccttctttttctccctcttgtttaaatatgaactggtcatcggcaacttttccgcggtttttcaattgtagcagcaaatgcatgaaatcctttctgctgatcttatttgtttctctataattgacagttttttcaatgacgtccaggaaaaaattggtaacgtcgtttggaaatgtcttcaagttaaaaaagtttacaacttttatcggtaatataaacaaaagtgtttccttaaaacgttcaatggcacttaaatcaaatattttgcggcctttatgtctaaattcttcgtttggattttttagggaattgcattccaatccaaatccaactgttgcaatgacgtcagtcgtaaatctggcaactacgtctcttatatttaatacttcgttgaatttagcatgctcttctagaacctcagttaatcccttagatgtagagcaaagtgtttg

SEQ ID NO: 8140 - DNA, 1154 bp, Diabrotica virgifera
  SmartBlast Evalue=8E-76; Info=Ribokinase n=1 Tax=Aedes aegypti RepID=Q17H56_AEDAE
aacagttaacattccatttaatatcattattttaaaatgacctccagcaatattgtagtagttggttcttgcatgattgatttcgttagttatgctccacgattgccaaatgcgggggagacgatccacggaagagaattcgccacgaatttcggaggaaaaggggccaatcaatgtgttgcggctgcaaaactaggtggaaatactgctcttgttgctagggttggagatgatatctggggtcccaagtacatccaaaacttaaaatcactaaatgtaaacactgaccatgttcaaatcacagaaaattctagctcaggaatagcccaaataactgtgtctgatgcaggagaaaaccaaatagttatagtggctggagctaacaaccatctgaacactaaggatgtagaagctgctcaggagctcattagtgatgcagcagtgttggttctacaactagagactgcacaggatgttgctattagggccattcagctttgtagagggatttcaatattaaatggtgccccagctctttcggaatataatgaccagatattgaaacttcccactatattttgtgttaatgagactgaagcttcaatatttacaggcggattgccagttactaacgtcagtgaggctgaaaaagcggctcaggacctaatctgtagaggctgtaatagtgtacttataactttaggtagtcaaggggcactatttgtaagtaaaaacgaaaaacacgtcgtatctagtccttcagtgaaaagcgttgacacaacaggagcaggagatgctttcattggagctctagcctaccttctcgccaacgacaaaagtataccgatgcaagaggccttggaaaaggcttgtatagctgctagtgatagtgttacaagacctggtacacagattagctttcccggacctgaagtgttctcgaagagttcgtaagtcaaaaaaatggcttgaaggagcggcggatctacggggagggaaaaaggggaaattttcctcctaacaaggtccaaaattaaagagaaaaattgttgaaaaataaaaatatattagctgacatgaaacttgagccacagacagataaattcaacccaataacactctagttagaaattaagggaacttaatgcatataa

SEQ ID NO: 8141 - DNA, 1157 bp, Diabrotica virgifera
  SmartBlast Evalue=1E-106; Info=Uridine 5'-monophosphate synthase n=1 Tax=Culex quinquefasciatus RepID=B0W331_CULQU
tgccatttttagtgtatctttaacataactttctgtaatcaagttaccagctgcgctggcctcagctaaaagaaagactcccctctcctgtaatcctgtactgttttttatggcatcaagaactcctttgcccatgagagagtgaaccgtgatcaaaggtgcccaggatgatatttggtatattcctttactatattgatactccacggtctttccaatatcagcaaactttctatcctcgaataagataaaattatgcctcttggctatttcttgtaagggaccaatcaaatttagatgaaagtcttccataatgtcgatatgtgttttaagggcacatatgcttggacccactttttctgccaagtttaataagtcagttgaatgcaacagatctgctgctacgcatagggttgattgtttcgtctgcattatttggaacagcttttgtgcaacagggtttttggctttcagagctctggatcggaatgacacattaagccgattttctgtaatatgattcaaagctgttttatcaactttcgttgaagccaaatagcttcttactttctctaccattttctcatccacacaacctgcttctttcaacatttccattagctgcatcatacccagcaaagaatgaaccttaataccattattattcaaaaaagcttcacctccttgttctctattcaataaaataagagcgtcagtacaattcaaacctgcgtctttaagatcttttacagtttccaaaattgaactgccagaagttatgacatcttctattatgagacaattttgaccaggctcgaatattccttcgatgagtttctttgttccgtaatctttggcttcttttcgtcgcatcaccatgggaatgtttgtttttgtagacagtacagttgcaatgggcaatgctgtatatggaactccacatagtaggttaaaattgtttatattatttactttctgaatcataagatcagatagagtcaccagtagtttaggatagctaacaataactcttagatcacagtaaacaggagtcataatcccaattttagtcttatattctccaaattttatagcgttaatggaatataattctttggcaaactctttcaatttatttgcataacactccattatga

SEQ ID NO: 8142 - DNA, 1150 bp, Diabrotica virgifera
attatagcactttacaaacacatacaaaaattacagttaaacaaacccctaaagattatgaaagcagttctttttgaaaattaactcaaatacctacttaaattaaaactaggtatataaataaaacaaaagcatattagtataatattttcattttacaagaggtctagacttggaatcatcatcacagcatgcagctttgtactttctcacctcgctcatatacatagaccaagcatcacgtgatgagctctcctctgaagttggaggcttcggcttttgcaccataccagtttttaatactttaccgcctcttcgcttaccaaaaattggaattggttttggagctacaactggtgggggctcttcaactttcttttgttgttcttgcatttttttaaacatttctaaaaacgaaccatcatttttgaaaacattatcttttgtattatcatcaactgattgattaaattgagaattcatgccttgaatatcagtatctctttcttcagacgatctttgaacagatcttctgtgctttaatttacttgatgatttatgcgatcttgaatgactttttgatctagatttagacctggaatgttttggagatcttcttcttttgtgtctatgcctttgatagtaacctcctggtgtaaaagctggtgagcgagatcgacttttagaagaactgtatcttcttcttctacggcgagagcgggacctagatcgtcgagatcggcccttagatctggatctagacctagaatgtcttcttcgaaacctctcacgagaatgacttctagactttgatctaaatctgcgatctaagcaccgtttctcatactcaacatactcaggattttttaaatatggattgactagatctatgagtctacctgtgggctcgttttcctgtgtctcatcttctttttctatggacatttctttctctgatctgtggcctggatcatcattaattggctctggtagaagatcatcttcagttccaggaggtgggggtatatcccattctacacgagcaggattcatctgtgggaagtatgatgattgacctgatttaaatgctggattatattttcctcaaaattctttccaaaatatgtctgccactttatctgaacaaaag

SEQ ID NO: 8143 - DNA, 1157 bp, Diabrotica virgifera
ggcgtgtatattcaacgtgtggtaaaaatatatttactaacgacttaaaaacattgaataaaccttgcaagtaatggaaagaataaaaagtcgatgttataaagacttcgattcagatcggattatactgtcaaaaacgacagaaaagtaaaagattaatgtatttaacgatgtcaaaagttcctttgtcgtaatcatctttatcgctttgaagaattttctagttctttgcaattagaattattgttggaattatttttacaattttattcactggtagtacagcgcagacgagaagaaacaaatatatggtaaaattacaatttcttttcgaaaacctcgttttatgtagtcaaaataaacttattaaattttgttttctgtgttatgcacacaacgttttgtaaaaaagtataaattctataatactaataattaatctatcacatataaaatatttgctagtacgtcaaaaataaaagactacaactggtatttaaacttcaatgggataaaattatacaaaagctagtgcaaaaaccaatcactaccatcaaataaaaatgttccctttactatggtattacctgttcataatcaatataacaaaataacaaaaaacttgtatacaaatctattacattctcatgtaggcagaaaacccccacctaccattgtcaaagtctcttaaaattgattcagttacttttttgccattcaatagaatatcaaaattgtttcaattgatatgtcgtcagatggcgccacctctcctgcgtcgtggcgtcatctttcggaaaaaactcgtataaaattcaatatgatcagcgtcttgacaacacaaaggccactaattttacaaacattggtactatatcaaaaatcttgagagttctgacgtgaaaacctttataatgctgttcagtccatggaaaatgatataacctttgacagttatcgactactgatagctaacaattaagattcccaacaaatagatcctatgagtcaatagtgaagtaaatctttagaaaaatgttttaaatagatatctttattgactcggttaaccaatacacatgctgatactcttatatcaatcacttggatttttgtacaataagaatacaaacacgagtaatatatgaataagcacc

SEQ ID NO: 8144 - DNA, 1155 bp, Diabrotica virgifera
  SmartBlast Evalue=1E-133; Info=Serine protease H99 n=1 Tax= Tribolium castaneum RepID=D6WS54_TRICA
attataaagtgaaatttattaaaactttattttctttagtgatttttagtaatttaaaaatcatcactactgttgactcccacgaacaaagtaagagatcaacgttttgtcctgctgcctcacaatgcgtgcctctatcctcttgtccaattctaagcaatcttataaatactgattgtttattaaataataacatagagcaaataagttgtggttatcaaggatctggcttagtttgctgtccccacgtaggagaatccgcgactctggtacctggaaggctagttgatggtcagagatgtggaatatcacaagttcaaggagacggttacgaaggtattggagcgtttccatgggtcgcgagaataggatttagaaatgtactcactggagagataaaatacccatgcaccggatctattcttaatgcgaggataatactcacagctgctcattgtgctttagcgaaggcggataattttaaactatattcggtccgtgtgggagaatataattctaatactgatattgactgtggtactgaattttgtgggcttcctgctcaagacgtttcactgagtcatgttgtggtacatcccaattatcaaaaacaaaacttccaaaataatatcgctttgcttgtattaagaacaccagtcaactttacggttactgcacaaccaatatgtttgccagaaccttggtctgtcacgagcaataacgcacttttggttggatggggtaaagctgcaggtcaatcatatgccttgccaaagcagcaagttctgcagttaccaatcattagtcttcaacaatgcgttcaagtgtacggtagaacgctgtcagtaacagaggatcacctgtgtgctggaggagaagctggaaatgatgcatgtagcggatttggaggagctcctttaatagttcggcacggaaatacacattatcaggtgggcatcttatcatttggatccgatcaatgtggccgaggaggggttcccagtgtgtataccaatattaagaaatatattacgtggatcagggaaaacacaccacaagtttttgaatagtcaaaatgtagttactaaattaagtagtatagtttaatttttattaaaataaattattgtacagaataaatagcataaaaattct

SEQ ID NO: 8145 - DNA, 1150 bp, Diabrotica virgifera
  SmartBlast Evalue=6E-42; Info="CG4558, isoform B n=5 Tax= melanogaster subgroup RepID=E1JJF2_DROME"
aaaatcagcctttttatttgggtatagattaaatattgataaagacttttataaaaaggttaacacagttaacagtacgaattgatataagttatggaaggcccagttgcattcgttactggaagactaataggtcgccagtaccaccagttataccataatatatatgaaggcttcaatactactgatacagtacggcagttattactacattctttggaaggttttagtacaatacttctctctccagatccctgtattagaaatacgtagctgcattcggtattaggtaacacgtaaggctctgctgtgtggccatctaacattacaaacctttcaacgctttgaccagatctttctggaagaaaaaatggttttgggaagacctgacgaatgatacgagcagatgccattttggttattctccaagagatatgagtgttcaaattggacagaaaaatattgtcgtcactaccaaataaatctcttaatgtagtaatactggaattagtagattgtagtcttcttgtttctgaatccaggagtaccctgttttgtttgtaagtttgttggagggttttaagggttacagtcttttggttcgatttgacaataaaaggagttccagattcagatttaagataactttcctccattgatgaaatattcaacacagcgaaaacattttcgcagggccagcattccatatctgctacataaaagtaggggttttctataagacatgtttcatcatataaatctgttaaagatggaaacagtctgattattgggacagataaaaaccttataaatttcaaggttggataagttaaaccttgaacattccttaaaactatgctggacgttggttgatgaacgttcaacaagatgtaaataaaaaaagatagggtagtaaatagtacgaatatgtttcttatgctagtacagagactttgagctttgattggtttgggcacatttgtaccattttgttcctttcttaattcgagaaatgattgttcgaatagtatgttgacttctttttcactcaagcctaaatttttggcatgtttttgatttggactacatttttcttgtattcttttagaagttctactttttgactattttctgtaaaacttaacctagt

SEQ ID NO: 8146 - DNA, 1152 bp, Diabrotica virgifera
aggggggatcaactgtaaacgacgctttacgacggaaggggggagggtattaaaaactccaaaatttttacggcgtagtttatggatgttccctattcagcgcatactttacggaaacggaccacatcgattcacaccgaaacgcgtcgaaatctctgagtggaatattatcgcggatagcaagttcgacgaaatagttattaaacgattcgttctaaagctttttttgtgacatcttatacaatttttttacaagaaatcgccacaattttaagtctaaatttaaataaaaaaagtctaaaatgttgtattttgttttgtgtgtgtgtttatttagattttatggccttggtttgagtcaattggtcacatattttttgagatcagtttttacaacagataaaagttcttgatcttattcgtaactcattctaaagtattgataaaatttgtcttggtaatcgattaaatcaggagataaagtagcaaattcacttttcgtgtgtcgctttttccaatttttacgcatccattaattacgcttcctttatggaagtttattgtgttgttcctgttcctcacaccatatcttccataaaatatgtaaatatactgactgagctggcgtgatttcgtccataaatgtgccgtaggtatttaattccgggctgtagcggcatagatataataactaatagattaggcaaggtatgggccgctctgtgcatcgaggtgtaacgccaatatcaaggacgtcattggccaatatccactttgagtggtttagccatctttgtctgtcacatgcgcgggatcgcttggttaaaagatagatagaccaccgatcgacagcctgcgcgttacgcttttttgctcagtatgccttgtctatccttaatatgtctatgtgtagcggtccgttccgttgccgaccgattcgatcaaatgggcgcggaccttaataatattatgaaaaccaaattgatttggcacattatctttgaaaggtgcgttaccactattaaagaaataaattaattaacaatattaatatttgtatgttgaatgggttgcatatgtgagtccatattaaatgaagtaaagaaacacagacccactcacaatcattcaacaatacttcgacgaccggcc

SEQ ID NO: 8147 - DNA, 1152 bp, Diabrotica virgifera
tttttcatattatgaaactgtccagtcttgaggttgttgctaataacaggatgcaaccgccaacaaggattttgttttttttttatcatttttagctctttttaaactacacttacagcaccaacacaaacaaattcaatgaaatccatttttttattgactagttgtatagtgtaggtaagagatacagtataaacgttttaaggcccatttttgtttacacctaccagtttaaacaaaaaagaaactcttttttcttcacattaaccggtttgcacagagtgaatcgtctgtggcattttagcttttagttaggaagcagttatttactagagtgtatgttttaattttaaaaattttggactgtttacatacgttaattttagatgtaactatgtttttataaagttcttttagtagcaataattcaaccaataacaagagtaattacaaaggcggtaagagtaagtggccaaaattaattttagcacatactatgtcctgctttaacggtatatacagtaggaaaaatgaaggaatgcccatgaacgagcacataaaatacgctgtattttcctgtcaccgtgtcacacaaaaagttggccagcgcaagtacatataataattattgttacatgtacttgcgctggacaattttctttgtgatccggtgacaggaggatacagcgtgttttatgtgttctttcgtgggtgttctttcatttttccgactgtacctacgtatgtattatatgcttgatatgttatttagtaacatttcttcaagttggtagagtttggtatgtctatgatgaaggtaaaacccttaaaataagattgacaatatatgttatatccgtttttacttattaggtagggcaaaacttgatatgttacttgatttcttatgttgattatttttcgttttaggattggtaaaacatgatgcaaactttcaaaatgctctcttgaaaaatttggttaaacgcacatatcaacctttgccaaaacactacagaaatgatctgttttaacctctttgtcctttgagcagtgtgtgttaattgtattattttatatttaaaaatgtctaacgaaaaattgtaaataatctacgacattccagaatgtgctggataatgctccgagacc

SEQ ID NO: 8148 - DNA, 1155 bp, Diabrotica virgifera
  SmartBlast Evalue=1E-153; Info=Cathepsin B-like proteinase n=1 Tax=Diabrotica virgifera virgifera RepID=Q70EW7_DIAVI
agtcattatagagtttgttagcactgttcgtaatatacatgttttaattaattaaaattcgagaaaaaatgccatattcataaaaatgaaggcggcttttattattacactattactacctgttgtattaagttacaaaggtagcccaaatcctctttcaaatgagtttataaactatatcaatagcaaacaaagcacatgggttgctggaaagaactttgatgagaacctttcaattcaagagatcaaaaatttattaggagcaaaaacagagagattaggagtcgctaaagaatttttacacagtgaaaatattcaagttcctgattctttcgacgcaagagaaaactggaaagagtgttcagatgttatcagcactgttgcagatcagtcgtcttgtggatcttgctgggccgtcgctgcagcttctgcaatgagtgacagaagatgcatagcctccgagggaagacgccaagtacctgtttctgctgaaaacctactatcttgctgcggtacctgtggagatggatgcaatggcggatatccaatcatggcatgggtttattggcaacagaacggaatttctacaggaggtctttatggcagcaaccagggctgtcaaacttattctcttcaaccatgtgaacatcattctaatggtactaaagtacaatgcagcactttgcactacgacacaccttcttgtaaaaagcaatgtgacgatcccacacttaattataagtccgagttaacctttgcttcaggtccagcgcattacttcaagtcagttgcaaatattcaaaaggaaatagtaaagaatggtcctgtagaagcaacttttgacgtatacagtgacttcctgaattacaaaagtggtgtttatcaacatgtcgctggatcatatgtaggagggcatgccgtcagaattttaggttggggagaagagaatggagtagcttattggttggttgctaattcatggaatgaagattggggagacaagggattgtttaaaatacttcgcggagaaagtgaatgcggtttcgaggatggtgttgttgccgcacctgcatatggttaatcctacataaacaaaatattgctataacgtttagttatgatttattttataataataaaaattgtttcctaaaa

SEQ ID NO: 8149 - DNA, 1151 bp, Diabrotica virgifera
  SmartBlast Evalue=1E-143; Info=Muscle M-line assembly protein unc-89 n=1 Tax=Harpegnathos saltator RepID=E2B5C2_9HYME
aatatgctacagcttggaatataaggcagcggatgagttggactggattaagaaggctgacaatattgatcatgagttttatttgatatctggtctggagtcgaacaagagctatatatttagattagcagcgaagaattcgataggctggagtgatcctggagtaccttctgcgccggttactactaaaccttcaggctcaccaaagattcaactaagcaaagcaatgttacatctccaacaacttacagacagtggaaaagaggtggacgaggaatccaaaacacgcttggattataaattagaatcatctccagtggaatgggaggactctaatgttcaacaggaatataacttcatttctgaaatagcgaggggcaaattctcggtggtacttaaaggcgtcgacaaacgcaatgatactgtcgtcgtagcgaaaattttggactacaatgacaaaaccagagaagacgttgagggtgaattcgcagcattaagatcgctcagacacgagagaatagccagtcttctagcagcatatcgcaccaacggcactgctgtatttattttggaaaagcttcaaggcgccgacattttaacatatttagcaagtcgacatgaatacactgaacaaaccgtagctacaattgtctcacagattctggatggtttacaatatttgcactggagaggactatgtcatttagatttgcaaccagacaatattgtaatgtgcggtgtgaggtctgttcagatcaagttagttgatctgggatcagcacacagagttaccaaactaggcacaaatgttccagttgttggccatcccgattatttatcacctgaagtaatagctgaagaacccgcattcccacaatctgatatttggacagtaggtgtcttaacatacgtaatgttatccggaacggtaccgttccgtggtcaagacgagaatgaaagcaggcaaaacatcttatttgtccgctacaggttcgaaaacctattccaggaagtcacgcaagaagccacaaggttcctgatgcttctcttcaaacgccatccaaataagcggccatcacctgaggaatgccacgaaaatcgctggttactacctaccgattacatgatcaagaaacgagaaagagcagttt

SEQ ID NO: 8150 - DNA, 1152 bp, Diabrotica virgifera
  SmartBlast Evalue=1E-144; Info=DNA replication factor MCM7 n=10 Tax=Drosophila RepID=Q9XYU0_DROME
gccctttgttttgcagagtatgtttcaaagaatctttactcatctctaaaagcctgattgcttcatttacgtcatctttttctacaacatttgatagacgtaggcgagctaaagctgttgacagacgcaaaataccaagaagatttctagctgatgtgaacgtcatatcggcagagttgcgggcttcttttcttagatccacataagcagcaacaataaaatctgtcaactcctcgggtatagcaggatccttcattttacacatagatatgtacttcctcataactttcatgtctaatgctgcggtttccattggcggttgtttgctatgttggtggacatacgttatgtgcttggcaagttttagatcattgtcacggtcagctttatcttgaataagccacagcaagtcaaaacgtgataaaagagcggctggcaactgtatattctgttctaaagttctctttggattatagcgaccataggcagggttagcagcagctaggattgatacacgagcgtttaatgttgtcataatgccggctttagcaatactgattgtctgttgttccataacttcgtgaatagcggttctgtcctcgtcagccattttatcaaattcatcaatgcaacatacaccttgatcggctaataccagagctcctccttctaacatcatttcacctgtcatcggatctttcattacagaagctgttaaacctacaccagatgaaccccgtccagttgtatactgacttcttggggccagtctattgatatatcccaacaattgtgatttggcaacaccaggatctcccataagacaaatattaatatttccacgaattttcattccatcgggccttttatcaacaccaccaaccaaaagaagtaacaacgcctttttaacatccaaatgtccataaatttcaggagctaacgacatcgccaattttgtgtagaaatcatcttctgtaagtgttgccaattcctccggtgtaagaaggttgtctgaattttccatgttcatcttgtttaacgaaattattttatgagcttccatgtaggtatctgataacagtccacccattatctgtttgaaaccttgcttcaatagtggtagaaacaccggtaatagcaacatggtcacca

SEQ ID NO: 8151 - DNA, 1147 bp, Diabrotica virgifera
ctccagttaaatcaaatatggtaaaatgggggaagatttgggatttacaatgtatatacattgtaaatcatgatttgggagtgctcctcataacattcaagtgtcttggtttgtttatttctagtgcatctttattgtgattgtagtataggtacatattatgtcttggtccttgcgattcctcttgaataagggaagaaccctacagtatttggggttaataggtcaacaacgtccaagaaagtcgggctcaaaagacgtagaaatttgaaactgaatatatagtatctaaaattcattattagtttcttttcaattatgtacattttcttttcattttatttcaatttcatttttatttttattttcaaaattcatttgtacctgtgtaacaagagtgaacaggaattttaaatccatttcagctagccgaatgagctgttttattcgtaattttccaggtgaacacattgattgctacactacataactacacctattttaggaaatttattcgcatttaaccgaatgttatactgaaaaaacccttctgtcacacttgtaggaaaatacttacatttccattccaactagccatgcagtagtacacagtaaagccggatttatcttaggaaggggcgtgtattacacgggtcgtagaataatagacggcgcccgtccccgttgtctccccgttccgctgtattataaattagccaattgaggctcaaagttatcggcaattcactgcaaaactcttataatacagactatagggattaataggatatctggccttcaacggtctaataacattaggccattgaaggctagctaaagttgttaataaatatgctaatggtggacttcaacgcagaattattcctttccacatgtatttcaatagcaagtggttttgtttgtgtcccacagggctgattggaatggaataacaaaattctccatgaagtttgtctcgattactaatcaaatatacctaatgtgatgtttgcgttcaattattgggatttaactattacgttattttaaacctgagtctctaaattgataatctcaccaaatagtcaatatatcaccattttttacaatttaggaattattaagatgtgtaactggattctacttg

SEQ ID NO: 8152 - DNA, 1151 bp, Diabrotica virgifera
  SmartBlast Evalue=1E-110; Info=Acyl-coenzyme A:6- aminopenicillanic-acid-acyltransferase 40 kDa form n=1 Tax= Camponotus floridanus RepID=E2AV98_9HYME
gtgtatttggcggtcaagtgtcaagtgcgagatttttcaaaaatgcccgtaactgaaagcatcggcagacgtcaggatatacctattctgtatacaagagggactcattacgaagtaggatttaatattggaagaacgttttccggcctaattcacagcttcataaatgggaacacagcattagaagaggacctgttgcccgcttacaacacacctgaaggcaaaaaagcatatgaggacacccttgcttcagtaaaaaagaattttccacagtatgtcagggagttggaaggaattgctgaaggagcgaatgtaccattctttaagttattcctgttccatatggatgacataatgtctaatgttattgaagaaccaaaagtacaacaggctgttgggtgcagctcgatttgtgttaatcaaaaaggtcaggagatactaggacataccgaagatgcactcagcgacactctaaaccatatctatttcgtatcagctcacataattcccgaaaaacttgaaggaaagtggcagtttaaagaagaaagattcacttctttatgctatgccggacatttgcctggttacacaatgagttataaccatcacgggtttatatttacgataaatactttaagcgtcaaacataccaaacctggaaagacaccaaggatgttcattacaagagctctcctaggcgctgagaactttgtgcaagcccaagatattttacgagatcggggctgtggtgcaggaaatggctgttccatcaacatgacgtttttaaaacaagagggcgatagaatgtttcataatgcggagatggctccgtcagacaaagacgaatctcagttaaatatttttactgctagtccgggagaatgtattatgcatacgaataaatatttacgattgagtattaaagaaactaacgagaatatgacaaagagtagcataaaccgtatggctacgttaaccaaatatcctgcaccaaagaaaggaagacgtgaccacgatgttgggagacaataaacattcagaatttcctgtatttgttgattatcctggtagctatgtgaaaactgtagctgttggtatttttgactgcaacgccaaaacttggagcatctattcagacaacccatcgaaaa

SEQ ID NO: 8153 - DNA, 1156 bp, Diabrotica virgifera
  SmartBlast Evalue=3E-28; Info=RNA-directed DNA polymerase from mobile element jockey n=1 Tax=Camponotus floridanus RepID= E2AVN7_9HYME
aaagttgtgtttctcaaaccactcctgtaaatttattatatgggtatttaaggaattaattagcttgtatatatcagatccttgcaccagaattacaaaatcatctgcatattgaaaacactccatctcatggtttattaaatcatgtagggatctagtatagagattaaataatattggactgagtggagacccttgaggcaatccagtggatgcttgcagttgggcctaatatattatttgatttgtctttaacgtagatatttctgttgagcaaaaattgcaagatcaagtttgcataagttattgggatgtcatactttaataagtatttatatagcaaatatatattgactgtatcatatgccctactgatatccaaaaaaattccaattgtatttaaatttttactaaatccagttctaatataattaattgttaaagctaagttatcgttgcaccctttgtttcttctgaaacctaactgcttagggcttagtatcgattttttttccgttatttgttctattcttaatttaattatattttgcaaaattttgcctacacatgactctagagctatgtttctataattatcctcacataaagggtctctattgggttttaaaaagggaatgacaagggtgtttttccattcttgtggaaaacctgtgtttcttttaactatttgattaaatatttttgacaatgtatctagcgccaccaggggaagtctgtttatcatgctatatgttacaagatctaagccagtagccttatcctttttatttatgacacttattatttcttgccttgaaatgtcctccacatcctcgttagttagggtaaccatgaactcaggatctgttatgtcaattgccaaattatttaatatgttctgagctatgtttttgttgggaagtttagcagggattacagcattttgatatgtggagaatagcttaactgttcgccatatttcagatagaggagtgtcccttgtcaatccattgcaaaagcttttgaagctatttctttttttgtttaaatattttttactgtatgcaaatattttttgatttcaatataattttcattgcttgcttcttccttatattttttaattttttcttttcttgtttttattaaattagag

SEQ ID NO: 8154 - DNA, 1154 bp, Diabrotica virgifera
tagaccaaatatcctcactcgccatgctttacaataaagtaagaaatgcttgtatttaattttggctcttaaacttgttaaaaagataaattagctctcctataaaaatctgaatctaatgcagatattcaacaatactgtatagcaaactcataactcgttaaaaatactcagtattcatttcattttaattactagtatgtagtacaataattcggatagataatacagtagttaaaatatttgactgtaacccaattatattggatgtttgaaaatagaacatggtgtaatgaaaaatactatttatttattggatttaccaaagttgtgtatactaaaaatactatgtattaaatatttgagaaactattccttcaataaaaacttcctgtgtttgtataccgaaacggcacctttaaagattttacgaacgcccactagatggacacgtggaaatgtgtcattactgtgcatctaaagtttgacatacgacattatttcacattctaacatgaaaaactgtaaaaaaaaacaaagactttccgtagaatcatgtgttgtgattttaataaaggtacaaatggcttaattcagctttttataacaaaacctcacaaactctatgaaacttgttggtgccgatcaaaatatcaattttactaaatttataggctttattgaacatctgaaaataaacacatatctcaaaaggcatttgacttaacgtgaaatacaggcatgtcgcagactataatacatttaattttgcttgaatatttagctgcgaaatgaacaaaataagcgtgagaaactaaaaaaaaaagaatttttaacaattaaaactaatatgaaccaacaatttattatttcggcctcagtagatggagatgtgccggtactgtgtaccaagaatttgacatatgacactttttcaaatttgttagcagaattatatatatagagggcgctggggaagtatgtcattactatttgaaatataatattctaaaaaaagaaaaattgcacgaagaaagtagaaattattagtggtaaaaaattatcagaaactgtttaaaattagtttttaggccagcaattttgtgaaggtcgaaaatactgtggaaaattttgaaaactttattcaaaagtag

SEQ ID NO: 8155 - DNA, 1149 bp, Diabrotica virgifera
  SmartBlast Evalue=1E-59; Info="Eukariotic translation initiation factor 2b, epsilon subunit n=1 Tax=Aedes aegypti RepID=Q0IFF3_AEDAE"
agtctccgaatcatgccaatcatttggtgattgtcttagggatttggacgctaaaggcttaatacgaggtgattttgttttactagaacctggcaccatgtccaatgtgcagctattacctcttttggagaagcacagcgaaatagttaaagcggacaaatacacagccatgactctaattttacaagaagctggagttggtcatattgcaagaaataaattagaagatattttattaggcacggatatcaacaacagagtacttttttatcagagacgtagtaaacgcagagagcgaaaattgaactttcccgtggaaatgtttttagaaaacccgacaatgcttctactaaacagtttgagggacactcgaattgctatctgttctccttcggttctacccttattttccgataatttcgatttccagactaaagatgatttagtacgaggccttctgatgaacgaggagattttagaagggacggtttatactcatgtgttaaagactaaccaatttggtggagctattacctcatggagaatgtaccaagcactcagccagcagctcttaaggaaatggatacatccattgaatctacctagaaaaaacaacagaatgctgaaaaatgacgttattatcggacctggcactaatattccagaatcttctcaagctaatagaacaattttaggaccaaatgtaatcgtgggtactaacgtcatattaaacgaatgctatgtatattctgataccaaaatagagaacggcgttgtgatatctcatagtgtaataggtccaaattgtactattaaagccaattcagtagtgaaaaatggaagtatactaggcgaaggtaccgttatagagaaaggaagttgtattgatgattgtcttgtccaagctgagccacccgaagatgacgaagaatttgttaaattaggcagcaaatcttatgaattaaaaatagccgatgacgatgacgacgatcagcttcctactgatataatatacaggaaacaccataggctacttattttttgacgaagaaaattacgacgtttcagattcagacgaagatggttttagcgagagtgaagaagaactatcgtatactcagtcaccagttccagaatgacactaaaact

SEQ ID NO: 8156 - DNA, 1145 bp, Diabrotica virgifera
  SmartBlast Evalue=8E-44; Info="Transposable element tc1 transposase, putative n=1 Tax=Ixodes scapularis RepID=B7QGY3_ IXOSC"
caacaattatataaagaataattttaatgactgttacaaatagaatttagtatttggtgatagaaccgtctgcttctataactttatttagtctatttggcatactttgaattatattagatatcatatttggatcaagatcttcccagcactctaagattgtatcccacaattgatctgaattttgtggcataaaatttcttttatatatttttttaacaattatgccccaaatgttttcaattggatttatatctggactgtgcgcaggccatggcaatacttccaggttttgcgtttgaaaccaattccttacggcatgggcagtgtggactgaacaattatcttgttgatatataaaagtattattaggatacaattgctcaatagaagggagcattacgtgttccaaaacgttaatgtaattgtcggcagtaaatcttccctctaatcgccaacaaacaccaggtccatgtatactaatccaaccccatacatttacagaaaaacgtccagatttattatgagagtgaatatatcgttcttcaaacctagtattggctggacgataaacacggatttgaccgttataggtcgactgaaaagtcttttcatcagtaaaaatgacgttgttccaaaattgtgggttgcggtaaatatagtttagtgcaaatattactcttgcttgccgatgttcaacagttactaatggttttttagcagctggtcggttttttaattcagattcattgatccttctgcttacagtaggttgggcaccaggaaatcccgtatgaatccttgaatccttcgacgtcgcaaatggattatctcttaagaattgaactaaaacagcatcttgttgaggagtggatactttggaacgccctgaaccaacttttctttttaatgatcgttgttggacccatcgttgcttaattctgaagattgttttcaaatttctattatagaaatttgctagcgcacgaattgaccatccttcttccattttcgtaattatttgagccttttcaatctcacttaaatgacgaggcatattaattttttattgtacgtaacgttaaaccttctatcaaattaaacgtctttgacgtctatgagttgcatttttgatcacttatgac

SEQ ID NO: 8157 - DNA, 1152 bp, Diabrotica virgifera
  SmartBlast Evalue=2E-35; Info=Vitellogenin-1 n=1 Tax=Culex quinquefasciatus RepID=B0W8V0_CULQU
ggttacttaatataatacctaatagaaggaatcagtggacacaagatgcggctacatattaaaatctttttgttttgtgcttttgttcttgcaggtattaactgcattcccgacatccccatcgcgctaaagaaagactttttccaaatctacaaaggactcgcagtagaagtaaagcaactcactggtggtaatgtcaccctcgacaagttaacctttacccactttgagaggaaacatcgggaaaatggtacggtattagattcttcaaacctggaagacgttaagtacgccaaagagaagatcgtatttattttacatggatgggctagttctgccactgtggattgggttttggaaatgaaaaatgcgttcctggccatttatccgaatagttcggtgattacaattgattggagtggaccggcatcacagccttactcaatatcttctattaatacttacgatgttggaaatttcatggcggatatgattcttgacctgataaataagcataatgttgatattaagaaattccttctggtgggtcactcactcggaggacaagcttgcggatttgcaggaaaaaaactacaatcagtaggtaaaattttacccagaattattggtctggatcctgccggtcctctgttcagtattaggccaaaagacaaaaggttaaattccgaagacgcagaagttgtagaggttattcattctgatgcaggaagattcggatttgaccatccctgtggtactatcgacttcttcccaaatggaggaaaatggcaacctggatgccagagaatcgatttgcttgatattacgagtgtcgctgatccagttacctgtgatcatcaaaggtcccacgaatatttcaccgaagccattctcaatcccggagatttcctcgcaacaaaatgtactcaatacactttactatttaaacagtgtgacgaaaactacaaagtaccgttgggagacctcaccacgacattgaaaggaaacttctacttcgaaaccaataaggaacgaccctatgctaaaagacaaggaccaggactgataaacaaaatatcgaatatttttaaacattagaaattatactataagtactagattgttatgttagaaataaaaattgagttggaa

SEQ ID NO: 8158 - DNA, 1149 bp, Diabrotica virgifera
  SmartBlast Evalue=2E-62; Info=Protein preli-like n=1 Tax= Camponotus floridanus RepID=E2AM01_9HYME
tgtatgtcatgtatgtttacctttaccttgttcaaatttagacattttaaacacctttcattgatctccaccgattgatgagtactgttcggctattcttcaaaatatggatacgatattgtgtgaactagaaaccagaaagttgtaatcaacattccttaatttacacattgtaacttctttgtaattgcaactttttacactacaatgccaaagtttttttctgattcaacaatctttaattacacctgggaccaagttgcacaaggtttttggaaaagatatcccaatcctaatagtaaacatgtgctgactgaagatacagtagaaagagaagtaaggagtggaaagttgttttccaaaaggcttttaacaaagactaatagcattccaaaatgggctgagaggtttatgagctcaagacatgtgaatataattgaagaaagcattgttgacccaaaaaataaagttcttaccacatacacaagaaatttagggtatgttaaagtgatgagtgtaacagaaaaagtagtgtatactgaaagtgaggaacatcctggtaaaacaatagctatgaggtacgcctggattgattcacaaattaaaggatttagcagagctatttgtgcatttggctatgaaagatttaagaaaaattgtcataaaatggtgggcggttttaatcatgtcctctccaacctatatccacaacaaaatgcgctgacttcaagttattccactgctaaggcaacggcgaaactgaaggatgctgccaaaaatgcatctgaactggcaaagtccaaagctgcgccgatctatgcttctctacatcccaaccaatcgtagaagtaacttacaaaccgaaacatttattatatcataatgtgaaattatgtaaaattactataatctgtaattgtataaaatataacaaattaatgtctttgtaaacaatgaatagattggatgctcaaaacgtagacatttttaaaatataatggaaaattgtaaggcagtagatgttagtgattggtattcatttaaaacattttttctgaattccttttgttacgatttttagtcattatatggtggtaagagtatcactaaaacctctacaacatatcaataaatagttctttctgtcgc

SEQ ID NO: 8159 - DNA, 1150 bp, Diabrotica virgifera
  SmartBlast Evalue=5E-91; Info=Mitochondrial carrier-like protein 2 n=1 Tax=Harpegnathos saltator RepID=E2BKH9_9HYME
gtttctttaggtgactgtctgtcggtcctttcctcctaaattattttaaaaatatgtcaaaaagaaaagatgacttgcgttggtctaattatggtttaagaatattaattaatactgtatcccacccatttgaatacgcaaaagtgttaatacagatcggctatgaacctattccccctaggcctggaaaaactttttttggaaaaccagcattgaagttaccaaatatttttgagtatgtaaaatatattaaatcagtagacggatttgtgggctgttacaatggccttgctcctaaagtttgtggtaatattatgagtgccattgccactcaaaagttgctggattatctggagcctccatcagaggaagaggagtttggggaagaacctacagaagacgagaagaggaaaatttttgttaaaggtgtaaaaaatgaaataataatccatacagcagctatagttgttagccaaccttttcatgtgattactgttagaatgatggcacaatttattgggcgagaatcaaaatacatgggtatcttaagctccttgagagaagtctaccgtgaaaatggacttgtaggatttttcagcggcctggttcctagattggttggagatataatatcccttctgcttgttagtagtcttacatatgctatcaataattatgttatcgaagaaaaagaactcggtatctacactggatcaatcatgagttttttggcgacatcagtaacatatcccttccaagtgatttcaaactgcatggcagtaacgaacagcggattggtagccggctctccaacgtacatgccccactacaagtcgtggatcgactgctgggtggatttgtccaacagaaatcaattgaaacgcggctccagtatcctagtccgctactacacaggaccttccatcgttattggaggacaagccgttccctttccatcaaaagacaaacagttaatttcttaagtttgacttcaagatgcaatcatagtaacttgtgcgattgtacataattttatatattttctgaagcacctcattgttgttcaatcaataaattgtttagttttacatcaaatttctttttatgtggcatttacctcattttaacatattataataaatgtagtttt

SEQ ID NO: 8160 - DNA, 1150 bp, Diabrotica virgifera
ccgcgccccttaaaactaaataaattttacaatcttttgggaaattttacacaaaaacatctgactttaaatatacgaacatattttttatttaaggtatgtccctaatggtttgtaaacaataatacaattgtcaatgtcaatacactgtcaatgtcaatgcatcgaggtaacatggcacgaaataggtttgatttagcctaaaaaaaatcggcaggtttactacttcaaaaattatgtacatctataaaatatacataaaccgaattgttttatatacaaattaacacttatgcagattttttacttcttgaaatatggcaaaaggactactaaagtttgacatcacattaagcgaaaagcttactgcctgttctcgaagaacttctattttattttacttccattcttaattgttttccaatgaaaaagttaaatcaacttaaaaatttaatatgataaaccaccacattaaagcatttgccaaaaaggggattcacatccaatagtttgttgataaatttacaatgttgccgagtcgagtttatctcttcaatataatgatccaagagtatagtagaccaagtcttcacacggatatcatgtcaaccatattttgtcccagtcaaatgatgtgcaaaattattttgagttcggttcagataatgaacttgcttttttgtccttcaaagtagagaaaaagcttgatttctcttgcttaatatttatggtctaattattttatctgtactaatatgcaagtgtttactgtaagttctaaaatgactaatttacaatgattaatgggatgttaaaataccggcaagtgcttatctttaaagcgagtactcgaatttcttaagcatttataccaaacattgataccgccacttctttgcgcattctgaccgaatttcgtttctactctaacaaaaataaaatatacatttcccacaaaatttacttactttttaaagttatatattaattatattaacatccataaaaacgatatttagtgaatgatgtttggatcaatgtttccatataatatctgctgcaaaaggtattttatgtggaacaattcataagatttgcctctgtaacatcaaaactgtcgcagtctgttaccgttgataggagaaaaatc

SEQ ID NO: 8161 - DNA, 1150 bp, Diabrotica virgifera
  SmartBlast Evalue=1E-116; Info=GTPase Ran/TC4/gSP1 n=16 Tax= Metazoa RepID=D3TM84_GLOMM
aaaatgactttctattgaattttagaaggtgcttaaatatttggttatcataaactatttagtgtaaaaatatttggcgcgcattcctgacacctactcccgtcttcttgtgaacgccattgtgaactctaacgactttggaaccaagctgaagtaatccgtgattttttgtgccatcggtgtttcctagtactttttattcacaagtttaaattcaaaaaatcatggctggcgaacaagatatgcccaccttcaaatgcgtcttggtcggagatggaggtactggcaaaactacctttgtaaaaagacacatgactggtgaattcgaaaagaaatatgtagcaaccttaggagtagaagttcaccctttagttttccacacaaatagaggacaaattcgttttaacgtatgggacacagcaggccaagaaaagtttggtggtctgcgtgatggatactacatccaaggacaatgtgccataattatgtttgatgttacatctagagtcacttacaaaaatgttccaaactggcacagagatcttgttagagtttgtgaaaatatcccaattgtattgtgtggtaacaaagttgacatcaaagataggaaagttaaggcaaagagcattgtcttccataggaagaagaatttacaatactatgacatctctgcaaaatccaactacaactttgaaaaacccttcttgtggttggctaggaaactcattggagatcccaacttagaattcgtagctgcacctgccttgcttcctccagaagtccagatggatccccaatggcagcaacaaatcgaaaaggatcttaaagaagcctcagaaactgcactgcccgatgatgacgaagatttataaactcattaaccaattactaaaactctgtcatcgttccaaagcgcgtgtgtaacaattgatatcttacaagacttaagttaaattacattttatgtatttctgaagcagaactgttgatatttttatataaatgttttctaaatttgttgaaaggtttgtctggagtctggacgtatgttcttcaatatattagtggtatggttgttagagtgttagagtcagcaagctaccgtaacagttcttgtcacataggagtgtagtcttaatttcaataaata

SEQ ID NO: 8162 - DNA, 1136 bp, Diabrotica virgifera
ttaatttatatcgacaatctacggtcggaagtggtgaaggtctgtcttccttagagcctccatgacaacgggtagacctggaaatggtgctgtcgggggatggaggaagacagattttgatcaaaacgaaaccgtagattttcttatttagttttagtttaatctctctaatgttcgattgcaaattgtttttgataggatcggcatcaccgagctaaaaactcttatgaggactgcattgccagggcccccgctcccatatgtgcaaagtgtgcaatgcacacgagcgccatgctttgggggcgccaaaacccggggtcaaaaattgcaaaaaaaaaacaaacaaaaaaaccaaaaattaattttaaagtaaaagttgagaaatataaataggattggtataaataggagaaaaagaggagaaaaacagaatacttcggcgatgtaattggaggatatacataccatcttcttcgcctcataatacaaggaaaaggggagggaaagagacggagttgtcgaaagaaactttcatggtggcgtaatattagataatggtgtggaaccatagtagaaaaattatttttcgcagcagccgatagagaagggtttcagaaacttgtaaacataatgacggccaagctcttaatacgaagaataaggacacggtacctaaataaaataaaggtataaatacacacgaaattttattagtataatatcatccagttactactgattcttatgtgctagaacatgtcagaagtcaggcattttaatttattttgttatgattttgttctgtttgtttcattttgatattttagtctacaaagaataatccatttactaacggtttatgctgtgaattttaacgaaccgcttatattgacatgaaatttggcatacacagttaacatgtcaatgaaaaaaaaaagtgatattgtgtcgatgtgtgctttttccctcggggtgagtttcacccctaattatacacaaccaaatgactaattctacacataggtctggatcccgcatatgaaggaaaggttgattggtggcgggctgaaagtttgttgatggcttgggggtgtctggtcggacgggctttgatatgtgggagcactggaacaggg

SEQ ID NO: 8163 - DNA, 1136 bp, Diabrotica virgifera
aggtattgtacttatattcatattatgcattttattttatgatttaagtgtctcaaatagttagctcaacgggtagttctgtcttaattttgaaaagaaaatgacaaccactacatgtttttgaataactcaacatttctttctataaattttattttataaggaataaaataaacattttgggacgtaggtaaaaatgactaaaataattgtgatattttcatgaaagatttaatttcgaaaaatgtttgtaggctttgttctgaaacataaactttgaatataccattctgctataaatattgatacaaggcatttaactaaaaaaatttaaactattggtttgatttgaaaaagttttacacactttattactgagtttgagttaactacaatctacaaaaaaattattcaaaatgaccaccatttgttagaatacagcaccgaagtctcctatcggccattcattgatcgatgtatggatgacatccttaggaaaattgtccacagcttctaccagcgcctgcttcacccggtacatactatgcgctctaaaattgactacaattttttgtagtcgagtggattaaggtctgggctggctggcggccaatggttactataataaataattcagatctatgattttagtactagtgtgctagtattctacctatagattcttggaagtatttgaactaagcattaaatctgttcattattttaccacgaagttagtctggtcaaaaaattaaggtgtaattacccatatacaaataatgcattgtataatggctttaaatgcatagctgtgagaatggaattgttttttttttgaatttttcattcaagcaatagcaaaggccaactatggtaaaggttcacggcgtaggttttaaaagggtcataattagatacgtcactgagtgaatgctgagttttctatcgtttagctgttcttaggagtccgacaactctaaaatctacgcatctaaccatagttggcatttgctgtaagggtagtgcctttttggtaaatttttcttggtatatttctgaactttttaaattttattttcttgcatttaattttataaaatatctgtttaaatgaaaacagaaatttaatttttatc

SEQ ID NO: 8164 - DNA, 1150 bp, Diabrotica virgifera
  SmartBlast Evalue=1E-143; Info=Nadp transhydrogenase n=2 Tax= Culicini RepID=Q16LL0_AEDAE
ctattgtaagagccttcgacactagagcagctgtgaaggaacaggttgagtctttgggagcggagtttttgacagtcagcattgaggaagaaggaggtactgcgggtggttatagtaaagaaatgtctaaagaatttattgatgcagaacatgcactgtttgcaaaacagtgtaaggatgtcgatattatcatttccactgcgttgatacctggaaggaaggcacccattttggtgctaaaagaacacattgaatcgatgaagccaggtagcgtagtagtggatctagcagctgaagcagggggtaattttgaaacgaccaaaccaggagaaatatacacgtacaaagatgtcgtccatgttggtttaacagactttcctagtatgcttccaactcaaagctcgacgctttatgccaacaatatctccaaatttctgctatcgatgggcgaaaaagatcacttcaatataaatctggaagacgaagttatacgtggaagcataattttagacaagggaaagctcatgtggccgccaccaccacctccccaaacacaaccgacacctgctacagccccgaaacaagaactggaaactttgaaggcagtacctaaggcaatttctcctttcaaagctgacttaaataaatcactggctctcacaacaggtattggcacgatcttaggtctgggaatgatttctcctaagcctgaatttacagctatgttatcagtactcgggctctcgggcatagttggctaccacacagtgtggggtgttaccccagcgttgcactcgcctttaatgtccgtgacgaacgccatttccggaatcacagctgtaggaggattacttctgatgaatggaggatattatcctacaaattcggtcgagactttggcagcaacagcagcttttgtgtcgttcatcaacgtattcggaggatttttagtcactaagcgaatgttagacatgtttaaaaggccgggagatccgaaggaatataactcgttgtacgccatccccgcagttggtttcttgggtgcctatggctgggcctccatgaatggattagcggagattcatcaagctgcttatctagcagcttcgctttgttgtgttggagcgttagctggtctaagctcgcaggc

SEQ ID NO: 8165 - DNA, 1149 bp, Diabrotica virgifera
  SmartBlast Evalue=7E-51; Info="Splicing factor, arginine/serine- rich 2 n=2 Tax=Aculeata RepID=E2BZQ0_9HYME"
gctttcttggtgtcgtcacttgtggtgagttgctaaaataaaaatattatattatagagtatataatatataaaaagaatatagtttattataaaagtatcaagattcgttcaaatatgagttacggtagaccaccgccgcgtattgacggcatggtctcattaaaagtcgataatttaacctatcgcacaactccagacgatctaaggcgcgttttcgaaagatgcggcgaagttggcgatatttatataccaagagatcggttcaccagagaaagtagaggctttgctttcgtaaggttctatgacaagagagatgctgaagatgcgttggacgccatggatggcaggatgttggatggaagggagctcagagttcaaatggctcgctatggaaggcctacatcaccccatcggaggtacggtcgtcgccgaagtaggggcagtagaaggagccgctccaggtcacatcgtcggtctttcagtagaagcagatctcgctcagacagcaaaagctccagaggacggtcaagatcgatttccaaggatgaaaaggaaaggtctaagtcactcagcaaatctcgttcaagatctaggtcttaggtgttgcggaaggtgaaggagtgcagtgcagtaaattaggcgcctgctctctaaaggtatttataaattaccacctttgacctaagaacctttttattttatcagattttttgaaagaaacatttcggatgtgttgaaaatgtttgaaaattcagtaaaaatgttttgttttctatgtaacattagtgttttaagaagtattttgtgtttattattgggtgttacttgataccatttggtgtatcaacaaacctagtatttagtgtccctaggaatatattcaaatacatagttcacttaaaatcacttttgacttaatcttacgtaaatgtaggaaaaaataaatcatttaatgatatttgcctaggagactttaacaaaattgtatattgtttaaaatcatttttagcaattttaaaaacaggacgttatactttgaaaatggaactttaggttagtttagttttactgtaattgtaatcaacttggtttatgaaaaatgtaaaaattccatgagtttttattgtacaattttttgcataaaata

SEQ ID NO: 8166 - DNA, 1148 bp, Diabrotica virgifera
  SmartBlast Evalue=1E-128; Info=Eukaryotic translation initiation factor 3 subunit I n=1 Tax=Bombyx mori RepID=EIF3I_ BOMMO
tagaaatctttaaccccggttctttcctcatcaatgtgtcagaagttcacgtttaaaacattagatataataaataattaaaccaagttaaagattaatcgccaatatgaagccgattatgctccaggggcacgaacgtgccatcacacaaattaaatataatcgagaaggggacctcttgttctcagcatctaaaggtaacaaaccagacgtatggtatgctctcaatggggaacgtctgggtacattcaatggacaccagggagtaatctggtgtatcgacatagactggacctcaaccaggttcatgtcgggtgctggtgacaacacatgcaaaatctgggattgcgaaacaggtaaagaaatcggaaacattaattctgcgtctgcggttaggacatgcatgttcagctactcggctaacatggctgtatacactaccgatcaagctatgaagcagccttgcgagatattgtagtagatactaggtgtgtagatgatagcacaggtagccagaagcctatattgagagtgcccataaatggatccagagtatcgtctattttgtgggatagtttagatgaaagttttattacaggacatgagaatggagagcttattcattgggatcttaagactggtaaacaactaaacaaagtcagagaacacgatcttctcatcaatgacatgcaatggaacaaggaccaaactatgtttatcacagcttctaaagatcatacagctaaacttttcgataaaaatgatttactgcttcttaaaacatacaaaactgagagacctgtaaattcagcagccatcagtcccatttttgaccacgtagtgcttggtggtggtcaggatgctatggatgtaacaaccacctcagctaaagctggaaagttcgattcaaggttcttccatatgattttcgaagaagaattcggcagagtgaagggtcatttcggtcccatcaacagtgtagcattccatcctgatggaaagggttatagttctggaggagaggacggtttcgttagagttcatacttttgatacatcatattttgaatacaactttgattattaagagcatattgttacaagatgaggttatgtaagataattgatataataaaacttttatatcct

SEQ ID NO: 8167 - DNA, 1146 bp, Diabrotica virgifera
gccccttaatatatagaatagtccagcacaacttgtttagcaacaaaatgaaaaaatatacttcaaaaacagactcaaaataaaataatgcaagatgtgtgtctgtgagtgtacatctctggaggtaactttaatttttgatgcaaaatgacaaacaacttttgatgccaagaaaaaataaatcctacagtaaataaccaaaaagggttaatgacaatgtgtgatctctatcagggagtagttcatatttaacgtgatgtttgctacaagtcacgacgtagcttgcaacgatcattaaccaaccaattgaattgaatcgagccaatgtttttaaaataatttgtacctttttatggtcaaaacactaccttaatacattttaaattttcaatttatgtttagatcaaaaatattttacaaaaacaataaaaattaataaaaaagtaaggagtgctttctaactaaaattaatttaagataaaatattcacctattatcttaattacataatgaatggaatgaacatttcaacggaaaaatgtaaattaattttgaaaaaccaacatttggataataatttcccaagcaatccagtctaaatataatatcaaaacgtactataggtccacttcgaacagacaaaaaaattcaaaacttttttccaaacaagttttgacgtagcaccaattatttcctaaaagacaacacactaaacgaactacctcaaaatgtccttttctaaaaaagagaagtctcatcactggaaaatatttccgtacatcactagcaacgctcgatcagcgtagctatagtcagtcctgcaatgtccgataacattttaagtatttaaaacaaatcgctggcgatctcaatacgaggtgtgctacaaaatagtgagactgatgacaccaaagctgcgaacaattctaattttcaaggaaatatctcgaaaaatgtgttacaaccactatgttggcctgatatggtactaagtgattttttatgttttatttaagtcaaatttagcttaaacactgaaggcgtttaacgctgtgaaagaaaaacgtccaataatgttttatggtaccaaagctgtgaaaaattctactttttaaaggaaaactctcgaaatatgtgttttaagta

SEQ ID NO: 8168 - DNA, 1145 bp, Diabrotica virgifera
  SmartBlast Evalue=3E-52; Info=DOMON domain-containing protein n= 1 Tax=Culex quinquefasciatus RepID=B0X1J7_CULQU
ccagagcagataagagaggattcccaccggacgttggaaaaagtcgaatcataaacacacctaaaatttcattcgttgttcgtgtgtgttataagattgaccaaaaaccaatattgaagttgaagacaagtaactagttgagctaagtgatcgtctacaccgttttaatgccacgatgagaagtgttgaggtccttgccattattggattggtgtcttcaattcactctggattatgtgccaaacccatagaaccttactacggaagaaaaataggaaacttagtcgaattcgcccacggtataaaagggactgcatacgcggtagatgagagtacgatattcatcaaaggattttattatgacggtactggtccagacgctttcttctggattggcaattctccaaggcctagtccagagggaacaatcataccatatccggaagactacaatggcagggatccaccggtattacgggcttacaacaacactgacataatcctccgactgccaatgggaaaaagaattagggatatccgatggctgtctgtctggtgtagacgattcacggtagattttggcgaagtatttattcctcccaacttagaagtgcccaaaccaagggtccttccagaattcaagcgtttagctcatggccttcgatctgacaatattagtattttagatgcaaagactttttatatacccaatttgcattatgacggagccggccctgatgcctatttttgggtaggaaatgggtcggaacccacctcgtttggaatcaaagtgcccaacgaaatgggatcgctagaacctttaaggggttatcaaggtgaagatatagaaattcaacttcctggtttattgacagtgtacgatatcgattggttaggaatatggtgtgtccagtacagacacaattttggccacgttaacatacccaaagatttggatgtaccgcccgctcttgggcagactaaggtctctaaatatgccggaagcccgagcggagttccttcgaaccgtagcggagaaattaattattattttattgctcttattttcttttattatattggtttataagaatattttaatgatgtatttactaatttatatttttaacacttatgctctactt

SEQ ID NO: 8169 - DNA, 1139 bp, Diabrotica virgifera
caactttgcttgtgtcggctgagaattgtcatgaatgaaactttatccaaatgaacttatctgttgtaagagtgaatcatttgaagctaaatttcattgacggcaattttgagctgacacgttaagtaatatgtttttttccatggcttactgaggacgttttttggatctcatgataaaaatcagtctgtattctaaatttctaaacaacatgaattatttagtttcttgaaagtgagaccttataaaacatatgttgtctattgccttaccgcctaatctactctgcacaaaactgcacatattgccggttgcggaggaagccctttcggtctctaggctggtcggttttaaggtcatcaaatggttataaaccatggacaaattatgatcgattttcgctgtttcggtctcataaacggtcatttcctttttgaaaatgtctgcgtaattttttgagaatatatttttttaggttatagaagtattttctctctcctctttcagttcaatttcaagttcttgttctaaagtaaaattcacggagtccggattagcgacccgtcttctactaccattatgtcctctggcactggttccacaatcacttgtttatttatacgactcgacaaaattttcattttctgtcgcattgcattctttttcggcatggggaaataaccaggactctttagtccttcatcatccattttttgattttgtaagtacactgatgtagctgtaatttcagagaggcgctgttccgcgattctgttgcgtagtgctttcgattgctcggaactaaggtttacatttttttttaaacaaactaaatagtcctgactatttagtttgtctaaggcaaatttcctggttgtgtcggccgatatcaaagtggagtctcttctgcatagagcttctacagccagtttcaccggttgaaatgtagcgatcaactcgttgattattgaccactcgccagcagagaattttatcgcagaatcaatgtctatcaacactatatcgatgcaaaattttgactgtagaatcgttccagcatagtatgcaaactgttgctgacacacggctttgaataaagaggccaatgaaaacatgaagtaacttatttcgaacttgac

SEQ ID NO: 8170 - DNA, 1147 bp, Diabrotica virgifera
  SmartBlast Evalue=1E-123; Info=Tumor suppressor candidate 3 n=2 Tax=Formicidae RepID=E2C774_9HYME
gaatatttatcttgacgtgactttttactgatgtgttggccgtaggtgaatggttagaatttaaagaggtgtattttcggtctttcggaaattaaagaaataaagatgaagtacttatatttattattatttttaaatttagtagctatagttaatgtttatggccaacaaaagagacagccccataccatggctgagcgtgtccagcaactaacggacatggctaataaacgaccagttttgagatttaatgctaataagtttagagatttcgtaaaagcctcaccaaggaactattcagtaatcatcatgttcacagcaatggctcctcaaaggcaatgccaagtgtgtagacatgctagtgaagagtttgccattgtggcaaactcttatagatactcacagagttattcgaataaattattctttgctgtagttgattttgatgaaggatcagatgtgtttcagatgttaagactgaatactgccccagtatttattcacttcccacctaaaggaaaaccaaagaatgcagataccatggatattcaaaggataggttttggtgcagaaaccattgctaaatggatagcagaaagaactgataaccagatcagagtattcagacctcccaactactctggaacctttgcactgattattctttttgccattgtcgctgcattcttatacctgcgcagaaacaacctagaatttttgtacaacaagacgatgtggggactaggagctctctttttctgtttcgctatgacttcaggacaaatgtggaaccacattagaggaccccctttcatacataaaactggaaatggtcaaattgcttacatacatggatcatcgcaaggacagtttgtgtttgagacatacattgttatgtttttgaatggagctgttgtactgggaatgattctgctaactgaatcagcaagaggcaaaggcgaccccaaaaagcgtaaaatctttgctgtctctggcttagtgctgctatcagttttcttctctctattgttgtctgtatttagaacaaaaactcaaggctacccttacagcttcctttttaaataaatttaaaaagaaggaatttaaatgtcattgtatgatgttatagattgaataaagttttgtt

SEQ ID NO: 8171 - DNA, 1147 bp, Diabrotica virgifera
  SmartBlast Evalue=5E-38; Info=Muscle-specific protein 300 n=1 Tax=Tribolium castaneum RepID=D6X2J9_TRICA
gatcttttctatattggcgtcgcttggttgaggtttttgttttgacttcttatggcgttttttatgccgtcttgaggtccaatcttcttctttttcattatctaagaatgttgttacgacagcatgtttatctacaggaacaccatcaaaagtaacttgaacatcgtactcatcttctgattctgaactggattttattggaactggctctattggtgtttcttgtttttgtatttgttgttctatctttgtaggttcgacagtaagaactttactttcgactatctcgcttatagaattatttgatgacggaaccagcacagaagccttaacatgaatctcataagcctcagacgaagtgggtgttggacttggtgtcaatatttcacctacttcttgaataattactggactagtctgagttacaatctctgtagtttctactttcggtataggtgaatagacactaactggtttttccattggtggagcagagggttcaggagacgtctgtagtccacattccataatttctggttggacttgcgatgctatttcggtagtttgaatttgctcaggagatttagtttgagctgattcttcccgactttctacacgtgtctgcatagcagaatcacttcggatcaattcaggcttttctggtgaaatggtctgcacggcttcctcgatgatttctactttctcaggtgtaactgtctgtgtagaaatctctgtaatttctgttgtcagtttttcttgtggagattcggtctttggtgttgtttgtgtaagcgtttcggtagtttcaatctcaacctgagtaaaaccttctttaacatctggttttacagttacaatttctttttcttcgtcgcttgtttggatgaatgcttctgcaatttcttttggagtttctggtgatgtttgaaccgagacttgttcttttggtacttcaggtatcttttggactggagcttcttgtacagctcgctcagtttccagaaattcgttggttatattaactggagatgtctgagctacagtttcctgtgtaatgacagcttctataacaggaacagtagttacaatctttgttgttatttcttcgggtgatttgctttccgatcggataactacattttcttct

SEQ ID NO: 8172 - DNA, 1146 bp, Diabrotica virgifera
  SmartBlast Evalue=1E-61; Info=Vacuolar ATP synthase 21 kDa proteolipid subunit n=1 Tax=Harpegnathos saltator RepID=E2C4E3_ 9HYME
ctgggctgttgcactaatcatatgggttggttgttagttcacttttttctacagtaccatgtgtcactagcataatactcaaaaaattaatatttaattttgtgaacttagttaacatcattttgaaaaatgcggtacactttgagttacatcggtgctaccctagcgtccactgtaacactgatttttgccctctactactgcctcacgggaaaaggagagcaagttagtttagcatggttattgttgaatgtgtctccccacatgtgggcaggtctaggaattggccttgctgtatcattatcagttgtaggagctgctgcaggaattcacactacaggagtcagtatcgtaggagctggtgttaaagcccccagaatcaaaaccaaaaatttaatttctattattttctgtgaagctgtggctatctatgggttaattatggctatagtactctgtggaagttggaagaatttcgatgtagacctattcaacctcaaaactcataactttgctcaaaaccattatggatcacatgttatttttggatccggtttaactgttggatttgtaaatctattatgtggattttgtgttggagtagttggttctggtgcagccatttctgatgcagccaattcatcattattcgtcaaaattttgattattgagatttttggaagtgccattggtctcttcggtctgattgttggagtatacttgacgtcaagaggctctatggtttaaatgttcagtaaatgaacatgaaaaataaaatgaataatttgttaaaagtgtgtgtgatgaagatacaactattttcactagtttacgccccaaaatatttcattgtggtttttgaacaatatttaaaatccattctaaattaaaattcttcaaataattgttgaaaacagattcaagggtctttaatcagtgtatataatagtattaaataaatattccactaattttgttaatcattgttaaacattgtatagttacaaaagaaatttttaatttagaataatatgcttgtacagcatgtagtcccactagtattagtatttaaaaactgtattaaaaattgtcttttctatgtctaataaaattacagacgattttgttaaattttaatacagatct

SEQ ID NO: 8173 - DNA, 1145 bp, Diabrotica virgifera
  SmartBlast Evalue=1E-122; Info=Sulfite reductase n=1 Tax=Culex quinquefasciatus RepID=B0WBF7_CULQU
ctagctaaagaaagtccaaaagtagataaaagtgatgcagttcctggaaattatagatcaaacttgccagtgtatagtttggacgaaatcgcatctcacaattcaaaagaaacaggaatatgggtaacctataaagaaggggtttacaacatcacagagttcgttgaaggacatcccggtggagatcaaattttgatggcagcaggtagttcagtggaacctttttggatgttgtatggtatacacgaaaatccacatgtttatgagattttagaaacttatcgaataggaaatttaaaaccagatgacaggaattattttacttcagatatgtcggacccatattctacagaccctaaaaggcatatagcattgaaaccagcctgtgtcaaaccattcaatgctgaattaccgccagagctgctagtggaaagctttttaacaccaaatgaactattctacgttaggaatcatttacctgttccagaaattaatccagatagttacgaattggaaatagacattgaaggaaaaataaagtaaccgtttttacgttggagcaattgaaaaaaatgccaaagcataccattactgctactatcatgtgcgccggtaatagacgaagtgaaatgatacaggttagacctgtcaaaggtttaaattggggagcagcagctatcggcaacgctacttggagtggtgtatatttacgtgatgttttgttacttgctggtatggacgagaatgatcaaaaatataaacatgttcagtttgaaggatatgacagtgatgcaacaggtaaaacttatggtgcatcaataccaatctggaaagctctagatcaaaggggagacgtattgctagcttatgaaatgaacggtgtgcccattcctagagatcacggttttcccgtgagagttattgtcccaggcatagtgggtgcgagaaatgtgaaatggcttgaaaaaataatagtttctgagaacgagagtgattcccattggcaacagaatgattataaaggattttcaccatcggtcgactgggacactgttgactttactaaatctcccgctattcaggaattaccagtgatatctgctatctgtcaacctacagcgaatggtgccgttaaaagtagagga

SEQ ID NO: 8174 - DNA, 1145 bp, Diabrotica virgifera
gccgagaacaagactgtcacttttgacgttttttaaaaaggcgagaggtctttcagttttgatggtggaagtttttggtcaattttatagaaaaataagtaaatgtacagtggatgatctggatcatttacaaagagtattctggttattgagtggaggagagtattggttggtgttgatttttgtttaaagacaagcaaatctttgttggaggttgtgcaaaggatggatcagtctacactgtaagccctatgttttgtcactttgtcagctaccgtaccgtggaggcttttagtagcagtatgtttgcctgaacatattatttatttgtagagtggttaagttaagtgccatatctcaggtaacaattttgacttactttatctcaaaaatactttggtggttatacgcgatttttttagactgagcggttcatagatattgctaaattttatcagttaaagtgggtggactgttccaataagtacagaacaaaaaccttttattttggtgctagattcgtataaaaaaatgataacgtctgtgtatttagtttatgtttaatttatatcattaataatatctataatttgttgagctcagcgttctctatacaaatagtacctttaggttttacaagttaatttttttatatatttaacgggtttgtgttttctatcttgtttgactgttttatgtttagttttttttgtttctttgctacattactgttaagacttttttataaaataaatttcgaataattgtcattttttacgattgtcattttttttattatctttattttttttattttttatttaatccacctacatttcagataattttacagagtaatttggctatcagttagttcctgttcaattgtatccgtaaggtaaggtaaggtaaaatcctacgcaggtaggttggcgtccaacttttcgttttcttcttcgttttctttccaattttctttaattttgttatctaccgacccctacccctccgaatactgtaaagagcaacggtgcacttattcacatatgtcgggaccttcaggctgtagccattttataggcacctaaggttgccgcacgggtaatattatcggtcataatacccgtttgcgcgccaatggtgaa

SEQ ID NO: 8175 - DNA, 1141 bp, Diabrotica virgifera
actgctcgaatcatatcttcatgactagagagcggaatatatgcaaagtgcatatagaggcatatattgcatattttcagacaacaaacacaacattgcatatttaagctaaacacgatttattttgcatattttaaaaataaatcatatgtataaaagtttaaaattttcctctcttagttggaattttataacttcgatatgaacgagctcgttatttatctatctatggctcattattatctatctggactttcccattactacctgaatttaacaattatgggtgttcccagaaaatattattttattagcgtagcaagtcgtaggtacctacctgcttttaagggtctaatatttattttgtcagtttccggccaacatttgtttaaagtaaacgttgtatcgtatttagtgtttttgaagtgattggtatatattaaatttaaatatgtctaccattcaaaaaagtgcttggataaagtgttttcccgagttaaagctaagtggagacaaagtattttgcaaggcctgttccaaaatcgtaagttacattcattttcacattttattttttaaatgaggaatttttaaaggaatttacaattaagtgattcggttaatcttgttaacactttttctgctcattgtcaaaaaattcccggaaatacagggattgcaattagaaataaattaaaaaatgttttagaaaaaaatgagggcttcgattgtttgaggaaagttgtacgtatttttgaaggcaacttttctgaagatcttacgacttggcaaattagtttactgcctaaattaaatattgtcctataacatcaatagatgtagaacgaactttttctgtgtccaaacacgtttttagtgatagaaggcaaaagttgctagttgaaaattttgaaaaatatttgattataaattcatactataatttagattcttaatttaattataatatcagtttttgtgtgtcatttcatttgtttttatgtgaaaaataaatatgtattaaacataaatgtaggttgaattttttaaacataaatgtttaataagttttcaatttaaaaatcttttagtaatatttttaatattttcaatattaataatttactattaggattgaaaa

SEQ ID NO: 8176 - DNA, 1144 bp, Diabrotica virgifera
  SmartBlast Evalue=1E-114; Info=Phenylalanyl-tRNA synthetase n=1 Tax=Glossina morsitans morsitans RepID=D3TPN1_GLOMM
ggttgtattgtgatgaaaatgttacaaatttaaataaaaatgttgaatatttcaagtattagtttgattaaacaaacacattttaagttattcaaaagacttttatcaaaagcgcaacttaaaactaatgacttaatccttctgaaccaaaattacttgaaagatgagtatacaaatatcactgataaagtatcaggatatattggaagaaatatttacttacaaccctctaatcctttgaatttagtgagacaaagattagtgaactacttttataaaaaatatgtgaacagaagaggaaaccctatcttttctatccatgataatttacccccattgtcaatgttacccaaaattttgatagtttacttatccccaaagatcatccttcaaggaataaaagcgactgttattatataaacaagaagttcttacttcgagcacacatgacggctcatcaaagtgagctaattcagtcaggtttaaataattttttaattataggagatgtgtacagaagagatgaaattgatagaacccattatccggtttttcaccaagtagatgctgttagactgcgatctaggaatcaaattttttctgatgataatttgaatatttttgaagaaggaaccaacactgcttttacaggcaaccaagaaaaacaagcttgtcattctttggaagcagtgaaagttgtagaatttgaattaaaggataccttagttggccttgccaaagcactttttaaagaaaacaccaagtatcgatgggtagacacaacttttccatttacacaaccgtcttgggagttagaggtctttcataatgatgaatggattgaggttctagggtgtggtattatgcaacaagccattttaaataacgctggagtccacgataaaatcggttgggcctttggtctagggttagaaaggattgcgatgtgtctatatcaaatcccagatattcgtttgttctggtcttccgactcaggcttcctaaaccaatttaaaaacaaaaacgtcaatgatgatattatttatacccccattagccaatatcctcaatgtaagaatgatctaagcttttggcttccaccaggggagttttctgcgaatgacttttatgatttagcccgaaa

SEQ ID NO: 8177 - DNA, 1143 bp, Diabrotica virgifera
ggaacaaaccttatattatactaatacattgctaaagagttctaaaaacaactgatttttatataaaaacagactaaaaatataaggaatatcgcagaagatacaacacagagttatatattagcatagagtagagagagtgtcattcagagcgaagtgacgacaccatcttttttatttggattagcgctgtttcactcttacgcataataaagctgctacagttgtcctcctcttccgtgcctatattcacacaaaatgtcatcatagattttcgatacaatgtgttagaaagagatgcagcaaaccagtccatgagatcttgtcgtcaggaagcgcggaaggtaggcttcccctatgttaatatatacctctatgttaataattaatctatgaaatgctaattgtgtcaaaattttataaatgtcattagtgtcaaaattagataacagtggagtaaacttgcctgaggttggactggaccaattacaaacaagcttttcggcatgggaaatttgagttactcctcttggtttaaaaacatacataattcgattgagtcattctggagctataatgtaacaaaataaaatgatgtttattaaatgttattcaatgtttacatagtgaaactgtaccggacagactgcatgacttgtcgcattgggattttataagattagatgttgcgatttgctacataataccttcttccactcatgtcttcaaatttaattttaaacaaacaatatcacagatcaatattgagcatcccaatcctcaaattctaagttaaacgctctggcattagcaggtgtatgaatgtcggtttgatgattgctggcaggacaattatcgttgaaatcttgaaacacatacttcttatctctcgaatcgcagactgtcatgtgttctcccaacaacgtcttgtttgcaaaccgatgcagggcgttatagggacaagtcacaaagtccggatagttcaccatacatttgatgatgtgtctttgtaatgtactctggggcatgatgtgtagtgggttaaatggacagcatacattcctttcagccatatttagcccaaaatttacacaatacaaacacaaaaaccacaaacagtaataaaacaataataaaagattt

SEQ ID NO: 8178 - DNA, 1143 bp, Diabrotica virgifera
  SmartBlast Evalue=1E-110; Info="Short chain 3-hydroxyacyl-CoA dehydrogenase, putative n=1 Tax=Pediculus humanus corporis RepID=E0VKS4_PEDHC"
gtggagtggataataatcaatttactgtttttgtctggagtttgccggggttgtaagttgttgtttgtttgtgtaaatacttcttactacttcctatacgatggccactatttccaatattgctaaaaggtgtttttctaccagttcaaccttaaacgttataaaaaatgttacagttatcggaggtggattgatgggttctggaattgcccaggtggcagctcaagcaggtcaatccgttaccttggtggatctaaatgcagacatcttaaaaaaatctgaaacttccatccaaacaagtgtgggccgtgttgccaaaaagctacataaagaagatgcagctgctgctaaaaagtttgtagaagaaactatagcaagagttaaatattgtccggatcccctaaaagctttagacaatgctgaccttgtcgtggaagccatagttgaaaacattgatatcaaacacaaactcttcaagagcttagatgaagctgctcctgcaaatacaatatttgcttccaacaccagctcattatctatatcggaaatagcttcggtcacaaagaggaaggataaatttgggggactgcatttctttaatccagtggcagtgatgaagctgttggaagtaattaggattccagaaactagcgaagagacctacaaagccatgatggaatggggtaaatcagtggggaaggtctgtattacttgcaaagacacccctggatttgtggttaacaggcttttggtgccttatttagctgaatctatcaaactgtttgagagaggagatgcctcagctaatgatattgatacagctatgaaactaggtgctggatacccaatgggaccattggaattggctgattatactggcttagacaccacactcttcattattgatggatggcacaagaaattccctgaaaatcctctgttcgaaccaccagcaatattgaggaagtttgtagcagaaggaaaattgggccgtaagactggtcaaggcttttataactactcgaaatagtaggagactgatagataatgtaagttttacaccgggtgtgcttaaagtcggcagaaatgatattgtacatcataataatttgtttattatatatctttttatattatatttgt

SEQ ID NO: 8179 - DNA, 1141 bp, Diabrotica virgifera
  SmartBlast Evalue=1E-80; Info=Probable cation-transporting ATPase 13A3 n=1 Tax=Camponotus floridanus RepID=E2ADC5_9HYME
gtacttaacgtgatcaaagaaggacgcgctgccttggtgaccagtttcggaatattcaagtacatggcggcttattctttgtgtcagctcatttcagtaattattctttacagtatagagtcgaatttgacggatattgaatatttgtacattgatttatttattatttcgatttttgcctttttcttcggtcgcaccgaatcgtacccagggaaattagttaaagagacgccgctgagtagtttggttagtgtatcccctatagtgagtttgtttttgcagatacttttattggctgtgtttcaggtaacggcttttgagcacttaaagtccgaaacttggtacgttcccctaaacgccaccttcagtggcgaagaagagaacgttgcttgtctcgaaaactacactatttacacgatatccagtttccagtacattattttagctgtcgttttctctaaaggttacccgtacaggaaagtattttcaccaattacggccttgttgcctcaacgatattcttaaccggactgtctgtgtatttagccctgatacctcacgaacctattgcacattttttcgaactagtagtaccccaagattttaccttcagactatatcttgtgatgtatgctgctatcaactttgttttgagtatctttgcagagcatgtaattatcgaaaaaatattcttcaaaaggttgaggttcaaattccacaatatcgacaaatcgaagcgaaaatatctggccgttgaaagggacttgagggcagaccggaaatggcctgtgcttacctcagacttcaaatccgccgtcagtcctagttcgccacagcccgtttgcccggctcagttcgttatcgaacaagagaatagattcgacaagaatcatatacttaacaaactgtacgacgcttctgagaatcaaaagatacaacaagatactacaagaagtttgccgaatacgccagcgaggttaaccaacaacttcgtgtttcggtcaccgaaacatttacaatatcaaatgaacggtaccaacgagaccggatatttcagccaagatgacttgttttcgagtttaccctcagaaaatcaaaccagtacacgatctgacacgtacaagagtataagtgacaacac

SEQ ID NO: 8180 - DNA, 1144 bp, Diabrotica virgifera
  SmartBlast Evalue=4E-78; Info=Carbonyl reductase [NADPH] 1 n=1 Tax=Harpegnathos saltator RepID=E2BU93_9HYME
caaaatatatttttattaaaaaatattaaatgcaatgtaatacaatttgttttaataatactacagtgaatatcattgtgtggtgaatttaatatggtggatttggcatttccttgctgtaccaatcgactaatgtgcaatctttccagatatatttccctttcaaatcagcatccaatgcagcaaacaaggcacttctggctccttcctcgatacttagaagaccgttatgacttgtcatgtcagttttgacatatcccggatgaaccgcattgatcgaaatattacgattgggctgttcttcatcgaagagtctctgttggataatggtcagtgctgttacacccacttttgaaacggcataggtggagtttccccagccgtcttttacgtgtgtgttgttttctgtagcttttacaaacttttcaagtaatttactgagttctggtatggttaaatcatttctcgaaagttcatttctgagattctccgtcggtattttggacagatgtccttcagagctggaaacatttacaacttttgcgttattcctcaacaaaggaaacaaagcttcacaaactcttagggttccaaagtagttggcttctatagtttttgatgcttggacaaatggagattctgtagctgctctaccaaatgcaattgccgcattattgattagcagatccaaaccgccatgttctttttgaataaaatcccttaattcgtctacgctggtttggctattgatatccagttggtgaaatactgcttttagattttctttttctagctgagctacagcagcttgacctctttctacatctcgagctgtcagataaacgaggccatcaaatcgttcacagaggcctttgacaatagcatatcctattcctttattcccaccagttaccacagcaactttttgcgaactcattttgtggatcttaatagaaataaaaatatcactattattaaaaggtaggtatagagatactctttatcggattcctagataaggagataaaaatgtaagtatacttcaatgaaagtgaagtttgtaattgtacacgacgaccgacgacacgacgtgtattttactatttatagaataattttttcttgttgtgatggatgatggacc

SEQ ID NO: 8181 - DNA, 1141 bp, Diabrotica virgifera
  SmartBlast Evalue=1E-124; Info=tRNA-dihydrouridine synthase 3- like n=1 Tax=Harpegnathos saltator RepID=E2BNW9_9HYME
agtattttctactcctgtgttatcagatccccaatgctcaagtccatagttggcatatttctttataatatcaaacctttctgaactggatatgtcccagagcttctgctcctttatttcagtgaatatccaaggttttatcaatgctcctcttcctatcattactcctgcgacatggggagctgtttcttttgctttgatataatcttcgtaactaagaacatctccattgcctaatacaggtaatggatcagctgcttttgctacagcatctatatattcccaattggccaatcttgtgtacctctgctctctcgatcttccatgaattgttaggagacttgctccacaatctctcaactttggtgccaaaatatgtgctatattatcattgttgtaaacacccattctcatctttacagtgaatggaatatctaaaatagtgctcatacttttgacacaactttctaatactctagctcttctcatcaatccacagccagctccagttttatataccagttcaattggacatcccatattcaaatcaacaaaatcaatatctgtctctttttgtaaaagctgcccgcactttgccaataagtagggattattggcacatagttgtactccgaaaatgtcttcagattcgtgtcttcttaatagagcccattcttgtctcatgccctgtaataatgaagagcacatagccatttctccacaagtaacatcagctccaaattgtttacaaattcgtctaaatggaagattgcctacagttgtcaatggacttaacaccaatttgtctttccaatcaatctttttcttctccctttgtaaaactgatatcaaatcttcatctgtaacacatccaatactgttctgatcttctttttcgcccccatctttattgttctttcttaaagaatcaacatactttacacacttctcagccaaagtaaaatcatatgttctctttcgaagtgctgcttggatatcctgctgaagaatatttttagtatgtggacccttagcttcatagtctgaatatttctgctgatcaactttattcctaccatcactgatatgatcattgccaaacctacaagatagtcctctgttgcactttcctgaagtttgg

SEQ ID NO: 8182 - DNA, 1143 bp, Diabrotica virgifera
  SmartBlast Evalue=1E-121; Info=F-actin-capping protein subunit alpha n=2 Tax=Formicidae RepID=E2AYP3_9HYME
cttaaatggcatggttttgcaacaaacaatgacgttatagccaatttgtcacaatattttgaggagcttgagcaaacttatttttaaaggggataaaaagtagtatgcctattccagtattgggtaatattgtgttaaaaccataacataccagccataaggaaggacagataaaatactacaataaaaacaattgtcccttgattcacaacaatgccatccttacattcgccatcttggccattctctccattaaaagtcagtcactaatcattgcgttttgagttctttgccaatgctataggatacgattttattccaatccatttttgtcctggtgacaggaagaagtcttcgtagggccttgaaggttgtatctgacatgttctggtagttttctgaaattgccgtctgatagagatcctcagcggcttctattacttggatgatttctttggcagtttgtgcctcagatgaaacaggaacagtttcttttatttctttagtacttactaattgtacattaccctcttcataataatggacctgtactttgagtacccctctcacctcagcagtggaatcatcagttagactaatggaccactgagatctccatctcccattccagtagttcttcggagagaactggtggtcttcgatacaagctgttaagttaacaaccccgctctggttgcggcctaccacactacatactccatctttgtaatggttcctagtgtactgaatgaactcggagtctaaggctgcccgccaaggctcagaagcactatcgggggtatagacttggtagtctaaggcttcttttctcaggtgatcataggtaaaactctgcttacttctggggtcgaagaatctattattccctaaatcgttgtattccgtaataagcactaaatgatcggcgttttctattttaacgggggtcagttgatctttgttatactgggcgaatgccccgctggcaccttcttttaagaggtcatcgtcgtttaaaagttttctaacatcattaaatacctcattaaattcaccgggtggcgaatggagaataaaatccgatactattttcactttttcttggtcactaataacgtcgtccccgtctgacgccatgtttag

SEQ ID NO: 8183 - DNA, 1141 bp, Diabrotica virgifera
  SmartBlast Evalue=5E-86; Info=Lipase 1 n=1 Tax=Culex quinquefasciatus RepID=B0W6G8_CULQU
agtattcaaaatgaagactcggttttttatttcatagcacttttttgttgctgttcagctgaattcaacatatttcagctggccaagcatgctatcgacgtcggatcttccattactaaagacgtgctcgataatgttttaactgttaatgatctaccagatagaattactgttccagaaattattaaacgtgaaggatatgaagtggaaagccactttgtcactactccagatggttatatactaaatctccacaggatcccacatggtaagcactcagaaggaaaaaggaaatccacacctgtatatttgcagcacggtcttttatgttcctcagccgactgggttatatttggtccaaagagagctcttgcgtttattcttgctgacgcagggtatgacgtatggatgggcaatgtacgcggtaacacgtactcaagaaatcatacttatttatttcccgaagaagctcaattttggaaatttagttggaacgaaatgggcatgtacgatattccaaccatggtcgactacattttaaaggccacaggaaagccacaattgtatcatattggacattcacaagggacaacatcattttatgttatgacatcagaacgtcctgagtataatcaaaagattaaagcacacatcagtcttgctccagtggcatatatgcaaaatctggtcagtccattagtgagagccctagcttttggtcgatttgtctttggaaataaattgatgattggaaaaagcgagtttatgccatcccacgcatttttcgttttagttaacaacgctatgtgtagcgtcggaataggagcagtatattgtaaaatttctattttcgcaatatctggatttagtccagatcagatggatcctgccgacactgttctgatttatgcccattacccagctggtgcatctaccaaacaggttcttcattatgcacaagaagtcgaatctgggcgtttccgtaaatatgactttggaccaaccaaaaacagatactattataacggttccgaaacagcccctgactataatttatctaaaataagtgcacccattcatcttatttatagttctaatgattggttgtcaagtgaagcagatgtaaatagacttcatggtg

SEQ ID NO: 8184 - DNA, 1141 bp, Diabrotica virgifera
  SmartBlast Evalue=1E-154; Info=Protein PSR n=1 Tax=Harpegnathos saltator RepID=E2BPS5_9HYME
cgggaataaaaagtgtcaatgtgactttatatgctgaaaaatattacttgttctaaattattttttacaaagtaatggacgaacatgaattcgcacacagagcacgaaaacgaattaaagaagtaaagaaacgagctagaccagaattaaataccaagaaagcatggaggcaaatggaatatgtctcagatgttgacaggttcaaaaactttgtagacaactgtgaaagaatagatgaaagtcgaacttcccagagacaatttataacacattatgaacttccttacaagcctgtggtaattacagggtgccaaaagggttggagggcggcagagaaatggactttagaaaaattaactaggaaatataggaaccaaaaatttaagtgtggagaagacaatgaaggctatagtgtaaaaatgaaaatgaagtattatatccattatatgcagtctactaaagatgatagtcctttatatatatttgatagtaattttggtgagcataaaagaagaaagaaattgttagaagattatgaagtaccgtattattttagagatgacctattaaagtattctggtgaaaacaggagacctccttatagatggtttgtaatgggacctgctaggtctgggacgggaatccatattgatcctctcggtaccagtgcctggaacgctcttgtagtgggtcacaaaaggtggtgtttgtttccaacgcatactccaaaagaaattctaaaggtaacacttcaagctggtggaaagcagcgtgacgaagcaatcacgtggtttgacttaatatatccaaaaacgcaaaagccaacttggccacaaaactgtaaaccagtcgaaatcttacaaggtcctggtgaaactgtttttgttccaggtggatggtggcacgtagtattaaatctagacacaactatagctgtgactcaaaatttctgtagtcgaacaaatttcccagtcgtgtggcataaaacggctagaggaagacccaaattatctcaaaagtggctaaagacattgaccgagaaggagccaaatcttgctgctttggctattaggattaatttagagaaaccctctgggatagcctcggatagttccagtaactcatcttctagctccagctc

SEQ ID NO: 8185 - DNA, 1143 bp, Diabrotica virgifera
tttaaggcgcatcaacctatatggttattagcgccgctcggtattacaaagtttatgtttacaatttgttgatatatagatagatacataaattaacattaatacatatacatagattttcatatacattgatttttacagtgttgatatttggttgtagatccatttcaaaaaacttaaaactgacgaaaagtcacagtcctcttcgaaacactcacgtagcgttatcggtagtttacacttaagctgttaccgcacttaccgcacattggattaacacttccagtaaatatggtattcatttgattactagtctttgttaaactcatgtctaaaaagggttttctgacaatccttattcttgtacttgatcgctatctatttcggaggaggaatataatacatccagctgtttagatattttacgtttaatttttgtacaacgtgttttcatgattttttcatcgaacagaggatatatgttgtctaataattctagtaatccctcaatatcttttgtgaaagtttgagcaacattcaatgtgttagctgaaccatatgcgttttcaaagaagtgtatcgtttcttgataattaagaacagtgtgatttttttcgtcttcgaaaaatgctttagttggttccatctgtttctttatatcaagagtctctcttgtttgggtagttttcttcttttttgaacgtgtatctgtagtaggtcgtttaaagcattcaggagtatcaggtggtgttactgtttcggaaaaagatcttttgctctgtatttgtagcgtcggctcttcgttaatttgtgaagtgaacgatgattcattgatttctggtccgggttcattaacgtttatatctttatttgtgggcgggttctcggtttctggctttggtgtgtcgcatttgtttgttatattaaagtctttatttttgtgttgtttagattgactatcttctacaaaatgatttgattcagaatggatttgtgctgaatgtattgtcacatcagatatagtgtctgctgtagttaccgtgttatttattactgaactggagttattgtttttttgaggacagtttgaggctacatgatcaatattttacaaatataacatgaatgttggtctaaagacat

SEQ ID NO: 8186 - DNA, 1134 bp, Diabrotica virgifera
  SmartBlast Evalue=5E-62; Info=Probable nucleoporin Nup58 n=1 Tax=Camponotus floridanus RepID=E2ADP1_9HYME
gaacttttactcatcttaaaatattcctctacaactattaaaattacctaaattatcaaaaatacaaatacaaaaataacagcaacttccattttttatatagtagtaaaagtttaatatttatgacaatgtgagctaaaaaaataaaaccgtaaactattgttttcctcttttgtttccggtgggtggtttttgcaattgaaaactattcgtactttgtcctagagatggcgaggcgaacaactgtgaactattcccgcccaattggcttacgaaactcgtgccgaatgtcatattgctgaaacctggcgctgcagtcgtgggcgtcgaaaaagacatcgtactttggttttgttgtccagcaaatagtgacgtagcacctaaagacaaattactgaaaggtgtaggtccagttgcgatcttcggtaaaggataattgaaaatatggctgaggtttccctcgtggctatcgaaaggattggtattgtcgttgtataactgttttcgcatctgcaggtacgcttctttctgagattccacttgagagtgaaccgagtgtagacgacccgctagagctacaaaagactcgtggagtctgcgcattcccaacgccatgtcctgcgacgtcacggggtttggatttctgtggtttttgacgtagctttcggctccttctatttgtgattttaatgcctgcatatccttttcgaatttgtccgcaagatttaggaaaaacttcagaggttctgtgttttcgtactgcaacccaggtggagtatcttgagtcctttgtgctatttccacgtcttgtaaacattttgctgtatcatattttaaattttctgccaattgcctatttatctgcaactgatgttctacatttttcagaagagccgtcaattgcttaatgtcttgctctactttcttaaaatcccgagctgaacattttgatatgtccgaactgtaaactttctgttgcttcacaaatcctttgaaggcttctacagtttgaagaagttcgttaggaaggggctgatctttaggtgtaacatctttttgtgcggtgactactttggcttgtgtagtagctagacctcctagaccaacggatggtgttgttgtggtactgctagt

SEQ ID NO: 8187 - DNA, 1136 bp, Diabrotica virgifera
  SmartBlast Evalue=0.000000005; Info=Endonuclease-reverse transcriptase n=1 Tax=Bombyx mori RepID=D7F166_BOMMO
tctgtgtctgatcatttttttaggtcatattcttttgcatattcctgccttcttgttgaggatcttcctcgtgaccttctacctttccttggataagtctttccatttttttctgtgtctgctctcataccatgtcaaaagtattataattcttctccaacagaacatttcagtggtatctactaggcttgttcaattgaaacccatgtttgatccagaaaaaaattatcggcaaacgtctaatctatctatctcagccttaaacgcccattcctgggcataggcctcccctgttaatctctattggtctatattctggccgatctgcacccagtccttgcgtgctgttctcttaatttcgtccgtccttctcatctgtggtcttcctctttttcttttctgttcccatggtcgtcagtgtagaattctcctattccatctttcatgtttttgccgcagagtgtggccggccaaagtatcttcattataaaagaataattatcgctatatttaaggcacatatcccattgtttcaccaaccgatgcatatcatgtttaaagaattcttgtggctgtagctcgaagaattcttttacggcattttctatttcttggtccatctgaaaatgattaccttgttaacgcctttttcagtggcccaaaggtgtgaaaattgtagagcgcaaattggaaccagggagtggatgctttaacatcctccattttttgttgttatggatttcctttaactacattggcgatataagaccgagcattttcgggcagaagaatgccaccacgtgagagcttttttgggcgtttttgtcatattgcttgataacttatttccttatacaggttttcgttgatatacactctagattgcttatagatagcttatggctgctaaaaaagttcaatttgccaagtgactaatgatgtgataacccaatatgttaggtcttttaaacacatttaacaggttatccactaggtatagttttttttatatatttattcatttatcgaatctcgtttattagataataaaccaataaaatatttatttattattattctacattgaaagaattataaaaaaatattttatttattcatttatcgaatctcgttta

SEQ ID NO: 8188 - DNA, 1138 bp, Diabrotica virgifera
  SmartBlast Evalue=1E-75; Info=CG2943 n=5 Tax=melanogaster subgroup RepID=Q9VHY6_DROME
aataccagaaggtaaagtccaatggactatagaggaagctcttagcgatatagttgctactgaatttttcgaattaccaatgtctgaattagatgcctcaatcgaaaatgaatttaaaacaaattctaataatattattaatatgctcatccacagattaactacacagactaaacagttgtccaatttaatttttggtagtcagttattatcagctaacggtttagttagagacgaattcggtttccacaaacttattgtagtggcaacgaaagtaggaaaattgtttgctattgacactttatctggatcgatagcatggagttataggctaccaaatgttagaccttttaagttattggacaaggaaaagatgtttctatttgtacaaagaactgctagatatgcccctcttcctgcactgtgtacacttattgctgaagattcgacaaatggaaatgcagttttatttcagttcgatcctatcacagggtattccattaaaggcattgaaaagttagacttcaagcttgcacaggcaatgttgttgccatatgaagatgaaaataatcttaaacctgttctgctgctttcctccgaacatcaagcaactgtgcatccacaaacgtccaagctatttgtatacaattatataaaacagaaccatatattcttagtagatagtaagaaaaatagccttaagggctataacttttaccacagtaccaaagaagaatttaaacttactcctacatgggaaatcaagttcagtcctggtaaaatagtatcagttaacacaaagcatcccaacgaaagggtacattcccaaggaagggttcttcctgatagatcagtgtattataaatacgtcaatcctaatctaattagtgttgccacaataagtgaagatccagttcataagcatgtattgagtatatacttaatcgatggtatttctggccttattatgtactcgacatcacacaaaagagccaaaactcctgttaaggtagtgcattctgaaaattggttggtgtactcatacttcagtgagagatttagaagaactgaagttgtttctgctgaattatatgaagggcatgttcaaggtaatagcacagtgttcagttcccatgct

SEQ ID NO: 8189 - DNA, 1141 bp, Diabrotica virgifera
  SmartBlast Evalue=1E-109; Info=NADPH cytochrome b5 reductase n= 1 Tax=Helicoverpa armigera RepID=E2JE74_HELAM
aatgttgtacttatttatttcactattgcaacagaaatatacaaaaaacaagaataaacatttaaaatttttaattattcaataagcaagcagcctttgtttttcgtggccaagtttctccaaatttggagtacaagcaaagtttatcattggtgggggaccacacatgaggactaaagcatcatcagaagcgggaaacaagtgttcttttaacatttcttcgttgatgaaaccggaactatatttccaatctggtccgggtctgtccaaagtataccataacttgaaactattaggtctactcttcactgcttcttctaattctggtcttaacaaaatatcgtcttctgtttgatttgcaaacaataatgcacattctgttgtgtcagtggggtctttgaggatgtgtctgatcaactgtaagattggagttattcctacacctccagcaatgaggttaactttcttcactgttatttcttctggtggatccttcctaagttttttcactgtaaatttaccatgacccaagtactcaattcttcccgctggacctcgtacatcgatagtgtcgccaattttaagggattctaaatgttgagtcattttgccaccatctggaaatttgggatgaacatttttgaaatataccttaataactaaatcaacgtatccttgatcgtcatctgatgacacaggagtgtatgatcttataactaactcatcgttgattttagcggacagtataatatgctgaccaataggaagaccaagcaccatatccttttctggtagaccaaacctgaagtttcttgtatcatggctgataatagttttttctattaatggtagttgatatttcgtctgtggatctttcaagaggacttttttacttttacttttagtaactttgctaggtgcatctggagaagaataaaagaacttatatatcacaaatgacgtaactatcacacctacgcctagcaccaaaggcagcacctgactctctcccgaatccattacacaatgtacttaaacttacaaaaataaccaatcactcaagaaacaactgaatttaaaaaatagctgctagtttttgtggtcttaatttttattaatgacattgaatattgaacttacc

SEQ ID NO: 8190 - DNA, 1136 bp, Diabrotica virgifera
  SmartBlast Evalue=4E-41; Info=Protein FAM45B n=1 Tax=Camponotus floridanus RepID=E2AJA2_9HYME
ccacttgttattagctagattcactttgttttttttttgttgttcaacttcgcctcaaatcgtgatcgtgactgattttagatttgttttaatagtatgtattgttttgttgtttcattttaatgttaatttagcaatgttttttaaaccaacatcctttcatgtacttgagaaagaaaataccgaaaatctcataacttggaactatccatcaatcagcgatgaacttaagactgttttaataaaaacttgcttttcccacggagtagaagcctgtggactgttttatttcaaaagattaggaaaacaatggatacatattaaacaatttattgttaacaacgataaagcagctgctgtaattgttgtatcgcaatgctttcaaccaaagttatatgaaacactatgtgatttgtttgctgcacaatacagtcgcagtggaagtggagcagacctggtcaaactttatttgcagatctataccaaaaatggaatttacgataacgatgattttattagtttaaataacttcacctggaaaaccaatttaaaaggactaatcaagtctttgggattagaaacaattttaatatataatgccctattattaaagaaacaaatactagtctaccattccagcgtagaggatttacaagaagggttagcttcaatcaccaaacttgtattgataagaaaaccagaagatctgctactacccttagcaaatagtttatcggaaattaaagaggtgtcgacatatagtttaattggtacaataaacaagaatctattacatcagagaaatatatttgatgtatttatcgatctagaatcgcaatcgataacacttactgataaggctagagatgatttccaaatgagctctttacacaaagaaatcgcccattttctggtacagctttccgaaagtgatggaagtgaacaggatttgataactgctgtggctcgaaagacgtcggatctttttaaataccttaaatccttttgcgacgataaagaagaaggaataaaagttaccagcatagaatctaaattgtcaaataaaaaactagcaatattcttaattaatttagccatgactgaaaatattttggtaatataagctctttgtattg

SEQ ID NO: 8191 - DNA, 1139 bp, Diabrotica virgifera
gcctatagatatataaggttaaaatttataagagatttcttaatcatttcaatatcattgacgacgttggttacaaattggtatttttttatcagataaagttgaatcactccccggtaactgtatattgtatagtaataaagtatattgtgaaaagggtgatatatttatctgtgacccgtataaaaataaactcaatttcaactgtatagttggttggattagtgtattaacatattttatcaagtctttatttatacctagtattctattattagtaattaggcatttaatagataggtatgttattttacatagagatgagatcaatgcttcattatctaataatctggcacaatctatggttgatgctagtatattgcaaagaggctcctttaccaataagggaattgtttaacacaggaatagtagcaggagagctacataatgaaaataaggcaagctgggaatgtgaagatgagaagaactgcaatttgaggattgatagtacgtatgacatatggataagagacaattatcaattaaagataaatgtggaagataaaaaggaaggtatagaaggtgatatcacattaactgtaaaaaatgttgaatggtctgttcctgtaagctacaaatattctcatgtcagaggagtacaatatggtagatatggtagtgattattattcttgtgatggtagtgtttatacagattgtaccaacaataatgacaatgacaataagtattttaaaaatggagcaggtgagacatatcctgaatcacctaatgatggattcatcaaagtagcagcagagtatagtgcattccaaactgactcttcatggtttgtagtgccacatgaaggaagatgtgcttgtgcacctgggtatgatgatgtttggttttgtatagggagggcaatgacatatgacatagaagatggcgtaattgcatctggtaccataggaaaagtgagtggatacaaatgtaccatagaaatagatgcattcggacagaaatatacagctagtttggatcaatcatcaactgatgatgtaaatattgatgtatcaggattcggcaatataagaataaatggcatggatgacataagaagtgatatagaaggcaaattt

SEQ ID NO: 8192 - DNA, 1140 bp, Diabrotica virgifera
  SmartBlast Evalue=2E-70; Info=Zinc/iron transporter n=1 Tax= Culex quinquefasciatus RepID=B0W7S1_CULQU
cattgtgttggtgtagagtgtgattcttaaatacaggtgtagacaaataaacaatgcctccccgagttcttctacattcacatcatgaccacctcgaacatcaggattctgaaggaaatgccaccttagctaaggctacagctatgtgcgtcctcttcacagcctcattcatcataggaaacataccaatcaagttaaaccaatggctcaattggagctcagatgccaaaagtaactcctacgtcaaacttttactcggtttgggcggaggtgtcctcctgtgtaccactttcattcatttactgccggaagtaagtgaacactttgaggagttggacctaactccaaacatcgaaatacactatgcagaagtattgatgtgtattgggttcttcataatgtatctcgttgaagaatgtgtccatgtttatttggaatacaaggagaaacctccagatatgaagatacctctagaaccagttgatgtggatttgggtttggctttaaaacgaagtatttccatcagaaggggagagatccctgacataaagaaaattcgtcaagagttggctgtagaagctgaacaccacggaagacactctcattcccatggtcattcgcatacacctgtccatggtggaggctcaacagtcgctataataagaggactactagtggtactagctctttcagtacacgaactctttgaaggtctagctgtcggcttagaaagctcgcctagtacagtgtggtatatgtttggggcagtagctgcgcataagttagtgatcgccttttgcatcggtgtagaactagtaacatcgggtttaaaaacgtatctagtgattgtttacgtatttatgtttgctgttgtgagtccggctggaataggtattggaatattggtcagcgaaaatgacagctcctcaactacattagtatctgtgatattacaaggtttagcgtcagggactttgatgtacgtggtcttttttgagattctacagggtgataaaagagatggacttaaacaattcggggctatacttctcggatttttaattatgtttggtataaccatgatagacgtttaagttgtagtataagttttgtaaaaataaaaagatgacaaattaaaaa

SEQ ID NO: 8193 - DNA, 1140 bp, Diabrotica virgifera
  SmartBlast Evalue=2E-76; Info=Calcium and integrin binding protein CIB n=1 Tax=Bombyx mori RepID=Q2F616_BOMMO
gcatgattggacaaggcaatgtttacgaaagttggataaaatataaaatgaaaaatgataaaatcctaatcttttgcatttgatttgatatataatattaatcacaaatatgactcatattcccattttcttaatgctaaactgttaatttttgttaaacctatcttgctcaatatttattcttattccttgtttgttcatttaacagctttatttaaattataaattcatatcagttttatcgagcaataaaaagaatttacacgattattaaatttaatatacatgacagtacatagtacatgtagataatactagactgtaaagacagagtttagactagactaacaaaaaaatgggacaagcaaaaagccaattcactgatgatgaactgcagaattaccaagatctaacatattttaccaaaaaggaagtcttgcatgctcatcagaagtttaaagctctggccccagagaaagtaggccataataaaaatgccaaactacccatggaaaaaattttattatatcccgaactgagtgtgaatccatttggagagcgcatatgtaaagttttcagctcaaatcatgatggccattgcacttttgaagattttttggatatgatgtcagtgtttagcgaaacagctccgaaatctgtaaaagctgaacatgcttttcgtatatttgattttgatggtgacgatatgttgggtaaatcggatttacaagaagtgattagaacattaactggtgaatataaacttactgatgcggaaatcgacacgttgattgaaaatattttggaagaagctgactttgacgacgataggtctctttcgttcgcagaatttgaacatataactgataaatcgtctgatttttttaagtgcattcaggatccgtttgtaattcaagaaaaagatgtatcgtgtatcataatttttactatatattaattaatacatacgataaacccttacaaacttaagtgattgtctgatttgaagataataattattgcttggataagtcgaagtctagcaagtattatttagagtttgcattggaacccagtattttttaagtcaaatttaattgtacagtattaatgtttttttagattatataataaaaatat

SEQ ID NO: 8194 - DNA, 1137 bp, Diabrotica virgifera
tgactatggtatgttattacacttaacgaatggcctataaagcataatcatttggtttaatatattttttatataaaaaatgaggactgtaatgaaagttttgttaaaaatatgtgagaaagtagccgaaaaacacaaccttacagcatgtaaaaaagaacagagtgtgggaaaatttccgataagaaatgttgtttacattgtatgtctactttctggaggatattttggaagaaaagctggtttacctctcggtaaagttgcaattatagtcggagcaggtggattattaacaagttttaaaatagttaaatctatgagagcaactgcgtccagagtattaccacgtagcagaccaataaaagatttagttcaagaaatgaccactgcgcagaaaataaaactggcaagcaacgtagcaaatgtaataaagagtcatacgaatcttaatctttctgatgaatcccgcattatggacgctctagataaaacaactgagctgcttattcttaatgaaatgattacggtcttgggggaggattgctgcttagatgtttgtatttccgataagtagactagtaatccattagtcgatacaagaactagaagttctcttatgcgttcatttagtatgtttagatctttattataaaaatataaactatataataatatatacagttgagtccaggattctttacccgtgcgtcatcatttaaagcatacaaaataagtcggaaatttactaaacgcaacagcaactgacagaaagtgatacgatcacgggatcactactccgatcacgggatatagtacaaaatttgacgttatcaaataaataaaatgtcaactgtaagtttaaaattttggtgcataattacagctacatttgaagtagcttaataaattattttaatatcattgactaataaataaataaacaatttataaaaaaattcaataacatattttccttttgttattttattcactttggcggaaacttaaacacacaaacaaccattccttaactgtgccaatgaggttatctttgtacgttgtaaaaattatctattgcgttgtaaatcgcaaaataaataggtatacttaccataaaatttcaaactccaatataaa

SEQ ID NO: 8195 - DNA, 1138 bp, Diabrotica virgifera
tgttaaatataagtacctatcttaaaatattaagatctcattagttaaaataaaagaactataaaaaaatgtatttgtttctgcgggagttaaatggatcagattatgttctcctgtgattcattttcgatccttttgcaaactgtcatatcaatctgaaaggtttttaataaaatgtgttagggctgatatttaccctaccaatatcatgtataaaataggctgttaaataagttttgtcgtttgataatagatggcgctacaacgttaaaggcatataaagacactttgccttcaattagaatcataaaaagataggttagtgggtgcaaacatggctcatgcaagtctcgaaggcgatctacgcgaagaacacctaaaaagtgtctcaacatcagaaatcatagcaaaaatacaggatattattttgtaacagagggagatctcattaggtattgtgagtaatattttggatgaagttttggtttcaaaaagttatgtacctagcttttagtgcaatattaactaacaagggtacaaaaacatcatttagaaaatgtttaaaaaagataaacacaacttaattcttggtttcatcgctatggatgaaacttagatctggtagcatgatcctggataaaaaagagaagacttttttaatggaaagggaattgtggccgtgtctaaggcataaaaacgcattaaaagaagaggctaaaacgtgtttcagtcacgaaacgaattaacaggttatgaccaggaagtaacgtcatgttttagatatttaaaagaaatgttgctggtggattacctccaaatgatcagtttgttatcataacctattggaccagttgaatgtacctaaaagttttcagaaaaaatacggcttacagaaagcaaataaagaaaaaataatattttcaaaggcaacactacatctcagacagttcaaaaaaagatcgcgaaaatcagttgttgcaacatccattttattcgtcagatttagcttcctttgacttctggccgttaccacatctcagaaaattcatgttttccatcgaacgaagagatagtggtaatcgtgaaacttactcaacaagctagtacttatatacagaattttcaaacaatatcaatt

SEQ ID NO: 8196 - DNA, 1133 bp, Diabrotica virgifera
  SmartBlast Evalue=1E-135; Info=Importin subunit alpha-4 n=2 Tax= Formicidae RepID=E2BLZ6_9HYME
ttttaagaaacgttacatgggttattgtaaatttatgcagaaacaaagatccatctcctcctacgaagactattgaagaactgttacctgctctgaatgctttgatacatcatacagacgttaatatcttagtcgacacagtttgggctttaagttacctaactgacggtggcaatcttcacatccaaatggtcatagatagtggtgtcgtaccaaagctcatacctctccttagtcataaagaagtcaaagttcaaacagcagctctccgtgcagtgggtaatatagttacaggtactgatgaacaaacacaagtggtgcttaattgtgatgccctcagccatttcccatcgttattagtacatcctaaagaaaagatctgtaaagaagcagtatggttcttgtccaatatcacagccggaagtagatcacaagtgcaagccgttattgatgctggactcttaccgaaaataattcataatcttagtaaaggcgatttccaaacacagaaagaagctgcttgggctatcaccaatttgtctataggcggcagtagagaacaaattgctagactgatacaggaaggagtggtgcctccattctgtgaactcctcaactgcaaagatgctacagttatccaggttgtacttgatggtattaataatttactacaaatggccggtcctcaattggaacagctctgcacaatgattgaagaatgcaatggcctggacaaaattgaagctttgcaaaatcatgacaacattaaaatttacaaattggcatatgaaattatagagcaatatttcggaggcgaagaggtggaggattccaacatagctcccacacaaggagaagcaacattcaacttcgatccaaatacaaatgttccaaaagacttcaacttctgatcgttttatgaagatgataattactaaacgtttattaaaagtaattaagtcatcattagccagaagaaagcgttgcttccttactttatatcaaaaaaacaaaacaaaatacgaatatgtctatacatacatttaaacatgtacgttcattttaagctattcatgtacatattatatatattttttatatataagacgatagattcgaacccaaaatgttta

SEQ ID NO: 8197 - DNA, 1132 bp, Diabrotica virgifera
  SmartBlast Evalue=8E-86; Info=Vacuolar protein sorting- associated protein 33A n=2 Tax=Aculeata RepID=E2ANA6_9HYME
gccagttgctttttctttgccaaaaatttgaggaagtctttgaacataaagcttcatctcctggacagacttttcctgtgtattttccatctgggcactaattgctttagcctcttttgagagataaccgcctacagcattgaaattcttgtcccggatgtcagcaaaaaattttgtcagttgaatctagaatcagttgcttcttatcttctgataacgattctgtagttctttcttcagtgcttaaaaaattatcgattgggaaataggcagttgaattatttataccgaaaatttcatcaatcaatccttcataagttaactgtgtagctaaaggtgtgatcaaatctacagacctatcgattaatatgatttgatcaatacatgactgttgattattttttcatatcttcactgttattcttttctctttgcaatctaaccacaagatcccaaacttgcttagctgcatttcctttgccccaaactttaggaatagttccatacattttttgaaggtatattatagcttgtgctgtttggtataaatacgtagggtcgttttcaattgtgtactccctaaaaacctcagatatttccattgatactaagtcagattcaaatggaaaaagctggcatttgaattcatcaattaacattacgcttccatagactcctttatgtttcaatctttccatgcacaataagcttttctttggtacaaaaaacaaatggtattgcttcttactgccacttttcgttttactgtcagcatgtacattttgtgcaatgtagtccatcagatacaatttgggccttgagatgaagataatatgatcgacatcagtttcaggtaaaggcatatttcgaagtgggaacatcttaggagcctggtgctccttgaggattgcatatttggctacaagtccaactggtccagctaagctgttatcccaaacaatgactttcttaccaggacattgttctaaaaggtttatcaggtttgccctagctgctgcttgaattaaggatatatctacttttccactttgcatgtgagccatatttcactttagcctttagcttaatcaaaagcaaaagaggtggatttaaatgtttatattttattctg

SEQ ID NO: 8198 - DNA, 1133 bp, Diabrotica virgifera
  SmartBlast Evalue=7E-64; Info=Inositol monophosphatase n=1 Tax= Camponotus floridanus RepID=E1ZXT3_9HYME
tgacatcagattatacactgaaatatgaactattacatttaattcaaatctattggtcagtgattggatcgtactgtatcaacttcttcgcgatagcttgagctacgtcttctgaattagccgttaagactctcattgcgaatcggttcaaggggctgccatcagtatcaagtaccacacctcctgcttcctttacgatgagttcacctgctgctatgtcccaaatgttgagtttgtattgatagtaagcgtccgcagcaccgcaggctaccatgcacatgtccatagctgctgaacctagtgatctcggtccatgagtttcccgcattagcatcttatagttctccaaaatgactttttctttgacggaattttcacgagcgaaactctctgttaacaccaaagcatcagccatagttttcgtatcagacacttataggttccccatttaaaaacgcaccttttcctttcctggccgagaagaattgtccaaatggggattataaatgataccaatctcaggttctttgttgacaaacaaagctattgaaatacaggaatggggaaatgaatggacaaagttcatggttccgtctattggatctacgatccaggttggtgcgtcggtgagagtacattctgctccttcaaacgttgactcctctccaataattttgtggtggggatattctttattaacggtgctgatgagaagcttctctatgtgtttgtctgtttcggttactaggtctgttctgtttagtttgctggtagtggatttgttccttactaaagcagtttctttgattattgcccccaatcgttttgccaaagcaacagccgtttcataatactgatccaattcttctgctgacatactgacttacctactgaccaatctattttaccacgtattacaaaactgttaattattctttaaactataggtactgttatttctatgtaatttcaaaattaaaacaaatacgcgatatctaaattcatcattcaacaaaactgttttacttatctgatttttacatatttatagtaggtacatatacaacactgtaaataacatattattatgctgaaggtagcgatttgattcaactcatactaaactgacggtc

SEQ ID NO: 8199 - DNA, 1135 bp, Diabrotica virgifera
  SmartBlast Evalue=1E-121; Info=Nucleotide-binding protein 1 n=1 Tax=Camponotus floridanus RepID=E2A591_9HYME
taggcaagagatatgccatgcaagacggacttgcatagcatgagacttgcatagccttgatgtaaagctgcttttaggaataagaatatagattattatactattacattcgtgtttttgattataatatataatataaaacatggcatcagcagttccagaacattgtcctggagttgaaagcgaaaatgctggaagggcttcagcttgcgctggttgtccgaatcaaaatatttgtgccagctctgatccaaagaagccagatccaggtattgacttagtgaaggaaagattggcagatgtagataacaaaattttaattctttctggtaagggtggagttgggaaaagcacagttacagctatattaagtaggacaatagcaagtagtcatagcgagaagaatgtggctgtgttggacattgatatttgtggtccctcccaaccaagagtgttaggagtccaagatgagagtgtgcatcagtcaggatctggatggtctcctatatatgttgaagacaatttgtcagtaatgtcaatagggtttttattgggaactgcttgatgatgctgtgatttggaggggaccgaagaaaaatggaatgatcaagcagttccttagtgaagttgattggggaaatttggactatcttcttatagataccccacctggtacatctgatgaacatctctctgcagtgacatatctctcgaaagccaatttgacgggagcagttattgttacaactcctcaggaagtagctttgttagatgttaggaaagaaattgatttttgttcaaagtcaaaataaaagttttgggagtcatagagaatatggcacaatttgtatgtacaaaatgtgagaaatcttcagatatcttcccagcatcaacaggaggagcaaggaaaatgtgtgaagatttaggggttccgtttttgggaagcttgccactagatcctagaattgcgagatgttgtgatgaaggaaaagattttgccacacatttagcgaattcgccagctttaaaagcttctaatgaaatagtcaaaagaataatggacttgtgtgaggtaaaggataagagtaaaacatagttttattgtatattgtatacatacttttatttaataaat

SEQ ID NO: 8200 - DNA, 1134 bp, Diabrotica virgifera
  SmartBlast Evalue=4E-17; Info=Endonuclease-reverse transcriptase n=1 Tax=Bombyx mori RepID=D5LB38_BOMMO
tatatacaacctaagatggaactttttcgcctatatacaaaagaggaagttaaaattcataaactaaggaagttttattttaattggtagagtgtaaagaactgttcctttcgtttccatgttatactgttcattatactgttttcatagaaaaatcaggatagggttttggaagtctcacaggtaaaagactatggagttgctggaagcgcatatgaaagatgttatcaccaacctgtatttgaaccagataccaacagtacgtcttcaaaatttcaactaaatggaagatttctcaataaaaaatagagtaaggcaaggttgtatactttctgtaatgttgtttaacttatacgtagaaaaacttcgcagaagcagtggcgagctctaataagggtgttaaagtaaacgacatatttattaacattagttatgccgatgacacagagactgtggcatataacatcgaagatcttcaatgttttttaaatgatcttactctttcaggtgaagctttggctttgaaaataaatatcaagaaaacaaaaacaatgatcataggcagaaatagttacccaaatgcaacgatggttgggaccctgagactaaaataaagagcagagtagaacaagtctggaagcttttttaaaacttcgtaaatttcttactgctcgcaagttggatttcaacctgagatacaagatgctaaagtgttacgtttggtccgttcttttgtacggaatggaagtgtgaacgttaaatatcagatccattaccaaacttaaagcttttgaaatgttgtgcctgtgccaaatgcgtagaacatcatggagggacagagtcaaaaatgagaaagtgttaaaaaagctggaccccaggatatcgaattttttgaatatatgattatataaaaagcgagaagactacatatttagggcacatatatgagaaaaacgatacctacacttttcagcaactagtactagaaggaaagatagaagataaggtaggactaggaaaaaatggctgtagatggttaagattaggtatcttaagaagaataaggacaaaaacagagtacctgaatgtcatttaaagatctagctgtctccgtagctgattgtgcaaagtaat

SEQ ID NO: 8201 - DNA, 1126 bp, Diabrotica virgifera
  SmartBlast Evalue=2E-53; Info=Endonuclease-reverse transcriptase n=1 Tax=Bombyx mori RepID=D5LB38_BOMMO
gtttagaaacagtattacatctgcaaaaacatacccaagtgcagacgcagcaactaaccataatctgctctgtgctggattcaaactaaaactaaaaagaataaaagcccccacaacgcagaagaaacctaatactcgactcctaagaaatgccgtaatagcagatgagttcggaaataagataaatcgtgagattaaaaaacagttagaaagatctgaacaagaaatatcggtcaaaatctagatatcatgaattccgtcatggtcaccatagcaaacgaagttttgaaaccagaaaaagacccaatgaagaaaaggattggatgaccgataaaatactagaccttattcaacaaagaagaaattggaaaaacaaagacgagattcgatatagagagatatatcgacaaataagatacgaggttaagcgagcaaaagagagctggatggaacaaagatgtcgtgaaatggaagaactacaaagaaaacatgacgagtttaatatacataaaaagcttaaagaaattacctacactcagagaaaaagaactcctcactttatgagaaactccaaaggtaaaataattctcgacttggatgaaaaaatggaagaatggactaactatataaaagagctcttcctggatacgaggccaccacttaacaccacaaagtatacgaatactggtcctagtattttaaaagcggaagtagagaaagccatcaaacagagcaaaaatgggaaatctccaggccctgaccaaataccatcagactggctcaaacttctggatgacgacaatgtctcacaactaacaaacatttataaccatatatacgagactggcatgatgccacagatatggttagagtctacatttattccactcccaaagcaacctaatacatcatcatgtaaagactttagactaagtagtctcatgagccactctctcaagctacttcttaagataattcttaatagaatcaagcagaaatgtgaagagacaatgggaaacaaacaattcggtttcagagaaggattgggaacaagggaagctttgttctcaatgctaacattacttcaacgatcatcggaagtacagaacctaattagtctgcttta

SEQ ID NO: 8202 - DNA, 1139 bp, Diabrotica virgifera
  SmartBlast Evalue=8E-73; Info=Cytochrome P450-like protein n=1 Tax=Tribolium castaneum RepID=D6WKD6_TRICA
agacatacgtgcatattgacataatgaatttattgtttaatggacgtctaaaaatataaagctcatatctaactgcacgcgataaatcgaacgaaaacaaaaacaagatttgacaacacatgacatatcataaatcttccaaatatggcagtagtactagctctttttgttggtgctatagtagctgcgatttcatattggtggatgggtatataccgaatcagatctaaactacactggataccagagatacctcgactacctttaattggtaatgccttggaattaaaaaaaacaacagaaattcttggcaaatttgaagattacttaagtaaacataatggactgtgtaccatagaattggccacttataagtttatagttacatcggatcccacatttttggaattcctattgggcaaaacagatattttgaataaaagtgacgaataccagtttttgggtaattggttaggtaaaggacttttaacagctgcagctccaaaatggaaaagaagtagaaaaatgctgactccttcgtttcatttttcaattcttgatgtctttgtcgatacgtttgattccaatgctgcaattttagtggatctattggataaagaaactaacaaagatagttttgatatatttccgtatgttaaaaactgtacgatggacgttatctgtgaaacgtcaatgggagtatcaatacatgcccaaaaaaaatccaaaatcggactatgttcgagcagtagcagagttatgccgattgctgatactcagaacgtactcacctttaaaaaccttcgatttttttttatcgccttacttctgactataaattagaaatggaacaggttaaaatacttcattctcacaccatgcaagtaatcacttcaagaaaagaggaattaaagaaaaaacataaagacgatcaaaaagaagaaaccgatgatgttgggattaagaagaggaaagcatttttagatttactgttagaaacaactattgatggaagaccacttaccgatacagaaattcgggaagaagttgatacatttttatttgctggacatgacactaccgcagctgctataagtttctgtttatattgtttgtcagttaacaaggatgtacaggac

SEQ ID NO: 8203 - DNA, 1137 bp, Diabrotica virgifera
tttaatttaatttaacaaaattagctcgttattcaaaaatttataaaattaaatttgaatgtttacgtcaaattttacgttgtcaaaacgtagttcaactcaagctgacagtggcgctagtggcaacgtgcttccagatttctgtgtgagttggatgtattacagtcaatagtatttggcgatactcctatatcgtgtggtatttttctgtttatacacacaaccaaacttaaaaggaactatctgtcattttttattattccaagcgaattcaagaaaacaatatacgaattcaaccaatgtttattttaaaactatttaatgagcaataatataaaaaattaaagaaaacaataaattcctgaaataacaaattaaaacgatttgttttgaagtgagtaacaaatttacttattaagcctttggccaattttaatagaaaatgataggaaggtgaaaaacaatgatcatgatctatccaacctttagatactcgatgtaaatgtagatagttaccactaaaattttatctctaatgaatcgttagtaggtataactattaaaatatttttttattattatcttttattagtttattattacgtcttaggaaggaatcctaaatatgataaataaaacgcatactgtaaactgatcttcaaattttttatagaagtataattgttattattctaaaaacaaaatttaatgttgaagtgttttgcaaatagtctaaaaattcttattttcacattttatacagaatttttatattatacactaaaggaaaaatatttttttaaaagtttgttctagataataagtgtgatcgaaagttgacaaataaatactcaaaatcaatttgttaattttccgatgttattatgcgttattcgcatcgccatatttgtaatctttatactattacctattattgccaaaataattgaagagggaaaaataaattcacaaaaatcgaatttgagaaaatatattttcgaaaatgcttttcaatattatattagataaaaacacattagcattaggatgtttttaaatttaacaatatttagcaccagtaaataaaaaaaaaatacaggtctctcgtcagttaaaaagcagaaaatgtcttttaaa

SEQ ID NO: 8204 - DNA, 1134 bp, Diabrotica virgifera
  SmartBlast Evalue=8E-10; Info=Putative DNA-mediated transposase n=1 Tax=Helicoverpa zea RepID=A4KAD9_HELZE
ggtctagaaccaaatcaacatagctgccagctgttaaagttgtttgcatgaaaattaaattagtttgtttacccatcgtaatacccaggagtttgacactttctcctttatatctgtgaacagatctggtagtttccgttctttctggtcttcttcaccctccacgtacacgaatttgtcggtcatctaattataatagcaaattttgccaatttcctatgttccagttttggtgttaaagacaccaatttaaacgatcaatcttgtactgccttgataactcaggaacccgttactgtctcctgctgtatagtccttgggcacgaactcttttttatcgttttcactgaaacacttacacctgttgctcccaaaatctacctttggagctgcagatgggaaattgttgggtcttttctaactgcgtgtacaatgaaacgatcgtggcgagccattgttactttttggtgatcttgtcttggtctatttgtaagctgtcctaattcctgatacctagcataggtttttgacgcaataccctgtgttacgcctaccactgcagctatgcccctctgatagattccttactctacaagaccaataatatttgccatttacacgtccgttaaacccacattaggcatattttcgtttttgaacgtaaaaattagtttatttattttcgatcaatttacaactagatcaaattataataatctctaacctgcgttatctgattgttttatcagttggtttattttcaataaaaacctttatttttgcaacaatagcaagttttttcagaagaaataaatattagtttgaaatacatgtgattccatatacgtttggttgtgtatatttattagaaaatttgaattttccaaacggattagaaatttcagaaggtttttcggtcttatcagaccatcatcagtgaaaatgtaactactactacactacccttaagaacttttccatatacttgttaacctttacaacattttctgtctaccccatcatacccccattaggataattttagcaataaatcatgttattgaaaactctagaaggagctttttgtagcggaatcatttagttacttgtaaatgttgacctgaagattctctg

SEQ ID NO: 8205 - DNA, 1127 bp, Diabrotica virgifera
  SmartBlast Evalue=2E-64; Info=Exocyst complex component 2 n=2 Tax=Culicini RepID=B0W3D0_CULQU
acttcagagatatttcctgatttgtggaagattggtcaagcatacttttctggggagctgcaggtgaaaattgaagcaggaaggcaggtcgaatacaaacacatggttctaactgctattgaatcgttttccaaatacgtacgagtcagcatcattccaaatactctagataaatctgatcgtgtccaatacggttctttaaccactttggaccgcgacgaagtagctctgtaccttccagaactgctccgctcagtgcgctctacatactccacattaattcaactagatctacccaatgaagctttagacatagtatcagctttgcttatagatatgcgaatctattgcatgagcaccttattccaacaaacagctgaacaaattaaacaactgtcagaaaattggaaaataaatttcagcggaaaatatacgggagttactgaacttcctttgaagtttttaaggttaattgaagatgtcatacaaattgtaaaggaatctgctttatctgtcgaacaaagggaaacatctcttttagatagttcttctgcgcagaaggaactcgaaaagcaggtcgataatattttaggttctttttatgatgtgctgaataacctttcatcaactgaagattatgatgattgtgatgataattcaccagtggtttctcagttgatagggactcccgtaggtcctcataaaacgggcgcaccgcatgatatccccacttgggagaatcggctgctgataaccttatcgaactgtatatttacaaaaattactatacttgatgagatttctaagaagttcagagaaacagggttttcctccattgatggtcctatcaagacgaataaaaataaatacgaagccttggaaaaatcaattttagataaatatttggagcaaaagagtgatcctctagttggtaccattgagccttctatgtatttgggacggtttgactgggatatcaacgtgcctcctacagacattcgcccttacgccaaagaatgtgtcaataaccttataagtgtacattctgaaataaataacatttcagttagtcttctagatagtatcttggtcaaaatcgtcgagacaatcgctgaagaactgtatag

SEQ ID NO: 8206 - DNA, 1134 bp, Diabrotica virgifera
  SmartBlast Evalue=1E-109; Info=Alcohol dehydrogenase n=1 Tax= Aedes aegypti RepID=Q16M07_AEDAE
catatcatactttaacaatagctttcccggtatttccaccacgtaacatatcagcaaaagctgcatacatattctcaaatccatgggtgacagtctctctatacttcagttttccttcttgaatccattttttattttgttctacaccttcgaaccatctatccacccacctttgaacaacgaatccttccattcttagctggttaaataccagaggatattggacaatgggagcttttggcaatgatgtatcgttatatccagaaattgccccacatacagagattctaccgaacaagctcatgtacaacattatcatcgaactgatctctccaccaacgttatcaaaataacagtcatatggtgcaaattctttaattttacttcgtaaatcatcttttttatagttgataaaatgatcaaatccgagttcatctacaagccattttcctttttcgtctgatccagcgacaccaacagttcggcatccttttattttcgctatttgtccgacatggctgcctactgccccagcagcaccagtaacaattactgtttcacctacttttggctgacatagttccaaaaatccgaagtaggcagtatttcctggcattcctaacactcctaaagctagtgaatgtggaaggtcttcaatgtctggtatgatccaaaccgatggcagcccgttgacagcaccttttccatttgatattgtgtgtgttctccatccatattctcccactatgtatgttccttctggaaattttgaatttttactttctacgatcttagcaacttgagatcccataaaagtccttcctgtctttactcgtggggcgtatgctctcatatacggatccacacttaaatattctgctgctgccaaaaattctccatccttgagcgccggcaattcttcagttacaagtttaaagtcactttctttgggaaatccatcaaactgtttttcaaaaataaaagctttggcacttacatgtcgcttgataaatttgttagtttgagaaaacaatctagacttttttaaaagcttattacacgcagtcatttcaaaacactttaattgcaatatttattacaaaatacaaaataccgacacagttatcagttatc

SEQ ID NO: 8207 - DNA, 1135 bp, Diabrotica virgifera
  SmartBlast Evalue=2E-79; Info=Carbonyl reductase [NADPH] 1 n=1 Tax=Harpegnathos saltator RepID=E2BU93_9HYME
tatattattaatctatggtgttatttatttaaaatagtgtacagtttgcttatgtagagcctgtgtaataattggtaattcataaatgagaaaaataattattctacaaatacatccttgtccaattacaaacttcactttgattgaagtataagtacattttttatctccttatctagaaatacaagatgagttcgcaaaaagttgctgtggtaaccggtgggaataaaggaataggatatgccattgtcaaaggcctctgtgaacgatttgatggactcgtttatctgacagctcgagatgtagaaagaggtcaagccgctgtagctcagctagaaaaagaaaataagaaagcagtgtttcaccaactggatattaataaccaagccagtgtagacgaattaagggattttattaaagatagacatggcggattggatctgctaatcaataatgcagcaatagcctttggtagagcagctacagaatctccatttgtccaagcatcaaaaactatagaagccaattactttggaaccctaagagtttgtgaagctttgtttcctttgttaaggaataacgcaaaagttgtaaatctttccagcgctgcaggacatctgtctaaaataccgacagagaagctcagaaatgaattttcgagaaaggatttaaccataccagaactcagtaaattacttgaaaagtttgtaaaagctacagaaaataacacacacgtagaagatggctggggaaactccacctacgctgtttccaaagtgggtgtaactgcactgaccattatccaacagagactattcgatgaagaacagcccaatcgtaatatttcgatcaatgcagttcatccgggatacgtcaaaactgatatgacaagccataacggtcttttaagtatcgaggaaggagccaaaagctccttgtttgctgcattggatgctgatttgaaggggaagtatatctggaaagattgtacattagttgattggtacagcaaggaaatgccaaatccaccatactaaattcgtcacactatacacaatgatattcactgtagtacctattattaaaacaaattgtactagattgcatttaatattttctaataaaaatatatttt

SEQ ID NO: 8208 - DNA, 1135 bp, Diabrotica virgifera
  SmartBlast Evalue=5E-57; Info=Transmembrane protein 205 n=1 Tax= Camponotus floridanus RepID=E2AHJ9_9HYME
ctgatcgcgactgtggaagttctcgcttctttcgattttcgctaaatctaaattaattttttgaaaaaaatgtgtgtcgggaaaatcgttagtgacatcgaaaggactaatccagtgattggaaagttagagtttagaaatgtggaacaggtggttcgacctcaacacactgaagatcatcaatcatgtaaccccgacaaccctgatcgaggggggtacgaacaagacatcctaggggtttctaccaaatatacatactatttcttccaagctattaagaacttacaacaacaatttttcaaatccaatacatacaagattctgcggcacaccacgcagcctgcccattttatcactgcagtttctgtgatcttcgtagcatacttgatgatgccaggaaaagctcatcctaaaatgtcccttctgtggaatctactgtacctgggggccttcagcgctcatttcggtgcccagatctggatgactttcgtctctggcttggctttgttcttctccctatccagacatacttttggcagtgttcagcaagtattgtttcctaaatactttcttttgaacactgtgctgagcttcatcactctgtttgtgttcatgaagaccaacaacagcgttcttctggaatcctgggagaatttaatacaggctctatccatctccttgtgcttccttgtggaactggtagtgcgcctgtacttcactcctcctcttttgcgcctcattggaatcaaacataagatcgaaaaagaggcaggagtgggcctggaagtaggaaaatacgacctgggaaggttgaaagattgtccttactatatgaaaatccacaaatcgtttagatccatccacatgaccatcgccatcttgaatttggttgccatggcgtgtactactctgcatctttattatttatcccaaaaattatgttcaatttgaaaggttatccaaaatggttaacagactgactactgaggatatggacgccaaagatcaaggattgcttggtgctttactctatggtagatacaagtgcgttgtaagctacttggaatgtatgtagagattgtgttttcgtgtgtgtgcctatattgtagcacttgtaatactcgtactattagtt

SEQ ID NO: 8209 - DNA, 1132 bp, Diabrotica virgifera
  SmartBlast Evalue=1E-139; Info=Ankyrin repeat and FYVE domain- containing protein 1 n=1 Tax=Camponotus floridanus RepID=E2A9F6_ 9HYME
tagctccagtcttcaatacatcaaaacagactttacagaccctaactggtttgttctcgccaaattttataatcggcacttccgtatccgaacacttgctacagagtgctcgtccgcaatggcgacaatggtgggtgcgaactgtaagggtaaatcttttaccacactcttggcaggaatctgtgtttgtccatggcgctggttccgataatgtgtctagaaggcggttcaaaagctgctttgttggaacctggtaattaaatatagtcactctttctgaattttcggaagacaaacaagcgttcgccttgactaaaactctgcaaaggcttccgtttccatttatatatgccagaaggagaggtgaattacccaaaatgtctggattatttattggatacgtaggaatgcattctaacaacagtccgcaaatggtggctgcattatcttttccatatttacacaattcgtgaagagggttcctacccttcaaatttactgcctcgacatctatataagattctgttagtagtactttaacaacatttagatgtccttctctcatagctatgtgaaatgcattgtcattttctacatctgtagcatcacaatcagagttattttgtattagtgccaaaacagcggaatgattacctgcctctgcggctgcatgtaatgctgtacgtctttgagcatccctatcgtctactctagcaccagctagaattaaactcctaactaatgtttcgttcccatgcctagctgctaaatggataggtggcgttagcattggatcttgtactctggaatttacgtctacttgtactgttagtaaaaatagagcgctttcaatgtctcccttttttaaggctatatgaaggaaattctgacccttcgaatcgaactgttcggcagcactaggaaacttatctaaaatagcctgagcagccttgttatttctaaaagtcagagcggtggcgaaaggactaaggcctgctttatctctcaaacttaaatcaatttcgggaacactcaacaacagagatattatttcttcttgttgactttcgatagctatatgaagaggcgtcttattttctgcgtcgcggatgttaacgttggctctgtgttc

SEQ ID NO: 8210 - DNA, 1124 bp, Diabrotica virgifera
ttcaaagctctgataatttatttacctatttagttcgtctaatatttctaaccctaagccctacaatagggcttttagtaattgtgattaccagaaagattcttcattgagccagtccggtcgtaactttttagcctcagatgacagataacaagatggctgcctctacaaaacgagatttcaaaaacttcaatggcgccggcgagagtgtcactactgattgtttttaatactgtgtaagaattaaaggaatttttagatttagacaactttttaagggaagttaaagaactttttttgatatatattgttgttagcaaataagcacattttaaacgtatgtaagtatctacggggtatttcacaatgagatgtatttttgaacatgtgaggcattgtatatgaacacgttttcggatgtagaagatttttgggtagatggacgacattttaattgttataaaagcttcttctcgttgtccttatgctcaataagagcgtcggactttgctatcatctatccatctttccatatttttccacaccttccggtctcttgccattgatctgttgcactattttccctctcttggtcacgatttcctgggtttgtttcatccacccctttctaggtctaccccttcttcttctcccctgtcttttggcatctgtcaccttctttactagtctcttctcgttcattttagttatatgtccaaaccaattcagttttctcttttcaattttttgctctcttggttcctgtcttagtacgtttttgatattatacaagcacaagcttatggatcgaaataagctatagatgagtatgctctcctctgtatactattgttccacagcgactattttgaacaatatgcttgtcatatctaatttatgaccatagtagagagaatatagacttatttaagctataccagctctacagatgatgatgctggtgatgtcgtgttagtaggaaatagtgaaagagacttagaacaaaaactggaacattggagacaagctctggaggaaaaaggtttaaaacttagtaggacaaaaaacagagtatttggaatgttcatttaaagatggagctactacaaataaaatggtatctt

SEQ ID NO: 8211 - DNA, 1130 bp, Diabrotica virgifera
  SmartBlast Evalue=0.000000005; Info=Endonuclease-reverse transcriptase n=1 Tax=Bombyx mori RepID=D5LB38_BOMMO
gtattaaaagttatttgagtaaattaattctcaaaattctcaaaggtagtcctgcgttaccacaaattgcaatggcattagtattagtattttcgattctaaagtagttagtttaatttgtttgcacattttcagcaattccatgtccttcacaacctttgaaaatatttaaaagagaccacacacaagcaaattaagtttaactttaaacgaccttgtttataagttccactacattagtcaaaaatcgtcattaccagtccataattgtccactgctaaacataggcttcctctaaaaacttctattggatggcctttccgagttttgaaatatatgacgtatttgtataattatgttatacaagttacacaaagaggcttaaaagtgattcagatcaccttatttttttgcatgtgtgtgtttttttttcaagtaagtagaaaattggaaagaagttgagtcatgttataattattccgaattcttgtatgggagtgactaacctaccaaacgagaaaatattttaaaggcaaccttagttacgattttttacgatggctcataatttttaaaccctcttaaaagtttcttttccttcttgtgcctaccgttacgaatgttggcaatcattctggcaatgataatcttattagcctgctgccttgaaaagccctgtaggggatgtcgcaaaccaggtcctcaagctcctgaaccaatatattcttcttcttccgacgcttcttttaccattcacctttccctgcaaaatgcattataacaggttacaaggttgtatattattattttgtttcatttcttgtgatgtggccgaaatagtctaattttgttctttttaccgtgcacactatttccttctctttgttaagttttggagtattttggcatttgatattttgtccatctatgatatctaaagaattattctatatgtccacatttcttgttgcttccaagactctactccatggataataagatggagattatataacatcggaggagtctgagtttctagttctaaattcaaattgtgtaatttgaacaccttggacatttggatgaacgctgcccttgctttttctagtcaattctaaaagtttagtagg

SEQ ID NO: 8212 - DNA, 1130 bp, Diabrotica virgifera
tatttgtaagttgttagttctgaaagctggcgttattcctttctttttatgtgtttggctacatatttgttgatatcttacctgtgatagagaagaagataggttctgggtttttctatgataatgggaagactaatttcaaggcttttttatgcagtttttgattttcgattctgttaattgtttgttccttgtacccattgtttactgctacatatatatttgttgcatgatgcgtacaattctataattatatctcgaagttatttatgatatggatatttctgtcagtccatgtaacatacagtgggtgatcaaattattagagccacgtagtaaaattcaatgttttagagaaagggtatattattgaagtgtataatatattaatgcgtttgtttccatttgactgtcttgttgcacttaatgaatgcaataaataatagtccgacaatagtggtaatgcgtgactgagatgcctttgtttatcagtgctgcccagctagcttgcaactcgtgtgcctcttattttgtattcttggtgtttacagttataataaactctgagagtttccattgctctccagtgatattctgacagtcttatacaattttttgggaatttagtaaacattgcacgttcattacactagtggtacatctcaccaaggaaaatagtagaaataaaaactttattatttaacactaaattactccaacagaagcataccatccatttctaaagtttcaaaggcaacgtggaccgtataaagaaaaaatttacataccattattaaacaaaagtaaaattttctgaggtggctctaatagccaccctaatagttaggatgggatgatgaactgtgtcagcactttgtattagataaaaaaagcagcaagttgcccaaagtattgttctcttctttttgttcttttcttgatgcctattacaacgttggataaatggatgccaaagtctaatatctcaaaagacctgtttttgatttacaatgatgattcggacaacttgccacctttttccatccaatacaaaacactgacacatttcatcatcccatcctaacacaacataaataggacttttcaacgcttctcatttgtttcgagct

SEQ ID NO: 8213 - DNA, 1131 bp, Diabrotica virgifera
  SmartBlast Evalue=7E-11; Info=Endonuclease-reverse transcriptase n=1 Tax=Bombyx mori RepID=D5LB38_BOMMO
attcttctatccttccttggttttagtagacggatgtattttgtttccagttgttcggaaaatgtgtgcatttatcaggcaaaatctgaagatctagtataattgcaccattattttcttcgggagttccttgagtgtaatattatgtgatcgtacaaatcattacagcatttcttgcgggttatatagaggttttcaccttatagaggttttactgtacaagggatgatattatacagacggtatttacttagcaaacaacataacgatatctgactagcagagaccatttaaaattggttatgtgtcaaattttatgggaaacactcgttttagattgttttagagttgcccagtaaacgccgtcccattgagcgcatagctgcctgtatatagtttaggtgaagatgttaaaatatttcacaggttgttccattaacaatgaggttaaaagtatgtaaaagtatatgattttaatttgagaaacaagaaatttttagcatatatagacaataatttatcaaaataagacttatttgacgttttgttaatttttttgctaagttatgtttttggcagtgaaacttaagcaatctttatatttatcagggtatattagtttatttacagcttataaattatgtattattaaataataatattttatttatatctctttccgcctatcttgctttgtattattaaatgaagtatgtgatatctctcttataggcgtataacatggcaaaaataatccagtttgcgatttttaactgttctgatcacttccttttcctgattcttttcgtatttgaagctcttcagaattatcccggtcaatcctgatgtttgaacgttgataccactaaagatatttaacgatacatagatatttatcattaatacctacttgctgaagaatggctatcacttcaatatgttttactcgatcaaagaccttataaaagtcaataaaacacatctctgtaccataaccggagtactaaatagtgtttctttggtttcaaggttattgcggaatctaaactgtgtgtcacaaagttgttcttctagtttgtggtacatctttttttgtatgggttcttctctatcccttctcttactcttact

SEQ ID NO: 8214 - DNA, 1131 bp, Diabrotica virgifera
  SmartBlast Evalue=7E-85; Info=Zinc binding dehydrogenase n=1 Tax=Aedes aegypti RepID=Q17E09_AEDAE
gtaacaattaatcagttggactttggagtgccttgattaagttccagaacactatttggaagtaaaaattgtgatatatacattttataatgccaaccaaaataagatatgccaacacaggagaaccactcgatgtcctttatttggaaaattatgatatgccagaaccagaaaaagatgaagcattggtccaaatgatagcagctgctgtcaatcccgtagatataaatattgtacaaggaaaatacccattaaaggttgatagtcctgggtatgaaggtatgggaaaagttataaaagttggttctgaagtgaagaatctaaaagttggagatcatgttataccaattgtttatgcaggaacatggaggactcatatcacattgccagaagaaagtttattccgcattcccaaaagtattgacgttcctgaaggggctacgttgcaagtaaatccagtaacaatgtatacgatgctgaaagaattcgtaaacttaggacctgaagatacagttattcaaaacggagcgaattctgcttgtggagttattgctattcagatgtgcaaggcatggggaataaaaactgtgaatgtggtaagagataggccactgatcgatgacttgaaaacatttttaaaaagtttaggtgctacatatgtttttactgaagaagaaattaaaaaaaccgacatatttaaaactggagagttgaacaatcctgtattaggactcaactgcattggtggaagttcagccactagcattatgaggcatttgagtgaggaaggagtgttagtaacttacggtggtatgtcgttagaacccgttacagcttctacaacggctctggtcttcaagaatatccgactggaaggtttcaacatgagccgatggaataataaagaagagaatttcgccaaacttcctaaaatattgaatgagatcgttgatatggtgttagaggagaagctgaaagcaccaccgcacgcgttagttgattttttgaattataaggaagctttaagaaataccctaagtccaggtggtatgattggaaaaaaattcattttggattttaggaatttgagtagtaaatttaaggatgtattataatatattttatgaaatt

SEQ ID NO: 8215 - DNA, 1133 bp, Diabrotica virgifera
  SmartBlast Evalue=1E-69; Info=Novel hAT family dimerisation domain protein n=1 Tax=Danio rerio RepID=UPI0001E90AAD
tttaatgtttaaagaacacattgaaaaagtacagtatttaaaggaacatcgaaaacaattcagaacgatattttagaatcaatgttagccattgtgcatactcatatcatgaaggagattggccagacaaattttgtggccattcaagtagatgagaccacagacagctccaataaaacgcagatgattatcatattgcgatatgtattaactggtattgtacatgaaagattttggaaatttgttaaccccctaggtactacagcacaacatttaactaatgtaatattggaagaacttcaattattaaaaattaatgaagcacctgaaaaattgattgcccaaagttacgatggtgcatcagtcatgagcggtaaactgggaggagtacaaacaaaaattaaagaaatatacccaaatgcacacttcattcactgctatgcccatcaatttaatcttatcctccaaaaagcggcgagtcaacacaaaccgataaaaatattttttgcaaatttacacggattttcgtcctttttcggccgatctccaaaacgtacgatggttctggatagagtggttaaagtaaggctacctaaagctgcgcctactcgatgggctttcaatacaaaatgtgttgaaattgtatacacttataaagatgatttaaaatcttgcttagaggaaattattgatgaggagcaagatggtaacaatataaatcaagcaactggtttaaaaagacatttggaagatgagcattttttattttggttaaattttttccataaaataatgccccatgttgatatattgtttaaacaattgcaaatgcgagacattgatgttatatctgtcaaaaattgtatcctgtcttttaacaacaatatccaaataattagaaatactattttggaatcagaagtaccaagcacatcaacagcaaaaaaaagaaaaactactgcagaggatccaaagcgacgaactgcacttgaaatttgtgatattattatatctgaaataaatcacaggtttagtttcaatgatcatctcatgatttcacagttattctacatagagaaatttgaagcatacactaccaactttccgcaaaatattttaaaaatggtgacggc

SEQ ID NO: 8216 - DNA, 1130 bp, Diabrotica virgifera
  SmartBlast Evalue=6E-56; Info=Sid-1-related A n=2 Tax=Tribolium castaneum RepID=A7YFV8_TRICA
tcaagttcctcagcaatgagctgatctgttcttcagacaaagcttcaaaatagtccgatactatgacatcttcgtacttatttctagcaatggtcccatacctatggaagataagcgcagctacagtcaccaggataccggaaccgattaatattaaaaatgtagcacctacagcgatagtgtaatcatttgctgtaatgctatttctgataataaagttaacatgtgtgcgaaccatctgctctatggaaacggttcttgtcagtctcggtagatttgagctttcctgactgcagtcataggtatctggtttcgcgacgaaaacaaggaagaatccatctttgtaactgcgtttcaataaagtaatagcaccttttgtattgattgtttgatggatgccctcatattttacatctttgttattgtcaaaaaccgggcacttgctgtcctggacagaaattgtaagacagagttcgtcttctgaatctacttcgatgacgaccgtgtcagcagtgtccttttcgaatctgaaataagcatatcttggctcactgggtcccaccgtcatgttatacggtttatcttgtattaggtaaaaatccggctcttctttcaattccacagttacgtttacatcagttgtgctcgccgttgacaatgccactatgaaattttgttggaaatataaagggcgtactatcatttcctggagaaagaattataatgttcatataatcatgacacaatgttttagaggacatattataagagtattctactcctggtttagtcgattcgataagcatcggaatagaccatgctgtcacttgagttctctgttcagcaacaatcaaaacgggaaattccttcttggcattctcggaagatgtgattatcctgtaggggtttatcgacgtaaagtttcgatataataaaataatttgtttgtttgcgttaagttgatttgtgatgggacttccattggttaaaagctgttgttcaattgtcagattattagttgatttacaatttattaaaccaaaacaaactgcaagcagaatccattgcaaatttttcatggtgatatcaaatttcataacagcaccttttaacgctatgtcgtactcttc

SEQ ID NO: 8217 - DNA, 1116 bp, Diabrotica virgifera
ttatctgctagatttacttaggtccattttcagatgtaaaaatatgtctaataaacgcaatattgattaaataaaaataaaaagtaaagtagtatgggattcgaaccacgattatccacgttctgaaccaaagaccatttctcgtcaccacccgctcgaactgtcaaaacataatactcgatagagtgggatagtcacgtcgtcgatattccccttgaattggaaagggactgccgaccaaataggctcatttatctctgtcgcggtcgtcacccattttaggatggcagggcgcaatctggtgtattatatatctatggtataaactgtcacgactgttacaattatcacgatagattacttttgtttcaaattacatatttttattcgtaccatgtattggttacctatttagttagagtacatgtaattgtcaaccaattatacatctataagtataagtcgctctaatatggaaatacccttcaacgaatacataattttcgaagttctttgtataataatcacggacgtacgttttttctctcacatcgagcttaatgcgttagaccgaattcgacaaacgatgacgcactgaaagaagttttggggacatctgtaaaagtttttgctcctgccatagtttatgatgtttcgatccccttgaatctcatcagatagtggttggatgaagacagaaaagcatgcatgtacgcatgcgccatcaactgtggaattcagaaaaaggaaataattgtgtatctttaaatctaactttctatctataaatatgtttttctgtgtattaggtattttaggctttttacatgctatgttaataaaaaattgatgacgttggatggcgtagaagacgacctgaaaactatgaatgtaagacaattgaggagaacggcacatgagaagtctgaatggaaggacataggcgcaaaagtccttccaggttatgatgccaaaagaagaaggctttttatataaactatcaacatttctaatagtgaaaaatcatccacaagtacatacttgctatgcctattaaacaacaaatggatgatgcactggtcaccgagaaattgctcagaaacgcttacgtaaggg

SEQ ID NO: 8218 - DNA, 1130 bp, Diabrotica virgifera
atatattttaccttataattgaagacaatatttttttgtaaacacatttttttagtttttctctgtctcatgtcatgtcagactaagagagactaaggttattggtaacgttaataattatttttgaaatttgtatcttcgaataaaatttatacaaactcaaaatgtattattaaacgccttagcagatattcctcgaaatacccaaatgtaacaaagaaaagaaaattttcgctggccagcctcaatgtcttatttattgagccattaacttttacttctgagcgactcagaaagcgcggagagggaagacatctgatgagtaaggtacgtgagatagagcacatcaaagtcataaacatggcatatagtatttgtttgtttatataattaattacaactaccaactccgcatagtgactgtgtgagttttgctttcttcgacgttttttaataagattcttcagagtacattggtttacacacagagtacacagactgtcgttttgtcagaaggtaagaagtgtttctacaagactcgttttattttattatgaataaattggttttgatgtcatatgtcatattatctgactcacttttaatcggtttagtaatgtaactttacaatatactttatttgttggatgttggattatgttttattgtaaacaaagaacaaagtagaatccatttcacctataaagtatatataacgtataaattctgagaccatctaataatttgaactgtattttcttttataatttactgaaaactctataatatagcttggtcaaccagctaaagatgctttgctgatcgataaaaaaaatacatgcatactgcataaggtgctttaaaaaatattaattgtatgaatctcaaaaagtaacaacaaatgtgttcaacaaagaattaaaaaaatatagagtatgcaaaaattttatgtcttaaccacattccatatacttattgataataaagtgtctatcagtatgatgttgatatttgaaaaattttatttgttctcgacaatttatggtagctattttaagctaatttagaatataagagacctccacgtttcatagttaatgacaataagtgccacaaaattaagtctgatc

SEQ ID NO: 8219 - DNA, 1128 bp, Diabrotica virgifera
  SmartBlast Evalue=3E-24; Info=Lysosomal acid phosphatase n=1 Tax=Culex quinquefasciatus RepID=B0WNB9_CULQU
agaaaaaagtgtattgttccctaatctaatttgattcattgaatgtgtaactacaggtctttaaaaatgtcaatatttctaataaaactaacgaaaaacattttttactaaatgtatttcaactacgatataaatttacgttaatttttaaattttactaattgattcaaagtattgtttgatgatagtcaatcacacagtcattaacaaaaatgggttttaaaaaacgggtaaaatcgcttgtgacctgcgttaattttctattagcacaggtctttactatcagaatgacgacttggttgagtttggtagtgccgttggtgtatttgtggtgtaggtgtaaggcagaggatgagttggtatcagttgtagaaatatttagacatggagacagaactccagctttcttttatccaaacgatccctaccaagatccaaaatattggaatggcctcaaggaaggagatctcacagagaaaggatcacagcaactctacaatctaggccaacaatttaaagaccgctacaaggatttccttggaaacgcttacaacccagatgaaataatagtaatgtcaacccatatgtctagaaccgaaaactcagcaaaatcatttatgtcaggtttatacggagggatagaaataccgataaaaaaagaaacagctgtagccaaccaaattatcacatgtttaaagtttgactatttgtacaagagatcagaactctcagatccagatatcgtggacataaatgaaaaaaataaggatctgtaccaatacttatctaaccatacaaaacttccggttggaggattgtttagagcatctggtgtattggatacgctaaaaattgaacaagatgcaaaatctggaattgccagaatgggcgaatatcgttatgggagataccatgcagcaagtaagtaaaactgctgcagagtttttctgctacaccaaagagatgcaaaagcttggactgggatctctgatgaaccacatcatcgaaaatttcgacaacattattagcggcaaaaaggaagccaaaaccctaatattcagtctccatgacctcaatctcatctgcttcctacagtctttcaaatacccagaaatagctcaaccaggg

SEQ ID NO: 8220 - DNA, 1130 bp, Diabrotica virgifera
  SmartBlast Evalue=1E-102; Info=Aldose-1-epimerase n=1 Tax=Aedes aegypti RepID=Q16SI6_AEDAE
gacaagcaaacatttagttttatttttaatatacttgtgtagtgtagcaatacaaaaaatatggcaaaagtcactctaacggaagatacgtttggaaagataaccgatggaaaaggaagaacgcaaaccgttagacgattcacatggaaaaataagaataatgtaagcgcccaagtgatcaactatggagggtatataacatcgatcaaggtaccaggttgtaacaaagaggtggaggatattacaattggttttaatgatatcgaaggttatcttaaaccagaaaacagatacttcggtgctaccataggcagagtagccaacagaattggtaaagctcagatgacagttgaaggagtaaaatataatttagctgccaataatggaccaaaccacttgcatggaggtgttgtcggcttcgataaggtattttgggaagcttctgtaaaggataccaaactcaccctcagctaccacgctgcagatctagaagagaattacccaggggatcttatagccaacgttactttcgaactgacaaacgacaacgaattccgtatcgactatagagcggtgactacaaagccgtgtcccgtaaacttcaccaaccacacgtattttaatcttgctggcaatggtacaggtgccactgaactatacaaacatgcagtaagtttaaatgctgataagataactgaggtcgtagagggcataccgacaggtaaactgccatgcgttcaaaacactgtctttgacttgcggataccaacagtgttaggagatgtcatccataaagttccaaactctccaggttttgatcacaacttctgcataacgaggggatctgaacaaggaaatgcctttgtagctagtgtttaccatccaaacagtggcagaagaatggaagtttacagtaaccagcctggagtacagttttatactagcaatttcctagcagaagctgatactcttaaaggtaaagatggatttatcaaaaaacacggagccctctgtcttgaaacccaaaagtatcctgattctgtgaatcacgcacacttccccaacactgtgatatatccaggagaacaataccatcattcagtaatttttaaattttctgtcgaagaggg

SEQ ID NO: 8221 - DNA, 1132 bp, Diabrotica virgifera
acacctaacataagtttaatattaaaaaggcttaataaacatcaattatttaaaacagcaatacaaaattacttttatacaaaacatgatgtataacatatacatcttatatgtaatttttaatcagactcctcctctgattcatcatcatcattatcctcttcatcaccactttcttcttcatcgccgcttccttcttcttcaccactttcctcttcactaccatcgtcatcatcactatcagcttcttgtttcgtcactactttctggattttagctttacttactacagtttcctcttcatcgtcactatcatcttcttctggttctggttcttttttcactactttctgaactttacccttttgctgtttattctgctttcctgctgcagcttccttctttttagctttgccttgggcagactcagatttaactggtggtgctggtggagggaggccttgagctattcttttaaacttttttaacaagtgcagtttacggttagctgtcttcgttaactctggtctactttctataagcttaattttttcgtctatatcttttatggctttagctttctcggcattatctgttgattttgctagggatttaagtaagaaatatggccgtctcttcttttttttatcattcggactctttttttgttgatcagaggactgtggagttttttccttctttactttttgttccacttgggcagtacccttaggtacctttttagcttttttacttggattatttgaagttaccacttgttgcttaggtgtctgttgtttctgctcctttttaacagatacttcttgtttaggagttttgagttggggtttgggtgttttattttttttaggtgtttgtttattctgtttaggagtgtctagctttgtttgttgcttaggagatggctgtcctttttgtttaattgcagatccaggctgtttaggtgtctgtccattttccaatttaacttttttggtagagttatttttaacacctaaacttttcctcttattaggggtttttggtgcaacatccgtcatttttagtaaatttggttttctgcagatatttaaacaaaacgtgtgctaaactcaagcagctaaactttgag

SEQ ID NO: 8222 - DNA, 1128 bp, Diabrotica virgifera
  SmartBlast Evalue=4E-33; Info=Novel hAT family dimerisation domain protein n=1 Tax=Danio rerio RepID=UPI0001E90AAD
taatattaaaaccatgtcaaatattgtcttaacacaaaatttctctggtagttgtgtttctttgtgagataattcctatttttaacgtctcacttattatctttctttgttattagcaagcgcggctcctccttagggtcaattggtcaatgacccccctaaaataatctcataaaaataccaattttattaaaaatatcttttatctaaaacttcactctgaaatataaaattctctctcagcagtctgcattggcaaaacaaatataatagatataataacgtcgcgcctcgcgctatacacaagcccgtggctgggccgtattttaaattgtctatatacagttcttatggcttatggacaaatgcatgtaaaatagaaaagagacggcagatagcaatttcgtgggcgagagtgggagtgacctttccgtcgtatacctctagtagagtcgacggcctcacgtttagttagttaccgtctgctgaccgcacttcacggcaggtctatatcgatcgcggcgtatttgcgtaatttattttgttttgttggatttttttgtgattgtaacaaaaacaagatgagtgttgttgacgaaataattgccttaaaatctgctggaacactaaattatgaacggcggcttgagaaaaaagaaagtggtcgaaccaaaaccaaacatgaatttaaaacaaacaacaaaggatagggtaaggacattcaaagatattttaaagaatcaatgtacaatttgtgtgattggatttgtggctgcagtgtgagaaatgcatttttttgctatccgtgtttactgttttcgaatgacgctgtatgggcgaaaaatggagtaactgacattaagcatttaaaagtgaaaattacaaaacatgcctcttcaactactcatataaattcatcaatgagttacgcaagtttaggacgtgttaacataagacagcaacttgatagtgtatatcgtaaatctgtgcatgactttaatgaattggtatctaaaaataggtatattttaaacaaactaatcgactgtgtaaaattttgtggagttttcgaaattgcattgcgcggtcatgacgaaagtgacagctccaataatcgtggaatttttc

SEQ ID NO: 8223 - DNA, 1130 bp, Diabrotica virgifera
  SmartBlast Evalue=1E-59; Info=Acid phosphatase-1 n=1 Tax=Aedes aegypti RepID=Q17E64_AEDAE
aattgtagcagctgcacttcctgcaagcagtttttctcctctacactattgcattccgtatccctagtatcagcatcaataataaaatcacttaaattttctttaaagctatctaaaggacaatttaagtcacaaccgttaacgctgacctgtctgatattgtccagttctttattaaacacttttactgtgtacttccagttttccttatgtagttctatataaactgtcgatgcaaacgctggaggagagctagggttaaaggcaccaaatgcatttaaaattgctcccatatttgattcgtgcgcactatacattttgtatttgtgagaagagctagaatttgcagccattgattctaagtattcaacaacttcatttaaaaatggcccaattataattcgtttcatgttagtcgtgtatgtaaaaacttcaaaaaattttccaatcgtggtccgaagaggctcgggatatatagatttggtccaagctggtaaactgaatccaacattgtcttcagtttttacacaatcccatatgtcaaatgcggttgtaacatccgttatattcattccactgtgtttggttaagtaggcatataggccagcattttctgagtcgtacgttgtaaactcttggctagccagtaccgcttgcatttccgtcgtgaatgctggacagtttggtggatacacgaaattagacaaaacaatattatttgcaggatgaataggtataggctgccaattgattttattttcccaccgttggtcatttgttgttacagggaataaaccataaacgttactctgtgcggacatgtgagtacgatctacgtctgttgtttgtgcatagaaaaaagatgggtcgtacttttggggtataaagtttgcatatctacttcttgtgtattgacctaatttcatatgcattctttttccttcatttgttagttgtccaccagctagtcctccccagtatgacgggtctttataagggtcgttagggtaaaaatttatgggtgtacgttgtccatgcctaaaaatctgtataacagctattaactcggcatggacccccgaaagggttaacccaactagaagaacaaatgaggctatgagatgcatctc

SEQ ID NO: 8224 - DNA, 1128 bp, Diabrotica virgifera
  SmartBlast Evalue=2E-53; Info=Retinol dehydrogenase 14 n=1 Tax= Harpegnathos saltator RepID=E2BNF8_9HYME
acacttgtatgtcggtgccatgaattacttacttcattgtgtgtttatttgtagtttaaattaaaagcagctgaatatggcatttgcacttactattttaatatcggttttaattattttgggaataataaagatctataatatattaaaagcaaagtcatgttctagtaaagtttgtctagttggaaaagttgccatagtaactggtgccaatacaggaattggatatgaaaccgctcttaacttcgctacaagaggagctaaagtcattttagcatgtagggacctagaaaaagccgaagaagctaaagatcgcattatatgtcaaaccgaaaataagaatgttgttgtcaagtcacttaatctaacttcattggaatctgttagaaagtttgcaaaagatattaatgaaaatgaagaaagattggatattctagttaacaacgctggtagtggtggtctcaatcataaatatactgaggatggtttacagttattaatgcagataaactattttgcgccagttttacttacaattttgttaacagggttactaaaaaaatcagcccccagccgagtaataaacgtatcatctatgatggcaaaaaaaactaatttaacaccagcaaatataaatgacccaccaccaggtccatatattagttacgggaacagtaaacttgcaaatatattattcacaatcaaactggcggaaattttaaaaaattcaaatgttactgtttattcccttcatcctggagcagtacagactgatatatttagacgaataacaggaatcagtaaacttattcttatgccagtgtatcgcatgttttttaagacagcggaacaaggagctcaaactactcttcatactgctttagaacaaggtttggaaaaatattctggttgtcattttgaagaatgccagaagattgcgagatatgctgtcgcaaatgacactgcactggtagatggtgtttgggaaaagacggtagagctattaaaatgtgaaaaggaagtttcagaacttagataaaataattaaagctttttaaaaatataagttgaataagttaaataatatatgtctgctatttatatttatcgaataaagtttgaaccttt

SEQ ID NO: 8225 - DNA, 1127 bp, Diabrotica virgifera
  SmartBlast Evalue=5E-40; Info=Centromere/kinetochore protein zw10-like protein n=1 Tax=Camponotus floridanus RepID=E2AR01_ 9HYME
gggagcctgaataagtatgtccccgttccattctatcagcttgtgagctatgtaaaagcaattattgtggaatagtgccacttgttgaggtatagtcttcaacaacttattgtggtattcgggcaccaattttgtgtagttcctaaaaatattctgtatcgttaccaaaatcctgcctgcattcacatcactgcctttaatagattgttgcaagattttttcacaaaaattcagcaattctatcacattttttgatatgcaacattgcaaaaattgtccaactccacaatccaatggattatctggatcgtaaggctctccaacttctatcatatcatgcaaatcttttttcataatttgctctgactgcacacaatactcactacatttcttgttaatgaacagtatatcaatgttatttgcatattctattaaaggagtagcatcttcggaaaatagtttagagtgtttcaaggctttttccaatttttcagtctcctcaattactactttgtagttttttaagccttcaactgtagaaggtatagtatcctgtagacaatgctttattagtagctctgataaattatctcggatatccagaccaatatatttcaatgtagttagttcattatctggagttgttaatggaaaactaaaatgctgctctagaaaactcaaaagagtctttatattggaaaaaactacaccatactctgatttcttgtcagcttctttaataactaattctactaatgaatacttttcattttggtctattttaatatctacaatgttatcaactataggaacaaaaaagttgttccacaaaaacctattgaactcactcaatttggaattgtatttaagggtatcagtctcattataaaacatagccagtaaagcttgttctaaagtactaatatttgatgaaattttaatactagctgtactgtctttacgttgtgtgattacattttctttaaatatgttttcaacttcatgagctagccctattgatttttccttgacatagaattttaattcatcaataacttccactagttcatcttcaggtatgtctgccagggttttttctaaaccagtaatgatttgcttgcatctta

SEQ ID NO: 8226 - DNA, 1127 bp, Diabrotica virgifera
  SmartBlast Evalue=1E-131; Info="Ubiquitin carboxyl-terminal hydrolase isozyme L5, putative n=1 Tax=Pediculus humanus corporis RepID=E0W0S3_PEDHC"
attgtgttgaaggtacaacaacttacgctttttagttttaaattttaaactcacattttagtatggccgaaagtgctggaaactggtgtctcattgaaagtgatcctggtgttttttcagaactaattagggaatttgggtgcaaaggggtacaggtggaagagctgtgggggctggataacgacttattcgaaaatttgaagccaattcatggattaatatttttattcaaatggacgaaagacgatgacccatctggttcactagtacaagatagccgattagaaaaaatattctttgcaaaacaagtaatagagaacgcttgtgccactcaagctatcctcagtgttctgttgaattgccgtcacaatgatctaaagttaggacatacacttactgaactaaaagacttttgtcaaggtttcgatgctaatatgaaaggtttaactattagtaattcacccgtgatcaggaccgttcataattcatttgcgagacagcaattgtttgaatttgatccaacaatggcaaacaagaatgatgatgcatttcattttgtaagttatgtacctatcgacggcagattatatgaactagacggtttgaagcaagggcctatagatttaggagctataccggcagaagctgaatggactgaaattgttagacctattatagaaaaacgaatacaaaggtatagtgaaggtgaaatccatttcaatcttatggccatcgtctcagataggaaaatgatgtatgaaaaacaaatagaagaacttcagaaacaaagtgaatcttcaggaatggagacagacacccaacaggctgaaataacgaggttacgtcttcttatagctgaagaagataacaaaaggcatcagtatcaaatagaaaatatcagacggaagcacaactatttacccctaattgtagagatactgaaaattttggcgaaagaaggcaaacttatgcctttgtatgaacaagctaaggaaaagactttaaaaagacaaaagtcaaaagcctccagttgaatttttgtaagagaaaatttgctttgtaagaacaccatttttgtatttttagacttacagatgtggagatgattttaaataaaatcataaatt

SEQ ID NO: 8227 - DNA, 1127 bp, Diabrotica virgifera
  SmartBlast Evalue=2E-67; Info=Protein polybromo-1 n=2 Tax= Formicidae RepID=E2BFH5_9HYME
ttaatcaaattttggtaaatttcttcgagtaaattcttgtttttatataatgtgaatggtttatatcgcataaaatcgtggtaatatggaaactgcaatggatagtgctccttttcctggaaatataaatataatagaggcttctccacaattaacaaaaatgaatgacatggatataaccatggaagattctctcgacggtggtccaccgtcagttggttcaggggaaatacctgccgttatttcacatacccctgtttccacccctgtctcaactcctgttcctactagcaaaaagaaaacaaacaagaacaaagttgttactggctacatattgtactccagagaagtacgcaaacaggtcgttcagaataatccagagtccacttttggggacatcagtcgtattgtaggtagcgaatggaagtctctgcccaccagtgagaaacagcaatgggaagaaaaggcttccaaattaaatgaagaaaccaaagcgttgtcagtgttagaacaagatcaatgtggaagtccagccgttccagtggttcctcctccaccaccaatcgatcaagtgttcgaatgtatgtgggacacctgcgactatcagtttgaagaggtatccgatctgattgaacattgcgtcaaagataaagagtcgcaagggcatgtgcaagcattctatcaagaaaacaatttgacagaattcaattgctattggcgcaactgcgccagaaataagaagaatgttccgccatttcctaatattactagattgattaggcatgtacgtgacatgcacatcaacaaaggcaatggaagaagtgttcctccagaaaatcgtagcaagaacttcaagccttccagtaagcctccagctgttagtcgtccgactccctctgctactcccactgctcctttccatgcctcagtatcatcagttttgtccccaattgcccagaagccacaggaaccaatgtttgtagctgttcctccacgtccacaacgcgtactacattccgaagcatatataaaatatattgaaggtctacaagcagaaaataagcacgtaactccttgggaaagaactctgcaagccgcacaagaaaatactcccgaaccagacatgg

SEQ ID NO: 8228 - DNA, 1116 bp, Diabrotica virgifera
  SmartBlast Evalue=3E-87; Info=Inositol monophosphatase n=1 Tax= Camponotus floridanus RepID=E1ZXT3_9HYME
gacaaggcgggcatatcgtatctgtaatttatatttaaatataaataaaagtaataatatttttattagaacaatgggtgagacaaatacagaaatgtattatgatactgttatgaagcttgtcaaagaagcagggaagatgataaacgaaaaagtacataacaggagcaaaaaagtagaacaaaaatccagtgacatcgatttggtcacagaaactgaccaagcagtcgaaaagttacttattgacggtttatctaaagcattcaaagaccacaaattcattggagaagaatcagtagcttccggaacaccagttaaattgacagacacaccaacatggataatagatccaatcgatgggacgatgaattttgtccacgcttttccacactcatgcatttccatcgccctttttatcaaccaaaaaccagaaataggtattattttcaatcccatgttgaaccaaatgttcactgccagaagtggaaagggagctttctataatggcgagcgtatacatgtctctaacactaaggcactgagtgatgcgctgattatgtttgaatgcggtactgctagggatgttgaaaagatgaagacagttaatgaaaattatttgaagctattaccacaagttcacgggtatagggcactcggatcagctgctcttaacttcgcgatggtagcaacaggcggtgctgacgcgtacttcgagtttggcatccacgtgtgggacatggcggccggcatattgatcgtacgggaagcgggcggtgtagtcatagatccgtcaggaggcgatttaaaaataatgtccaggcgagctctggtagcgtgtactcaagagctcgcggaaaagttggcacagcaactggtgtccacttattatcccacacctgatgatagttaagatgggtctggagtgtgagaatcccaacccaagatatccaaagagagttacctagttgtgataaatgtgtgtagagtaaatgttaaaagtggaaaataaaagaatagatggatgtttttattaaatgtacttattatataaatttaaatatttattcattaatattatttatttgttattaatacagagttgtttagaccaaaaaa

SEQ ID NO: 8229 - DNA, 1127 bp, Diabrotica virgifera
  SmartBlast Evalue=1E-72; Info=Mannose-P-dolichol utilization defect 1 protein n=1 Tax=Culex quinquefasciatus RepID=B0W4H1_ CULQU
aaattagatttcatatataattaaaccagccagcacacaataaatatacaaatttaaaatagaaacatcttcaaaatgatacaaattaaaaaagaaccacttgctacattatttaacttagttatctcagtacgtctacaagtcttgtacagtaaaacttcctctttggaagaaaaagttcacactttttttaatttgctaaaaggaataatttattctaccttcttcttgggatcgacattccagtagtacaataattgtactactagaacagcattagataaactactagctatataagttaaaattactacactatctccagtctcttgcatggaagtgaagattctggctaaagatcccgctagcagcataatcaacgtggctgctgatagctgacctgtgtgtccattttgtagattggtgtaagcttgcatcagcttaccaaccaccactaaaaatatgttgaaggtttgaagagaccacaagaattccagcggtgtcattccgaacatcataacatagcatacggttacatatactaagagatacgtgattgctttggttatagctccttgataatataataccaagtatccaattaagacagtctgtatagctaaaaagcttgcatctccccaagcactgaaaggaaaacctttcacaaaactgtatgccatataaattgttatggcactcaaatcgagggtcacacttagtatgttgatgccttctccactcttgttgttgaggattttgagaatttgaggaactttaactgtcagggatcccaaaatgattccaaatcctagacctttgctcaatgttgcaaaaaaacatggcccgtctaaatagttgaattctaaaaagtaattatcaaaacattttggtgtgagaactagcaaagctgctgtcctaaatacatcaaatagggtggaattcatattaaactgttaatattcttcaatattgtatcatttaagctaattgtataattattttataaccaagcaagcacaagaactattatttcttcttctcttctaattgttgccgataaagtggattagtggataaataaagcatttaattaattattttaaattattagttgtcacaattttatt

SEQ ID NO: 8230 - DNA, 1126 bp, Diabrotica virgifera
  SmartBlast Evalue=2E-42; Info="Acid phosphatase 1, isoform B n= 6 Tax=melanogaster subgroup RepID=Q8I0P9_DROME"
tcctttcttttcttcaattcccacaacaaagtatcagcgtactcaatatgtttcatgttgtatgctctcatagtgttcaaaatggcgctaagagtactctcatgtgccattactagtacaaatttcgatttctggttctttgctgttggatcagttattccgattcggccattcagcgatattggatcgacgaacttgttgaaaaaattgaacaggtagtcgtagaatgttcctattttgagtcttgcaagaggtactgtatgggtctggatttcgtatacaacagccgaaagatatctagttatattatgatccatagttttactccagtctggaacgaaggttaagtcatgctcctcataggtaaaaagaagatccataagctcgtccaccatttctatagaaacttttggccaaccagttttgttggcaatgtactgcaaagtttctgagtgtttttcttcgtaaataggaaaaacagattcctttaccttttgtagcattgagaaaaactttggacagcctaaattttcgatgagtgaaagaaaaggtgctatatggaccggtataggttgccaagaaatatgctcgttccacagttggtagcctttaggtggatacatacctgctaagcttgcatatgctgacattaaagttcgatcaatatcggtagaccaagcgtagatttctttgttatggtagaattcgcttagaaaggagctgtagcgatggcgaagccattgacctagtttgtattggcgatcaatacctttctttgttatttgtccaaatcccataggccaataggtcaggttataatacttatctgtaggaaaggaagtaaatggtgctctatctccatgtctagaaactgcaaccacagctactagttcatcatcactattttcaacaggaacaccatatccagtttcccaatgtagcattaataatactaataaatttattttactaaataatatgttaaccatgttgcgtatgcaatgaaataacaagcctaatttatcttatttgtattgatagtaacaatgtggcctcttgcactaataattaaatacccactgcactattataatgtgacacattctttaaaaaataccacgttttt

SEQ ID NO: 8231 - DNA, 1121 bp, Diabrotica virgifera
ttctgctcaaaatatataagattttgaggaacagcaagtgaagagttataatatttaatacaccaaaaaattttaaatccttagttactgtaacgtctatttgtatgttcttaagttgtatctttatcctatttaagggtatgtgggtgttccaattgtgtgagtcgttttctctttttaagtgatgtgcatattctagaagaacacaatccacccaaagcttgcatatacacaaaccttcaagcattcgtgatgttttgaaacaacaagtgtgcttgcattcacatttggcacctattttgaagacatacacgatcaatattgtttgatctatcttagttttgtgcaaaatagtgaatacactttgagtattatgttccccataagcggctctgatgtttatgaaatacattgtaatgatcattgatcgtggtcactgctgttttagactatagattttttcaagcaaaaatcggttttgacagtttactaatcagtttagtattgaaataaatcggaataatctgaatcaattgttatctgtgttatatagggcttttcattcacagtcatttgtttcgagcttctgtcatgtgtcacttaatattgatgtatctacgtcatacgttattgtatatcaatgatacaaaccaaagacgtatacgtagatatattaatattgtgtgacgcatgacaggggctcgaaagaaatgacaatcgatgaaaagccctatggtacaagtatcattgcaattaaaaaaaataatactgataaatagacctgaaactatctatagtccaattattgtaatatttatcaaagtaattatgaatactaaatgaaaatatagtcaaattttgaaacatttataatattcaattgttatctgacatataggtagttttatcaatgttttttgtagtgtatgtatatttacattttttcgatgatgcgaatatattaatttaaatgaataattaagtaaataatgaaagaaatggacgattaggagagaataatgaaagaagaaaattgtatatacacaaatttatctctgtgtagtatatttgacaggaatctgttattattcgaaaaagttgtcacctaacttatttcagtt

SEQ ID NO: 8232 - DNA, 1128 bp, Diabrotica virgifera
  SmartBlast Evalue=2E-95; Info=Proteasome subunit alpha type-1 n= 1 Tax=Camponotus floridanus RepID=E2AE86_9HYME
atttattaatcaaaatattattaaaagcttaaaaaatacagtatggatataacaaacgatgttctgccgtgactgtctcagtctgttttagactaacagagacagccacggcaatattcctttccaatacccactctcctgatcaacgggtggctttaatgctttatctaatccttctattctgtggtatccatggcagaagtttccacagctgggactgcatccctgggctcgtcccccgcatcatctctcaacggatctgcaggaaggtcctcaattgcagcagctgcagctcctcctcctctacgttcttcaccctcaataagggacaagtagggggaagtttcttcttcttcgaggattttaaaggtctgacctttgccagtgtatcctatggagacattttttgttgtgaggtcaacctctggaggtagagtatctctaagagccctcaatccatgtttgataagttcttctaaagaactagatggcaattcatccagatgtttttctaagtatgtcctggcactctgggatcgagctccaatggacatagctttgcaatcgtagaaattagcagaagggcacgtttggtagatatgagaaccagattcgtcataaccagctactagaagacctacaccaaatggtctgcggtcgtatctttgggtacatgtctgcattttgttacctaaaatactgataagcctattcaatggcatataagtatccaaagagtacttataattcaagcattcgtttcgcatatatctactaaggatcctagcatcagctgtaagtcccgagatggtgataccaatgtgatcgtctatgttgataattttcttctggtaggcagacagttctgaagaagccctcttcaaagcgataagtacagcatgagttttacttttcagtcccactgtggctgaacctaggttaactgcttccatggcatattctacctgatgcagacggccctgggggctccacactgtcacatcactatcgtattggtttcgaaacatcttttttaaagaactatttcggtttaattgttggaatttagatttactttgcgaacttctagccgacaacctcaaaaatcgtttgtaatgctacgtcgac

SEQ ID NO: 8233 - DNA, 1123 bp, Diabrotica virgifera
ctccataataaattaaccagttttataaatagtggcgtattatgcaccagaagaagcgaatgcctaacgtttttctctaaaaactgttcttcgcagatcaagcaaacaagcaatagaaataaacccagcttgtgagatatgcacacttattagaaaatgacatttaggtgttacaattcattgggttgaaggggaattatgggtgatctgaatagattaggaatctctccacctcatcccaatccttcagaccatcctccacccctggatagcaggctaatgagctatagagactgccaaatcggtaaaatactaggtatttccttgacaagacttgttatgcattatcttagatgacatatcatcattgtactttgcttgaccgggtatcgagtccccgctcagaactaggtgcagttctgtgactgggcgctcgagattttggacccctttttcccgtttttgtatttttggattggtgcgtttacgtgttgtgtaaacgcctttatccattgtaataggtatttggcttcgtttttccatttcacagatacctcttgtactattctctgggttgtctaatctctttttgaagatgattgcttgttgtgtacaccagtcgtctatagtatcttcgcgtattcttcttctagtaatttttctggctttgttcttttcgcttgtcatttctcttatttcagggtctatttgagtggtcgtttgctaaaagctgatatgtccatttttgctacttttcaggagagcaaattcaaatttctacgacgtccataaaatcacagttttagaaatatcatatttggttttgagtttaattttcttacagctatccatatgagtttacagataacctagctacaaatttcataaaaatgttctgttaattttgcaaaatgcaaaaaatttgcacatatcagcttttggcaaacgttttttaaataaactactggtaacattgtaataaaatttggtgggttttaagaggtagtttttgcgcattttttgacattcaacaaacaattttctattcaccaatggcgcgcatacgggtaatggtctaaatttttttaaagaaaaaatggtaccccgctgagatatttcaagt

SEQ ID NO: 8234 - DNA, 1126 bp, Diabrotica virgifera
  SmartBlast Evalue=1E-116; Info="Cation-transporting ATPase fly, putative n=1 Tax=Pediculus humanus corporis RepID=E0VGV9_PEDHC"
tcctttgcagtagtattcgaagtgggtgccgcttaggcgtcgcatgatgacacccatacgctgcgcgctgctagaaaacgggaattctcgaattataccgatctgaaggtcctctactatgttctcttggccgttcgaacgatattgtgggggtgttaatacggtcggaagatcatgttgaacttggtgttgtctgccacttctggctcttccatggcccatttggtactttcaaacatctttaagtcaagcggatcaccaacgatttgtttgtcaattattgtcaaagaatggcaagataccaaaccgtataataaagtattgtacgaaattaattcgacattttcgatttgtggcttgaaatcattattttctataggaactacacacaataagtctaggccgtcttcggttagagtgccagtcttatcaaagcagacacagtctatagatccagatacgttgatgcttcttggtgatatgcagaagatattattattctgtagtcttctctgggcataatatcggcccactgtcatagctgcaggtagagctggtggtactgttatcgtgattagatcaagtgcttctagaatgaagtcgcggggactgactcctctcagtgctttgctgacaatcgtgtagacgaatccaacagcagcgagaagtattaggaatgtgacaaatttataggaatccttttcaaagcggaagtcaaccggaggggggtagagaatgctacgtactaaactaccttttgaagtcgaaaacgccgttctcacaacaattgccaacaccttttcatttccaaaatatctcgtttggatgacgtgcgttccacaaaatagcgtatgtctagcatgttctttcggatcataggcaatctcggcgatgttcggcacagcggttttggtaacaggaacagattccccagtcaacatagactcatttaaaatacaatttccagtcaataagactgcatcacagtgcataatacaaccatgggcggggatttccattatatcaccaggcactaacaattccgtcgaaacagtttccgatatgtactcggtctgttcaatttcgtcgggggatttcccggggacacgtcgcaataccgtacaaa

SEQ ID NO: 8235 - DNA, 1112 bp, Diabrotica virgifera
  SmartBlast Evalue=3E-61; Info=Angiopoietin-like 1 n=1 Tax= Tribolium castaneum RepID=D6WEJ6_TRICA
agctgggttaatatttattaatgatattacaatatattatgcatctttgtatatatctatctataggtacatttacttcaccagtagttcacttgttgattactcttcttatacctcaactgcccgaatcatcattttagatcctgctaggatgtacggatgtcctctaaaaccattccagtttacaccatgatagttataagtcgcaggaagatttacgttaatgtgttttccatttaaattgctggtatggcaagatttgtaccaccatgcaccctcatgaatgacagcgcaatttcctggattttcatcttggtctacatcaaaagttgaaaattttgagtttagatgaggggacagcgcatctccagcatctcctgaatatcctgttaacacatttaatatgtatccatctttttcgggtcctataccaaaggttttgaattgtgcataagctgtcttcttatctctgtcagtgagttcaatcaaaagttcattgatttcagaaccggtcatatgatgaatattttcaagcccaatccaaaattctccattaagatcaccaaagccaaatttataatctttataacccagataaaactcttgagatccatcaaatcttttttgaatgtaagtccaaccaccacctttggtttccatatcgcagaggacagaaatggtttcttgcttgttctaggcttaattgtgtatattcctgttttgttactaacgttatctaaaatttctctacaacttcctggataagcgttgtatttatctgaatattctggaagtggattaagatgacaaattggtgttttacttcgtcccaccaaagatttacatttttaaaaatactaaaaaaattctgagaataatcctcattaacgccactttgttcaactccaagagacagttttaagggaatttgaacattatgttcatcttttctgcctaatgagatttcatcactttgtggttgaaagaatcggctaaaatcatttttccacgaatcagccttactctctactttcacatctaacaattttgtaagcttgacattgacaggattatgttcttctgctctgcctaaaatttggtattcggcaagt

SEQ ID NO: 8236 - DNA, 1089 bp, Diabrotica virgifera
  misc_feature (824)..(824): n is a, c, g, or t
  SmartBlast Evalue=3E-37; Info="CG2663, isoform A n=12 Tax= Drosophila RepID=Q9VNB4_DROME"
cgctgcttaaactcttataggtcacctttttagtactccagatcaagataaatataaaaccaaatctttttctatcgttattgatcaaaataagtaccttagaaccttaagtatgattactaatgagttgttgttaacggaacattctaaagtgcgccaacaatggggtaaatcttcaaaggatgtcctccaagatattcagatattaaaggagtggtgtgaaactcaaaaacattttcctgaaattccagatgacaacatgatagagttttttcttactaactgcaagtatagcatagaaaaaacaaagaagaatattgacatgtattacacacttcctccattaataccggaggtatacgaaaagggaaatcccaatttaccagattaccaggaaaatgttgagaaatctggaatgatagtaaccatgccaaagctaacagaatctttacaacgagtatcaatatatgcgtttaaagaagactctactcagtttgatcccatgacactggtatctcatctacaaaatgtgtacgaaataaggacgcacattgatgtggtaatgggtgagtttattatcatggatgcaagtaaagtaaaaatgggtcatgttgttaaatacacaccaattgtgtttaaaacaatggttttaattttgcaaaacataatgagaaacaggataactcaaattcatatttttcattatcccccatatatcaatatcataatggcagttgcgaaaggtattttaaagaagaagctatatgacaggatatatttacatgaaaacttagagagtctctacaaacatatttcaccagagnttctgccaaaagattatggtggaaaacaaaagtcaatggaggaacttaatgaattatggaaagaggagtttgttaaatggtctgatagatttgacaaaaaatcaaaaatgatagtagatgaaagtctaaggccggaaccactggaaaattcagaaattttgggatattacgggaatttcaaaaaattagacgtggattaaaccaccgcataatatttgtatttatgttattacagaataggcatatctcgtagttaaagctgatt

SEQ ID NO: 8237 - DNA, 1122 bp, Diabrotica virgifera
  SmartBlast Evalue=1E-13; Info=Liver stage antigen 3 n=3 Tax= Plasmodium falciparum RepID=C7DU36_PLAFA
gatttttgttaagtctccaaaacttctacacaagtttctaacattcacattatagcaataatccccgttcactaaatcgccattcactgaaatgttttccttttcctccttcctcgattttttagttttcttcttttttaaaaccttctcctcgggtgtatcggactggatcgtggtggtttctgtgtaagtttcagttacggtgctatcatcgtcagctgcttctccattatccttaagctcaaacttattaatttgctttataatattgaccattttcaactgactaacatcctctatttcctttttggatacagcagacactagttctgcatctcctttaagaaactgactcttcagattcttcactatctcagcaggaactgtttccgtatctttttctctgttactgatttctgtgtttttggatacgacttctgtatacttctcgtaatagttgctctctgttttgctgtggtataaaaattctgtgtaagtttctttagttttactgtctagagattcttcagtattgctgtcagtaatgctttcatattcaacttcttcttttttaatttcatcgatgtgattttctcggatgatttcttctggcgattctttagttggttcaggttcatcttctgatataacttcgtaattattatccacaggttcgtcttcaatgtcgttctcaactgcatctagatcagtgactatttcgtcgttgtggaattgagtcaattcatctaatttgttgtacaagctattttctaccataaattcatcatttttgactggatcctccactggttcgtagaggtcctttgggtaatcttcaatatcttgatatatgtgttcatcgtagtttgctaattcttctactttatctttaacttcttttaggttttcgtagatattttcattgatcggttcctttaagttttcgtagatgttttctgaattctcgtatactttgacttcttcctgcgtactggtattaactggtggttcacttgtggatatttcagcactcacttcactggcggtattctcttcttctttatcttctttatcttctttatcatccttaggtatttcattggaagctgattcatctgagtt

SEQ ID NO: 8238 - DNA, 1119 bp, Diabrotica virgifera
aaagtttagtaagcgtgttgtccgagaagtgtgcaaaaataagtgggcaaaaaatttacaaagattgcaacaaaacatgataaatattgattaaatatagcgaggttccataatataggtacacgatttcggcatatttaatttgtatgaagtgcccagaaacataaagtaaaatatataaatgtcaatttcaaacaagagctaaaactacaaaactaaatttactcaataactgtttaaaagattaaaatatttatgtttctgtgcgtttcataataaaatatgtatttgtttaataaacgcatgactaaaactaagttaaataagaattgggagaaataaaagcgaaggctgaaggtaaaagaaatgttagataatatggagtttagttgttagccgacaaaatactaatacaacggtccacgtccagtaactgtaacaggaacgatgtatctctcaatattgtgccagatgtccggatgatgttcagtaacttgttctctggtaaattcagctgttcgttacatattgagattttctccagtaatcctttgtcaatctccggtttcataaaatcggagaaccttagttttattcgctgcttgcccatgttttgatagaagatggtaaactcgtctccattctgcaacaacttgaagtatatacctgcgatcaaatcacccttctggtctctagacagtaagcttttgaatccgtagaccaaatttcttctttccgtaacatctacggctgtcaagtaaggtctaccgacgtaaatgatgcctgcaaatgtatctactttcccgtttctagttgttctttcgttccattccacgaagtgcttgttgtttggtgttaattggtagttgtagtctttgcgggtgttgccttcctctgactgtataaaccaacctgtatgtggatacgctccatctgacatgacggtaaccactctagcaacatgataaccgggatcacatagcatcactgcagttcttccggaaaattcaacttttaagcacatcatgacgtgttccttttccaatctatacggcaaagaagtgggatcatatctaaaagcattggtgtatacaatagggctgtcgatttcttcctcgc

SEQ ID NO: 8239 - DNA, 1125 bp, Diabrotica virgifera
  SmartBlast Evalue=7E-51; Info=Acid phosphatase-1 n=1 Tax=Aedes aegypti RepID=Q17E63_AEDAE
cgatggacttggtaacttatgttgtctttgtcagttttctggggattattggagtaactgccaatttaatagctgttgtacaggtagttcgacatggtcaacggacgccaattacattctttcccacaaacaaatattctgataggtcgtactggggaaaccttggtccagggcaactaacaaatgaaggcaaacgccaacactatgaattgggtcaatacacacgaaaaagatattcaaactttcttcctctcaaatataatgaatccagtttcgccgcttatacaacagatgttgacaggacccacatgtctgcacaatgcaacgtttattccctctttccagcattcgaagagcagatgtggcatagaaatgtaaactggcaaccaattcccattcatcctattagcatagatgttttttctggcgaaccagcttgcccaaattataatgtacttagggctgctatgttagatgatgatttatcacaatcgatagatgcgaaatatgcaagagtatacaattacatcaacagatatactggattaaagataaagagttttagcgaaattcgtaccgtttttgacgattttaaaattcaagttgacgtaggtcttcctctcccagattgggctaaagctgtctatccagaacctgttacatctattgcaggatggctttttgaatcattcaccagaacagacgagatgaaaagattcgctacaggaagatttttaaataatatcttagaatattttgaaaatatgtcggaagattgcacctactctcaaaaatatcaattttatagtggtcatgacctcaacatcgcctcaatcttgaactcatttggagcatttaatccaccctacccaccacaatttgcgagtacagtatatatggagcttcatttggaagattgggaacccgttgtaaaagtgtttagcaaagacggaaataagataaaacaaatcagtgttaacggatgtccattaagctgccccttatctgaatttagggaagttctgagcccagtgatagttgataaaattactcttgatgaagaatgcagacaaatcatccaagaagaagaagaagaagaagaggacgaagaagaagaagacagaa

SEQ ID NO: 8240 - DNA, 1125 bp, Diabrotica virgifera
ataggttaattaagttatatcagcggttttttgtattttctgcgttattcctttaatttttagattttcagtctgttgttatataaaaaaacggttgtttttagaactctttaatgatgtattagtataatataatatttatggattaccgtcaaaggcctatgacaaccaaaaaagaagatgtatttggtgatatttctaatgactttcctgggtgtgaatctgtctttttagtttactcctcttggtttaaaaataaagcttagttgagtgaaatgctcagtagaatctgataaaaatttctgaatcccacatgatagcgacttctaataggaagatgtttaaacgttttaacccccgcataataggggtattcatcgtggccattttttttttcgtacacttgacgtaatatgacgtttaatattatataaatatacatcatatgtcaagtgtacgaaaaaaaaatggcggctatgaataatagctctatagtagcagcaccaaccagttgttctttggacgaacttgtcttgagaaaagttctttggttacttattagatgatctattataaaagagtacttagttaaatgatagtgtgatacttatttttggataatattgtatagcaatctccactattcatagacatattttattatagatgtgattttcattgactattttttgtagtagttgagaacgtcttgtagaatctctttcaccagatttcttaagtttaaacaaagacctgtcctcaacactttgactaaaacaatgtaagattgtttgcaataaatagttttaatggccgtaaaaataactaaatatgcattcagtgaatataagccgcttcagaaaaaaacgaatgtttttaactgaccagttatttccatcttgaaataatagggcttttcatcgattgtcatttgtttcgagcttctgtcatatgttgtataatctgtgtataatattaatatacacggattatacgacatatgacagaggctcgaaacaaatgactgtgaatgaaaagccctattacgcatattcgctgtgagccgatgagtagaggggatttgacagttttcgccagcgctgttagtggcagttttgtgcattg

SEQ ID NO: 8241 - DNA, 1124 bp, Diabrotica virgifera
  SmartBlast Evalue=1E-156; Info=Protein purity of essence n=2 Tax=Formicidae RepID=E2AZ34_9HYME
tatccggcgtggttataatgtcgagtaaacctgccacatcacagaattctgaaaaggaagtacaaggtaaaaattcatctgtataatcagccaagagcttttctgaagatttcatcaaagcttcatcattgtggcgaatgtagtctgctaagttggttgaccattgttcgtctggacctcccacattcttgaagaaatggttatagattccatcgataagcccaaagaacaacaagtacggtttatagatattataatcttttactgatttgtctgatacagttttgacaggtccggacggttgacaatgtcgcacttgtgccaaaaccattaaccgtttgaagtgagaaagccgatgtgcttgccactgttgtctggagtgaagtaaaatggacatcgttatccaatatagaggaccttcagcatcatacgctgtttctatccatttttctgcattagtagcttcgatgtacgacataaggttggcttcttcccttttattcactcttgtagtatttatcacatataaagcaacgtgtatcagatatggtattaaatgcatattactttgtggtccaccgcctcccgtatcttcatgaaaagatttctcttgtgcaaacctcaacagcaaaagcttcaaatcgtgaatagttgaattgtgtcctatatctctgtgattcgtgctttcctgcaagtatgtgttgtgtctggcaagacaactggcaaatgatgattcgggtacttgtggaccccatagcggcaagagtccgttgcatttggtgttggcgttttgaagggccgcagattcccattcgtcacgagcccgtgccaacctcactgcactcatatgacaatcgatatgaacgatgttgaagtggctgacagtagtgtatccaacagtttttcttggtttgccttcgaattcttcaacattacatctttttgtaaacgtgtacagccccaaaactttggttggttgatatttatatccttcacgacatatgcaacacaccaaaccggattcctcgcccaattcttcaatttgttggagtatattagactttgcagtgacttggcctttatcgttggttctcattcccaactgaccaagttgcttttccctc

SEQ ID NO: 8242 - DNA, 1124 bp, Diabrotica virgifera
  SmartBlast Evalue=0; Info=Serine/threonine-protein phosphatase PP1-beta catalytic subunit n=5 Tax=Apocrita RepID=E2C580_9HYME
acaaatgcatcgtcgacagataagatgaatacaaaaagtagtgtaaggatagggcggaggtgtagagggaagggaaggaggggggctagaaataagttagtgatctacttcttatttttgttagggggatttcgttgcggtgtggatgggcggcctgaattcatcccctggtattggtactttgccttcttttctgacggtttgagaatctgaaacgaacacatcaacgtctcgtccacgctcatcatccctccagcattgtcgaactcgccgcaatagttgggagcggagaacaaagtgacgagctgtcgcttggcgaagaactcgtagccatcttcgacaacttggtgggcgcggcagatcaaatcgagatcgtgtcggttcaggaatttgcttacgacgtctgctccgaaggtgaaggaaacacctcgatcgttctcgccccacccttggacgtctttgtctggatcggaccaaagaaggtcacaaagaagaccggtgtctggtacatctgtcggcctcattattctcctgatttgttccattccttgcaaatctggactcagtccaccgtgacagcagaaaatcttttcatcgataatggcggaaatgggtaagcaattgaagcagtccgtgaatgtcttccataattttatattgtaccttcttttacattcgtcatagaacccataaatcctgttgatggaggcgcattcgtggttacctctgagcaggaaaaaattctctggatacttaatcttgtacgctaacagtagacatatcgtctccaaggactgcttgccgcgatcgacgtagtctccgagaaacagatagttggcttcaggggggaaacccccgtactcgaagagacgcagcaggtcggtgtattgaccgtggatgtcgccgcagatcttgagcggcgcctcgagctccagcaggatcggctgctgcaggaagatctcgcgggatttgaggcagagaccgcgcacttcggactcggtcatctggaccgatttgcccggtctcatccctcttacttctaataatctttgtattaaactgtctacatttaattctggctctgccatttttcctcaacaaattgttcacggcacacaacaaat

SEQ ID NO: 8243 - DNA, 1123 bp, Diabrotica virgifera
  SmartBlast Evalue=3E-23; Info=Hepatoma-derived growth factor n= 1 Tax=Harpegnathos saltator RepID=E2B603_9HYME
tttgcgccatcagtattatccttctcattttcctctagtctgttaataaatgcagcacgagattttggttcagaacttagtccaaaaatgtcagcctcactaagttctaattgtttacagtctgctctaaatcgagttactaattcggcgaatccttcaaaaaagcttgtgcttttatcatttaacttaacagtttgcttaaattttccataaaccttctctgccatttccctcacagtttctgcctgtttagtaaactcacttaaggtttcatcgttcatcttccactccttcgtgttccctacatatttacgtaacctccttaccatttcgacgatgtggagatgcttttttagtatgatagcatcaaaattaagtttgtacatatcttctaaatacccaattgcttccttgggatcagccttatccaaacctagacaatttttaatcttaacatcaagattaagtaactcagcctctaaattgagcatggctattttcgctttcttcgcttcgagcttcttcgcatacaatatctgtttaacttcttcttctgtcttttcgatattaggaataatcacatcgggatcgtcaccaacactactctcaccggattcgatttttttgtttagtttctaaaactctatttgctactgtctcatcgtaaacggctcgttcgtattcatttgtaactactaccggccactttaaatgaagttttatgcctgctatagtaccggatggtaatgttaccggtaatatttgatcaggagaatcgtctcgcggttctactggcctttctttataatcagactctgtcttctttacatggtttgcataaaggatattatgtcttagaacatgctcagcaattatttctaaaggtttttctttattttcaggtttttcatcttctacactcatgtcagttacagtttcagtctcttccttaatcccagcgtcacttgttttcttctcctctactggtgtctcctcttctttcttatctgcctttttcttttcctccttaactttagcttttggagtttttttaggaaccactttttcttttttaggaactactttttcaggttcctccggttttttagacggtgtttctggt

SEQ ID NO: 8244 - DNA, 1120 bp, Diabrotica virgifera
agcccacatttagaagaaaaaaaacaaaaatattcaatttaaaatttgtaacaaaaattaacacaaaaatttgtataaaagactataaataaagattcgcataaagtcataaaaattacgaaatagaaaatggttttgagaacgacaatcagtataaatgtttgattaaaaaaagatatgacacattcaacctgattcttggtgttatcctttataaaatttaaaaacacatcaacaaattccatcaaacagttgtgtccatcgtggaaatcgctatttatccaagagatactgtcccgcaacaaagtattttgcaatattcacacaataaattattatagagcttttcacgttaaggacgaaacgttacgtagatagggctacgtaattcttatggacaatagatgcgcaccgatgccgcttctatcgtattgagaatgaatcggcagtcggtaacaacacgtgcctgatagttttgatagcaacactgctctgtataagccaaacgttccgttcttaaggtgaaataaaatatacacaggttaaaaaaaaatgtaaattttactttttcagcttgtttttataagcactttattttatctgataatatttgaaagtctaattaacaaaaattatgttgtacacaggacaaacatattatttgaaattctacatagtagaagtattgagatacaaggtattctagttgtaatagttatttatgtaccgtgggaattaatagatgtttgtgcatgagtacgactatcttaaaaacaagaaagcgtctggtctgagtgtttgtaagtcacccgaaggtattacttctattacatctattaatgcccatggtgcatacaaacttttatgtcatagtagtttgttatcgtatttacaatctaaatatttttaaaattttgaaaaattcagaaaatttatgatagtaatatttatttgcaaccgccaacagaaaacacaacattacgacatacgttcgttaatgcggtgcaagtgaccttgggggtttcagttaaatctgtttattatagatagttttatagatagattaggcaatatcgtcgttagggtaatgacgtcaaacataaataaacataataatgtt

SEQ ID NO: 8245 - DNA, 1122 bp, Diabrotica virgifera
  SmartBlast Evalue=3E-69; Info="CG5044, isoform B n=8 Tax= Sophophora RepID=Q86BP1_DROME"
actagttcttctgtaacatcagccagatttggtggatcccatttaggagtgtcattttatcttgtaggacaactcgtgtaccttcatatgaatccttaaatttgtaaaagttgacagtcaaattatactccatgttcaaacattccaaccaactcatacctttacccttctgcaattgttttaatatcacttttaagctacttggtgagtatttttccattaaattaagggtatctctagcccatggcgatccatcatctcttaatttagtaaaaatactttctacagttgactccgaaaagcatttgtttatcttgtccattacaggttgtaaagttaactcagaaatatctttttggcagaatgtgtcaagcactgcaataatgcttctatcagaagaacaatttaaaagctcctcttcaagtaaaggcaagtcgctgtggttgcaataatgagtagcaaatcctgccctcaatacgtctggtccgatgattgtactgcctgttaaagctaggtaatatcctaggtgcccaatggtgcggtggaagaagtaagtagcagaagcattgggaagaaaccctacctttacctccggcattgcaaattttgtcttttccgtggctacacggaacctcgagttaactgaatatccagcacctccacccattgttattccattcatgagagcaataataggcattttatagtttctaataagatgcatattagcattgaggtagataatcatttcgttagtatacacccaatcttgcttcaaacctgcctctttcagaagcaccaggtctccaccagagctaaacgctcgatctcctgcacctttcataacgattagggattttttgttttgtaaatccatgagtgttttgtatacattcttctgtagatccacattcatcgagtttaatactttcggtctatttaatataactacggcgttctttcctacttctttggtcaatactgattgagtagaacattttcgtgaggtaatatgtgtgtgtctttgaattaatcgtataaagaggcagctcggcgaacttaacgacattgtttatgtggtttctgtgcacacactaaatccgttatcttttaacaaatacc

SEQ ID NO: 8246 - DNA, 1122 bp, Diabrotica virgifera
  SmartBlast Evalue=3E-10; Info=Reverse transcriptase n=1 Tax= Anopheles gambiae RepID=Q868R2_ANOGA
gactagcagtacgggatattatgaacaacctgataagaagccaagagtttcccaggagatctgaaaacggcaaatctcaaacttatcccgaaaccgggaaaggaattagaggagcctggggtatacaaactttataccagaataccttgagattcttatgaagatgaggctggagaggaagatgatggagaaaggtggcatccgatagccagtgtgggttcaaatctgcggtagaagccataaacaggatcaagagggagatatccatatgtaggagcagatggacggtggctttcttgcgcgatataagaaatgtctttaatattgtcagctggaaaattattatcagagtactgggcgacttaggaatatctccctaactgcagaccttggtcaggaactacttcacagatagatatttcaacattgcgaggagtagctctatgaggagcacgacgggagtggggccattgctttggactgttctatataacgagattttggaggccgacctgggcattggtgtacaggcagtagccatgcggatgacttggtggagcacaacaaaaactggttgacatgcatagagggaaccgagccttttttgaagacgtggatggaaagcaagactagcggccgagaaatctgaaatatgatcttaaggatcagaggatatagtttttgtcctagaggtagaaagcaaataaagtacttgggagtagtcttaaatacgaggcgaacctttggtaagcacgtaaaatacgtcgttcgcaaagcatagggcgacctggacaaggtactttttcaggcagttcgtaacagaacacgactctttcaggtgctaaatggaaaggatagaggaggtaggtagcggatagaaattgcacactgtggagtttgacatgtggagtttgaatgatgacagaaacgaattacacagaaaggttggtatggtaagtgcaaatgttggttggggatacaatgaggggaaagactgaataaacgacaatactggaggcagtaactcgaattgtcagaaagaaatattagggaggaatctgcagcagagtgagatgaaggggtatctatgcgatgcaccggtctggagatgacctaccgcat

SEQ ID NO: 8247 - DNA, 1122 bp, Diabrotica virgifera
  SmartBlast Evalue=2E-50; Info=Regucalcin homologue n=2 Tax= melanogaster group RepID=Q9VYR1_DROME
gcgtcacacatagtttattaaataaaatataatataaaagacactattacacggtatagtttacgattggtatctatcccctttgaaaccagaactacctgtgtttttgatgatatatgttgttcctgcaggattaggcggaatcttgccatcaactggaattcttgcagtggtaacaaacatttcgtctagattcttgccgccaaatgaaattgaagtaggttgtggggtagacataacaattttttccagaagtttgccatcatctgggttaattttgactagagttgaaccaaagattgctgttaaccataagtttccatcggtgtctatggtaagcccatctggtttaccgtcgatgttgtgaggcccaaattcaaaaataactttttcgttacttaaatcgccgtcctttgaaatatcgtattgaaaaactttgggttgtagtgtgtctaggtagtacattttcatcttcttagtattccaagccagtccatttgaaattccgatattggaaagatgttttttgacagatcccttttcaacactatacaaggctcccctctggggtatagtttctccatcagcgccagctggacccatagtacctgcccatagtctcccccaaggatcaaccttgccaccatttaatctgttaccctttaattgtggatccgtttcaatttctttaatggtttctacttttgagacttgaggactaacaccatcccattcaactgatacaaatttgttgttaagacccgctataaatttgttgttggatcccactactgggaacataaaggcgatcggctcatttccaactttagtttttgtaacgttgccagatcccaaatcatatctataagcattgccgttcgggacatccacgaaaaaggcgctatttgtacattcgtcataatggattcgagttccgcaatccaaaggatcacttataggaataaattcgtatttgttagacattttgtgttcgggcaagtatataacagtagccaacccacaagtccaaaatgaaaataaaaagataaaaatgttgagtggtgtcattttagtgattggaacatattacataaactgatatataaatttactaaattccac

SEQ ID NO: 8248 - DNA, 1120 bp, Diabrotica virgifera
  SmartBlast Evalue=2E-16; Info=Endonuclease-reverse transcriptase n=1 Tax=Bombyx mori RepID=D5LB38_BOMMO
aatagaggtgtgttattagtcttaaatctctttcatctaggtttttattttttaggatttccatgagtcgatcacgctttattttatcaaacgctttattgtagtctataaaacagacgtaaagaggatggttaacatccaaacatctctgtgtcagcacgttgaaggagaataatgcctctctggtacccatgtcattgcggaacccatattgagtgtcactaatatccagatccagtttagagtgtattctgggtattgataaatcatgatatttgaatagcttagacattttttgaaatgtatatcttgctttctctatcctacatttgatttctagggaatggtcccaattttgattgatgttcgtaccaaggtaggtatatgtttttactgtttctatttgttgaccgttctcactgattcgtccaaattgctgttacttcttaaagatcctgcttagagattgctgttccttcagagattatttcgaacatatttaactatattttttactattctctcgttcaagtcggactctgcctcccgcagcatccgtctccaagcatttctttccttgcctactctcctccagttatctcctcaatatctttagtaccggttctcacttcgtctatccccctcttccttggtcttcctacggccgacgccccaccataattccactaagcgttctactaggtgtcctgttattgtgtgcattcttataaggtgacttgcccaacgcaatctttgtatttttgcaaaaaaattttgtgtaatattaatataacgggcgattgaatcttattcttcacatgccattgtcgcagaacggtcctaatattcttctcaatatctttctttcaaaagtttcataaggtttattgtttttctgttcatggtcatgaaccatgtttctgcgccatatgttgctattggtcatttaatggtttatatatgttgaactttacttccctatagatgtcttggaatccaaacacctacgacaattatagaactatgctttattatcaagcattatccttttccgcatttcctcctcctcatttttgttgactgcatatttccctgcctaattattgtttctcgtagcatt

SEQ ID NO: 8249 - DNA, 1119 bp, Diabrotica virgifera
  SmartBlast Evalue=5E-57; Info=Pre-mRNA 3'-end-processing factor FIP1 n=1 Tax=Harpegnathos saltator RepID=E2BAT1_9HYME
ctcccgatgatctctgtgaggactactatcccgtcgactacttggtgacctcattcccatagacggtggtgggcccatatgcatggaaggtggtcccatcggaggtgggcctgtcaatgttttcaactcagaaggagcccatactggaggtggttcattgccccattgacagtcctgtgtaggttcataaccaacaccataaaagggatctggttcgggattaaatccatattctggttggaagttttcaaatgtagctggtggaggaacactgagatctggaaatcctggtttcctactatactctcttctatcagctgtcataacctgaatagtgttcactttagttgcttgatcagttttattcatttggggttgcatcctttggttgttacctgcaaaatttccagtatatttactgttatcattcatgattggcataggaccacgaggcaatccactcatcatggtcattggtactaagcccgttcctgaatcatttactcgtattcttttttgcctttcacagtaagctctccatgtatcttcattgaagccgtaattaaaataatcagtgatatcagcaccaggcttcttccatggtttatcctctaaactatccaaattaaattcagatgctagtactccatttatagacccagcttggtcaaattcctccacagtaaactttccaggctgctgctgttgctgaatttgtttgttcttatcaccgacagcactaagtaaacctcctctttttatatttaaagctgtatatgaagcaggagtagtcgtctttatatcaccaatgactacattaacatcgtcatcgctatcatcatcgagatcctccttttcactatcatctccattttgttgtacttctccatcttccatactatctttagtttcatcattctgcttgtccctttcttcgctatcaaccaccggcggagcatcttcttgttgggcattttcttccggtgcaggttcctcttcttgtggtgcttcagactctatgttctcttctgattcgcgggaatctgtattcgcagcttccccattatttaattctgcagtttcaccatataaccattgatcatcttctaaatcatcggc

SEQ ID NO: 8250 - DNA, 1119 bp, Diabrotica virgifera
  SmartBlast Evalue=5E-57; Info=Probable Bax inhibitor 1 n=2 Tax= Formicidae RepID=E2AUW6_9HYME
atctagaaataaatgacgtgttcatatatctttggttgtttatctaccatcgttaacttcaatcaaaacgcagttacgatttcaaagagaaggtgaaacattgtattaaaattaaagtgaagtaaaataaagtagaacaatagcattgtgaatcgttgagaaacagttgaaattcgaacaagtgatctatcattttcattatggcgacagaatacgtgcgtttcagcccaaacgcatttctaaattcgtttaatgcaaaactagaacaaccagtccgacaacatctcaaaaatgtatacgcctgtttggccatgtccacaatgtctgctgcccttggcgcagcagtccatctcttcaccaacatcatgcaagcaggatttctatcagcaataggagctttggtattcttcttcctcttagtaaacacacccgatgacaatggcaaatcaatgacgacaagagtaggatacctccttgggttcacttttctcacaggagttggcctaggaccactgctagaacatgttatcttggtagaacccagtattatcataacagctttcgtagctacctcaacagtatttgtatcattctcagcagcatccatgttgtctgagagaggaagatggttatatttgggaggtactttgatgactatgttgactacgttgatggttctttcactcgcaaatatcttctttggagccatgtggatctatcagacgcagctgtatttgggattgttggctatgtgtggatttgtgctttatgatacccaaatgatcatcgagaaacgtagattgggaagcagagatttcgtagcacattcattggacttgtttgttgatttcattggaatcttcagaagactgctggtcatcttaacacaaagggaacaggaggcacaacgtaaaaagcgtagagactgaactgaatgaggaaggaggttgcaagtgagcgaatgtgatgaaaggatggattacattgtgatcatataatatctgtcaataaataatcatcactagaactccaataaatgttgtttcttatgtgtgtatattttttattaatccttatattgtaagtgatgtatttatttaaataaagtttgggttttgt

SEQ ID NO: 8251 - DNA, 1113 bp, Diabrotica virgifera
  SmartBlast Evalue=9E-77; Info=Gustatory receptor trehalose 1 n= 1 Tax=Harpegnathos saltator RepID=E2BBZ3_9HYME
gggtaattagctcaaagaatgattttgagaacataaatagacacaggtctaaaactttgataccatgtttaaaaaaaaatcttttgacccactttcaactgtttcaacgatcaacttcaccgtctttttctatatcacgctttacttggtgactgggactgtatcatatttttcaagtaagctacagacatgttatttttactaggaggtggctgtgtcagctgagaatctaaattaatattatatttacacaatagagtacttatataggccatcctgtactgtttgttcatagtaacatacacaacagggttgacacaactcgacaagtaaaccagtaagtaactgatgatgtgtagaggtgcgtgatgtacttctacgtcaaaaattttgaccaatgtgattggaagatagcaaacaacgaagcagataaagatgaccaataccattttggtgatcttcatttcgcttcttttatatttgttaccagagttatgcatttgcatcttcttgtgtgatttcctgactacccagtatatattggcataacatataactataacaacacaaggtagtgcgaaaccaatgacgaatagagctgtcttggagctgttaccatgttcatccgggttgatggagcaggttccaagttttgtgtccattccgtaggttccccatttacctagaagtgtgggtatttgtagaccgtagctaaaagcccatatggcaccaatgtacattgctacttttgctttcgtgtagatggtttggtagaggtgcggccatgcaatgaggatatatctgttgattgaaattgatccaatgcttaaaagggatactccaacacatccataccttaacgtcggaatcaccttgcaaaggacatctccatgtacccactttccatggaagaactgacttgcagcaaatggtacgactataacgccgaatatcgtatccgaaaagcagagactagctataaatgctgccgcaactgtgcgaagtttagcatgcttcactagcgctacgcatgtcaacaggttaccaactatccctaccaccattataacgatggtcagaacaccagctgctaccaacattgtttgcgaatat

SEQ ID NO: 8252 - DNA, 1118 bp, Diabrotica virgifera
  SmartBlast Evalue=3E-93; Info=Geranylgeranyltransferase type I beta subunit n=1 Tax=Bombyx mori RepID=D6RVZ4_BOMMO
taaaataaaatctaagattactttattgtcccctgaatatctgtaagatgatcaaaagtccttttagtaatgtttaattcacagtacatttcactcaaaccgccaaaatccattagacttaagcccgctaatccaagatatgtgtgcatgggatctggtactacgtttacccatttggaaaaaccgccatacctatcctgggtcattaaaacaaattgattgttattgctattgtgaataaaatcgtaggcgtttaaaattttcaaggctcccccagtccagaaggaataacatgtgtcgataggtttgttgggtctaccactgaagcctccgtcaaatctgaacagaagccaacgtcttaatgcattaaattgtgctctggatagtttatctaggttgttgcttaaagctaaggctgcgactgcgcagaatgttgagccacaatgtgattccagttctggtccctgaccaattcctccatcatatgaaatactgttcaatataaaatctaccatagcatctatgtctatacaactccaatcatccaatatgtaacaaatgcaggctgcacagtatgaaaacctcatatcactttctactccatctatagcacctttaaatgatccatctggtaactgtaatgttttaagactatttaaaatagcctgcctattgactcttttcaaatcatctccaagtattaataaagttgttaaacatacataagtatgggctatatgggagcatttataaataccatatctttccttattgttaactgtatttagagttgttgatccttgaaaaccacttattggttcttctttattaataatctgcaaggaatatatccactctataattgactgtcttctttcttttggaatattctcaatttctcctaatatatccaagcctgatacagcaaagtacataagcactgatctatttgtgtccattgagctgttagaagatggcaatttaccatttaatatgaataataaatactttttgtgcagttctggggcaaatttatgaatattttctgtttccattataaattttttataaacaaaataattaagaaagtttaatttaattgttaaaagtcctagtcc

SEQ ID NO: 8253 - DNA, 1114 bp, Diabrotica virgifera
  SmartBlast Evalue=2E-12; Info=RING finger protein 17. n=1 Tax= Gallus gallus RepID=UPI0000ECD5F6
gccaaatgtgatttgaagacgacattgggaaatttggtgaaatatttgtcaaattcatacattttgtccacgtttatcacatcttcagtagctctgtcaaaaatattcactctatactttctgtcatcaagtttttctaaaactttcgctcttgcgaaagagagattatgaaaaacaacacactgctcgtcggcattccacgatgatcttgttttatgttccttggtgtaatgtatttgtaattcctcatgtagcttcattgcttgtgattcgaatgcggggaacttaatatagattaaaccgggattaactaatttaacaacttcgattttctgttttttgattttgtcagcttgttcctcatctgattcatcatctgactcgatttgtttcaaccgttgggcgagaattccatcgtcttctctaaaccctctgacagcatcattctttggccattccaatgtttgggaaattttaccagttgaatcggccaaattttgctttactaattgcgcatttatgcaaatatcaacatctccaaccatttcgaacataccaacttctaatggttctacgttatgaacgactattttcagtgtgtcttgggataggaaaaagttttctagaaatactgttgccgcctcagtccacgttgtatgtttaccaagtggttctacttgcgccagcttcacagagatgctctgaatttctaatcttgtaaactcctctttcaacattcgtatatcgcgccaaggaacagtcaattctaaaccccaatcaacaagtaagacttgacagttatcggtattgactttcaacaccaatcctctatgccaattgcctctgattagatctttgtaatttactacaacgtaagttccttcaacgggcacacatgtgtcttctcttgaattcttgtaactattcttcaacgattcattcatcttttctaggaactttatatgcgaagccatatgaataaagatatggtgtggatcaataacactcgctagcctgacattagcctcctgggattttttaaatttgacactgttagggaaaagtttgtattgtccgctaagggttaatttttgaggagtgacaacttcagtgt

SEQ ID NO: 8254 - DNA, 1118 bp, Diabrotica virgifera
  SmartBlast Evalue=0.00000001; Info=Endonuclease-reverse transcriptase n=1 Tax=Bombyx mori RepID=D5LB38_BOMMO
ctgtattagagtacaaagactcgtttcatacaggttctctgaaccgcatattggaatattttccttgcggtgccttttgatattgtcatatctgggtttattaaacagaggacttgaatcgagtcgacattcaattcatttcataaattcaattcaatttctttaaagataagacttctgagatgctacgtgttctctgcattgttttatggattggaagcttggacattaaagatgtttcaagcggattagaagcctttttttttgggcctacaggatattaaaaataagttgggtggatagtcacgaatgtcgaggtgttgggaagaatgggaaaagagaggttttgaatacaattaaagttagaaaactgcaatatctggaacatgtcatgaggggtgagtgttataacttgttgcaattaataatacaaggaagaatacagggtaaaaggagtcgtggaagaaaacgcatctcctagttaaacaatttgagagcatggttaactgcgatttagggaagcggtatcgaaagttcgaattgccatgatgattgccgaccttcttagagatggcacgtgaagaagaatatgtcattagacataaaagtaaacagtgcaacaaatgaagagtgcagggctatattagctcaatgtacccgtgtgtctagtagcatggcagttaatgtatacaagattcatggtagtgtcggaagcaactcaatcaaataaaaaaacttcagataaattgtttaatatcagttaaccggtttagtctgaatccagtgtggtatcagaacaaggttccttcacttgctttcgttcctgtgctttattctttagttagttaactcgatctcctttcctgaggaatcactcagtcttgttgacttctttagtcttttgtaaatattttaacattattcttatgtttcgtcaagcaataattgtaaatatatgcaaaataacaaacactatagtatcattatgtgtgtgctgagtattattgtttttatattggaatttgattcacttcatttgaatacttttgtttcatttggtttttaatttatttgttttttattcgactttgttttaaacaaaaaaatatatacaataa

SEQ ID NO: 8255 - DNA, 1113 bp, Diabrotica virgifera
  SmartBlast Evalue=1E-154; Info=Phosphoinositide-binding protein n=3 Tax=Culicidae RepID=B0WB19_CULQU
tggcagcggaaattaaaccagcaactcaatcaaatgaaagattttgtacaacgaaaaagccaatactgttatcaaagttagacggttgtagcgatgagattaatgctgcagttattataccaggcgaagaaggaattatcagtgtttccgatgataaaactgttcgagtgtggttaaaaagagattcgggccagtactggccaagtatttgtcaatatatgcctagcgggaccacatctatatattacacagtggaaacgagacaacttttcatcggccaagaaaatggaaccgtttcagaattcaccctcgcctcggatttcaataggatgatgcccgaaaaggaatatttagcccaccaagctcgagtaaccgatataatttttgcaattaattgtgagtgggttctgagtgttggtagggataaagtgttttcgtttaattgtacacagactggaagaaatatcggaacttttaatgcagaagcgtggtgtacggcattacaatttgacgtccaaacaaaacacgcctttgttggcgactactcaggacaaataactatgttaaaactagataataacggagcttcagtgatcacaacgttaaaaggacattcaggttctattcggtcactatcttgggacagtgataggaatatgttgtttagtggatccttcgatcatactgtgatcgtgtgggatataggaggccaacaaggccatgcttatgaactacagggacatcataataaggtttctagtctctactattcaacgagtaccaaacaattaattagtgccggagaagataacgtaatagtgttctgggacatgaaccaaccacgacaggaaactcccgagtgggtggaatcggatctgtgtcaactttgcggtaggcctttcttctggaaccttcgtgccatgatggaccaaagacaattaggattaaggcaacaccactgccgccattgcggtaaagccatatgcgaaaagtgctcgacaggaaggttgaacattccttccatgggtttcgaatttgccgtcagagtgtgtgaaccttgtcataatgcgcttaaagataaagaacggacatctctagcaacgtttcacgacg

SEQ ID NO: 8256 - DNA, 1118 bp, Diabrotica virgifera
  SmartBlast Evalue=1E-34; Info="AP-3 complex subunit delta-1, putative n=1 Tax=Pediculus humanus corporis RepID=E0VFE0_PEDHC"
acagtacgacgaaattcaaagggtttgcgatctggtgatagataaattaagtgacagtatcaaatctgccgaactggaagtccaagagagggcgagtacgtccctcatgatcattaagattgttcgggaggaatgtgaatcaaggaaagcaacaggtaattcaaaacttatggacaatgaagatgttgagggtaaaaccgaaaacacgttgctaatagcggacgaactggaaagtttgtttagtggtgaactgaatccagttgcgccgaaagcacagaggaaagtgcctgtaccagatggtttagatttagatgcctggatcaacgaacctgtagacgaatcggaatcggacagtgagcctgaaatggtagaaaatctatttgtaaaatcagaaagaactaggccatcttaccaaccggagcctacggaagaggaaatgaaaaagagtcgcgaagctagaaaatacgaacaacaaaacaatcctcactatttaaagagtaatgattccatcgaacgcaacggaaacagtaatggtaatgaacatttcgaaagtatacccattgccgaattaaatctcaatgttccgctgaagatgataggccagaaacggtctgataagtaccttaaggttagcaaaacgtccaaaaagaagaagactagtcggaagaagaaacacaagtctgaaagttcctctgatgaagaagttaatcatggtcctgtgatagaagtaaagagagatatggagcttccagaaggagccacaatttctgagaatgaaagtgatcattctcataaagacgatcctcatcgagccctggatatagacttaaacttgccaacttatgattcttcggcgaaaccagaacaccctaaaaaacaattgaaagaaaagaaggaaaagaaacattccaagaaaaagttggataaagagaaatctagtaaagacaataacgaaaaacgtactaaagaaaattgtaatagtgttaaagtagttaaggaaaaatctagtaaaaagaaaaaatggtaggcataaagaaaaaacggagcatgtagctaaagaagcgaatttattaggtttagacgacgtcgcagtagaagcagtaggaggtgagacggat

SEQ ID NO: 8257 - DNA, 1117 bp, Diabrotica virgifera
  SmartBlast Evalue=1E-157; Info=Inosine-5'-monophosphate dehydrogenase n=2 Tax=Formicidae RepID=E2A771_9HYME
gttagaacagataatgaccaaattagagaatttagtaacagctcaatctggagtaacattaacagaagctaaccacatacttgaaaaaagtaaaaaaggaaaattacccatagtgaacaccaatggcagtctcatagctcttatggcgagaactgacttaaagaaggccaaaagttatcccatagcttcaaaggatgaaaacaaacaactcatcgttggagctgcattaggaactagggaagatgacaaagctaggttagcacttttggcacaagctggagttgatgtggttgttctagattcttctcaaggaaactcaagctaccagatagatatgatcaagttcatcaaaaccacttaccctaacctccaagttgttgcaggaaatgttgttaccaagaaacaagctaaaaaccttatagacgcaggagccgatggtttgcgagtgggtatgggtagtggaagtatttgtataacacaagaagtaatggctgttggacggccgcaggctactgcagtttataaagttagtcaatatgccaagcattttggagtgcccgttatagccgatggtggtattcagtctatcggtcacattacaaaggctcttgctcttggagcttcaacagtcatgatgggttcattattggcgggtacttcggaagcacctggggaatacttcttttctgatggtgtgaggcttaagaagtaccggggtatgggaagtttagaagctatggaccgtaaagatgcaatgggatcagcgatgaataggtatttccacaacgaagtagacaaactcaaagtagctcagggagttagtggcagcattgtagacaaaggatcagtattgcggtttttgccttatttacagtgtggtattaaacatggatgtcaggatattggagtgaaatcattgaatgatcttagggacagcatgtatactggccaacttcggtttgaattaagaacacattctgcccaagcagaaggaaacgtgcacagcctgttttcatacgaaaaaagattgttctaacaattccaataatcttccataggtttcaaactacattttgtacaacaaattatacggaggagaaagattcctcattatatt

SEQ ID NO: 8258 - DNA, 1118 bp, Diabrotica virgifera
  SmartBlast Evalue=8E-12; Info=Glycoprotein gp2 (Fragment) n=4 Tax=Equid herpesvirus 1 RepID=Q8V0M0_9ALPH
ccgaagaaagatgttgaaacagaaggagagctaattgaaccaaacagtgacgtggttgttgtagttaaggccactgaagcagtatttaaattcatcaaaggtgtgcttggtttagaaacgtttgatacagaagtagtttgaggaagttgtgctgaagttgaagttgttgattgaagtatagtcaatggagccgtactaaagaaattaggtttaggtgccgtaaggaggctgcctgtatccgctgtgccaggtgttcctaataaggactttgaagaagtcgtcgttgctacagtttgcaaacttgcagtggcaatagctgaactagcgggttttccaaatgaaaagaaactctgggctccagtgttttgggatggtaactcagaagaaacgtcaacatttgatttaaaactgaaagtaacttttccttgactgggaactgacgattcaggtttcgtgcttgtactagtactatcaaaagtgtattgggacaaattgggatataaagactgggctacagatgtctgactaggggttccttcaactgctacagttgaaggtgttgtgaaagttaaaccagctgaagaggtaaaatttttagtggcttgagtagtaggaacgaaagctgaagagataggggtttgagttaaattgcttaaaaggtttttcgtcactggataataagtgctaacgttaggaggcagtacgtttttgtccaagcttttaaacgtgaaggtttttgaaggttccggttgtgctggagtatttggaggtaccaatgtcggttttatatcttgcataagttttaaaggagtcgattcagaaaatttaaggtttttaacaactgccggtttcattacaggcgacatttcggctcctagtatcgaaaaaacgtggcttcctctaacagtgggtgatctggtcagtgaggtgttaagtttaggtctagcagctgtaacgtgggttatatctctatgtttgaggaagtctcgaagcttctgcgttttcgacgaagttaattttttgtttctgtcgcgtatttgctcatgtagaatgcggtagtcatcatctggatccaaacgaaggtatttaaggtcctcgatctttttttaatccaacga

SEQ ID NO: 8259 - DNA, 1103 bp, Diabrotica virgifera
ttttatattattattgaacattgaatatttatctttgctgatttttgaataatttatgaagtatcgatttttttttaagaatatctataaattttgaaatatgaagtgattttttgaattgaatatttttatcaagtttattatatatgctattattgaattttgaattttatcaaatttatttgaaaaatctctatccgatttctatttctagtacggttatttttgaatattttatggaatatcgaattttttccaaaaatttctatcgaagtttgagatataaacttattttgaatatttttatctaacttttgcatatgctattttttttaatttttgtcgaatatgtatactattattgaatttttattagccagttgtttttattattgatatttattgattctatagatacattttcatcgattttgtgttaaattttgtatgatatgaacctgaattaatatttttttgagtgataaatgatatttttttaatgaataatgattagtgatgacatacgttgatataagagcttaagacaaacattgctataagcaagagatttatttttaacgaaccgacctgatgcgtcgagataaggaatttggagggactatatagataagaagaagaactaacaatattataagctaaatattatgagacaacttgagacaataagaaacccactgctcttgtcaaattagggaaggtactaatgatttatagaagcttgaaagcttattagagacccactctgtgttttgagagtacctattttattcatgattattcgtgaataaacaacggcctcaaagcaagggattgaggttgtgaaatttttaaaagaatttgatctagccaacgatgttatacccgcttctattaaggtagattgtcgaggtttcgtggttagtattgagtatcatgattgttatatggaatatgtagaagaattggaacttttctctcgagtaaaagccactttgattagtcgaacgtaggcattgagggataagtaaaggaagtgattattatgatgttatattatgaaatgatatattgatgattaaatgacaaatgattgttatatgaag

SEQ ID NO: 8260 - DNA, 1114 bp, Diabrotica virgifera
  SmartBlast Evalue=3E-18; Info=Zinc finger CCCH domain- containing protein 10 n=1 Tax=Camponotus floridanus RepID= E2A3Q6_9HYME
tactactggcagaccttcgtctttgtagtcatcgaaagtaactccatttcttctaaacactcctcgtagtgattctaatgtgaccaattggggttcggacatgttattggtaataacaatagattgtacttttttctgctcgccgtttactaatccagcgatttcggcttcttcttgatccttggtgatatgacggtatttacagtgcggcctgcgacactggccccttttgaactgattacaaaccgggggactaccaggcatctgattcttcctggtggcttcggctaagatttgggctgacatttgaccggtgcgtttgtactggtccacttcgtcggtagaacagtggataaatttgcaaaatggtctggggcagatatagttctgaaaatcgtggcaaaaattcaacagcttggtttcgttctcgtgcttgtatttacaaaattttctatcgcacaaaccgcgggcaaaatctctacaaacgctttcttctttttcacttgttctgtctgattgtatggtatcctccgaagtatcggacatcgtttatatgaaaatgtagtttattcgttcctatataaaccttactaatccagcagatattcaattaatccaacggcagatcgaacctcttgtgcagctctgatacagtgacatgttcagcatcggccaagtatcccagaatcacctgagccagatccttcatttcgttgtactcgtgcagagcgtccatctgcgggtggaggtcggtcgtaacaccatggctttctagttccgctatttctttatctaacttggattcttctttcagtaaacgctcgaatctggacttcaattctaggttcgaagacgactctttagagtctacctttttgatctttttggaggatttcgacagtttgtgctgacgtttggaactgtccatttaatttacggcatttgaaagtatcatttatcctttaaatggaagattttccactcagactcaacataaacacaattcactgcgatcaatcacttaattttcttctgtcaaagatacagtaattttagtaattaatttgagcagaattagaaaagcattgcaaaatcaaccttgaacagcttgctc

SEQ ID NO: 8261 - DNA, 1110 bp, Diabrotica virgifera
  SmartBlast Evalue=6E-58; Info="Alcohol dehydrogenase, putative n=1 Tax=Pediculus humanus corporis RepID=E0VSJ3_PEDHC"
gaaaagttaaaaatgtaaattttgcaattattgattgattgatgactgaaaagaacactgctaacatggaaattaggaaagatctgcataaaacacggttttgaagaaatgggcatattatctaagtgtagtctagtggctttcgaattacttaacgaaatgtttgcagcggtaggagcaggtttcttaggggttttgtatctagttaaaaaggggtttaataaatatgactcgatacgaaccttaactatacttgtagtaacgacagccagcgtggcttatatcactcataagaataacaaacaaattaaaccaaacaagaaaaaagttatatgcattactggatgtgattcaggacttggtttttccctggctcaacactctgttgatatgggatttactgtaatagctgggttcttaagtttagactctaaaggctgtaaagagattcgacagaaatatggaaaaaatataatacagattcaacttgatgtaaccgattcatctagtgttaaggcagctgttcaaactattgaacattttttaacgagaaattcaggatatgctctccatgctatcattaacaatgctggtgtcatggtatttggagaatttgaatggtcaacagaaagactgatacaacaacaaattgatgtaaatctgatgggcacactgaaatttaccaatgctttttgtcctctcataagacagcatagaggaagaatagtaacaattactagtcactgttcccaatcagtacttccgggtctctcagtatatggagcaactaaaacagctttatcagggttttgtgatggtcttagagtagagatgaacaaatatggagttgatgtaattcaatttatacctggctcttttacgttacaaagtaatataatggctagacaacttcagaatgttcaagaaatgcatgataatttttctccagagcaacatgcgttttacagtgactacttcaaacgatacaatatttacttgtcattcattactcctcctccgatgccctttaaaattgaagatgaagggttatacaaggaatatgaaaaaactttgctggacgaaaagcctgatgccatatacaaaaatgag

SEQ ID NO: 8262 - DNA, 1115 bp, Diabrotica virgifera
caacggtggaattcagtcgagattttaaatttacggtactattgagcccccctaaatattagaaaaataaaatttggggcagctcctaatgcaaggttagacctgttgttcgtctaacgcgactggactatttggcgcatcaaaaatgttagtccttagcgcagatgaatgacatccaacggcatcctacgtttgccttgattggtcgttatcgtcgcgcattcaaaattttgtgtcatgagtggattgcaaaactgaaactgtcaaaattcgagagataattaactgattctttagcattaaactgtgcttaaacaatctacttgcttgcatcctttacacccgagctgtagaaatggaaaaatacggtgtattcgccggtccggaacacgaatgactttaaatagggttgaatatggggcgactaaattaatataaggaaattcggaccagtagggatgaaaataaaagccattgctgtaagattaaacggcatactaaatatttaaaaatagtttttttttggacagaaaaattttaagatcaagaatgacgcaactgtagatagggttggaaatggagggattaaattcggataataaaattcgaaccaatagggatgaaactaaaagctatcttataagattaaacgccattccgatgctccggatggttactctttatttaatcactatttttaatatttaaaactttttagatgaagaatgacgcaactgtaaaaggggttgaaaatggggggattacattaggatattgaaattcggaccaatagggacaaaataaaagccatagttgtaagaagaaactccataccgatactccgtgatggttacttctcatttaatccctattttaatttatttaaaaatagttttttgctctccttagaaatttggatttttgcagttaagtcattctcattctggaccggcgagattacaagaacataattataaccatttattgtacctagtaaataaattgtttgtgataaaatactaaaaccaaactaaaatgcttgaattgttagaaaaatgtttcaagtatattactgaacacactagaatttaggtatgaggtatgtagtagataca

SEQ ID NO: 8263 - DNA, 1101 bp, Diabrotica virgifera
tgttttcgaaagtttcgatgagtttgcagaaaatatttctgtctgtagcgagagttgtataccggatattaattttaaagacttcggtgagactcatactcggaaatataattcgttggctgaagccagaaacttctttgtcaaagaaccggtaagtagcaaaccaagactaataccactgcctagacgcacaaagaaggacgaaacgcctagtgactatctaaaacgcaactggaaggaaaaacattctgcttcaatgcctaaattatataaaagacaaaacactgaaccaatcttcgaaacctatcataccatccacggtggtatgaacatcagcaaccactttcccggattaacacacattccatcacctcaacatttcgatccttctttgcctcattacgctagaaccgtcagcccttgtacatgctttcacggcagcttaaacagatttgaagtagactatcaacattatgctgaacagggtctgtcggccagaagtatgagctctataccacacggaaactaccaacttaacacacgcatacacactgatgatatcggcaaatgttgtgggggtgcaaactgtcagacagtggtgccaataactgaatatttggacacttatttgccaaaaacggaggaaacattcgaagaaatgctgaatcgccagaaggctgaactaaatgctttaatggaagctcacagaaagcaacagttagaatacatgggtaaatataaaaggcagaaagacgaaaatagatgagttttattttctttttgtttttgttacagagtttcatcgaaaattaaccgaagagagtaaaaaacattgaagaggatcaacagattaaagtgagaatgtaaggctgtataataaataattattattgtttatattgttatattttaaagaagtcctagatattaattacaatgattgctgataatttatttttaatatctcctgttattcctagttttgttttatttattttagaaagtgacagcagtaataaagtcttgtacggaagataaggatagaaaatgttttccttatcctccacagattattcctatattatattcatgtataatttt

SEQ ID NO: 8264 - DNA, 1116 bp, Diabrotica virgifera
  SmartBlast Evalue=1E-92; Info=Kiser n=1 Tax=Bombyx mori RepID= Q6PTY2_BOMMO
acccatgattgttccaaattatactaagggctttaatcgaagatatatcatagcgtaatcaatatgacacaacaataatttagtcacagttttattgtttgacaaccataccgtacaaaataatcagactttaggcgtaattagataacctagcgatttcctcttgtagcaattcaaaaaaattgtgctaactatcgaaaagaaacagtacagaagaaattagctcagagtcatcgtttgcatgtcgtccaggctcttttttgctttctgtgagatgtcccccatcgacttctttgcactggtcgctatatcgtctagcgaccttttggtatggctaaaaatttcatccgtactcctcgttaagtctttgacttcatcgtttaatttgttgatcacccattccatagcttgcctacctttgcctgcgttatttgatattttagtggttaaaagatcctccatgtagtttgttagaggtactccctttactgtcacgactgcctcttgtttaagaagagttttggttgagtctgaaggatgtggagtatatttaagggtttcgttgacggctatatggcggcaaaaggtaagatttattgtttttaagaccatgtgacggagagaggggtttacttctgactgttcgctggcgtagcagatctttgcagaacctatgagtgcttgtgcccatctaggaaaataccaaatcgagctaaccagtctatgtgtgtgcaatactccatccaccacttttctttctacaacatcagtgccaataacagctgtgttgtgtggatttggatatttcctccaagctgcagtggcaactttttcccatggatggttaaatgtgtgttcacttgtccaaattttcatggttatgggttatgttttctagaaatatttccaaaattgaggattagacaagcatcagacagctgaatgtaaaatgtaaaccagaccagtgatagtgatgtttcgagagtggtctctaggtctaggtcacagtcagacgtcagactcctaccgtttattcaaaatgactaaataaaataaagctgactgaatgttcggaactctgataattaaaacgtaattcaatcaaagtccgctgat

SEQ ID NO: 8265 - DNA, 1113 bp, Diabrotica virgifera
  SmartBlast Evalue=1E-75; Info="Ptm1, putative n=1 Tax=Pediculus humanus corporis RepID=E0VNX5_PEDHC"
ctcgtattcttgtagtgatagttagtttaggttttggtattgttaaacctagattaggagctacattacatagagtcgtaggagttggccttctttacttctttttagctgcctctgaagcctatttaagaataaccaaagaaaaaagtaatcccagcaaagatattttagtagcatctgtgccacttgctgtgttggattctgccatctgctggtggatattttcagcattagttaacactaccagaactttgagattaaggcgaaatgaaactaaactaagtctttaccgccactttactaacactttgatcttttctgtattggcttcagtgttcttcatgctatattgtataaaagttcaccattttgtcgattgtttggttgtgtggaaagatatttgggtagaggaagcatattggcatattctcttttcgttgttattattggtcataatgatcttatggaggccaacaaataataatcaaagatatgcttttgttcctcttttggatactggtgatgatgccgatgaggaagaacagcttgtaaatgatgcttatggggtaaaagtccgggtacatcaccctaaaaataattcgactcaaagaactacgatagatgatgatctcaagtggttggaagaaaatgtcaaaagtgatcctgcacttcctattttagattcagatgaagaactagtgaatactaggtttgaagtgtcgaaaatgcagtaaacattttgccataattgtacttatttatattttaaatattccttaaagcattgtgcaagtgaaagtgaaaagactgaagtttgttttacttaaaacgacttaaagatgtaagtgagagcaggatcgtgtaaatagagatgtgttttattgtgaagaaagtaaatcattggttatgtctccagtcagtattttaggttctactaggttaagtatttaaatctaattttttgggcacatactttagcctatttattcacaaattatacctagcttcagaatttctctgtgttctgaagattaaataatatctcttcatagatctacaccattgtatcagacatgtgcatataattcataaaaatataagttatttccaact

SEQ ID NO: 8266 - DNA, 1115 bp, Diabrotica virgifera
  SmartBlast Evalue=1E-159; Info=26S proteasome non-ATPase regulatory subunit 14 n=20 Tax=Endopterygota RepID=PSDE_DROME
cgaaaactaaaagtcatactcacggttgtttttgtaaaacttgtaggtaacgaattttcgtttttagtgaattaacaaaacaacagagtgattttccaacaagaataacttatttattagtttcattaatttgataaacaataaaatggatagacttcttcgactaggaggtggaatgccaggtttaactcaggcaccgccgccttctgatgctcctgttgtggatactgccgaacaagtatacatatcctccttagcactattaaaaatgttgaagcacggccgagctggagtacccatggaagtaatgggtcttatgttaggagaattcgtagatgactataccgttcgtgtaatcgatgtatttgctatgcctcagactggtaccggtgtcagtgtagaagctgttgatccagtgtttcaagcaaaaatgcttgacatgttaagacagactggtaggccagaaatggttgtggggtggtatcattcccatccaggtttcggatgttggttgtctggagtggatatcaacacccagcaaagttttgaggctctctcggaaagagctgtagcagtagtagttgatccaatccagtcagtgaaaggcaaagtcgttattgatgcctttaggttaataaatccgaatatgatggtattgggccaagaacctcgccaaactacatccaacttaggacatctacagaaaccatcagtccaggctttgattcatggtctaaatcggcattactactccatcagtattaattacagaaagaatgaattggaacaaaaaatgctactaaatctccataaaaaatcctggatggatggtctaactttagcagattactctgaaaattgtagtgtgaatgaaaagactgtagctgatatgttagaactagccaagaattacaacaaggcattagaagaggaggagaaaatgactccagaacagctcgctattaaaaatgttggcaaacaagatcctaagaggcatttagaagaaaaggttgatattttgatgaccaataatatcgtccagtgcttgggagctatgctagatacagttgtttttaagtaattgctggatctctttttttactataattgcaact

SEQ ID NO: 8267 - DNA, 1113 bp, Diabrotica virgifera
gctcaacaagcattcagcatgctcaaccctgtttggaggcctgactagtataccgcaaagacaaagatccaaatattccagtcaaatgtcatatctgtttgtctttacggatatgaaacctcgaaagtgacaaaaaccttcaaaagacaagctgcaggtttactaaggtggtattgtggtacatctaaatggttaacatttttaaattgaattcgccagtttgacgatatgtaatgcttaaagagatcaataggaacaattgtgcacattatttttgactaaaattagatatgacaatgcttttagaacctgaccatccatgacgatgaaaaaagtatcccgatttgcttaatgcttataagcattgaactgaaacgcttaaatggttttaaaatatcagctgtataaagttcttccgttaccatactttaatgttagtccagttacaagttttaaaatcaacatctttcacttgaattttaaaattgagcacacaatacagaataattattagcttcccaaaaatatattttcgaattctgaaacatgttctaaaattaacttaaatatatatgtagctcaaatccctccaaagtagttaagctatctattatcgtgataatcagtatattgtaggtgtaagatttccttttagtgacaatttttatagaaaaattgacatattaagtaaaatatgtaagttttttttgtctgatcgtctcgaagaatcagtgaaattatcaatattacaacctcacttaacctcaaatttttaattttcgtatataggtacgccagagtattttagtctaagttgcagttccatttgaattttacattactatgttagcctttttgatttatggccaggttttgaaccattaaccatttagatcattcacaaaaaagtgaatgcgattcatccacttggctatctgaccaactaaagcatttcttttatcttatttattttcttaagaagcaattgagaataatctgatagttttttaaaacaaaatagccctcctaccaaatattagagctggcaatttcgaattatttggtatggcagagggtaaaaagcaatattgaatattcttttcatttaagccc

SEQ ID NO: 8268 - DNA, 1115 bp, Diabrotica virgifera
  SmartBlast Evalue=2E-54; Info=Zgc:91936 n=1 Tax=Danio rerio RepID=Q6DBT2_DANRE
caatactttaatcaatcattataatttaacaatttaatcgtttcatcccaaagctgtcgagctaattctgggtctctagcagttttgtaatgttcttgataatgacattctgagaaaaatcctcccgttagatgctctatacctggttcggtagctacatagattgttgtttgcgcaccttcttcaggagttttaaacaaaaatttggataatggcgcaacacctctgtagacaacaggcgaaagatgtctagtgattatgtcagtagctatcattccaggatgaagagcaaacacactaatattaaactcgtttaatctcttggccaattcttgagtaaaaagtatgttacacaattttgtgatgggatagtctggctttccattgagattttttcacatcaagtttagcgtatttagctgcctctgaagccacgtttatgattctactagctgtagatttttttagtagattaactaacataagcgttaataacactggcccaaagtaattaatttgcatctctaactgaaaaccatcttcagtcaatcgatcgccaagcattagagttccagcattattaattagtatatcgagtttttcctctgtttgtaaaatattagtagcaaagttcttaacagacgttaatgaagctaaatctacaattttgagaaccacgttctgattttgtgttagagttttaatattttgaacagctacagtccctttatgatgatccctacacgctacaatgactcgtgctcctcttttagcgcactctagcgcagtttcatacccaatacctgtatttgatcctgtaactataaccgtttttcctacaagacaaaccttattcttacacgacatagtattaaacttgacgtaaaatttgaagatcaagttaaatattactaaagcaaatataatataaagtaaaaaaaacaacattattgctgatatacagtctctctaaatgtatataaaatactaaaacaaatagcaatcttaaaagttaacacaaaatatacttaattaattatgaaaaagacagaaccgtaaagtatataatattaaatttttatttatctcatcatgtgtttttgacagcgtagttg

SEQ ID NO: 8269 - DNA, 1115 bp, Diabrotica virgifera
  SmartBlast Evalue=9E-43; Info=CG6776 n=3 Tax=melanogaster subgroup RepID=Q9VSL2_DROME
acacatatttattgactgaagtgtataaaaaattaatagcatatcttatccacagttatcatcttaatgaatattgcgcaaacggaaaacggaccactcacagacgttgaaatatacttacacttagtttgtggttaaattaatctataaagatatctgtccacttccaattttacttcagaaatacaaagatatttcgatatatctataaattatttaatatgtctacaaaacatttaacagttggttgtgtagagcctccaagaacagagggccttctcaggttctattccatgaaattctgtccttttgcccaacgagctgcattagtcctgaaagcgaaaaacattcctcatgatgttgtatatattaatttattcaaaaaaccagagtggtacagcaaaatcaatgaaaaaacattagtaccagccattcttgatggtgataaaatagttgtagaaagcctggatattgctgattatctagatgaaaagtaccctgaaaacccactctatcctgaagatcctgcagccaagcagcaggttaaggatattattaacaaggcaggtggtccacaaggggtttttataaaaatcgtattaggaaaagaagaacattcagcagaagaatgggctaaattgttgcttgaagctcttcagcctttggaagaagaactttcgcagaggggaacacctttctttggtggagataaacctggaatggctgattacatgatttggccatgggcagagagagcaggatgtataggaattaaattacaacagaaacttcctttgaaagactcagacatcccacttttaaggaaatggagaaaagatatgatgaatgaaccagtttgcaaagagttatatattagtggtgagaggttttggaagatcacaaaagcaaaagtggctggagaggaaccagcttatgatgaaatatgagatagatacttaaatcaatagaagtcatattaattccatgcaaaatttgtcagatgaaatgataaaatataccgttactctgatgttttatatcataagcttccgtaattcacttattgttgcctacaccctgtactaaacctgaagacaataaatattacagctttt

SEQ ID NO: 8270 - DNA, 1114 bp, Diabrotica virgifera
  SmartBlast Evalue=1E-36; Info="CG7139, isoform A n=4 Tax= melanogaster subgroup RepID=Q9XZ11_DROME"
agggaaaagaagaaaaggtagaaaaatcggaagccgcactgccgaaaagtaccagctacagttctgcagtgttgactgaatctagaagtactagttatagcaacggtcttgctactgctgctagcggatattcaacacctcttagttcttcttcaagctgcacctctcttgctacaaagaaatcacgaaaagttttagattttgaacgagctattaacaatatcaataaaggatataaagttttagtcattttaagaggtacaccaggatcagggaaatcgttcttaggcaagaaaattcttgaacatactgtaggttttgataggaactaccagtttcatattatgagctccgacgactatttctgtcagaatcccagaggtaattatgaatatgatgtgcacaaaattgaacaggctcataactggaatcagcaaagaacgtttgagaaagtaagtagaggtttcagtcccattatcattgataacactaatactcagatgtgggaaatgaaaccttatgctaccatggcgacggactttggctatcttatagagatattagaaccagatacccattggtgctttaacgacaaagagctgtcgaaacggaacatccacggagtacccaggcaaaaaattaaagatatgatagaacgatacgaaaaaaatataactgctgaaaagcttataagtgcatataacctagtttatagtttccaaaaaccgcctcaattaagattatatcctcctctatccgttgtggcggcaaaaccggttgaaaattggaccaaaacagaacagttaccaaacggtggtgaacacattgaaaccataaacctcatgaattttgatgacgacgaagaggaaaacaaaaaagagttttacgccgattttaatggtgcagcatcgagctgtgcctggtctacaaactgcaattctaatgaaaaagatatatttgttataagcagcgatgaagaagaaactgagccgtccaaaaatgacaatgatctctacacgcaatggggagtcagcgaacattctttaaaatcttgggacattgttactcctgttagagatatatttaactctaaaacgtatcccctcgcaagctc

SEQ ID NO: 8271 - DNA, 1113 bp, Diabrotica virgifera
  SmartBlast Evalue=2E-35; Info=Prefoldin subunit 2 n=1 Tax= Camponotus floridanus RepID=E2A1G9_9HYME
gaagaggctaaaaaatagaaaataccaaatttgtccaaaaacttaaaatatcagaaaatggccagtaattccaaaaagaaatcagataaaggacccacacctgaggaaatcctaaccggttttcaaaatttgagggccgaacagagggctctatcaggaaaactttcagaatttgagttagacttgaatgaacacaaaatggtaatcgaaacattgaaaaatgtaaatgaagacagaaaatgttttagactgataggtggtatactaacagaaagaaaagtaaaagatgtactaccagtattggtaacgaaccaggagaaacttaaagaatttattgaaaagcttcaagaacaaattaccaagaaaggttcagaaattaatgaatatagggaaaaacacaatattaaatttaggggcttagaacctacaaaacaagacgaacaacctgtagcttcaacaacggaagctagagggaatgttttggtttcttaacaataaagtaattacactttttattgtatatttattttctggactttcttgaagacatattaactctttattaggcctttacaatgtttgtaagatatattaacaagtttttaatgtaaactgttgttatttttggttgaattagaaggcttgttctgttactttcaaatatgaagttttataaattgatatttttcatctaaacaaaataagtaagatgtttgtgtatgcgcagtatttttaccaaaaactgtctttaaattatcaagtaacatactattacattatctattagtggcaaaatcaaaactgtgaaaatacagagtaacctggcaaaaaatgacattttttgtttatttctaatacgtatcttgtatccaaactttatacgctttgtatgtaagtttatacatatagtagacaattcactatttgaaagtaatgaaagtggcaacagctttttgtattctgttaaagcattgtataagaatacctcttcatttaaagatattgttctgatacatctatcagcatcacctttcaagaactatttttgtattttaacagtaaatttgtgttatagtataattgaatcaaatgaatctcttcatagttttctat

SEQ ID NO: 8272 - DNA, 1114 bp, Diabrotica virgifera
  SmartBlast Evalue=3E-50; Info=Glutamate--cysteine ligase regulatory subunit n=1 Tax=Harpegnathos saltator RepID=E2C0U5_ 9HYME
gtaatgaacatatttaatgcttaaatgttgttttgcatgtaattgttatttcaatagctatatattcacaactataaatatataatacattttttatcacaaaagttttaaatttttccgcagaatgattgaaatttttagtaattattgatcaagaaacttcagtagatatcccttggtggtaagaacacccctgcatttcacatgtattaaaaaccttaaggcccattgaagcagcaatggtttgtcaaatatattttggatagactgtgcaggtagaatatcaactgcatcactgtgtgttaacagtttgatatcatgttctttgcaaaacgtctgcaatgacggcggtacaacacaacaagttgctaagttgatttggataatactgggtttgactttagcccactggtataacgatttgaaagtattttcttccacgtcggcaattcctatttgtttaatttgctgtgtttctattaagtcttccaacactttccaagcactctgaattgtatttaaatcatcttttttatcttcggatggtttttgtttaaaagttacgataacgtcgttaatcgccttaactttcaacaatgatagagctttttcaatagcttcagtaagtaatacttgatcatcagtattcaagaaaaccttgaaaccaatttttaaatcagacagttcatgctcacttattttaaggttgtcctgtggtctgcttataacaacttgttgatcaggttgtaactgtaagctaccattattaccaaattccttcaaagtaaagtttatggcttccaccagctcttctgaagtattctgattaggtttttttgtaatatcattaatggataataaatttccagtattgactataatcttgttaagtttagtgaaatcaatattttttgccatagcaagatacacacttttcaaatgaagtaaaagtgagtgaaattggtgaaatacaacaaacaagtaatttaaaatgtataacctaaaaatgacctaaaagaaaaaagtacccaacccagatgttgataaaaatcggaacctttaaaatctggcttactgtaaataatagtccggttaatactatattatatatcta

SEQ ID NO: 8273 - DNA, 1105 bp, Diabrotica virgifera
gattgtcaaaataatacaatgcaaagattagaataaacttagtgttcgtcgaggtaagatgttttattctcccttaactacttaacattgaaaagaacctgaagagctaccgcccttagggtgacggaacataccagatatattagatataataatttctctgcaggataattttttcatattcaaaacttccttccaaagatgaatactctttactaattcttgtggcctctgaaaattcacacaccttcacttaacgatcagctagaactatttcgtggactttcttaaaactttccggtgtaactgcatcggtgagccgtggactaattactatgttccataataatggtttttgtgcaataatgaaatccgtatgccaatcaagttaagaatatgtgcaatgtattctataaatgaaaacagactttgaattaatttagtgtgcaatctaagtaatgttgaattgtgtctgggcgacattgtgaactataccatcgacacttttttctctttgtttttttactacgtctagcaatgaaacggtgatacattgtcgtacattaaataatgtacagttgtcattaagttatttcagataccttaatatattaagcttattacaaagtcatttgtatttgagtgatgtagttaagtttccgtcacaggtagaaagtaaaaaaatgttaatctattgtacatttaattattatacgtgctattccgtatgtttacctcttgaaacttaatgacactactcaaatacaaatgactgtaataggattaagattgatggcaactgtactaaacgtatttcacattaaaattgtacggtatatggcaaccaagacaattattgtgcaatatgttggtgctatatatttctgcacaatgatactgtatggtataggctgtccaataaaacattgtgtggcaacatatggtacaataatgatgcatggtattgtaggttagccaaaaaccagtgagtgtataatatttttgtggaatatattgatacggttgtttactgtttaaatcaatctaagaatgaatattgtaaaacaaaaaacttgtagtattaaaaatatgagtttttgagttt

SEQ ID NO: 8274 - DNA, 1114 bp, Diabrotica virgifera
catacatactttattaatattcgtatacatacatagacacgaatgtaatatgtgaaataacaaaaatatatacaattcagtacccttatataaaaatacataatgaattctaaattttgctctcttataagggaagataccactataaccaattcttgttttctagcttataaaaggcagcagaagtagcactactacatcattatatttgatctttttttatacttgttgatcttgatacgaaaattttaaataattgtaatacccgtagttaaataaaaaaaaagttacgtgcattttaaacgggtaggtaacataaagtacttatattactatcttaagttatgctggctaccaagtttaaatgaatttaagtaagtacattataataatattattgaagaacattataaaaccaaaaatattattgaataacattataaaacaaattaaatttatacatttcttgtaacatatttttaggttatggagtcaataattcataaatattttttgtaaaaataaaagctaaaattcatttcatttaaaattggggtaaaatataaaaataacattcaatactcacatatcctaaactatgaatatgtttatgtaaactacataatatctgtttatttagtaaaaaatccctgagatcttaattgttactaaaaacaggaatatcttttaatttggtgaagtactaaaatctacgtaaaatttggcaataattggaaggggattaatgcgagaaaaatatttaaatataatttgctgattaggtttttaaaactgggctcaatgtctaacttggtgtgttttggtgctttacattaatatataattactaataatatatagtatatagagatacaattcatactctaccacatgagtaagagggtatggcatttcccaataaaaaattaaatacataatctatattttatttccactcgcacggccagtgctatattataagaactggagattatgaatcctgtgcgtaagggaataattccggatgttcctaaaaacagaatatttttttccaataactaaaatcatttatgtaaggtgggcaataagtctactactcacaagctcattcgat

SEQ ID NO: 8275 - DNA, 1112 bp, Diabrotica virgifera
tctttcagttaagtttaagtgatctgacaacgaatttgagaagcgtagctttttgcaaaatattcgcatcgtgtttgtaacgggtattacaataaattaggattactgatgaaggtattcaaaatatctgtttattacaagttttcatgaaaataataaagaaattattatattgtaacgaataaggttatattggatctccctcgtataaccgttccaactagaacgatgttctcgaaatcaccgcggcgcgtgagaggtattccagaatttactcgatggtcgttcagaatattgattaaatagagatgggcggatcttttgagttaattctggaacacctatcacgccgcagtgatttcgagaacatgattcgagttagaacggttatacgggagaggtccaaaataaattattcgttacaatgtcatatctagcaacgctaaaaaaggagtttgtgtgtttaaaccgttcatccggcaatttttttgtttatttttgttgtatgtatattagctttcttttagtatatctggatttgtccaaatctttgtattgtcttcagttttaccatatattcggttaggtttacgctaagtttgtcaaattataatatattttcatcctaagttatatttatgtagcttttcagatcgtgaataatacgtttttgcattcttgttcttttcgcattacagagtttcaatcacatctgtagtttcacgttttatccatactttcttgtcatttgtcattagatttatgtatttgacgttttgtgcgcgtatccctgttgtatagccatggtcctatcaacatatgtatatcataatttacatcgtcagaggtcgctattggcatttattggtgcattattttactaacagttgtcacctggatggtacgcgtcggttcaattcagtccgctcacaaagtcttccctgatgaaaggtaaaccttgaagcacgtgtaggagaatggtgagggacccgaattgaatcgaaacctaaccgtctatttttatttataatttattttttgtttataatttacatccgccaactgtcattgttagtaactaattttgcaaaattaggaaaaagacaatatca

SEQ ID NO: 8276 - DNA, 1113 bp, Diabrotica virgifera
  SmartBlast Evalue=3E-12; Info=Transposable element Tc1 transposase n=1 Tax=Rana catesbeiana RepID=C1C4F2_RANCA
aaacaatgtcgctatcccttttaaaatctgagttgaagaaacttcaccttaatgccgtttgatgtacgtgatatacagtggttgcccaaattattagagacagtaaaatgatttcttacttttttgctctaattgcatttttttagcaagtagttggctttaaggttttcatttagtttttgtagcagagagtgtggtattaaggtcataaaacccattggttttattagtataaccatttatcttttcgcaaaacaaaattttgaaaataaaatcactaattttaatattcagtgatgccacccgttgctgcaatgacagtttctacgcgtcagggcatgatctgaatacaagcttctgtgttattttttaagtttggggtatgatgacattctttaatattgtcttcaatcaactgccgtttcatggtgataccatctttggcagtcgttcgtttaattaactcccatatgctctctatggggttcatgtcaggtgagagtcccggccagcgcagaactgcaatattttctttggtcagaaatgcaattacactcttaggtttgtagcacggtgcagaatcgagcataaaaatatatttttccccaggggactattctttgagctggagcagtagccgagtttcaagtactcgcttaaactggtccttgtcctttccacgatgtataagcgtcccataccctttgccgagattacagaccaaaccatgacactaaccggatgtttaacaatctctacaatgcaatctggatagaactactcccctggacgttgtcggatgaacgtacttttgttcaccttcttctttatgtgccgtcttctaccgaaggttggcgaccatcaaacgataggtttctctgttttgtgccgcatgtattatgttcgccaaaatctgaaatgttggttcatcagagaaaaatgataatattcgtcattcacgaaattgattcgttataaaaagttgaacttgctagtctccagtcttcaacaatcatactccggtgttgtcaaaaaacaatttaaagtagaaaatacaaaaatatgtgtagtgtccctaataatttggtcttcttcttcttaacgtgccctatc

SEQ ID NO: 8277 - DNA, 1110 bp, Diabrotica virgifera
  SmartBlast Evalue=1E-10; Info=Kielin/chordin-like protein n=2 Tax=Xenopus RepID=KCP_XENLA
aattaagaaacgttatttaatttataaattaaagtagtatacagtttattcttgtttgtttgtttctaaacatcggaaatgttttattctaatagtgaatgatgataatattaacgctcaagatgtcgtctataataaaatacacgccattgctctgtctcatttatctgaattttgtttttgctgttgatacctcagaaaatgaaattgatgatggtcatatttatcaaaaacatgccaagtctccagcaagtgcaattcaggatgaagtcgacattcttcagctgctcaatatctcatcaaaggatcaaggcgtttcttcagtagaaggtccgatcagaaattttccggcatataaatttaggctaccatacggaaacgttcttctatccaatgccactaacgtcactctatccatgaacaaccccaaagggtttacagcaatttttctaataagacagcaaaaaaataatttaggaacactcatgtcggtgaattcgcctggaagactaagtccttggtttcaagtaatctcaaactcgagagtaggtgtgctaacagtgaaatacagactgaagggaatgagcaagatcaagcaaattgattggggattgcctaagcatcatcggaaatctcctatggcagcctggacttggctttcaatctcctttgatcccaaggacggcattatccgattagatttggactgcgatcccagcagatttgaaacaataaagcagaaaaagcatttgggtaacttcagtgttccttttgactcacttgtttattttggacaagaaccaggacgaaagaaaaagtttttgggatctatccaggttgcaaaagtcctgccgtacattttggaacagaggctatggtcctgcgtgcagatagccacaaatctttctccagagtttagaaaaccagtatcctaaataattggccattgtcaacaatattaaattcacaatcctaattcatggtgttttctacctttttatttttgtttacacatccactattggatacgtcagatgacatgcacaaatccacccttaccctcgatttataatagatataagctgattttttctaactttttaatgatga

SEQ ID NO: 8278 - DNA, 1110 bp, Diabrotica virgifera
  SmartBlast Evalue=1E-101; Info=Wolframin n=1 Tax=Camponotus floridanus RepID=E2A2Z7_9HYME
agcaggaatgaaattatggttaactcagattgtagaatccactgctcagaaataaaagaatacacaaacaaattcaccagaaggcttacaaaaaactgaccgtaaggcttcatgttgtttctgatatattggtactcggtttcactggaattcaagttaccaccggagtaacaaatgaacaatccagaccacaatcgaaaatcagtgaactctttttggttctgcaacatttgaaacgtcgtacaaaccattactgcaaacgaaatgtaatacaacaacattggtaaaatatacaaaacattatcggaactaaaaaatacgtaaactatcagtaacagcaaaatttgtagttcggatttgactagaggacctaagagcggccaagtcttctgtcctagaaattgaatcaatttgaaatagagtatttttaaaaccaacaaaggatgtagtattgacctatgaacgtaaggaatatggtctaaagcttttaggtccgggttcgacaaacatagtatgcgattcacttccggtaactggccatgtgagtagtcgacagcggctgctagtagatgatcctcggttagtttttcattggtactatcggatctttgtgaccaatctgtttcttcttcagattcgctactaaactcttcatactcattggttaatttacctagtccccaattatcttcgtctatgtcattagtttctgtagattttgagcacgtttccccacgatcaatcgctaacatcttccttttcaattggtaggacgtaatgtattctcctccatttgacaggcttgcaaacatttctctagcagcttttcgggccaatttctcatcctgggtcatattgatacatgattttacatccatgtaattgtgctctgtaatgcctttcccactttgaaggcatgcttttagaagattagttgcttcgatgttgccttgtttggatgctttaattaaccaataaactcccaggcaagcattttcctttttatcaggttcaacttcgcattcttcatccaatagttgtttagctaagacaacttgggactcgggacaaccatctgatgctagctgacttcttaatcttttgagtgaa

SEQ ID NO: 8279 - DNA, 1111 bp, Diabrotica virgifera
  SmartBlast Evalue=1E-136; Info="Protein transport protein sec13, putative n=1 Tax=Pediculus humanus corporis RepID=E0VSJ7_PEDHC"
gacaaataaggcaatttttattaatttaattttaaaattagagtagtaaaatatacattcattaaaacttaatacagaagaaaatgcaaaatataacactttcgaaatctatttaaatagcgaattcattgattattgatttgaccttggcccttggcaatatcactaatgcattgccaactaccttctgagttttgatcccacaaggtaattttattatctccaccagatacagctaaaatatttccattcaaagaccaactaagattccaaactacatcatcaaatgtatgtaagactgttgaattccaattgatgcaatcattgctagtccatataacaactctcctgtcttgagaacagctggcaatggtatatctgtggagtcctactgatggagcccaagctacatctcttacccaatcagagtgtacttcaagtttggactcttcaatccacctgtcaccatcttccctccatatttttactaaattgtcacatcctccagaaacaagacgtttcacaggtgtagtctcatctccaaaaacaggggttatggctggagcccaacttacagcattacatcctattgcatgggcattttgaatcttcttggcatcccaaatattacttccaacattataagttaaaagagaaattgaaccatcgctacttccacaagccagaattaaacctagctcagcaggtgcaaactgaacagagttaacactggaatcatgatttgcatactcataatattttatccattttctttgctgttctttccaaattattactttcctatcataagaacacgaagctaataagttgccaaacttaggatgactccaagctatttgccaaacaggtccatagtggccttttagatcatccagtagtgtggaagctccactttttatatcataaactttgatgctgttatctgaggaacaagtggctaaccttaaaccgtaataatctacttctgcatcatgtatcatatcttcatgaccagtatctattgaatttaatatagaaaccatttttatgttaaatatttaattcttgaaattaacaaaatttaaccccaaacttgacacgtcaaatgatg

SEQ ID NO: 8280 - DNA, 1110 bp, Diabrotica virgifera
  SmartBlast Evalue=2E-57; Info=Isoform I of PDZ and LIM domain protein Zasp n=2 Tax=Drosophila melanogaster RepID=A1ZA47-7
aggtggttcaacgtggataccttcagttatacctactggtcccttatcggctccatctccgtatgttaacagttctggtccagttacaaggacttctttggcagctaacaaaagcgaaaatatcggatctatcggaacaggacataatttgtctgctaagccatttagcccacagctgaatggttctgtaaacggtggaccaaaattagtaaataaacaatataatacacctctaaaactatattcagaggaaagcatagcagagacactttcagcacaaactgaagttttatctacaggagccttaggtgtaaacttcaagaaaaacgaaagaaactacgactcatctaatagtgaagtcctgagagcactaaaagaagcagaaaacgaacccagctatccagatcacgaggccgactcaggtgtagtgaccagtccaaacagcggaattgccggacttagacatgtccaagccccggaaaacagacctcaaccaccacaacctcagctgccacctggacagaacatttgcgcagattgcgaacggttgattgttggtgtatttgttagaataaaggacaaaaatttgcacgttgagtgctttaagtgttccacttgtggctcctctttaaagaacgtagggtattataacattaacaacaaactttactgcgacgttcacgccaagtcagctgcactcaaaaaccagactaatccaaatctagttccaattaccatcccaccaggtggaagagctccagctcacgctatctcgtctgccctttctagccattcttatccaacatcatctccattatctccaaagttaaacacagctggtacccaatatcagacaaattactccggtcccaaaccattctcaagcgtaaatgcgccactctctccccataacactcttccaagagcagccccattatctccagtagctccagcaccatcttttaatagtcattcttatactccttctgcttacagtccttcatcaggacgattctcttctgttaaaccagctggtggtcttttaaaggtgctggaagcggtaaacaatctacaggtgtaagaattgcaccaagacgtggtcgtggtatc

SEQ ID NO: 8281 - DNA, 1110 bp, Diabrotica virgifera
  SmartBlast Evalue=4E-84; Info=Cysteine and histidine-rich domain-containing protein n=5 Tax=melanogaster subgroup RepID= CHRD1_DROME
tgaagactcttgcagacatcatcctggtgaacctgtattccatgatgcatacaaaggatggagctgttgcaataagaaatgtacagattttacggaattttgaacatacaaggttgtacactatccaaacattctaacatcaagccagtagaacctgaaaaaccagtagctaaagatgtagatgtaaatgaagtcattgaggttaagcccatagttcaatcaacaatggaaaggccttcctttaatactcctttagtcacaataaaggcacaagtagcaccatctcttcaacaacaactcaaaatattagaaaccaaacaagaggtaaagacaacaaacttatcaggagaaattgttataggaaccacatgtaaaaatggaggctgtggaacaacatatgaagggccacaaacaaatgacacaacttgtacttatcatccaggagtgccaatatttcacgaaggcttaaagttttggtcctgttgtcaaaagagaacaactgattttgatgcatttttaaatcaagttggctgtgaaactgggactcacatatggagtaaagaagcggcaggtgatgaaactgtacaatgtcggtgggattttcatcaaaccggctcccacgtggttgtctcaatttatgccaaagagtattgtctaaaggagagcatagttaagcttaatccagtaaggatgtatgccaaactggtcttcccacaacagtctaatgcaagttttcttcttgataatgagctaaaagggattattaatgtggaagctagtcaagtaactatgtacggaacaaaagtagaaataaaaatgaagaaagccgaagcgggaagctggagtaaactaggcacacctgtaactgcagaacaggcccaaaaagcagcaaatccagtagggaaaattacgcgtgccgtcgacgctgttgatctagatgatttataactaaagtgtaatctagttttttgtacttttttacatcatgaatgtagacaaccttgtagtgaaaaaaactttatttttgctaactttttcaaggagttgagattttggaatgttattttaatattttatcacagtttttatgttaaaaattcagttttaaag

SEQ ID NO: 8282 - DNA, 1108 bp, Diabrotica virgifera
  SmartBlast Evalue=1E-114; Info="Mitochondrial ribosomal protein, S9, putative n=2 Tax=Aedes aegypti RepID=Q16Q53_AEDAE"
attttaaaaatgttcctaccaaaaataaatcgtattatagatcctttcaagtccttagcaatccaaaagaacattgcagcaactgtaaatggagcccaaacgatgtcaacaactgttgccccaagcgagcagaagaccgaaaagaaacctatcagcaaagcaatgaaggcttacttagaacgagccaaggagcatgacgagtttatgaaaaggcaaaaagaggagtttttaataggtaaaagacatttagctaacatgatgggggaagatcctgaaacattcacccaggaagatgtggacaacgcaatacagtacttatttcctagtggtttgttcgaaccgaaggctagacctcacatgaaacctccagaggaaatatttccacaaagaaaagctgcagagttcgatgagactggtagaccttatcattttctgttctacacaggaaaaccttcatactatcaagtattacatgacttaacgagtcatataaacgatcttattaagtttgaagataccatgattcgaaaaaacctacaaccagatcccaatttaacatttagcatgtctggttttcaatggttagataaacagtctctagagacaaaatttgttgaaacgctaaagaaaaagactacgaatattttattacttcgttggagaggctcagtgctatgccatattcctacaaagttaaagattttattctagaatatgctaatccactcattaataaagttcagtcacaagagactccgaaagccaatatagacaaagacggaagacagttcgtaactatatatgaatgtatgaggaaaagatctcgaggcgacgtcacaattaggttaccaggtacaggaaaaatttctattaatggagaagatattacctactttaaagaagaccaaccgagagaacagttgctgtttcctttgatattcaccagcatgctaaacaaagtggatgttgaatgtaatgttgaaggcagtggtgagtcagcccaggcaggtgctttgagatggggcattgctactggtttaagaagtttcgtagatgaagaaatggttgagaaaatgagactagctggacttctcacgaaggacttcag

SEQ ID NO: 8283 - DNA, 1111 bp, Diabrotica virgifera
  SmartBlast Evalue=1E-148; Info=RING finger protein 121 n=1 Tax= Camponotus floridanus RepID=E2A2F2_9HYME
gttgacttcaaaattaaaggtggaatgatgataacaaattcagcttatttacactagctcaattcagggctaggttaagtttaatttatttgtaatttaatgtagaatataccgttttattgaaagaaattgcaccataaagatggatctacacaaagttgtagagctgggaaaccgaacgttcgaggagcttagtccagaagaaaaattaaggctagaacatcaaagaatacatgaacaacataaaggccatgagaagatgcatgcggaaatggttatagttttaattataacgttagttgttgcccaattgtgcctaattgaatggaagaagcggcattataggagttattctctagtcactttattagccatgtggatcctcccgctagggctttgtttgagaagtcattggtggagattcgtttttatatggcttttattttcatgtataactagtcttattgttagaaaagccattcagaagccaatagataggaccacaccgagattagtatataaatggtttttacttctacataagctaagttacgccctgggcattttaggatattttgtaatgatggcaaccttttttggactgaattttgtgttcaatgcccagcctaatagttggatggactgtgcgttactactcattttttacggactgtattatggcgtactaggtagagatatagccgaaatatgcgcagataaaatggcagcccatattgggtattattcaccccaagggatcagtacaagaaatttggatccttcagtatgtgccgtatgtggtaataaattattagttagcgaagatgaagaaggggtcatagaaaatacgtataaactaagttgtgagcatgtattccacgaattctgcatacgcggatggtgtatagtaggcaagaagcaaacatgcccgtactgcaaagaaaaagtcgatcttaagaaaatgttttccaatccatgggaaaaaccacacgtgctgttcggccagctgttggactggatcagatggctggtcgcatggcaacccgtgatcgtttttctagtccaaggaatcaattgggccttaggcttggagtaggtaggggccgaggcg

SEQ ID NO: 8284 - DNA, 1108 bp, Diabrotica virgifera
  SmartBlast Evalue=3E-14; Info=Endonuclease-reverse transcriptase n=1 Tax=Bombyx mori RepID=D7F170_BOMMO
gtgaaatataaaggtcctaagtgtagcataaatggttgaaaaacgtaaaatgcaaatacttgtttttttatgttttttcgcatttattgcatattttgcaacaagggtgacaatttttaaaattttaactaatcctatattgtaggaaatttaattacgcaacttttatgtcagtgcaacttttctcagaaatgaataattttaaagttataatcaaaaaacgaataaaaaaatcgaatttttccttaattttttgacattttgattatttaaacaatgttccggacctttttgagtgggaggataacttaattattattatatgagttaatttcaagcaatttctgcaaaaaaaatatgagtcacctctcaacgtccatctcaaaacagatgcgccctggactactatagaaggcaatgatcgagctcggcgtacccaagaaactaactgcggtaacacaaatgtgtgtaagttactactttacacaagttagaataggggaaaatatcaaatgctttctgcgtaaattctggactcagacagggagatccgttgtccccattgttgtttaacctggccttagaatatatcatgcgaaaaatttatccaaaaatcaaacaagacataactgctcggggagcaaaaatcatacttgcctttgacgtagaggcagtgggacaatcaacaatggaagttaaggatattttctcgagctttgaagaagctgtattaaacatccatttaaaataaatgaagacaaaacaaaatacatgttcgtcccaaaacaaaaacgacggcgaataaggcaaaacattactataaacgaccataacttcgaagcggtaaaagaatttaaatatctaggaacaactatcacaaatgacaacaaaatagagcaaaaagaaacccgaataatggcaggaaacagatcttctttgcaatgcaacatctaatgaagtcaagacttccttcacgaggtgcaaaaatccagatatataagaccataatacgaccagcagtcgcgtatggaagcgaaacatggacgctatcaaaaagaaagtaaataaattgctggtgtgggaacgtaaaatccttcgaatgatatat

SEQ ID NO: 8285 - DNA, 1109 bp, Diabrotica virgifera
aaaatgtacagtgcactaatttttaactgatatttttaataggaaattatttatttaatacataatttcaatgtcatcatggctgacagaaacgttaatggaatttcaccgaaccctgaaaccctaaaacacaatgctatatacgaggaaaaactacatcaacaatttaatggggtccattcatcacaatcatcaaggagttcatcacctggtacacgcctcggatatgtacccccttctcagctgcctccaagtaggcctatccctcaatctcaacttcctccttcccgatctgcgccgggaaatataactcaacaattcggggcattaaaccttaaccaaaatgctcccagacatagtccacaattcggagctcctgcaactcaacccactagttccagcccctacacaatacctccttttagtcaagtcagtaaggaaagtataaatagtcaatcatctgctatcttaccgccaacttcaaatacttcgagtacagtaacttcgtcgcaaatgtctacacctcttcaacaaggaccattcagtgctcaacctacaagtggttttcagaaacctgatccatttcaagcaattaaaccagcacaaaccaataatactcagccgacttctaatgtaaataatcaaccatcgcaaaatccaatgcaatttaatcagaactctcctaatgtcaggcttcaacctaaccaagtaccagtgcaaaataatatgggcgttccaactaattcaaacatgcctaggataagcccggttccacctcaacagaactttcaacctagtcctaatagatcagcttttggtccaataccaccgcctggaatacagaatccgatagttagtcaaattagtccaaacaggacaggtttagttcagggaccaccgttacaaacacaatacagagctcctaatcaaattcctgggccaccgccacaagctggtgtacttcaagcaaaccagcaaaggtcataccaagcatccccaattcaacaaaataataaccaaagatttaacaatgctattgctacccaaaatatcaataatggtccaactatgaacgcaaattttcctccacaagctgcaccttctaacta

SEQ ID NO: 8286 - DNA, 1110 bp, Diabrotica virgifera
  SmartBlast Evalue=2E-18; Info=210kDa protein (Fragment) n=1 Tax= Sarcophaga peregrina RepID=Q9GV23_SARPE
caggtctccaaccaggtttatcgggtcgttcaaaatcaccttctggtctcaaattatcttctggttttctggcttcgggacgctctccaggttgccatttttcaggtttatatctttcaaattctccctccggtttcaagttatcatctggctttttaggtttcggtctctctgctgggctccattgtggtttggacggtctttcaaaatcaccttctggtcttaaatgatcttgtggttttataatagggaaacgctcccctcttactgcattgtattcatccttaggcttaccaaggaaaggaccttctggatgaagatgatcgttgtaatcgtctggattatgtggacaggtatggcgtccacatgtgcagagttcacagatacattgctcctttaacggtactttaaccactgctggcttggccggttcttttatgattttttcgatgtggatgactttgttgtctgagattcgattaatattcgtaatgttttcgacttcctcgatattttttatgtcgactatatcttctttaatgaatgtcttgttgataacatccgtagtgcttttatcgattacagttttattaattcttttatctgtattttctatgtctttcaaatttactacattcgttcgtttatcgacaatatcaacgttttcgataaatttcgtatcgttttcgacagtggtataatgctccttgatatcctttttatcaatagttgtgtgagactcatttataatataggtttcatctacaacgtttgatgtaaattctacattttcagtcaccgactttgaagttgaacttgttactggatattcttttgtcactatttctgttactgttgtcacagatgttctactaggtgaatcaggtcgagaaggcctagatggtttgcctgccacagggtagtcttctgggtgtttcttttttggagatttgtcttgtggactcttatctttttaccagtttatctggagaggtgcttcttcgaggtgaaactgaaggttttcccgcagctggtagttcttcaggatgtttcattcttggttctttttccttaggtttttctttctgtggtttctcaggagatgtactt

SEQ ID NO: 8287 - DNA, 1109 bp, Diabrotica virgifera
cgacgtattaatataatataacatttatggattaccgtcgagggccgacatgatcaatcaaaaaagaagatgtatttcgtgattattctagtgactttcatgggtgtgaatctgtgtttttagtttactcctcctggttaaaaaataaacaatagttaagtataaaaacattcaagatttgatatttttcaaaatgttcaatacctttgtatattcgctattttaggtgctcactgtctaatggcgttgtgtatacccagtataataacacgattaatgttaatttttgattggcaaaatcattaaaataaaacaagttgttggctggtagttcgaatatattacatcaatggggaatgttacatgcaaggatacagaaaaaagccatttttgcgtactttatagtcaattattatcaaagaagtaaaaagatttatacatttattagtacacacaataaaatttattctcatttctacgcaattcattagagaagcccaaaatttccgaccctctgctaatttttcagatcagtagtactgtacaagactacagaactatctgacatcgccaaggtcagccgatcgaaaactttggctacgcgatattgtcagatcaatcggaattcaaagatttttctgttttttatttgctacctgtttcacaataaaatttctttctatgtatttcttcctgcatacattttaaaacaatgtattctaaataaacaactattcgacgattttatctggcaatgtcgcaaaaccactgatttcgtacacaatgcattttaaattgatgtttactctttgcaccaacgcgttcaactgagttaccttccgatttcagatatttctgtacaactgtaccagataagtgtctgccctcctcaacatgtcgctaaattgccatgtatatactgtcgacatgcacgacggcatttcatgtacataaccatcaaatgcgttgtatgtagcacgcttattgagttttttgtagtgtaactgcaattaatatccacgagtatcgggaaacttactcagtaaactgttagatgtttagcaatttgattgagcttaaacgttaactttttgtaccttagttccttt

SEQ ID NO: 8288 - DNA, 1111 bp, Diabrotica virgifera
tgacaatgacatttgttccatttgttaaacagcattttgttaacaattttaaaaaataattaaattattatttattagtgttggtgaattgttgatatttcaagtttttgaagcataaattaaaatccaaaatgagtgtcatagatgatgaaacaagaatttttcaaaattctatcaggtacttgcacaacatctcaacattaccagaaacaaatgtaccaactttaagatcctttatttgtctcaaaagaagattgatggaactacgcaggagttcctttctcccaacaagtgctacaaaaccaagtatgcattgtcaaaagtgttttttgaattactttgaggggcctgcaacatataatgttatttctaagccaactagatacacctttgaggacaaagtaaaagcaaagcagaagaatggcttacctcttacaagatatcaagaaaagtatctcaaaagaatgaagaagtttactggaaatattttggtcactaaatgtaaattctgtaatcatgaaaaccaaacaaaattggataaaccaaggcgtaaaccaatacccaagatatcactaatatccagtccattaataaagaagaaaaagaagaacaaaagagataaattctgtggattgaatcaaagtattgttgcttcagtttcactaaataacagctatgttattgacaaaacaccagattggtctaaaacttttatcccattaggaaacagtattaacaataatactagcatggcaacaaagaagaaaaataagaacaaaagagacaaattgtatggattgaatcaaagtgtttttgcatcgagttcactaaataacaaccatggtaatcatgtcaaccagagcccaccagatttatccaaaacttttattccattgacaaacagtaataaaaataatactggaaactatatggtagccagcactagaattcaattgaagggtatttctagtaaatatcgcccaaacaaaaagaagaagaaaaattgtaaagaccctaaaacacctgagatcaagaaagagaccaagtctgagaccaagatttctgctcctttgaataatggtcatagtaattcgaaactgaacagattatc

SEQ ID NO: 8289 - DNA, 1111 bp, Diabrotica virgifera
  SmartBlast Evalue=1E-107; Info="Fatty acid desaturase, putative n=1 Tax=Pediculus humanus corporis RepID=E0VE44_PEDHC"
ctccgccatgtgtatcaactcgtccatatcggctttgtctatgtcttcgtcgccgtagccccatacctcgggatgagttccgtcgcctgttttctgggctcttctcaagatcatgtctttggagacgctttttagatcgtacgcccagcccagtcgagcgaagaagttgatgaagtttgttgatgggttgtacaagttgcccagctcaccggtcttgtagtcccatggaaacacgtggtggtaattgtgccatccctcgcctaaggccgctaaggacactgctaggttttctacggaactaatatacttatcatatggtttctggccccacatatgcgcagcactattcacgaagaaggcaatgtttaatgtcaacgtaaatctagtattaaagtttatccaaaatgagttccaaatggtttcgttccaaaaatatataggaatgctcactggtaatataatattgaataataagaacaacggtggatagtatttttttttgccacattacgatggcatctgtttctaaatcactcatatctaccgcatttctcttctccacaaccttaggatgcggcgttactaccaaccagcccacatgcgcgaagaagaaaccttttttggcgttatggggatctgcatcggtctcgctgtacttatgatggaccctatgatctaatgcccaggcgtatacgtgcctctggcctgtaatagtaaataataaaactaaaagtaatctaagcggccatttggctttgtacgatctatgcgaccataatctgtgggccccagcggtgatgccaaaacctgaggtgtacacggttaagagtgcgaataatgttgtataaaatttagctgacactatacacaaatacagtccatataaacatcctaaatgtaagtaaagttgcactatcgtatccggccatcggatctgcggcacaaattcttcttctttttcttctgtttcatctgtttctgccgttttcggctcattattgttggtggcctccttcgggagtctacggtatggtttggtccctaaacttaagtcacttgttattggtgtttcatcacttacgacaccctcatgggttccctctgtcattac

SEQ ID NO: 8290 - DNA, 1098 bp, Diabrotica virgifera
tggaagaggcgtcctgtcgctttttttctaatgccgttttaatgatttaatttaattgaatatttcccgagatattctagttgtttgtaggccaaagattgtttatggttttgaaatattcctgaggccgcctgaatggtccaatttcatttctgtggagtacattagataggcgtgcagtgtctttttgtacaggggtcatagttgttcttatgtatcataattattgtggttattatagcgaccgtaaatttttgattaacaattcaattgttgctaaactgttcattcaatttccatcggcttctggaattataatctatacgaaaagagcttttatattgccaagttatttaattattgataaacaattacttatctaaaattttagttgaaaattaaagattttgttggaaaaaaccggcattttccggggaaaatttagttgaagtaaatcgggaaaaacacgtctctatgcagaatttaattacggtgcattttttatttgggtgtgtttggtgtagcacagtatctgcggactttgcatacctatattattaatacagtcaaacccgcttattggaatagccctggtgcgaagaaaaagtattagtataaccgggacattctaataaccgatcattggtggctagtcaaaacatttcctgacctcaaatttatattccttaaaccggtttattcttataaccggtattctaataagcgggttcgactgtatacaatcataagattcgattccagcaataaaattgctggtaaataacttttcgcaaaaatggcctgttctccgataatctgcccagactatattgaaaacaaaggataataggcaacggtaagacataccgcatgtcagagcctacgtcctgaaacatccacgtcagtagttaaggattaataagggtttttttttaatcatcttacctctttacctctatttttcgctaaagcaaatcgtgccaatattgtcatctacagattttctactattcttttgctagggggcaatttataaacatcctttatattacagtaccgcaaattttggagacttcaaggttgtcgttaggatacttc

SEQ ID NO: 8291 - DNA, 1107 bp, Diabrotica virgifera
taactgaaaagatcgccaagtacagagatctggaaattcaaatacgaaggcaatgagaatgcaaagtacccagacgataccgattattatgtctactactggagtcattccgaagacccccctcgaaagcataaacaagctgggtctaaatgaacacctttataagaccatgcagaaagctgtactactcgcgacggccagatgcgtacgaaaatttctgggagaaactccagcatacgaagtcacctagggctcgataacacggaaagagtcccaccagagctcaatccttttgataccgtaggtatctgggagtgtgagccgtatggctaaatctggataatatgcaaagtagcaactctatttcttcattatttgtgccagttaaagtagctatttctaattgctcttccatattgtgagatcagtattatggattatggtattctttaaatgacaaaataattcaagtcaacattttactcgtttcaatgagcttattttaatttttaatctaggatcttatcataggtaacaaatagaaccttataggtttttctgctatagaaaatatttgtctaatagtatatataaaaatgtcatttgtcaaaataaaagattattttaaaatgttaccaataactctagtatgctgcatttcaaacgttagaatcagtgtggttgtatattgcaagcgggtttgccgtatttcgcccattctgtgaattataaataaatcctccttttgtataccatggcagttaacagcggtaatcctttacaagtacctgcctagcgctacctttcacggccactgccgtgaagagcggcaaagttatcaagaaaattctcatttagtttgcatgaccctatcctttgtacactgcatcgcatgtctgaaatatgctgtagacatgtagtatattgtactttaataaagtatcctgaaataaaagcgtctttcatcttagcagtttcaagtaaatgtaatgcaagtcaactaaagcacaatctattgatataaatttcatgatgatacaagagacgaaacttttattacaattttatattatggcaaatcattatacgttaatttggtaatagatg

SEQ ID NO: 8292 - DNA, 1108 bp, Diabrotica virgifera
gaaattttggaaatctcatttttaaacaaaactgaacattattatgtaataaaaaaaaatgtgcaagttccctattctccatggcaaagacacttatgggcagttgcattatccttatggaaaagttttgttttatttaagccgggtgtgcttttacaaatgcttgcgaccagatttattagaaattgggagtagtatttaccagttatggttttaccttttgcaagatactcaacagcaaaattcattttgtgttccaaaaacaccaacgacttagttcctatactgctatttcttttaagtagtggttcatccatatttcaatattctaccactgctttaaacgactgcggacagttaattgctgcattggatgacttgcaatattaggtacatgaagtctattagcacgtgtacaaacgtgatgaaaagaatcacggaacgcaaataattttagtagtatatgatgtttttaatttgaataaagatgttctcatttgttgtgatgttgatctgcaaatctaatatagggcttttcattgattgtcatttgtttcgaccttctgtcatatgttgtataatctgtgtataatattaatgtgcacggattacacgacatatgacagaggctcgaaacaaatgactgtgaatgaaaagccctataccgggcatttaaagaatatactgttttatgtacattttttgaatgtttattagtcaaaggtttgttcaaaaatttagttaaaagtagattacaccaatttaataagggaaagtaccccggatagtaagtagttgtgtctaatttttgtatgtgtaatatttgattgtatggtataggtcccaaaatatgtcattgtattgctcagtgttttatcgacgaaccgaaagaagatgtgtaccttttactcttagtatataataaaaaataatgagttcggggtattttccttcgaattattttagtcaattcacaagacaagacataattaaattattctttttaagtttgctaaagttaacaacatgctgtaaactaatgaaattattattgtattgtatataaatattattgtattattatattaactatgtataacttacaact

SEQ ID NO: 8293 - DNA, 1109 bp, Diabrotica virgifera
  SmartBlast Evalue=1E-173; Info=Serine/threonine-protein kinase N2 n=1 Tax=Camponotus floridanus RepID=E2AIA9_9HYME
ggcgtcagctgcggcctttctgatgtaaattcttcgtcaaaattgcttacgtcttccattgactccactgtaggtacaaaaggtggcgggattctgcgatgtaacaattcttcccactgaatatgtctaaagaacgcctgtttctttacgtcctctgcatctctctcactcgaacctaacctcctatcaggactctttcggagtaaccttctcataattgcgatggcttctaaagacagaaaccttggataccgcacttcgtcgttcactatcgaatcaaaaacttcctcttcatcatctccagggaaaggcgattcaccaaccaacatctcaaatatgagtactcctaaaccccaccaatcgacggctctagtatacgacgtttctgtcaaaacttctggcgctaaaaactcgggcgttccgcagaatgtgcccgtcctatcgccgaagcccattccttccttgcacaatccaaaatctgctatttttacgtaaccttccgtatccaacaataaattgtctagtttcaagtccctgtagatgattttgttctcatgaagatactgtaaacctaatacaacacatgccgcataaaaaacagctctgggctcgctaaaaacatcagcatgtatgtgcatcatcaaatctcctccagcagcgtactccattacgaagcaaacgtgagcatcggtttgaaaacaagcaaacaaattaaccaagaatggatgtctgatacaattcgccacctcgaatatccttttttctgacagtaaagattcaacttcatctctggatattatgtcgcccttctttaaagctttgattgcgaaatattcgccagtgtttttgtattgcgacagaattactttaccgaagtgacctcgacctaagacgctgattagtctgaagctgtcaatgttaagacctccagattgagaatgtctctttgattcatatgcgctgtctctgtaggtcagctcccgtgctggaggtcgacgaataatattggctacgtcataaacaggagtaacattttcagttgaacttaatacaatattctgtcgactaggcattctagaagattgtttcatccatctaccccatgtcac

SEQ ID NO: 8294 - DNA, 1104 bp, Diabrotica virgifera
  SmartBlast Evalue=2E-45; Info=RAG1-activating protein 1-like protein n=1 Tax=Camponotus floridanus RepID=E2A1M7_9HYME
actagtgatagtacaattactgatataataaaaaataaaatagatacataaattaagtggcctaggactaatcaacacctgacatcatttcactattttcatttaaatattttcaaaatttgaagtgttttcaattattacttatacacattcagttttcattttaatttaaacgtgaagattataaaatttgtccttgtttatatgcttgaataaccagaaccagacaaaactatcattccactagtcgccttcagaatggaagccttatccaatgttttgcagccctataaaaatatagtgggacaaacggcaagtattgttaccattgcccagttcttctctggggcctttatatgcaaggacatttataaaaagaaatctacagctggaattcaggctgtcccttttattgggggtataactattggtatattaatgctaaaactagcacttttgatgaacgatgctgccatgctccaagtcaatgttgctgccattgggttgaatgtactataccttgcattttactactattattctgctgataaatataacgaagtattaaaacctggcagtgtgggagtcgcaattgttgctgttttttatcggatattcacttgttgaagctccagaattactcgaatatagatacagtttggtggtgacaattttaatgctggcgttaattggagctccactgttagatgtaaaagccattattgacaaacgtgatgcttcttccataccgttcccattgacttttatgggaaccattgttacagcactttggttaatatatggcatcattttacaaaatgcatttatgatagttcaaaacgtcatcggtttcctgctgtgcctagtacaattagtattgatattcaagtatcccggaccctcaggtcagactaaaaataaggctaagagcaagaaaaagtccgccaaaagagattaatttttttcctttttagagtaaattgttaaaattatttttttattaacgtttattgtacattccaggtcgccaactgaactttgaaacttaagagattagtgattgttattaatgaaacgataaggcaagttgaaaggtgatagata

SEQ ID NO: 8295 - DNA, 1108 bp, Diabrotica virgifera
  SmartBlast Evalue=0.000000005; Info=CarE (Fragment) n=2 Tax= Spodoptera RepID=E5KG14_SPOLT
tctttattaaaataagtatatacagcgcccaattaattttcagcgttttgaggtataattgtatcactaaattatacttatacttatacttacacttatatttataatttgcgtcattattaaaagaacattttgtacctaaatccaaaatgatcaaagaaagacatagtacaacattttaaaatttaaatttttaattttatctatttaatacgagtaaaatggtggcctcaaatatacgtcaaatatctctctagtctctttatatctctttgggtgtgttttaacttctaaggttttgtctatactcataaactttatgttgttcgatttaactttgggccatatcacatttccgagatcttcgtccttttctggtgttggatttagatgtttaacaaaattactccaaagtttgcaaacaacattcctataaattggttgataatcattgacatatttgtcggtgtcacctttccacatatattgtaactcttcagtgtgttcaacaccaatctggttagtgggtgtatacgcaaattcgaagagatatgcgggagcatactgtgaggtcaaatctgcttgacgaataactccattcgtaaaaaagtattcgctgttaaactcgattaaagtagttcggttttcaagaaatgtggtatttgtatacagctgtttcagtaatgctcctacagtagctctgtcagcttcagccacgttaagttcagggtgtacaagtctgctgggatcaccatcagcatatttagattttgcgtcaaactcttcccatgtgtcaacgctccatggagtacggacagaagatgacggaataaaccacaacagttcttgtgatgtgtatccagctaataaagtagcatggttaaaatctccatccaaaaatgcttgatgttgaggtttggttaagaaaggctcttcaatatattcttcttcaactgatggggcccaaataagatcgggtattatactgactgtttgcgtagctttatcatcaactaatgtagctgacaaatcaacaatatcctttactggaacattctgcagaacttctaatagtcgtgtagtatccttatcatctaaagtactatcc

SEQ ID NO: 8296 - DNA, 1107 bp, Diabrotica virgifera
  SmartBlast Evalue=1E-101; Info=Spastin n=1 Tax=Harpegnathos saltator RepID=E2BI57_9HYME
aggtttgttactgtttggacctccaggcaatggaaaaacgttgctcgctagagcggtagctactgaatgtcaggccacatttttctcaattagtgcagcgagtttgacatcaaagtacgtcggagatggagaaaaaatggtgcgggcgttatttgcgatagctagagaactccagccttccattatttttatagatgaagtagattctttgttatcggaaagatcaaataatgaacatgaagctagtaggagattgaaaacggaatttctggtggagtttgatgggctacctagtaatccagaaagtgaaaaggtgctcgtgatggcagcaacaaacagaccgcaagaattagacgaagccgcccttcgacgctttccgaagagggtttatgtgagcttacccaatttagaaacaagagctaagctgctcaagaaattattggcaaaacagggttgtacgttaacgcaacaagaattaaagaggttggcgacattgactgaaggttactccggtagtgatctgactgctcttgccaaagatgctgccctcggtcccattagagaattacagccggaacaagttaaacaactggatccaaacgctgtcagaagcataacgataaatgactttttggattcgctaaaacgtattagacgtagcgtgtcaccgcaaagccttgtagcttacgagaagtggtcgttacaatatggcgatgtttccatatagagaagtcacattcctattatatatattcacaaacaaaagacagttattttaaaagatttaacgctacatatttgggagttttaacggaaaattataattaacattatttcgtgttgcatcagaatattagttcagttcgaatgctaaattgcaacccgtatcatgactaattcacctagtgtgtgaacctgtaaggtaaatattgttttggtttttgttagaagtggaaacagcttttattataaaaacttactaatgaaacaacaaacttctagtgtaaattgtatgttgaaattttaaaaaaaattatccaataggccgtatcggcctgtcatcgctcgtgggggcatacacttgtaatatatttaatttgacggggc

SEQ ID NO: 8297 - DNA, 1106 bp, Diabrotica virgifera
  SmartBlast Evalue=4E-67; Info=Multiple inositol polyphosphate phosphatase 1 n=1 Tax=Camponotus floridanus RepID=E2AXD1_9HYME
cgttgcttcttattgccaatcactgataattaatacacaagactgatgcgggtttacagttagctcacctcttttgcagaattcggtcagtccccgttaatcttatcgaaatttatagccatacaaaggtataagtgatgcataaattgaaaatgtacagttggttttaaagtgcaaacatgagagctgtgatgtaccactcggtgctcttgttaatttgttttttagttagtttttcaattgagtgcaccaactatgggtaccccttcgagaatcacctagcacagatgactccttataggatagtatctaataagagttttgaccggatagaatatagaggttgtacaccaaaaaagatatggatgatggtaagacatgggactaggaatccaaaatattctgtgattgaacaaatgctggctcgtttgcctgagattagaaaacttctagtggagagtacatctttaccaaatgatcatgtaaaaaatagggacctcgatcttcttcgcaaatggaaactcacattagacgtagacgacaagaataaactaacccacgaaggtgaggaagaaatgctggttttagccgaaagaatgcagagcaggttccctgaattattcgacgaagtctacagtaacacatcatataagtttaagtacactcattcacaaaggacactgaggagcgcctattttttcgcagcaggattatttggaaaagctacggccaaagatgtgtggttcccagcacctttgaggaaggatccaattttaaggttttataaattgtgtgataaatggaatgttgaagtcaaaaagaatcctgctgccttgagagaggtaaccatattcgaaaatggtccagaaatggcgaagttggtgaaagaggttaataagaatttggcactcgaagacaacgaggtaaacaaagatgacgtattgctgatgtaccaaatgtgtgcatttgaaacagcatggaacaaaaagagaaaatcaccttggtgtgccctttttacgggagaaaatttaaaggtactggaataccttagagatttgaaatattactggcaagatggctatggacatgagttatcatataaacaa

SEQ ID NO: 8298 - DNA, 1107 bp, Diabrotica virgifera
  SmartBlast Evalue=3E-24; Info=Glucosyl/glucuronosyl transferase n=1 Tax=Culex quinquefasciatus RepID=B0W9Y5_CULQU
caataagcgaatcagagagctctaagtaagagcggcaaacattccatccggaatcaatatccttgatgatggtgatggagcagaataatattcgacacatttgacagaacaactcctaatttggtatacgctcctgttgttgtctataaaaaacgtaacgtagcgcagttgccgatatcaaatataccttctctcccttcgaattcaaagcacatcagtacataacatgttaactattacatgttcacttcttagacctccgacagtgtataaacctatataaaaaaaagtaatacgataaaatactaaacctacataatgtaaaatcacacagtgagtggactatgtaaccatctttctcgcttacgtactaaccgctgacactactttcggtattctctgcataactgtcgtctaaagtgtcatatttccccacattcctcctcttacaggcatttattgcgtagcgtaaaaggtgcttgataataaaatagaataagaagaacagcatgagttgtactactattaacagaataagaacgtctacaaggcgtctcttgtataaaggcatttggactccgggtgactgaaaatgtcttgctccccgatgtctaaggacatattcgacccagtaaaccgctgtattgattggagatacttgtcgatcggcgaaaaacagacctgctgcttcggcgtatgctttatacagaggatcttctatgatttgcgttagagctttaaccatattttccccatctatatctttcaagctgacctcaataccatatccatcacgaacagttcttgcaatattcgggatttgttcagtgaataacggtactccgacaattggtgttccgaatcggacagcttccattatcctgaataaattgccgtctattacggcacctattatattgttgtgtccaataaaatccccatgaacaacgtctttcacaaatataactttatctgcgtcatactcttttggaggttctgggaaattccatacgaatctttgtttaaagctgccaaatatttccaagattttggccactctgtcgggccccaaataattaaaatgattcaaattgggatctaatgcaa

SEQ ID NO: 8299 - DNA, 1108 bp, Diabrotica virgifera
cttgtcgtatacgtatatgagtaacaactttttaagtgttcaatatctcgttacatcgtattaaattaaaaaggtaaaaatcaaaatgctcaaaaatatgtcaaaacaatcgcacaatacaaaatcgggatctgtacttttaataaaatattacaaaagattcataataatttaaatttaaaacagataatttaaattatttattatcatttacagtgcacatgtgttgatagcatatagtgctctgtataatttagcattttttgtggcaacgtatagtgaattaagtttttacatatatgttgtatattttaatagaaattacctttaaaagtagttatagcaaatcaatcattaggctaaacgttcggtaaccaacgcatttgcagcatcaagacgaatgtatagaaaatggtataagtactgtattgtatagttaaatagtaacatatttttaactagtattttttgtattaagatttatatctggtgttagtttactgtgatcgactactctatttaagaacgtagtttattgtatcggcaaaagataaaaaaatatgcctttttgggatttagcaacattccttgaaggattttgcgtttgttgccagttatttatttttattaatcatactgtgccaaaaactaaaatagttccgaaaatgttagttattatcattaagaaattattaggttttggatttaataggtatgatacatatctaaaaaatattaaaactcatcatgtttattatcaaaaacgaaacactgcataacatcatttttttaaattgttttcaaaatggtttccttgttaaggttatcttattttttttccttcgctcgttcccgatgacggagttgatcaagactatgactccagttgtataagtacccaagttgtagtatgcaaccatgaaatttttagaaattcctttgttttcgtatgttggccattttatttcactgttttgaggatttcacattcgttccttattttgtttaaaaactcgatctagatgaccttatatttaaaatagactaaaatttaatgcaaatctagattgcagtagttcttactcaaaattggaagtaaataccaggg

SEQ ID NO: 8300 - DNA, 1106 bp, Diabrotica virgifera
tatcaatcaggattcgacattttcaatattttagagctgtcgtatatgtagtactgcttttgaatacttcatctgtatgaatatttttcgaatatggagcattgactataacctacaataaaaattgttttgcaaggtcttagatttatttgataaatcatttgctctttaaaattgttcgaaagatattcgcaaactcaatcgactataggtggcagtgcagtggcatgaaaatggccgatgtaattgggataacgtattttgatataattaatatttttattattgtaattaattaatataaataaaagcattcaatcgacgttgatacatacgttatttatagtatcatggatacataggttaacggatgctttgtttaaattttcatcccaattcctctagttccaaataagcggtagcaccctcgcttgagctcgcgaataagatgacgtaatatcatggaaagatgtgtttggtgaatgaatgacggggaactatacaatcatactgaaacgtaggcaaccagttattcgatgcaaaatgtaggcagttttttcgtcttttttgcataacgaattaattaaatactcgtttaggtatcctatatttcttaaccatcactgtctacactgatttgtgattgattgttctatttctcagtcgacttctggtgctagatatgttcaagtcacaaataaaccattttgtggtggtttattgtaaacacttatattgtttgttctatattttgttctttttgactgtgaacaacacagtatctctacaaaatggtcaatttgtactttttgtcatattatttgtagtattttgatttatattaatgtatatatatttaagcattgtattaatataggacaattgttctggaaacacgtatagtttgttgttggcgcaggacagtaccaacagaatgaggtgtttggactcgaatcgattaactaattttttaagataatcccttgttaatccagtaagcggcagatatgaactgataatacatttacgaaagcaccacttcgtactttgtattttcttctgacccattttgtaaataattaaacgaataacatctcctaatctct

SEQ ID NO: 8301 - DNA, 1105 bp, Diabrotica virgifera
  SmartBlast Evalue=1E-53; Info=Angio-associated migratory cell protein n=2 Tax=Salmo salar RepID=C0HBK3_SALSA
atcacatacatatacggccccatcggcagcacaataaatatttaccatcattaccccatttcatcactgtaaccgcacattctatctgagcttgatgtcgtaaagtctgtttaccaagttcccatacacagagatgtccagatattgatcctgatgcaattatccccagagtggaattaaatagtgcaacttctacttccttttcaccgtcaggtaataaaatagaaattgttttaccatcgcttagcttcattaatctagattctggtgcagatatagctaaagttccctcctgattaatatctagattggtcacagactctgcttgattattgctccactcaacactacattctttaatgttccaaagcctaacgtttccatcatcgtacccagcaaggatctgtttaccattaggtaatattacaccacatgttgtagaagaattattttgagcaaccaaaactttacaattaccttgtggtatctgccataaatatatatctcctgaatgacaaccgcaaaataaagcatttgttaacggatgccacttcaaccactccaaatcatctccttcataacaccatgctagtttcttctcttttaaactccatacttgtatcatacccgccatatcaccagtagcgacatattgaccatcaaagttaaaatgaacttcagtaacagaatctttatggcctgaaaattcaaatagtacttcaccagtttcagtgttccagagataagctatatcatcttctccccctgttatggctaacgtatcatctttgctcaaagctgaactaaaaacggcttttttgtgtttttggagagtgagggatgatacatcaattatttgttcctcaatttcttcattattttgatcttgtagactgatatcatctaacatatgttcaacaggttcctcttcgtaaataactccatcatcgtctaatattagttcttcgaagtcgtcctcgtcgaagtcttcgtccataattattactagattttacaacttaatttaataaatgaaagtatgtacaatttaagaagtacatttgtttaaattttattaacacaacctaacctcttttcatgtcac

SEQ ID NO: 8302 - DNA, 1106 bp, Diabrotica virgifera
  SmartBlast Evalue=2E-26; Info=Grain n=1 Tax=Tribolium castaneum RepID=D6WKS0_TRICA
cgcctgtggttttttcgaaggcctaatcggaggtctgtgaaccccattaattttgtggtataacccgcacgcgttacatagataatgcccggtaccgtctctacgccaaaggggtgtaacactagcaccacaattcacgcactctttgactagtacctcttggcttggtggacgtccatcctccatcggactggatgaccatgctgtattcacgtagggacctcctccatatgactgcgtactgtccgcttgggtgaaggatgttgatggtattgctgtattgttgttggtaggatccggtgctcgttgaagcccaattggctgttgtggtgaagtaggtgtcatttggaagaagattcagctgcgattgactgctagatacgtcgtagtttgtcggatatctagctgttgctaaattgggatcgtctttaaacaataaagttgctggaggtgaattttcaacactgcctctgtcaacgtataaattttgatactgatgttgttgtaaatactgtggaccgtcggtataaccgttattgtattgggctgtctgcagacttgtataatcacctccgggttgatctatttccgaagatatcgttataggcacctcattaccttctatattaacagtagctatattactggtgtaaccgatatcctgtgaaaagttttgtcctgagaagctttctgctggcatttctactgtgtactgttttggttccgtaaactgttccctttgatgcgtttccatgcgcagatcttgataagttgttgtctctgttggctcaattttatgttccacaggactttgttcctgtggagttgaattttctgtgttaacaatctcttcggtggtgggttctggcggctgttcttcgtttgtttcgactatggttccagctgtagttataaaatttcttcgtatcacacctccgccagaagtaacggaaatctgaggtggttgagagtctgtgtctgaagtatctatttttggtttaacttcttcaggtgaaggcttctgctcgtccttcgagtccatctcgttatcagtcatacctgccccgcacttaaatcctgattatgtaccttcacacgcgttgaac

SEQ ID NO: 8303 - DNA, 1107 bp, Diabrotica virgifera
  SmartBlast Evalue=9E-96; Info=Glyoxalase domain-containing protein 4 n=1 Tax=Harpegnathos saltator RepID=E2B8A3_9HYME
aaattgacagttccggttgatcattatattaaattaaaaatcataattatttatgagattaaaagtagttagcatatgttgttctttggaaaattgatctactagacgacaggagcagtgatactttcctaactttgtgctaaaacttgtgataaaaatgtcgttgtcaggaagagctctacatttcgttttcaaaatcccgaatagaaaagaatcgatgagattttatttccaagtgctaggaatgaaattgctaagacacgaagagtttgctgaaggctgcgaggctacttgtaatggaccgtacgatggcagatggagcaaaaccatggtcggctacggagaagaagacaaccatttcgttatcgaactaacatacaactacggcatcactaattacaaaaaaggaaacgatttcgagaaaattacaataaagagtaaagaagctttggaaagagcaaaagaacaaaattggcccgttgagaacggtaatatattagttgctccaggaggttatcgatttcaaatagtagatgagccccaaccgtccgatagagatcctatggactctgtcacactcaatgtttcgaatttaaagaaatccattgaatactggaacggcattttaggactgaaaatattcaaaactaacgataagtcagcactccttggttttaaagaaaacgaggcaaaattagagatacaagaaattagtgaagcaattgaccggggagaagcattcggtcgtattgctttttcgattccacatgcagaacaagaacccctctccacgaaaattaatgaaaacaattgcaaagttctaacacctcttacagttctaccaactcctggtaaagcagatgttcgtgttttaattttagctgaccctgacggtcatgaaatttgctttgtcgatgatgaaggatacaggcaactttcccagccagattataggagtgaaagagtacttaatgttcagatgaggaaagataattatgatacatcaagctaatgttgtcataagcagaaatacattcgcaagatatctctatattctatatattttactcaggttaaaacatatttcaatatacactttattatgtt

SEQ ID NO: 8304 - DNA, 1105 bp, Diabrotica virgifera
  SmartBlast Evalue=6E-73; Info=Serpin55 n=1 Tax=Tenebrio molitor RepID=D1MYQ5_TENMO
tctgagacaaagaaagccaggtgaagaatttgtcttaaatgtggcaaatgcaatgttttacaactcagatattgatttaagaactgtatttactagtagcctcaataaaatgtacgatacggatattaccccattggatttttcaaaagacacgactcgaataattaaccaatgggcagcggaccgcaccaacggcttaatcaaatcctttttaacgtctccacctcccaggaatactgcttccatgtttcttaattccatctacttttacgctgattgggaaacaccgttttccgactcattgaatcacatggatacgtttacagtgagtcccacacacaacgtcagcgttctctacatggttggcaaaatggaagacgtaccatacatcgaaacgaaaaattacaagctggtttgtttaccttacaaaaatagagaacttggaatgtatgttttccttcccagtatacatcatgagcacaaatacgatatcaaaaagttctttgccagtttagatccaaaagaggttgtgcactctttattgaatatgaaaaataagtcagtcgatgtaaaaatgccaaagttacatttaactaacacaatcagtttactcaaacccctacaaaagtatgcgacgtacaaaaaaattcaagataacaaaactcacctaaggcaaggaaacatcttagataatttagttaatcaattaaggcagtaccaaaatttcactgatccgaaatacacagatatttatttggataacgccgctcgaggtgttaatctgcaagtgtcggatatttatcaacaaacaatattctccgttaatgagaaaggtacggaagctgcctccgttacagcaggcactaccttttacgagggagggtccaaaagtttgttcttaggtaggccattttcatttttcatcaggcatgaagaaactcaggctgccatttactggggtacgatatccaatcctgataaacattagataaagtattataatttgttttttgtattgtaagaacttttctttgtgaaaagtgactgatacacttgttgcaaggtggtttaatttattatagttatttgtaatattaatattatt

SEQ ID NO: 8305 - DNA, 1105 bp, Diabrotica virgifera
  SmartBlast Evalue=1E-16; Info=Pleckstrin-like proteiny-like domain family B member 2 n=1 Tax=Camponotus floridanus RepID= E2AKJ9_9HYME
acaccttctccaaacttcaatcgaaatccaaattttctgaggagtatttcgtctagtcccgttaatatcgactcgaggaacgatcagaagaaaaatgaagggactgatatgggcattgatgtttgtgttctagaaaaaaggaatacgaggcagagttgaaacgaaatcaggctcaacaagatagaataaaggaacaagagatggaaaaggcagaacaggaaagattggaagaaattctcaacatgtgtgcagaatatgaaaaacaacaatcagataaaaacaaatctattccgaatagaataaaaacgaatggatctctaccacgggacaagaggggacaatacgcacctccttctccaagctacagttctacaccgccctcatctcctctcgatatattacataatgaactcattaaacagtccaaacaccataattttgaagatacacctggttcgacccgcacatattacgaaaatgttgaactgaagacgcctgagcaagagtttcgagttgtagagagaaagagcccgtatgaaaatgtgtacgcccaacaaaatcatcctgggccgtatccaccttctccacggactagaattaaaacgtttattacgactaacaaagaacattccaataagggagcaaacgaggtgatcgataacaaattcgctattttggaaactgaacaaatacttctgagagaagcagaacaaattctacgacagaatctccacaactccaaagagtttccacccgaccatgatattttcgatatcccccctaacaacacgtctggaaaattcgattttccagaagttaacttagataatatagattcgataaaacctaccccaaatttaaaaactgaacgcacacttgaagcaggagttaatgttaaggataatacagaattttcgaaattgaattgtaaagattatgatggagaggacaaaaaaagatttgagcagctaaaacaagagaaaaaggaaattttatcggttatatctagaatcaagcgacaaattgcggaggttgaaatacaagaagaggagctacaacgagagatggatttagagaaggctcttatctcaggggaacataaatc

SEQ ID NO: 8306 - DNA, 1104 bp, Diabrotica virgifera
  SmartBlast Evalue=3E-19; Info=Thyroid transcription factor 1- associated protein 26-like protein n=1 Tax=Harpegnathos saltator RepID=E2BI36_9HYME
ttagcaaaacattaatacgaaatataaaataatcgttgataataccatagtaactatataatagcaactaattattacgtccagcacaaatataaactacgtcatttgttgaatcttttctagcagcatttcaagtctatctttcataatgggctgaccttttttggtttttctggaaagcttcttaaatttaaccgctttttcttttcgatatttcgtcaacgcttcttctttctcttgcttcttctttaaaaattcttcccttttcttttgcttctcctccttgattttttggaattggtcgcgagctctctgaattggattgtattttttctgcggttcccgttttaaagtggactctgcttcttcgggtttagtaacaggaacgttttggttggttgtttgttcactttcgccatctaattcttcatcagaatctttatatctaggatcattatatatcgtactgacatcaacactttcctttggacttttgattttgtaaaaatctcttaaaacagctttctttctattatcttcccactgctgcagtttatacttattgctatatttttttaagacgatacaactttttatcgaaaggtttcttttcgccccctttttgaactgtttcgctagcacttgaatctcctggttgtacgtcagatatgggtgaaggtcctttcctatgtttagactttagaaaaaagctggaattgctactgctagtttcgctaacacttgaatttcctggttgtttgtcagatgtggggaaaggtcctttcctatgtttagactttagaaaaaagttggacttgctactgttacgaaaattttttcgtgaaactcctttcgattggggattcatattgggtttattcgccttatttggatctttgaagctgtttctaggtttacccattttagttcacttctagttgaccttcggtagccaccctctgggttcgataaaggttttcggtggaatcttgagtttttggttaaacaagtgtgtaaaaaacacgtcggtccttcgtcaatcaacaaattttagcactattttgctgcaccctacgaataccatgcctatttccgtgaaaatta

SEQ ID NO: 8307 - DNA, 1102 bp, Diabrotica virgifera
  SmartBlast Evalue=3E-24; Info=Histone RNA hairpin-binding protein n=1 Tax=Camponotus floridanus RepID=E2AP73_9HYME
atatttatttctactatttattttattatgcccacaatacacaacccttatgcctttagttttgtttgttataactgttaagttctataataacacaaacaaaacatattagtgataaaatggtattatatatattttaatttatgtaaattgttcatgctaaaaattattggttaaccaaaaagtttcaaaaagtgagtttagtgatagtgcttgctgtatgtcttctacgacttccttacaggaagaaaagctctagaaactataagtgataaattattcaagaaaaataagttattttcattatgaacgatccccgtttaaaagtcaagagagaactaaaagaggagggcgagctagatgattcttttattgacagcataataagtagtgaacaaagtcatatcaaaaacataaagccagatccagatggtccatgtgacaagattcaaacacattcaaaggggagcacaatagacagtggtattacaataaaacaagaaaaagaagatggattaggtaaacagaagcaagaaaagaggaatcaaaaaatgaaatattaaatacgcctattaaaactgaacagttccgggatgagtcaaacccttcaccttttaacaaagagttgttccagaatttcaccttgcatagccctgcaaccaaggactgggtggaattgatggaagaggaagtgaggcaaaatgacaggaaaagagcagtaaaacgagtgttcactgagccgataaaagaagaaagtagtacctctagttctagttcttcaagtggagaatggaaaactggtagtggcaacagtagtaatgaagaattagaagtactacctcccgcaaagaaaacgaggaatgaactgcgaaccttaaatggaaataaacatccaaggaggcctaaggagtacgagactgatccagctgtgcttgcaagaagacagaaacaaattgattatggaaaaaatactcttggatatgatgaatatttgaagcaggttccaaaagatgaaagacagcctgagcaaccaaaaactccaaacaagtatatcaaatattcaaggcgaggttgggatggattgataaaacaatggcgcttg

SEQ ID NO: 8308 - DNA, 1103 bp, Diabrotica virgifera
  SmartBlast Evalue=2E-71; Info=Chitinase n=1 Tax=Monochamus alternatus RepID=A4PID3_MONAT
aatcatactaaccttttctttaactgatctttcttcttcataagtcagccattgatcctcataatacttgtagtatactttttgtgtatcatcccatacgctggtataattcgcaaagtttgaacagatctgcctatatgttgccgttgatggtttaccagaaccagtaataggagcatgaaaaccatgatcattgggatcggcaagagtgaaggttcgtccatagaaaggtattccgacgttaactttttccttagtggctcctgcttttaaccagttttgaagacccatggctgtattcagatgatttctctcataagcactttcaactggcgaagcaaagagggctgcattatgaccagtgtaaatactccaagggccataaaagttgtagcacattatattgatcatatcaacattttctgttatttttggtacaatataacctgcatcaggataaggatatactgcaacacttagtaggtagttttttgtttccaatgccttcttaaattctttcaagagatgaataaaattttcctcatccttactgtaaggcttttcccagtcaacgtctactccatcaaagccatgtaaacgaaggaagtcaatggtattttgtattaagctttgtcttttatccggatccgcagctacttcagaaaatactgcagcaggtgtatccccaatacttatgagaattttcagtttaggattcatttttttaagcgataccactcgtttatacatttccttcttaatatctacatatttattgtggattaaggttccattttcatttatttttacaaatgcataatttaggtgggtgcataagtttgtgtctattgattcaggtggtgctactttgattccaaaactgcctgtgtaataacatattacgtttcttgtgaagtttgttggtgcacatgatactgcaccaagaacaacgcaaaaaatcacaatgattccgcaccacttcatggttaattaactcaaataacggtaccgtccagcagaggttcgtatttgtatcaaaagttgttggggaactaccactgttttgtttatagttgtatataactaccactatatacctaaat

SEQ ID NO: 8309 - DNA, 1103 bp, Diabrotica virgifera
ttcccagcacccagcaatgagcattatttaaaactttatacaaaataatacaaaacatatgtgcaaaaattattttaaaaacttactaacacaaagcaagatgaattggctaattaatctcagtgcaaggaaaattcaggatgtcccatacaaaacataaaccgaatcaatccaaatgacttgaaaattttgcaattttcgtttttttactattttaaataaaagtacataacttcaagaatactctctgaaaatttcagatttattggagaaaaattaccggaaatagagcgtgttgaatatccctagcttcgattcgcttcgcagcagcttcacatcagcgcgcttgagcgtaggcgtagtgacaaacgttcaacagctgttccccttctcttttgtaaattactacgcgattcaaaaacatattccagtatgcatcacttgacgatttgacagagcaaaaagaaattgaaaataaaagttgtcaaaactttgaacgcgtttttcccaaaactgcaccaaaggcggttgacattgtaactcaaaaactatttggccaatccacttggaattttagacatttcctgaggtaacgctgtcgagatattttttgttttgtgcttatgtttttgtttcacaataataaatatgttgattttcgccgtttttttacgaacaatttcgttattttgacttctgagtgataccaaaaacacaaaaatcgttaaaactaaaaaactcgacgttacctcaaaaaactcataagctaacaaaatctttttattttttattttacatgatccaatgacgagttccaatgtccaccacaaaattcacaattcacattctaccatagtttaaaaaaaaaatcacaaaaatagtgcttaaaatgttgaaacccccatacaaccaatgcaagggttcaggccatacccctccccttaaattaacgtaagttaatttatttggcgtattaaaactttataaaaatctctttttctcttttctccaccagcactccacctgacataatgaatagtggagtcactgaaggtggatatgagctattacctccgatttcgttgaaccaccatcgatttgca

SEQ ID NO: 8310 - DNA, 1099 bp, Diabrotica virgifera
agatgatatatttattaatcgcagacaacttacaagatatagtttctatgatacattcgcttaaaactttgtctgagagatgcaggattaacaataaactttgagaaaactaaactaaacgacacatctcgtaatgagtggaaatataaatattgacaataacaccatacaacaaacagacacttacgaatatctgggacacgagatcaaaataagcagagacgatcaaacacatgaaatacggaggcgaataggcccaacatgggcagcacttagcaaatgggcaaattaagccatataaaaagttcaattctcatgtgccttaagcgaaaggtttataacacaggtatgcgaccaaaaaattgtttaaaatttaataagtgattttcattatgttttcaacactgataccgggaaaaatagtgaaaaaattccatcacgtacagttatttcacaaaatgataataaagagttattaggagaaagtgattttcatactgttttcaacgctgatttcgggaaaaatagtgaaaacattctatcaaatacagttatttcacaaaaataaagagtaattatgagaaagtagcaatattttgtacaatactacgatcctggcacaaccgatccccattccattcttacaatttgagctgaaggatttagtaagagatctaggctttctaaagaatcggcagaagttttaggatctagaataaaaaataaacatatgctggttccggatacatctttctcttggtatcgatgtacggaaagggaatttgtatctttttttctcccaagatgacctggtgttaagcaaactctgctgctcagaccacaaatgtacactgtggtgatttaaaagttatttcaatgctgcttggtcaacaaagtggctatacaaagttcccttgctttctctatgaatgggacagtagagacagaaagcaacactacataaaaaatattgggccctgagagaaagctacaagtaggagttaaaaatgttgagaggaaagctttgtggatcccaaaaaggtcatacttccaccacttcacattaagttagggctgattaaacaatttttcaaggcac

SEQ ID NO: 8311 - DNA, 1092 bp, Diabrotica virgifera
aggaaactaggcaggaaacaggtggattttctttctataggtctacaacgacaggaaaagttatcagctacctgtataattcagtgtcgtgagaaaaaccttatttctctggactacttggtgaaaaccctttaaatggtataaagttgtttaataaagttacatttgtgtataaaataatatgtgatgtatacctgtaagcattactgatgatggattgcatttctgaaaacgttttgtgatgtaacccaaaagggtctttaatttttaactttcaattgtatggaaaaaacatcagtagtgatggaatagcaccacatcggtttaaattgtttttatcctaaatttgattttttttgctaaatgcttcctgactttatatctactttttattcaaaaactttatatttacttttgttaaattttgttattttttatgctctctaagtccttcttttggaatgatgtgcaaataattataaaaaacaataatcgcttcataactcgagtttgagatgctatagcattagatctgaaaaattgtagggaccaattttttaacaaaatatgaatttaaaaggggggcaaaacgataaagaggattttaatttatttggtgaaaatttagggtaaatggcggtaatgggaaaaggttttctatttctaactcatatacttaaaagtttatatctatttgagactgttttgctagtcatacctcgaagatagtatatatcagaacgtgtgcagtggaattaaaagcacactttgtataaaatcagtgacgtagtctgtaagaattaggctgtaaggttatattattttttactttttatatatgttattgtatagggtgatttattgggaaatacttttttacattggttttattttaaagaatctttcgatagatagcaaacacacatgacaacgttaaactggttcaaaaatatgagaaccagttactcaaagtattagtgaaaatctattttgagctatattatctactcaatatttaacttcctatatgtcactatggaacacgacacgccttttatattactttttagagttctcatcacttaagggacc

SEQ ID NO: 8312 - DNA, 1106 bp, Diabrotica virgifera
  SmartBlast Evalue=4E-20; Info=Heterochromatin protein 1beta- like protein n=1 Tax=Bombyx mori RepID=C8KIP4_BOMMO
gaaattaaatctacaacaaatcttatcactaagtaaaattaaaagtcgtctggcgtatgccacgcaattctttcttcataaaatttaatgaccacctgtgggaatttcaaattggcttgtcttgcataaactaaatcagtatcatctgtacccttccatttcatcaagaacatcaattgaccactagtgtcagatgctccaataattttatcagcttctaaacctttgtcaaatgcagacttctctttgtctttaggtttagcaccctttttttccttgttgtcaacttttttgctcttcttcggatcatcttcatcatcagaatcatcagcttttttcttggatttttcatcatcttttttcgcccgactttcagttttcttttttggggcttcatcttcatctgagtcatctgaaacggcagctttacgagatttaggaccactttttctcttctttttctttttttcatcttctgaatcagaatcttttttttttgacttttttgacttctcatcgtcagagtcatcatctaaagcacttttgtctttcttctttgacttttttcctttatcatcatcggaatcagcatcttttgatgacgacttctttttgctctttttgtcatcatctgaatcatctatttttgattttttagagctgggttcactttcagactcgggtgatggagaacggcctttctttttctttttttcttttctttagtggatgaattgtttgaatccacggaagatgtagaattatctcttgttcttttcttttctttgccagcagccttcttacttttacgattcctctcaaactcagaaataagttcaggacaatctagattgtcctcaggttcccaagtgttatcatcttctgaatatcctttccattttagataatattctacttttccatctacaactctcctatcaataattttctctacagaatactcctcttcactttcactctcttctaccttctttttgcccattgtaatgaacttgttataataataaaatgcaccaacaaaccaaacacagcaacaaccgggcaaaacttgagcaaagacgccggaactaaacaaaatgcgtgcg

SEQ ID NO: 8313 - DNA, 1105 bp, Diabrotica virgifera
  SmartBlast Evalue=2E-86; Info=Beta lactamase domain n=2 Tax= Aedes aegypti RepID=Q16V29_AEDAE
cccaaatgaccaataaatcaaaaagtaaattttttactacttaaaatcgtatctcgaaaatcattaggtaaatataaatatcccaccttttcacaatattgacaccagtgcattaggaaattgccaactgtcgcattgtacgtactttagagttagttattgatcaaaatggtgtttaaaaccgggttaagacttttttcaaggataaaccgatcaacaattcgtttcaaccaagcaagaatgatgagcggaagccacagtaacttcattttcagacagttgttcgacaatgtcagcagcacgtacacctatctgttgggcgatgcagttagtaaagagtgcattattatcgacccggttctggagcatgctaaacgagatttccaattgaccaaagatttaaatttgaatttgatttatgcggtcaatactcatatgcatgccgatcacatcaccggatcaggatatctaaaatgtctaacaggatgtaaaagcgtcatttcgagagctagcggagcacaggcggacatattcgttgacgaaggagattttgtacgatttggaaatcataaaattaaagttctgagcactcccggccacaccaacggatgctgctcgttttattgccaggaacaggaaatcgcctttacaggagacgctctcttaatcagaggatgtggcaggaccgacttccaagagggcgacccttccactctataccacagcgtgcataataagatattctctctgccagcaaccacgctactttatccggcgcacgattataaaggcatgacagtaacttctgtggccgaggagaaacagttcaacccccgtttaacgaaaagcttggaggaattcgtccgcatcatgaacaaccttaatttaagctatcctaagcagatcgataaagccgtgccggctaacaaagtttgcggcatgtacgatgtcccggaggatttaaaggatggcctgtgatttgctgaataaacgtaggatttgaataacaaacaatctttatgaaaaatgtttttattcgtattttatgtatatttaccaaatttgttattaaataaactctcttgtgtactattattattatacg

SEQ ID NO: 8314 - DNA, 1105 bp, Diabrotica virgifera
  SmartBlast Evalue=1E-30; Info=Growth inhibition and differentiation-related protein 88-like protein n=1 Tax= Camponotus floridanus RepID=E2AD29_9HYME
ataaaagaaggtactgtttcaattcatagacgatcgaagattgccgtcccatgcatcctgttcatttttcttgactagcctcttcatttctctagcagcttttagatcattcctttctttggcacttatttcactggtaattccactcttggttcctaagtgagttgtaatcagtctcctagcggtttgtagatttgtagctggtcgtttcatagcaggcttcaaatcgttttggtaagctattgaaagtgttgatttgctggctgccaccattggtcgaacttttatcaaaggattctgcacatttatagctctttgggcttgtgtagaagacccaagaactagtatagcatgagtatcatctacccacttaatatacatggcatcactcttaatttcattaaaggcatggatcaaatcgtgcgtttccaaggaagctggaaaatcatatagctccaccatatgttccaattcttcaatcttcacatgttttgaaaaatagtcagagtaatcttccttagctttgacaatagttacattttttcctactttatgtacgatctcttttaaaagatcttcctgtatttgtccttcttcatcaaatagatcttcccagttgtttacatcgttcttctcaattttaagcgtgtcatttgcttcgtcaacatatttaataattggacgggttttcctatttatattctctttggctttcctcataatctccttctcttcctccaaatcatttttcactttaacgttctcagttaaatttatactatttttcaaatagttcatattactgttaggtataacattctttaaattatttttttgtggagggaagacgttttgatggggtacttctgaatttgtttttattacgtgttccttaataatattagttttttcgttttcgggtacataagaaataatattttcgacttctttttcgggttttgaaccaactaattctttctctttttcttcggaaattatgagaaaatcgcttatcatatcttctatagtactaatttcatcacaattgttatcgttaatataaaaaaaatcaccatagcacgcactccatgctcttttcggctcc

SEQ ID NO: 8315 - DNA, 1085 bp, Diabrotica virgifera
ggcgctactccttccctttccatgcatctggctatttttgttgttatcttgccagtatatgtgatagagcagacggtactgggttctttctgtggtggtggatagactaatttcaggggtttcttatggagtttttggtttaaaattttattaactgtttgttcgttatagccattgtttactgtaaaataacaacaaaaactaaccagatacacaaaaaagaaggaacaacaccagcccccagaaccaacaacaactcaagcaaatatattaagaacaacaagagccgaaagagaaaacgaccacagagcggtgtctagaaaccaacctgcggcgaccgtccgaaaacttacatcggtcaaactggcagaacccttgacaaacggatagcagaacacaaaagggccctcaacaatagaaaaacatacacctccacacacgcacctcaccctcagatcataatcactctttcaatgaagagcctcaagctttgcacattcaaaataaaggccctgagccatctttatagaatctatggaaattattaaatcaaaaaacacagatacaattctgaatgaccaactcgagacaaacagcttcccactcctcaaactcttcagttaaagactccaaaaaggcaaacccatagtaaactaaatcacttgagaaaggcactctgccgaaacagctgcagtcacacagctataacaaatcttgtggaagcatagaaaacaaacgctctcagtgctctattgttagataaaatgaacttccatcaagtaacggtcgaatccatgaattctttataaacattcaccataagcagattcttggcgaatactaccgttatcgttggatttctttacaattgctcgatcattcagttttcatcatcagctttgtgttccaatttagatttcttactaacgaacttctagtttccatagcatcattacaacacaccatcaacagcgtcttgcagagtggcataacgtgatgtggttccaggcatagacatataatatctattaaaatgggtgacgattgcgacagagatgaatgagcccattattaggaagtctctt

SEQ ID NO: 8316 - DNA, 1092 bp, Diabrotica virgifera
  SmartBlast Evalue=3E-48; Info=Transposase n=1 Tax=Aedes aegypti RepID=A9X5H4_AEDAE
tactcatcacccaaaccaaaatagcgtgcctaatttacaactgatggtttctcaaattttattttactttactgtttaaattcaaactaaatacatttaaaaaaattcaacaattattttaataattgcgatctgtcccactagtacactagtagtacttctgccagactagcatttacaataaaaataaataataaaaagtcgactgcacattgtacaccgcgacatctttgtgtctatatcgcaatacttttccattatattcgcaaggctctactccttacttcgctactagatggcactctggaacgttctcgtagcctcgttttggctttatataagcggcgatgtgcaatgagacctcagttcgaaacagcacgttgtggcgaatgcagcggtattaagtaatgagtaaatattttgcgacttacgtattcccgtttacgtatttacgtctacgataaattacaaattatggataagtttttaaaaagaagtgcagaaccatctacgtctgaaagtggcagtaataaaaagaaaaacagactttacagtgatgaatatcttaaatatggttttaccattatttccaataaaccacaatgtgttatttgtggagaagtattgtcaaacgaaagcatgaagccatcaaagttacttcgacatttaaatagcaaacatccagataaaaaagacaaacccgtagaattctttgaaagaaagctgaacgtccttcacaaacagcaagatacttttcaattggcaaccactactaacgaaaaagcattattagcaagttataaagttgcttatcgcgttgccaaaactagtaatccgcacacaattgctgaaaatctgattttgccagcagctgttgaaatggtacatataatgattggtgaaaaagagtctgcaaagttaaaaacaatacctctgtcaaataatactatccaaagaagaattagtgatatggcagaagatattcaagcgcaagttgtggaaaatcttaataaatgcacgtacttctctcttcaaatggacgaatccacggatatatctaactgtgcccaatttattacgtttgtaagatat

SEQ ID NO: 8317 - DNA, 1098 bp, Diabrotica virgifera
  SmartBlast Evalue=2E-73; Info=GNBP1 n=1 Tax=Tenebrio molitor RepID=B1B5K2_TENMO
gaaatcggtaggtgataatacaaacaagactgatgttattgttattagttaaacattaaccaacaatcatggtgtttcaaaattggctgtgcattttagtgttaattaatgtggtctatgcgtacgatattccgcaattacaattcgaagcattttcgcctgctggattcaaagtaacgttaccagcggacccgaaagtccttctttttgccttccacgggaaggttaatcaagaaattagggtaatcgaaaatggagacttcttcggtgaaattacgaccccaaccgatggaaatttcgtttacagtaatcccaatttacaactaaagctaggagatgaggtaaattactggacgtatgttcagcacgattttctcggatatagaaacgacaacaggacatggaaagtgacagaacttctgaccaagatatcagacaattgcatagcaagcaaatcgacagtaactggaagagtgagtatatgcactggagccactgtgtttgaggataaatttgatagcgttgggttggacaacaataagtggctagtagaacaatatgttccagatgatccggattatgaatttgtgacataccaaaaagatgataccgtcgttaaagtacagaataataacctggtaattcaaccaaaactattaagtgataaacagattcatgcgagtctattagatttaacaaatggctgtacgcggacagaatctaaaagagcacgatgtaaaagcgtaatgtacttgttacagaatcctgtaatttcgggacgaatagtctctaaaaccttattctcatacgttgatgttgagataagggccaaagtaccttcaggagaatggatgtatccagaaatatatcttgaagacgaaaattacaaccgactggttatagcgtacactcgcggtaataaagtgtttaaaggaaatgatggagcagatattggaggatcactcttatttggaggacctatgttaggatttagtgaacctgctaaaagttcaaaactaagtagtacccgacagactgaaccatttagtgatacgttccatgtttatagactgagatgggcaccagatcggattgatc

SEQ ID NO: 8318 - DNA, 1103 bp, Diabrotica virgifera
  SmartBlast Evalue=5E-61; Info=Luciferin-regenerating enzyme n=2 Tax=Photinus pyralis RepID=Q86DU5_PHOPY
cgagtttacagtcctaaaatggttactaactttgataagtaattaacctctttaccagcttaattaaaagtgcaacaagttcatttattcactaattaattttttattccaaatctacttaatcaccgtgtactagtctttaaaattcatttatttcaaaccacgttatggctcctgtggtggaaaaacttctgtcggggtttctgttgagtgaaggtccgcattgggatgataaaaaacaatgtttatattttgtggatatattaaaaagtaccatcaatagatacgtacccagtactaaagaacatacttgggcaaagcttgatgatcataacgtctccctaataataccggtgaaagatagagaaaaccattttcttgtagctttagacagatctgtctgtttggtaaattgggacggtcaaagcaagcaagtcaccaagattgagagacttgttgaagtagaagaaggtacagaacatgtattgaacgatgggaaatgtgattacactggaagattatggataggcaccatgggagcagctgcgaaagcattacaaaatctgcaagacggacaaggagcattttatagtatatctaataaaacggtccagttacatagagataatgttggttgttcaaatggacttgcatttgactacaagctgaagaaattgtactataatgattcgttaagagggactctagatgaatatgattttgatattgaaagtggaactatatctaacttaaactatgttttgaaaagtttcggtgatgactcatcggataatgaagtgctagttttggatcccgaagagttttctggagtatgtgatggtgtgactattgattctgaaggaaatctctgggttgcgattattggttcatcaaaaatagtgcagataaaaccaggcaaaccggcaactatattgcaatctgtggagcttccaactcctcaaataacctctctagcatttgggggtcctaatctagacgagctctacgttacaagtgcaaattttagctctcaaccaaaaggagaaagtcctggatgtttatttagagtaacaggactaaattgcaaaggagtgcctgctgac

SEQ ID NO: 8319 - DNA, 1100 bp, Diabrotica virgifera
  SmartBlast Evalue=8E-39; Info=major facilitator superfamily domain containing 9 n=2 Tax=Gallus gallus RepID=UPI0000ECD59C
gtcatttaaaacgattcaaaaatgtgaaggacaataattattaactatttatcttatcgtttctacgtttgatcagtatctactttaaatagtgttgcagttacatgattaaataatttaaatgagccctcttttgaagaatagctaccatggggaccaccaagaccatcaatttaatttacatgatttcttttctggatttatttgctgttggattaacatttcctctgtttggtaattacttaagagatctgggggcgtcacataccactgtaggattaatttcttcagcatactctgcaattcaagttttatcaggacctctcataggcagttggagtgatattagagatagaagaactgttttaaaatggactcttttaatgtgtgcagcatgttatggtcttttaggaacaacaaattcaattgtttttatactattattgaggttcgtcttaggtgtcgtcaaacatactcaaagtatctgtaaagctgtaataactgatttggtttctccagaagagcaaaacgacattttcggaaaatccgcttcagttgcttcattaggattcattgttggaccatttgttggaggaaatctatcagagttaaaccatggattcacttatgtgtgcatgcttactggactactgtttattattaactatgtctgtgcctgttatctgccagaaaataccaaagggagtacaccgccaaattcaaccaacaaccccatcggatggcaaaccgtgacatccgaattcaaaaaatctgtaaacgaaatagtatccattgattggaaagttcactgggatacctttctcctaaaatttctcttaggtttgaccataacggtgtacttttcaaatcaagccatatatctacgagaaacattccagatgtcccagaaacacgtcggatacatgatctctttgttcagtacgataggaatgatatctggtttgtgcctgaaaaaagtggatagtttcttaaaaaacgtggacgtctacacaaagatgggtgtatggttcggagttttagccctctgtttcatagcgatgtacctgtcgccgaactttatagtatttatgttttcctgg

SEQ ID NO: 8320 - DNA, 1102 bp, Diabrotica virgifera
ggtgtagaagtagtttagatagatcatgtctgaaatttctgccggaaatttgttttgtgatgactgtgatgaattacttacagtgaaacctataaaagtttactccgatggaaagactaaatgtggaagatgtgataaacaatgtgaaaatgttaaagattcaacagacgatttcaagagggaattcaaattacgtaccaccattatcagtggtactcccatccttttattggatggtcaaagatttagtttaaaatgtgcggtatgcacagaaatattttttggttccgagagtgaatacagagaatgtgtttgggatacgcgtgctgagaaatcataccacctcatttgtaatggttgcgtcaaactttttaaacatgctctccaacctaattgtggaagcttagattacaacatacttaaaagttataagtacgtttgtatgtggggctgcaagaaggttttcccaagtaaggagttattactacatcaatgtgaaaatgaacgacttcgtgaatgtccatgtcccgattgctcatttataggaacattaagaaaaataaagcaacatttttttcattaccatagagacttactattttttacttcaaatattgaaataccacagtgtacttgtgatgtgtactgctatattccaagtgaagatcaatttgttcgacttgaattttcaggagaaattaatcaaaatgggttaaacttaaatatacgacagatgtagaggttagatttgtaatagataaaaatattttactagatataagagtagataagacttttaaattgaaatcagaattatttcctttaaaattaaaaattatttccaaaccactactcgattagtgtaatctatttgattaaattctgttctgaaattagcataatatcaaagttgaacaataattattattttagttgtatcgtgtatccttagaattatccctggaagatcacacctattttttttaacataatccacgtgggtatcaatacccaatgacttttttgtagaaaaaaaataaaaaaagtaaacattttatgttttactagagactgtctaatcactattgaatacacaagaatg

SEQ ID NO: 8321 - DNA, 1102 bp, Diabrotica virgifera
  misc_feature (1090)..(1090): n is a, c, g, or t
  SmartBlast Evalue=0; Info=Dynein heavy chain n=1 Tax=Tribolium castaneum RepID=D6WRL4_TRICA
cgctgtgtatttgttgtgtactttaatttggaatatagataaaccattcatccaggctacaaatctggacagagttgtttttccggcaccagaaactccgatcagtagtaagtgaccttgaggttgtctgaatattctgtcaatccttaaaacatggtccaacacctcatcgaacaacaccaaaggaacatcaagttcttcttcatagaacaccttcagtctggcctttacatattctcttagttgttcccttccaacaggtacataatccttggataaccaattgctgtaaagaatgggtctttccaaagctttctcgcagttagctgatgggaagtgttttaaagctacagcatcaatgttttcgttagtccaacgtctttctgtgtcttcgactaatctgtcttggaagagacggagagcttcatgagcccaaagccttaccaaaccctccacagcaagattatcaagaggccttattgcttcacaaattcctcttacccatctggtcatttctcttggagaataaacataatgtggttgcatatcttgagtaaatctatcttgagatgccaaataaaattccaccatagcattagtcaatggttcggcataacctttcagaccaggcgccaatcttaacatagccctggtgaaagtaccgtagatctgtttcaaagatgtctctccgggataatctacataaatgacgggaacgtgtcgcaagaatcggtgggatagaggctttctgccgggatcagttggaggattacaggcaccgacaaattggatacgttctagtgagacccaggattggtccgaggctctgtaaaaacctttctgttccacgatttgacgcaagaacattataacacgttgtgtgccgtagttgtccatgtctggtaaatttatttcgtcacagaagagaactaaccatttgcccaactgtattggggacaaaactacaccattaggcgtttttctgtattcacagtagtggtcgaatgtcttcagcagcaattcaggagttgtagcagatgaaaagttcaagccaaccacttccatatcaggtaacgcccttaaagcgganaatagagtcatc

SEQ ID NO: 8322 - DNA, 1102 bp, Diabrotica virgifera
  SmartBlast Evalue=7E-88; Info="3-hydroxyisobutyrate dehydrogenase, mitochondrial (Fragment) n=1 Tax=Harpegnathos saltator RepID=E2BKV7_9HYME"
taaatttattaaaacacatgtataacaaacaaatataggtcttatcatcatttactttgtcctttcaaaaattcatagactactgcaaaatctttgtcaccgtaaccattgagaatcagtgctctgtatatttgatgagctaaagcacccaataacagtggagtaccacagcttaatgctgctgcttccgctaaacctaaatccttggctattaaaggtacactgaaacctccctcgtatccttttgaagatggtacatcaggcataactccaggaactggattatatgtgtctgaagaccatgatctaccggtggatacattgactatgtttgttaaaagtttcgggtccaaacctaatttaatacccaaattcattgcttcacaggttccaatcatagttattcctaaaataagattattgcaaagcttggctatctgtcctgctccaatatctccacagggaaatattttagctcccattttgttaagcacgggttcagcttcttttaagtcatttttacatcctcccaccatgaatgttagggttcccttctcagctccagttacacctcccgataccggtgcatcaatatatctaacatcgttttctttagatattttggatagttcttgagccattttgggttctatcgttgagcaatcgatgaaaagagattttttgggaatgccttttaaaataccattatcggctaaaagagtgtctttaacaatatcacctgtggggagcatagtgataactatatttgcatcttttgctgcatccttaggcgaactacaaacttgagcacccttaagattcgcaacactgttaagtgctgcaggtacaatatcgaatacttttacttcttggcctttactggtgaggttcttgaccattctggcacccatttggccgagaccgatgaatgacacattgctggcatttctggtttggaatgttttaacgaaagatcttgcagtcctaagtatcattttgatggaatggaaacctcacacagagcctatgtcgatattatactcacagcaccttcaaaccaaactactaaagtaaaatatttaagcgaatgtatgctatctcc

SEQ ID NO: 8323 - DNA, 1094 bp, Diabrotica virgifera
gaacgtcgttataacattgcgaatgtcgtgttaatgttagatgctttaggatggttctcagtgttgcagaattttttttttatcgtggacctattttcggtcataaggaaaaggtcgcgaaagcaatccaagcttaaaatcagttgccgacgcatttaagctaattaagcagacaacacagtttcttcgtacgcccgatgtaatcgtcgagcacccccctcacagtgaccatgttaacatttggtgtgctgtatccgcacatgtcatattaagctcgtattgtcattgaagcaaacgttggaatgccgacgccatcaaatgttatcaggagcgctacagaggacagattatcatgtcatttctacatgaacttcagcggttttgtcgtgccaggaacctaccacttaataaccaatggtttcagcaggacggggcaacctatcacacgaccagggagtcccttcgaatgctcgcactcaccagacctgacgccacatgacgcctacatatggggaatgctgaagaaagctgtttttcgtacctatccaccgtgtgacgttccggaagatttttcgttccggaagatttttcgtgttattcaacagccttagctcacagacatgattgagaaccttcgttaacagtgcgaaaaaggcttgaaactaaacggacggcatcttgaacatgttttatcgggaacgtcgtcgtgagtaatgtttgcaagcctatatcatgtatactaaatattaatttcagtaccgtttattttgccgtatactgtgtaaaaattaaataattttttccgtaagaagacgttttaaataatttttatttcattaattctttttactatcgtctagatgtttccaaccaatttcggccaacgaaatccttgctacgtaatcttcttgagatgatccgaggtaaagatatttcttaaagatgtaagcttcggatatggcgcgtatttttttatttgtagcatgcaaactgtctaatatacaccatctttggatatacgtagtatggtcactcgagaagattcaaccagttgtgtaagtggagctattcgccaacagtgtatactcccattt

SEQ ID NO: 8324 - DNA, 1101 bp, Diabrotica virgifera
  SmartBlast Evalue=6E-78; Info="Aldose reductase, putative n=1 Tax=Pediculus humanus corporis RepID=E0VMR6_PEDHC"
caaaagtttttttttactttggcaagtaaaacggcgctgaccaattttcgcataattcttgtccttgtttctttttccgccaattgctttaactctcgtatgggtattcagggtgatctttaagggtaggcattaaaagattcatattgaacaaccttcccttttcttctttatctaagccctccaaagctttcaagtcttcagcatcaagagtaaaatctgagaaattgaagttttgcctcaccctctctggttttacactctttggaataacaacgatgtcattttgagttaaatatcttaagagcacatggctcgtaggtctgttgtgtttctctgcgattctggttaccactgggtcagaaagaagactgggaacttctacatctcctccgaaccttttgtacatattatttaatccaggtgatcctagtgagccgtaagatacgacgacgatgttgtgattcttgcaataatctcttagttttttctgctggaagtacacgtgcagttccacttgagtgttggctggttgaattctacaattcttcactattctgtcgatttgttttacactgaagttggagagaccgatggttctggttcttttcgcatccacttgttcttccattttcttccaaacagccagatgatcggtaggtaaagtttccaaaggttttcccggttcaataacttttatgtgtactggaaaatgcaccaaatataaatcaacatagtccagttgaagcttttttaatgattccttcaaagcagactcaaccatatctggatgaatatgagtaaatggaagcttggtagtaatgaaaatatcttccctcttaagtttgccagacgtcagccatttatttagaactttgccgatgacatgttcgttttggtatgcagctgcagtatcgatgtggcggtatctagtttccaaagctgcttcaacggcagcttcaagttcttcttcattggtagcttgccatgttcccagtcccactatggggatttttacacatcctatcattgttagagacatttttgtgtgataatatagttatctggagacgcccactctacaactacaatgaaactgat

SEQ ID NO: 8325 - DNA, 1099 bp, Diabrotica virgifera
  SmartBlast Evalue=1E-71; Info="Cathepsin L-like proteinase"" n= 1 Tax=Diabrotica virgifera virgifera RepID=Q70EX2_DIAVI"
cttattcttaaacaaaatcaaaattacgaatctagtatagcaaatgaattatctaaatatattccgcactgattttttccacgtactaatcgcatgtagccattctctccccagctagttccccacgagttttttagaatccaaaagtccttgtcttcggtgccatatccaactgttaggatcccgtgattaacaccccaatcggtgcattcaccattatcaaaaatccctccaccatacagtttccatcccaaattctcatcagcatttacgacgctggcaatcggacctataagggccacagcttcagctaaagaattttctgactcttcgacagtcccatactgcgctatgggttttacagctttctccgtgatattcttgcagatatcgtccttagcctcgtaaggatattgttcgtctgagctaattccatgttccctcgcatacattaatgcaaaacgattagaccctttggtgcaaccaaagttgaaagccgaacaatctatcaactcctggacactcagagacgtagcagatagattcctttttagaactaactggccttcgatggtgccaaccgcactaaaagcccaaccgcaaccacaagttccttcgtctttaacttctgttacagctttttcatttctccagtccactgatggcggaattttagcctttgactttgaattaaaccctctactaatattttttgtataaagttttgtattaagattactatttaataaagatctaaattcttcgtttgtccagtcagcgtactgtgtagtttttagaaaataagacacttctcccttgttgtatttatcattatgtgcttctattactctaaggctgtcttgaaatactttaaatctcagcttgtcttcaatgtcattatatcttttaaaatgtgtattcttaaaattcttccattccacctcgtccaatgaaagggtgattcccaaaaaaactacaataaatattataattgacttttccatattgaattttaaataaggttaaaacattttacacttaatatctcgacaatggccattggcatgatggtacagttgattttgaaaaatcagatatg

SEQ ID NO: 8326 - DNA, 1094 bp, Diabrotica virgifera
  SmartBlast Evalue=9E-13; Info=Transposable element Tc3 transposase (Fragment) n=1 Tax=Harpegnathos saltator RepID= E2BZF3_9HYME
atgttgaaaatgtgttctttttgttaaatgaagatcagttgaataattattagattgtaaaaatcatgatggatgttctgaaagcgaaaacacagcaaatttaattctattttgtgtgtaaaaattaaaaacatcgtaaaaatgacaaactatgctgcagtgtgatttttgtaatttaaaaatttatcattgtcctgacagttagcttaattttagcgccatctagtggattcttacctgcgttcacaaatgctcatcaaacgatgcgttcaatggggatttctcttgttttaaaacttccaaaaacggagttttgtttgttgtactgtacactgcgcgtcattaaatagaggccacctagaatttttggcatttttaaaacattacaagaaattgattgtcattagatgtttgtgtaatgtttcagaatacgttctaaagcagtatgcaaccatttcttaaataccaaatgtcaaaaaaacacttctcccaaattgatgattttaatggaaaattttaataattaacattgtaaattttttctgttttctttataaaattaccataagtcgtgatttttaatatcctgtataccacctctatcttgaattaaactcctcattcgacttggcattgaattgatcaaattatggatgttgtcttgaggaaaagcttctcattcttccatgagcgccaaccgaagctgctcacgatttattggagcaggtattctgttttttactcttcgtttgagttggtcccaaacatgctcaatcgggttcaaatctgggctttaaaccggccaattcatttttggcatatcgacggtttacagatataagaataaagttttcgcccacaaatccaacaaaaggcattacatgctcgtctagaatttcggtaatgtatcggtgagcattcaacactcctctatcaataaacacgagatcagtacgcctttcgaatgaaataaagtgctgctgctgggcagcgatagcccttagaccaaattctatcaaccttattctcactgtagaagtgcttaatgtcacccatgagcattttgaaacggttttggattactctagcagtaa

SEQ ID NO: 8327 - DNA, 1100 bp, Diabrotica virgifera
caagctttgtcaaacattttcttttgataagtatttaatgcctaaataatcatgttgaaacagaaattatgacgacaaattattctaaaaaattttttagctaaaacatatatttgtaaaaataatagattccgcgagacaatcataattgaacattccacaaggtaaataaatcaaacgataaaaccggcaccttgagtttttttaatcaaacaatcatcaaacaacttgagtttatgtaattttcaatagtaataaatttctatgaaactttaataaaattggagaaaatgaaactactgtaaatcaattcatatgtgcatataaaatctttcaagctaaaggtattttagaacgtaaattttttaaccagatggcagtgttgatttgtttagttactagtgtttcggaagatggtctgaattatgttataagcatacttacaaagcaaagcatattgaaattaactaccaagagtaagtacaaatctgaaacacgaacattcaatatttttatattttttaactgccccacttgatggacaaatctaaggatgtaataaaagagtgttatcaagaaattcctgtagttgattgaacatatttttgaatacagtttctaaatatgtcgtaacgatttttgaccttgaaattaataatggcaatagtactaatgtaatttattatacttaccattttttagatgtattttcaacaactttcaccaagttcaaaacagatgcaaacccaaaaaaagtggatatttaaaatagttgatggttttttcagataaacctcacttcattataaattcaaacggaattaataacaagaaagtaaaaaagtgacgtgtagaagacatggcataaataaagcgagatagacgagaaataatagataaataagtacttataccatgactattgatgtacatattatttagtctcagatttaagcaagcaatactattcaaagaagtcactttcaaaaccactctcaattggagattgattttttttatttagcttaaaggccttgagaacaaataggccattggcatggtacaattgatttcacaactaggtagtgtaatgtgtactg

SEQ ID NO: 8328 - DNA, 1100 bp, Diabrotica virgifera
acataatgttgttccggaagtaaattgagtacatttatgttttattttgttttcttacgagtgtagtactaagtaggtactagataaaacagtagtttctaattttagataagaattgtgtattatatatcatatgtacaaagcttttgaatatgaactatattagatcaaagttgggcctagattaaactatctagctgataaattgttgtttcaggagtatcaatataatggatgctacgtgttatatcaagataatagaatcagtggcggcttttcgaaacagtttcagtatatatattctgtctgatcatttttttaatatttagaggaaactgctcttgtcttcgtcagcgattcatatgcgtgtgtcatcacacaatgaaagtgccaatgaattttaacttgtaaatgtagctatagctccaaaattatggtatttaggtataggtaacattacattacacaaacagaatcagtatttctcaaggacttttgaactaagaaagttcattacatttccagaaaaacggaagatctgacaacaatgtaaataccaacttactatcggccgcatcacaagacccctacacaccaaaaatctataaaaaattgtgcaaaccgtttccaagatcattgaggcgttccatacataaaactcactctgtataaaggactgtaatgctcgtaatattagacaaacagaaaagatgtcgaatttcattacatgagcgttactcctataaaatgagtcattattggactttgtacatttacctgcgaagcacaaaatgatcactattcggacaaatgtgtctccagcagtcccgccctattttatcggcacgaattaatttcaaatgctctaaaattgaattcttaaagcctgggagggaaaaacccgccaaaatggcgtttttaatccgtaaatttaatttttcaggtcccacctactttctttactgattgggaaaggtatgatccttttcatgggcatttttcagtgcgtcacaaatgatagaaaaaaaggtaagtccgtgataatacacatttacaacatttattctaacatgacattttagttaaatgtggcagttgtc

SEQ ID NO: 8329 - DNA, 1098 bp, Diabrotica virgifera
  SmartBlast Evalue=9E-77; Info=Proline synthetase associated protein n=2 Tax=Aedes aegypti RepID=Q17F75_AEDAE
aatcaacagcatttattttcaataaagttctaacatacatccagaaatttcacaaccattctaagaatgcttaggggctctgtacccaaatatcgatgatccaactcgcacatttgtactccccatttcaacagcttgttcataatcagtcgacattcccatagacaattcaatatttttccaatcgagacctaaactctggcagagatcatcacggcattgcttcaaacgtagaaaatcaggattgggcccatcagcaggatcataaccatatttacctatagtcattagtccctttaattctaagttggtacattcttttaaaacgaattgagctacatcagatacttgtgtaggaagaattccacttttttcatcctctccactggtatttacttgaatcattatatttaactttgattcaggtggcccaaattttggccagcttttgtttagtgtggatgctaacttttgagaatctactgtttctacaagatgcaaattgggaagacctagtactttgttaactttattcgattggaggtgacctattaaatgccattttatttctttacatttctctaaaattagtggattgttggctttctcttcaagttcttggacatagttttctccaaaatgtctttggccttcttcataggctgttacaattaagtttgctggttttgttttgcttacagctactaaccttggttctatgacttgtaattcagggcttctcttgttggctgcttcctcaatttttgataaaaccaacttaaggccttgtttcacgtctatttcagtcatcctcttcagcataatatgaaaaacatttaatcactagatagagtacactaatttcacatttgtttaaattgcagatccagtactagtattagcaagaattattaatgttgaaataaggttaggatgcaatgataaacgaaaatataaggtttaaaattatttcttgcggtgaggtaatagcaaatattttgaaattaatgttgataattaaaactgattacatatttttattttaaaataaataaagtctgggaataaaatgggattaaatcagctgttctgtcaata

SEQ ID NO: 8330 - DNA, 1100 bp, Diabrotica virgifera
  SmartBlast Evalue=2E-37; Info=Transmembrane and ubiquitin-like domain-containing protein 2 n=1 Tax=Camponotus floridanus RepID= E2A0G0_9HYME
ggtggattaaataaataattcatgaaggttaaaaatacgtgtattattatttcaagctgttggtaaatcaaaatcaaaatagtaataattattctgaataatgatcgtgtccagttggtattgatgacaagtaaaaagtggcataaggatttttctagaatcataaataaaaaattacatcaggtgatctaaaaacgagatgaccattattgaggggataggcgacgaagttacacatttttttattgcattgtttgttattgtcataggaactgttgcttggtggactactaacatatctgaacaaaggtatattaggactgtagtgttactagaaagaagaagacatagagcccatcggcgattaacaaaccatactgaatctgttactattactgaaggatcaagtagtacctctcagactgaagaaagtacacctgacctttctgctgaaaccgatgcagcattagaacgagctcgagctccaaatggcaataaaccccctgagcctagatcagaagaagatttaatcgctcccgatattcccagtactatattagaagatagtcgaggcgaagaagaagaaagtataattgaaaccatggatgctgatgctaatatcgttaggcaaagaagattagctttttatactggtttttcaaatgaaaatcaagagccaactagttcccacacagaatcgtttagacaaaatactagttcgccacaagactctagtacttcttcagaagatgtagagcctagtgcccctccaacagaagaaagtgtgcctcccaaaaatgaagatactactagtaatagaataacagtgaaattaaaatacataaacgacgatctgaaattagtggaaggaaatttaaatgaatcccttggagaatttaaaaagagaaatttcgtgccagaattatcctccaacaaattgatacggttgatattcaacgggcaggtccttcaaccagacacgcaaaccctgaaaaattgtggactgtttgacaattgtgtcgtccactgtttgatacaccagaagaggtctcaaccgaatcggtctagtggtaccgaaagcagaagggaaggttattctt

SEQ ID NO: 8331 - DNA, 1098 bp, Diabrotica virgifera
tccctctatgttaatatatacctctatgattaaaagtgacatgcgccacttgcatctaactcagcccgtgagtaatgacctgggagtaacttcagcccgtgagtaatgaaatattactcacgggtaaagaaatgggtgctattatctatgaaaaattagcgaataatgagcatgttattaaacggtcgtagaaaaatatttttatcttccattataatggtgttaacgaagagacgacgtgccaatataagcgagaaaccaaatacgatataaacaaagacttacaaaactgttgtgaatttcctaacaaataattatcttgtaaatcctaatcttttacttgccagtttgtgcagttcagtattaacgaggcctttttcactgagtgtcatgccttttttagaagtttgaatttacaaacaccgttctacgttttttccacactttgtattaaatgtttaatcataagacactgtcacttagcggtgttatatgtaatctttgtcaatgccccgtttgataacaatgataatgggattgatagatgaggaattattatctgcttgtgcctaaaattaaagtacgtattttaaaacagatttttattatatacatataaaaaaattatacatatttgccaatttgtgtgattaaagtgtacctaaactacgctgattttccgactatttttgatgccccttcaatgatttgcctcttgtagactttcgtctattgtaagtatgaaccatgaacatctaaatctgacttaattaaaaatactatagacatacattttctgtcgtatttagatttttactgctgtgccttaatttatattggccttatataaccgataattcatttcaatccctttatttgttaataacaaatggtactttaacaacagttaattttatttgcatttgttgcttctatagacatattatttgtaatgtattataacccaaacgattttgtgatacaagatacaaaattgtgtcttgcactatttaaaattaatatgttttatacactatgcgtcagagaaaacgggcgacccacaaagttggccatttttgatgtcttgaatttcctaaa

SEQ ID NO: 8332 - DNA, 1089 bp, Diabrotica virgifera
  SmartBlast Evalue=9E-85; Info=Endonuclease-reverse transcriptase n=1 Tax=Bombyx mori RepID=D7F159_BOMMO
atcttcgtagacttccacaaagccttcgacaccgtggaactagacggtgttacatctgaataacagtactaatagttagtacaaactaatagttagtactaaaagttagtacaaacgttgtaccagaataccacaatgcgtgtaaaactacaagatacaccagagaaatacatatcaatcgaggtgtgagacagggcgacactctctcacctaaattatttatagcggtcctctaatacgcttttaaaatgctaaagtgggaaaatagaggaataaaaatagatgaagaaatgctcaaccatctgcgttttgccgacgatatagtacttattgccaaagatctgggtgaagcacaacaaatgctactagaattagaaaacgtatcttcaacaataggtctaaaaatgaacatcagtaagaccaaatttatgacaaatttagttcccagcgaacacctaaccatccaaaatcaagtggtagaattgacagaaaagtacatatatctcggtcatgaaatcagaataggcaaggacaatcagacctgggaatttcaacgacgaataacacttgcttgggcggcgtatggttcactaagagacatctttaagagcaacatcccgacagctatgaaacggaagacatttgaccaatgcgttcttcctattatgacatacggagcagaaactctcacgctcacaaaaacaacagcactaaaaatgcgagtggcacaaaggcgcatggaaagatcgattctcggcgtgacaaaaaaagacaaaataaggaaccaagacctaaggaaaagaacaggtatcactgatgtcgtcgaacgtatagccaagctgaaatggaattgggcaggtcacatagcgagactgaaagactcaagatggaccagaaaactaattgactggcgcccaagagaagacaaacgcagcagaggacgaccaccaacacgctggatggacgacattaaccgaatatccaagaaatggcaacaagaagcacagaaccgtgaagagtggcgaagaatggagagacctatgtccagcagtggacagaagaggttgcatgatgatgatgacgatgata

SEQ ID NO: 8333 - DNA, 1095 bp, Diabrotica virgifera
gagagcttaaagtacttaaaacggtcgatttcactacttcaggaattcacaccaaagactcttcgtaaaagttattgtccgattttgtggatcgactaaatcctctgttgagtcatttatagttgaagaagaaatgtagttttcgttcatttgttccatgtcttcgtaaatgtcggactcgcaatcggaaggcaggtcatcgctaacagagtcaaatacggcagcgtcataaaactgatagagtggttcatcctcaaagaacgttgtgtcatgagtgccgtatgttacggaagaatcatctttcttggaatcaccactgctgtaactatacatgctctgattgttgtagttactttctgtttcgaagttattattaacactgttatgtatattgttcgtctcgctgttgtttttgttcagtttaaaatttagttcttctataacgctggagaatactctgccctttgtagattctttctcggtacttagctttaaagattttggtcgcggacttggttgccggctatcttcttcaacttcttgtgttggcagtgtaggtagtgttctcgaagaatataatcccacatgactataccatgacttattttcgtcggcttttgaatcagttttggatattaccgaggatctgattgcctttttgctttcttgttctttcaacaatttctcgaggacattgtttttaggtggcaccggaggaggtggcattctcggccttaccattttagacctatttggtttagtaggcgtctctaaaggcgattcgttctttatcaccttttcctcgattatctcattctcgttgacattattgctcggatcattcaaatagaaaatgcttcttctttggttctgagtattgttttgattttcgaaataatttgataaattagttacagatacagctgaaagggagacacttcgtcgtatcctagacaagaaactgtcttgttttgtattatctgttttttctgattttatgctttcatccttggagactttccttaatggctcactgtcatttattatgggtgatggtatatcttcgtctttttatctatgtctatatcttgttga

SEQ ID NO: 8334 - DNA, 1098 bp, Diabrotica virgifera
  SmartBlast Evalue=1E-146; Info=Dolichyl- diphosphooligosaccharide--protein glycosyltransferase subunit STT3A (Fragment) n=1 Tax=Harpegnathos saltator RepID=E2B5Z5_ 9HYME
ttccttgcacctctgttttcctcgtttacaacaattataacatatttgctcactaaagaagttaaaaactctggtgctggtttagtcgcagcagctttcgtatccattgtaccaggatatattagcagatctgtagctggcagttatgataacgaaggaattgccatattctgtatgttgcttacttattatacgtggattaaagctgtcaaaacaggaactatcttttggggggactctcagtgctttggcatacttttatatggtctcctcatggggaggatatgttttcctcattaatttaattcctttgcatgttttgaccttgatggcaactggacgctttggacatcgaatttatattgcttacagtactttatattgtgtaggaacaatcttatccatgcaaatatcctttgttggatttcaacctgttcaaagttcagaacatatgctagcactgggtgtttttggactatgccaaatagttgcttttgtagattacacgcgcagtaaattgtctgcatcggagtttgaaacactctacaccttcctcatctatacagttggtatcctaacagtagtagttggaggtgttttgacagtatcgggaaaaatttcgccatggactggaagattttattctttattagatccctcttatgccaaaaaccatattcctattattgctagtgtttctgagcaccaacctacgtcttggagttcgttttattttgatttgcagatattggtcttcttgtttcctgctgggttatatttttgcttcaaggagttgactgatgccaacatttttatgattttatatgggataaccagtatatattttgcaggtgttatggttcgtttgatgcttgtcctagccccagttatgtgtattttaagcggcatcgccgtgtcacatttactttcaaagttcatgagaaatatcgaaggaacaaaaccagttgaaaataaaaaatataagaaagttgaggcaaactctacttttaagaatgaacatcgtcgatgtttgtcgtcgtcattaccgtcctgttaatatcttacacattccactgcacttgggtcacttctgagctt

SEQ ID NO: 8335 - DNA, 1097 bp, Diabrotica virgifera
tccattgtgttgggcgcataacaagaaagtcaccatgctgcgtgtgtgtgtagtttttcttacttttctagtgttttcgtctattatcaacgctgctccaaagttcaaatcagacataaagagctgctacaaagaatcgtgcccagaggataccttcgcatgtgaaaagactagtaaaatttcaccagaccgaaaacatattttacacgagattcattgtctcggactgaaggatgatatcttaaaaaatataaccagttctgtgccaaattcctttggtccacgcattatctacgcaagttatcaatacagtggtaactatgaaataattcacaccaataccgaatccgaagttacccctagtacagctaagaaaaataaggactttgaagaaatagattttaatcatattggtaaagaaattccaaagacagaaaatcatgggttttcagaagttgatgatctaaatagagaagcggaaattatctattagtatttttttgaataataataaattaatataatatcagatttaaactgtataactttaataacttataaaattttattgtaagttttaagctttaggtaataaataataaaaagtaatgagaagatgtgaaaataaatgagaaagtcggatttttggtacaacggggacgtggacgggacggaacacgttgaaggatcgtccgatatgaaaagcattggctgatttatgttgcgatggaacggggcgaaaccgggaagtgtcaagggcgtgcgatttctgttgttcaacacgccgtgccgtccacgtcccagtgtaacataaataagcctttatgagtattttaaaaggtactccattagtcaataataatatcaaaatttttcttataataactgaattatagatactaatgcacatacatacaaataagatgtgcgttgaacgtaatgtatttattttgctttaaaaaatttcatgaactttggttatttaaaatgatatattttgcagaaatattgtttcaaatttgtccgacttccacaatgtttatgtaataataattaccaaaaaaatcctatttaacctttcataaaattgactaacg

SEQ ID NO: 8336 - DNA, 1091 bp, Diabrotica virgifera
gcgctcatcactgtataaaacaacttgactagaaacaatttttggctagttgctattgttccccattgctatccttggatatattaactccaatgcataaaaatataccccctaattgtatgtacaatgtatatttttttcaaatctgagtattctgctgtcacatgtcaatagctatttatattattttagttataaacatggttttaaaatgcaagactgctttaatcagtagatatacttgggaaggtcttgttttgttgattatgaaaaggcttttgatagggtgtgtataaccagcatataaaaattgtcaagaggaatgggcaggagacatagtcgaataattactgatttgtattagaatcaggtaatgttcgaattgatataaacaataagaaagaattaacgttttaaaaagactgggacagggttgtatactttcggcgttactgttcaatttatcttagtgacatcatggagcactttaacagctgtgagttttaattctatattatgtaatacagttgatccagtgtctaatttgttggacaaagtattaacaactgcaaatgaatacaaatttgtgtaaactaaggaaaatggatacggatcacaagatctacagtcggaaaaatgaaagaacacccatgaacgatcacatcaatcacctattttgtatatgctacctttttctatcacaaacgtttgttatttatagaaaaagacagcaaatacaaaacaagtgattgatatgatcgtccatgtgcattccttcattttccgactgtaagtatgtccaatttatatacataacctcaaataatagggtgaacatacatagtggcggatttattgcattggggggaacttcatgaaacaccaaccaagacataaataataacgtatatgcattaagttcccttaattttactaactagcgaatttattgggttgaatttgcctatctatggtttaagtttcatgtcagctaatatatttttatgtttcaacaatttttttttcttgtcgaggaaggcaaattcccccgtagatccgccactagctgaaccaagatggatgtaaatgac

SEQ ID NO: 8337 - DNA, 1096 bp, Diabrotica virgifera
  SmartBlast Evalue=8E-76; Info=Gag-Pol n=1 Tax=Ipomoea batatas RepID=Q6BCY1_IPOBA
ggctatgacagaagaactgcagtctttcgaggataactcagcatgggaagtggttgatgttcctgaagatggttgtgtagtgaagtgtaagtgggtatacaagaaaaaggttgataactcaggtaaagtgaaatatcgtgcaagactggtagcaaaaggttacactcaaaaatttggtgttgattataatgaaaccttttctccagtcataaggcattctacattaagacttttatttgctttgtcagcaaatttgaatttggatatttttcatcttgatgttgcgacggcttttttaaatggtgatttaaaagaaaaagtttttatgacagtacctgaaggtttagaaattgaaaataataaagtattaaggctaaagaaagccatatatggtttaaaacagtcagctcggtcttggtatgaaaaagttgataatttcttaattaatctaggttataagaaatctgattatgagccatgtctatacacaaagatgaaaaataatctaaaaaccattatctctgtttatgttgatgatttttttattttttctaatgattcagatgaatcagataatttaaagttgaaattaaatgaatgtttcagaattaaagatttgggagaaattaagaattgtttaggtatgagagtaactcataataaagagaatggtgttataactttagatcaaaaatcctatattgaacagttgttaaaaaggttcaatatggaggattcgaaagaggtttctaccccaatggaaattagtttaaatttgaatagagacgataatgcatctgctcaagtgccttatcagaatttaataggtggtcttatgtatttgtcagttttgacaagaccagacatttcatatcctgtaagttatctcagtcaatttaataattatcattcagaaacgcattggaagcatgtaaaacgaatattaaaatatttaaaggctacaaaagactatggtttaactttttcaaaaaatgataattatttgaaaggctatgtagatgccagttgggggagtaattctcatgacagaaaatcttatacgggcttctattttcagttttctggtggacctatt

SEQ ID NO: 8338 - DNA, 1096 bp, Diabrotica virgifera
atacctaacctaaaaaactacgagaaaattatcgcttcatttagggtctgtgatcagtaagggacttccaaattccaagtaaaaaataaaaaaaaaatacatcaaatagcgcgcaaacgacaataaattacttaattcaactaaacaaaaaatatttttctcctatctgacacgcagtctatacaagtctgaacaaaaattatacagttgtaaaaaaatataaaaaacacatgattaaaaaagcttcttatcgtttagagaattgttttgcacaaaacacattacactggtatttatatttttaaaccataactatgatgatacatttagaaaatattatgtccctctcaaaatgccactgtctacaagttcaatcggttaaaaattatcaacaagtgtacatatatgtatttaaaaagaattattgcatgtacgccaaaataaacgttcctaaatttatttacacacaatttgaattgtcaaactaccatcaaaacgccaaaattataactagagcacacatcatatgcactaggggttcccaaccttcaaatcttttatcccaatattaaagttgagactatttctctcctacgagcctatcatctaaatgttcggacaaacgaaaatttataggataatcatcgcttctcatttggtttgggcacttgtcatgcgtcatttaatacattcgtgtgtcacatgacaagtacccgaaacaaatgagaagcgatgaaagctctattgaaaacgttagatcttcacagccttgcgtaatgaattaaagaacaagatcaacaatataataaagacttatcaataataataaaaattgagcttagtttctataaactttgaactgcagtgttggcggcaactaaatgttcgaaactatctagttaccgtgtacaaaataaataattttgacattaactcatcataagtcgtaagtttcttgacagtttgacagtaacaaacctctagcaaaaagctctgataaactacagtgactccctctataacgagaactgaaatggcagactagttacctcgttataagacgatatcgttatatcagacaacaataatattgtgc

SEQ ID NO: 8339 - DNA, 1098 bp, Diabrotica virgifera
  SmartBlast Evalue=6E-66; Info=Putative GTpase n=1 Tax=Glossina morsitans morsitans RepID=D3TRD9_GLOMM
aatggaccatcatctagaagttctagtaagtattccaaatccatcacatcagtatagaagtctaaaccgaagtcaagctttgatgcattcttcttaagaagatctgccttgcttagtacattcacatgaggaaggccaatttgcaacatcgtagatagagatagcaacagagtagaaataaattttggaggatctgagcaatagtgagaatcgaccaaatgcactgcacacaaatgatatcccaatttttctaaacgtccaaaaatttccttgatggcagtatgatgtgtgtacaactcaacttgtccaggcatatcaaaaattaaataactgtctttaattttgcttaatttgctaagaagccagtcaaagttttcttcgaggtattccatacagtacattaaggctccgttaggtcctaatttaagttcggccatgacatcttctacagttactaactgcatgatgtctatcttcggactgtaacccatattttcattagctggatctaaattaacgatttctactttcctgtttaacttttctttgtaaaacgcatacacttttccacagtatgttgtttttcctgagccaggaggtcctataacgacctgcccgtagaaactttcagcttttttaactctttctaaagccatggtttacttgtgatttacaattgattctataataatatctaagctacgtctactatagtcttttaggcttaaacaaactagcaaaggtttttgagtggccagtttttctgtcaaatatctaactgcaacttctgcatgtacattctcagctcccagtatctgcttaatgttgtagaccttttctgatacggttagtccattggctggttgatctaccttgacttggtaaagattccctatcttttcaaattgagtgatgatcaagtgttgatagtttgtaaatgttgttaatgctacgtcggtgtgttgaccattcactataacagcaaaattattgaccttagatggaaaattgttcacagtggaagatacagattccgaatccatttcatgcttgtagaaaaatggaaaaataaacaactaaacaagagccaagtcatac

SEQ ID NO: 8340 - DNA, 1085 bp, Diabrotica virgifera
  SmartBlast Evalue=3E-33; Info=Multiple inositol polyphosphate phosphatase n=2 Tax=Aedes aegypti RepID=Q16ES7_AEDAE
gtaattattattccgtattttaattcacctctagtgactaaacgtttaagtgaatattccactctgtctgaatttacattgggtggtgtcttttcgaaatccataatacaagccgcaagcttggatccaaaggaataacttgtagcagatctcttatcttattagaaccatgatttacctgaaaatatctacggcatgtcttttgctgatgctggtagctgcccaagataactaccccaactataataacccgaataacaataacaacaacaataatccgaactacaataatcagaattataatccacagaacaattatgatcggcaaaacggtttcaacaacccccaaaacaattttaacggcgatccaaactacggcagtaatacaaactacggcagcaatccaaattataataacaataacaacaataacaataacaacaattataataataataatccaaatttttaacaaccaaaaacttcaatggtcaacctacagattcaggagactgctgcgaggaatactgctacgttgatgaccatgaaccttatctgtatttcggaacgaaaacggcatatgacagtttgaatagaagaagtggaaatcagcatgttatacctgattgccaacctgtacagttttggagtattatccgacatggtgctgaactgcctgattctgataccattagggcgttgagaaatatgaacagacttcatgaggatattttacgaaaccacgagcaaagaagaacctatcctgacaagggcagattgtgcaataaagactacgatatattcaaaagatggagattcaatgagtcaataagcgaaagtcgagccaatggcttgtcggagcaaggaagaaatgacatgaagttattggccagaagatacaaaactaagtactctgaaattctacagaataattatgacagccaatcatacagttttcaacactcacctgaaaaccgcgagagttttgaagcttatatatctggacttttttgatgacgatgtcaggaatgttgttcatgcgaacatcttaaacggtgatagattaaccaggcctacacaaaatt

SEQ ID NO: 8341 - DNA, 1097 bp, Diabrotica virgifera
  SmartBlast Evalue=9E-69; Info="Membrane associated ring finger 1,8 n=2 Tax=Aedes aegypti RepID=Q16TQ7_AEDAE"
gttgtagtcgcgaattgcttcattactttaattgtttagtacttatcgtgatataaaaatgtattttgtacttaaaatagccgcgtaccgggtgacactttgaaattatttccttcatctgtatcaaaagtgaataactggccgtacaaaatttgatcatttttatcttaacgaaaatgcctcagcagttcatcaaagtgaaggaaaaccctggaacgataccaaaagcggagtttaacaatcctgtaaagagtcaagactgggattcgaactcgaatctgtccaattctgtaggggatatctgcagaatatgccattgtgaggctgatggggacaatcctctgttgtccccctgttactgttctggaagtttgaaatacgtgcatcaaacctgtctcagacaatggttggctgcttcggatacacggtcttgtgagttgtgcaagtttaactttattctacataccaaaatcaaacctttttctgagtggcgaatattagaaatgacaagcgtcgagagacgaagacttctgtgtgccattctcttccacttcgtagcggctgtctgtgttatttggtccttatttgttttaatagatagagcggctgaagaagtaaggaaaggactgattgcttggcctttttggactaaacttgtggtagtatctgtaggatcgactggaggtgttgtatttatgtatatacaatgtaggcagtatttacatctgttttctagatggaaagcgcacaatcgtataattctcgtacaaaacgccccggaaaagccggctgcaccccccgcttcgccgtactttcagaagaatcttagccaccacgttcctacgcaagtagtcaccgttgcggaatataatcagccatcctcaatcacgaattccaactcacagaacgagatgcagatgtgctacgtgttcgaaaacgaaaaggtaaaatgttgcagtcgaaatagcgcgtcgtccatccaaaaagccgacgtccatgtcgaagatctgtgtgagacgcctcgaaacgaagaaagctcaaacaactcacctgacttatctaggagtaacatactagcgttagcattgagtgccctt

SEQ ID NO: 8342 - DNA, 1094 bp, Diabrotica virgifera
ctgctattcaattggtcgcaattccatgcgttatgtgtctgtatatcgtgcgttccatgggttattttgtttacttcgtaggaccgtgatcgttatgttggaacaaacttgtagtcagtttatcgtcggcgacaaaatatctgctagttttaacatctttaaaatcatcggagttgttactgcgatttctgtttctgtcatgttcagttttctctatgtactcttcagaaaaagtatcagcatgatcttcgcgtaatcagtcagctcctggaattccacgtgtatcagttttttggggtttctcattttttactttgttgcttctttcttcacttcttttacttcttggagatctttcgatctgtttaattctgaagctggttaatttcctgggattgccaactatccctccatcttttaggtggtcttccggggtcttgaaccgggcgggttgttttctagggcaatttttgggagtctattctcatccattcgtcttacatggttgtatcacatcctcttgcgctgccttcccatcttactttgcattgctctctaatgtttgtatttttcaccctgtctcttcttgttttccccactattgttcttagagttttcatttcggcaacgcttaacatctgtttcgtttagttggtgtcttcgcgcacttctatgttatgatcgatcgataataaacgcatcggtggtgacttacatcaagtggtttgagggggataccgcattgggttttaaatgccgttttattacaaatggtgtattactttaagcttagttttgtttcggtatctaggataaatttttcttgttgttccatgaataatgtcagatgttaaaagagatgtcagatttgtctcatactgcttcgtctcaataatgtttcgccggtcttttattaatgtaacataacgatttatttgaagcaattatcgagatagacttaatatagtctgattaggtacataaaccagctctcaatgtggctataggtaatacttaaagaaatttagcttttgagcaatgttaaaattagctttgcttaggaaaattcttataccaaagtgtctacggctttt

SEQ ID NO: 8343 - DNA, 1095 bp, Diabrotica virgifera
  SmartBlast Evalue=1E-93; Info=Cathepsin L-like proteinase (Fragment) n=1 Tax=Diabrotica virgifera virgifera RepID=Q70EX0_ DIAVI
ataaaagtttcttaccgctgacactgaacagttttgtggtaccaagtaaaaaggtatctaaaaatgaaatttttaattttggtagccacattggctataactgcaaacgccctttctaaccacgatcaatgggctcaatttaaggtgaaacattcaaagaattataacacttttagagaggagcaaattcgttttcaagttttcagtagtaaccttctcaaaatcgcagaacacaatgcaagatacgagaagggcgaggaaacttacttcatggctgtcaaccggttcgccgacctaacttccgaggaatatgaagctatgcttggtttacaaatatcatcaatgtctaaaccgaatataacgtccagttttgttgctgatcctgaagagcctgcaccagattctattgactggagggaaaagggagcggtgacgccagtgagaaaccaacactacccccatcaatgcggatcctgctgggctcatagcgcggctgcagctcttgaatctcacaggtttataaatgaaaataaattggaagtattaagcgttcaagagataatggattgttcgcgtgattatggtaatgctggatgtaatggtggatggatggattctgcacttgaatatgtcaaagatcatggaatatgtgcagaatctagttacgaatatacagcacaaaatggtgatacgtgtaagacatgtgaaaaggttattcacacatttaaagaagttgtagaggttgggcctagtgagcagcttataaaagaagctgtgggcaccgttggtcctgtgacagtagctgtagatgcgagtaaatggcaattatatgcaggaggtatctttgacggtaactgtggttatactgtaaatcatggagtgctagtggttggatacgggcaggaaaataacaaagatttttggcttatcaagaactcacatggagccgagtttggagaaaatggatacatcagattagctcgtgggaaagacctatgtaatataacgttcctaattaattatccaaagttttaagttatacgaagctaacttacaaaaatactattgttataaaatttctacaataaacagata

SEQ ID NO: 8344 - DNA, 1098 bp, Diabrotica virgifera
  SmartBlast Evalue=1E-61; Info=Reverse transcriptase (Fragment) n=1 Tax=Aedes albopictus RepID=Q6XMP6_AEDAL
aacagatagaaactgttacgctgactatgggagaacatgaaattacatcacaaccattcattcgttacttgggtgtgatgattgataccaaactaagtttcaagcagcaggtagaacatgtgagtgctaaagcgtcagtagtcagaacaaccttgtcacggctaatgccgaatataggtggcccaaaacaaaacagaagaatgttactgtcgtcagtaataacatcagtattaacctatggaatatccatttgggctgacgccctcggaactcaaaaatcacggaggaagattgcatcagtgtatcgcttaagcgcattgagagttgccagcgcattccgcacagtatcagatgatgcaatacacgtcatagccggaatgttacccattggaatattagctgaagaaaggaagaccctttatcgacaaagagatgagagagatgagagaggtgaacatagaagaacagaacgccaaaacagcattagacgatggcaaatacagtgggattccacaacaaaaggcagatggacacatcgtcttataccacagctaaatctctggctgaatcgcaaacatggtgaggtcaattactatttgacgcagatgctctcagggcatggctgctttcgagcatacttataccgctttaaacatgacgactctccagagtgcccatcctgtctcggaataagtgaagacgtggaacacgtgttcttcgtgtgtcctcgtttcaacttgctgcgaaattatcatcaaccaacaaataagaccagagactttagtaggaacgatgcttttatcgacagcagcttgggatgccataagcacctttgcgatgcaagtgctccaggaacttcgtcgaattgaaagaacacgagcagaaaatagagacgattagaagaaaactttgacaccatgaagaaagattaataaaaaaaaaaatctagaccctccccccgcgcagtaatacctcacggtaggtccgcgggggaaacagaggcagaagaaaggggacgggttttagtcggtattgtaactcacgagtccgacataccaggctggtcacctagtcctgatgatacgtaaatgtatttcc

SEQ ID NO: 8345 - DNA, 1093 bp, Diabrotica virgifera
  misc_feature (16)..(16): n is a, c, g, or t
  SmartBlast Evalue=1E-135; Info=Rhophilin-2 n=1 Tax=Camponotus floridanus RepID=E2AKP7_9HYME
ccgtaatgccgatganccccttaggccttaaagaaacaaaagaaaatcgacttccgagaccctttcaaagatttcatcttagaacattacagcgaagacgccaaccactacgaagatgccatctccgacttcatggacaccaggcaagccatccgaactcccctccgagattcctccgggatcgccttactctttaggtactacaaccaactgtacttcgtagaaagaagattctttccgcccgataggtccctaggaatatacttcgagtggttcgactctttaactggtgtgccatcgtgtcagagaacggttgctttcgaaaaggcgtgcgttctgttcaatatgggagctgtatatacacaaatcggggccaagcaggataggtcgacagccaagggtctggatgcggctgtggatagttttctaagagcagctggtacgtttagatatataaacgagaactttaccaacgctccatcgatggatctgggtccaacaatgttagaaatgtttgtacagttaatgttgtgccaagctagagaatgtcttctagaaaagctccaactacagtccaaggacaacaggtctatcgacatttgtttagatttatcccaagaagccgctcatcttgcggtatgttataacgacgtgagtcaactaataaatcacgataccgtcagagacttcgttccctacagttggtcctccctcgtccaagtcaaaagggaatactacacgggcatggcacacaacttggtcgcaaatggggtgttacataaagacgctgcgaagatgtccgataacacgaaagacacgcttctgtatatgcatgttgagatagatggattagcgcagctggatataaagatgccaaaagatgcttcagaaaggagattattagggagggctcatctaagggaagcactaatgttgtatgaagaagctcaacgacaacaccggatgtgtagagaattgaaaggaaagcaagcccttacatcggtgttgagaacagcgcataaaattgcgttaaatgcgtacacgggaacagagactgaagatgactttagtgacctgctcgatccacctcaaa

SEQ ID NO: 8346 - DNA, 1092 bp, Diabrotica virgifera
  SmartBlast Evalue=1E-112; Info=VPRBP-like protein n=1 Tax= Camponotus floridanus RepID=E2A804_9HYME
caagtgtaccgccaaccctacttattggcgcacagacgcagtttcctataaccctcaatgcagctttttgaacatcggcatccgcaacaatctcaccttctgcagcgcccaatatgatgttaatacccacagttaaagtttcttctggcaagtccaccctgtcacagaacaacaactgaactttgggcatcacgcaagaaatcgccaaaacatccaaagcactcctgaccgtctccgctcgtccgctatagttccactcataggcgaacgctataattttcaaaagtaacgtgatgccaccgagtttgagcagctgatcgacagggtgccagtggcttctgtacggcattatttgaaacagcatgtcgatttgttgttggatttcttcaggggatgatttacatgccttaaatgatggttgaagcattgttgccagtctttcgttaggcctcaactgcgatcgtctgatcgactccactttttggtataaatgaacttctagataccttcggtaagccacgcaaacgtgccttacgatttgtcgataagatatttcaacttcttcattcaataatgctctatcggaatctggatgtaaaattggcaacgttgcgatcacgttgtgcagtttcctcagcccatcctgcagatcgaactcatccacgataactttgaattggaacgtcaaaccaaagaacatgatcgactggcaccttccagagtcatgagcacattctaacaaccacagagcgtacttgactaagtggctaatgacgtgttttggcaacaaacagaccctttccatggcctcttcgcagtaacccaagtagtaaaacacatggatacgccagtggctgctatggaggggcggggaatgttttctagcactatctctagtcctttacactggataaattctatggaaaacttcttgtggcagagtaaggctgaaagatacttcaaggcttcaaatgctagtcgcgcttctttggtaactctgacatttatgtaacataatattaattctaaagcgtcgtgttcgaagacgtgactaaggaattcttgttggtctcctatgatgtcagatatctc

SEQ ID NO: 8347 - DNA, 1096 bp, Diabrotica virgifera
  SmartBlast Evalue=1E-100; Info=KDEL endoplasmic reticulum protein retention receptor 2a n=1 Tax=Bombyx mori RepID=Q2F604_ BOMMO
gtttaaacatttttattgtgttactttctgtcccgaaatatgctttggtggcgagttttttcttggaaaaaaattctaaaaacaatcacaaaacacgaaagtacgattaacccattgggcccagaattcctctagggtaaaacaaccccgaaaaaagtaattacaaatacttaaaagtaaagacaaaaatatatattttctggttattatgaacgaaatttgtacaaaaactatttaattctaatcctatataattgaaatttctgacgaaatggtaaacgtttatacaaaaaataaaatgtggatattgattgctatccaaacacatgatcattaggcatcattgtgttaataccgtttagctgaaagtaaaatgtttgtacagttaagtcttatataagaggggtttaagcgggcaattgtagtttctttcccttgagtactttagtaatgtaaagataaaagaagtcacaatataatatagtctgcacaacaccagctactatagcgatgagatcgtaatgagtttcagttgcatagcggtagatccagttcaaaatgtatagggccctataagatcccaatgcgaataagtagtgcgaagtaatactttctgcttctcctgttttactgaccatgaacaattgcggcaatatagccactgattccaaataaatactgaaagtccacaagacctccataaatgaaaactcgtgattgataagcatagccaaaccaaacgatggtaaaatgagaaactctattctgaacgtgtcatggttatggtcataagtggctttaaatttcatgtagattaaataaatagttgcatacgatgtggccaaaaatacaaatttcataacagtattgtacatagatacatatgacgtcactaagtcaaggtatcttgtagtatagactatagcaaagaggatctgactttttcctgatatacctgcacatgatctcgtatgccaaatcttttgcagaagaataattatagccactaaatgggataaatctcctgtaagtctgaaaatattcattttgggacaatattattttggaattctgacttcttttaagtgacgtggct

SEQ ID NO: 8348 - DNA, 1096 bp, Diabrotica virgifera
  SmartBlast Evalue=2E-24; Info="CG8927, isoform A n=5 Tax= melanogaster subgroup RepID=Q9VEY0_DROME"
attgtgttggggttactgaatttaagcacgtttttcgatcagtgagagtgaagatgtggtctggttttatttgtgttttatttgtgacagttataagcttatcaaatgcccaatttccaccgaggttacaaatccccggagctcttccagttttagacaattcccgctcctttcaaattagacaacaaaggctcaacgctcaagacttcgttccaaaaccacgaagacctaatcctataccagctcgggaaatacgaccagttatagaagaagaacaggataattatccttcggcacaaccacaaccacaatcgtcattatctagttttgatgcggaagttaacaaattaagtattcctgcattggcttctgctgtaagacaaagtgatttggatgagcccaatttaagaccatcaccactacccttcagaccagaaaaaccaatacccatacttagagaccagatcagggaaaaaccacaaccttctctaagaccagttgctcaaagtaggccagcacctcgaccgattcggcctgtagtcagacaagaaatagatattgatgatgaggaaaatattcccaggcaacctgtcaggcagcaaaagcccagacctcaaccaacaccacaacagtacagacctgctccagctctcagaccagcgccacgtcctcaatacgatgacgacgaacaaaataggagaaagaaacctgttgttcaaattttgagaaaatacagaacggataatcctgatggaagtatcacttggggctttgaaaacgaagacggtacatttaaggaagaaacgttgggtattgactgtgttattaaaggaaaatatggatatgtcgatcctgaaggagttaaaagggagtttgagtatgaagctggcaacaaatgtgacccaagagatgcagaactagacgaactagaagatgaagatttaccccagcaagctccaaaacctttgcccaaaaaaccaattggtaaacctcaattccaatataggccgcaactagcaccaaattaagttattaaggacaatgccatctttatttaatgtttttatatttttgttaataaaagttttaaagtagg

SEQ ID NO: 8349 - DNA, 1094 bp, Diabrotica virgifera
  SmartBlast Evalue=1E-124; Info=Talin-1 n=1 Tax=Camponotus floridanus RepID=E2AHI2_9HYME
tgttcgatgattgaaacctctgctcaagctgcttacttgattggtgtgtcagatccttcgagcatagctggccgccccggcttagtagatcaggcccaattcgcaagagcttcccaagctattcaccaaggatgtgcagctctttcgtcaccaacgagtccccagaagcaggtcctagaagctgctactcttatcgccaagcacaccagtgccttatgtaattcttgtaggatagccagttctaaaactaccaatcctgttgccaagagacagttcgtccaaagtgccaaagctgtagctaatagtacagctgctctggtgaaagagatcaaagctctagacgctgattattccgaggaaaatagaattaggtgcgccgaagctacaagaccgctgctagatgccgttgaaaatctttgcgtatatgcaagctctagcgaattcgccaccatccctgcaaaaatacctcccgaagctcgtcatgcccaacagcccgttgtcgattctggtcgtaaactgatagacacttcctgtgccgtcattaacgcaacaaaaaatctcattatcatgcccaaggatccttcaacgtggcaacattttgctggttgctccaaaaatgtgtctgatgcaatcaaacagcttgttgtgaatataaagactgaagctcctggaaagtcagaatgcgaagctgctgctcaaattattagcaatcacttgaaaacgttggatgctgcctacatggatgcagtgtctcaatctttagctccgagaagagctgccacgcttccagtttacagtcaacaagtcgaaagatcagctgctggactcttcgatacaattgaacccttaaaacacgctgccaaatttgaagctgaaaatattggtcacgcaattaaccaactggtacagtactttgaaccattggtagaaagtacaatcagtgctgcctctaacctgaacaactccaaacaacaggaacagatcctcgaccaagcaaagtctgtatccgaagctgcgctgaatttcatctacgcgaccaaagattgtggtggaaatccaaaagcagttaacattcatccggatattgatgaatg

SEQ ID NO: 8350 - DNA, 1087 bp, Diabrotica virgifera
  SmartBlast Evalue=2E-21; Info=Endonuclease-reverse transcriptase n=1 Tax=Bombyx mori RepID=D7F170_BOMMO
ttttttttccaaatcgtccattctcgagagaatgaatttgttccaacctttgcgtgctcactgtataatattacaccttaaacaatagcagcccgctggagtgaatattaatgaatctcttagatagttggtagtactgtacacaaaagtacatcccatttttgcagaaataatcattatcaacatacacattgattttaatacgatatacaataccgtaatgaaaaagttatatattttcctaggttttttataccgtaaaagatacaacaaatagtttcgatgtccaatagaagacataatgtaaagaaatcttcacacaaatgcttgtgttgttaaaaggagatgttatccgaagtagcacagtatggtgtccttctttttcttctttcaatgccatattaggtccccctaacgttggcagttacattggcaagttgttcacactcttcaactaatcggaatggttgttcggcattgcgtattcctgtccaatagcgaatgttattgagtcattacatttgcttccttccatttcctctgcaatcctcgaagttatcttttatgaccaacttctcaaatgcctcaaaaaatatgggcctgcaagtaaatgaggaaaaaactaagatgatggcatcaacatccacaatagatccagaaacatcgggcaccaattcacggttgataattctacctttgaagtggtggacaaattcatagacataggatcaccaaggagaacgccatgacggaagaaatttagcgaatgataatcctagcaaacaaatgctattttagactgagtagacatatgagaagcagaaacttaagccaaaaaacaaagtaaccatatacaaaactcttatacaagcagtgttgacatatggatcggagacatggaccatctccaaggcagatgaaaaccttctgcttttatttgaacaaagaatcctgagaggaatattcggtggcatctgtgaaaatggtgcttggagtaggaggtacaactatgagatataccacagatataaacatttatttggtggtgaatacgtagtatctcttataaaaataggaagactaagat

SEQ ID NO: 8351 - DNA, 1097 bp, Diabrotica virgifera
  SmartBlast Evalue=3E-56; Info=Ankyrin repeat and FYVE domain- containing protein 1 n=1 Tax=Harpegnathos saltator RepID=E2C3Y7_ 9HYME
ttaattgagcgtctggtgtaatttttgtatttttctaagtcgttattatatcgtttaatgcaaatatactttttctgcattgtttttgacggcatagtggagaggcgattgtctttcttcgtttgtcaataaattaggattcgcaccaagtttagttaaacagcgaaccaaatcgtcgaaatttgcggaacaagctaaatgtaaagcagtttcaccttttgaattgacatgatttatatgctcgctaactttttcgcacaaaaatacagcagccttttgtgctttttctaatataagtatttgcagcaaattcgtataactactagaatagattggattcgtctcagcaccatgtttcagtaactccttggcgtatgaatcatcttcgtcatcccccgattcgtacttcagtaaagcgtaataaagtggagtatggcctttattagtttctatgttgacgttgatcttaccttgctgaagcaaaagatgaaatattggtttgttgtctgcttggattgcaatgtgaagggaagtaaagccatgtgaattttgggaattaatattgatactcttatttataagtttttcggctacttttacggagttttcgatgtcagcagccccggcgatcaggtgcagagctgaatcattaccacttctggttgataaagtggcatcacaattctgttctaacaaaaattgcgccgaaaagaaatcctcctttttgatcgccttgtgcagcaaagtgtccccattgctgtcgagtatattgacgtcagcattgtgttgtactaaagtagttgctatactctcatttcgagacctcaatgctaattctaaaggtaactcatcgttcacatctcgactattaactactttaccaatatttgaagaattatctactaaacataagaaaaccacatcctccctttgaagtcggacagcagaatgaagaggtaaagttgtcttgtcttttaacatcttgtacattagaggtccagacatgtgctcaaagtcagaagaatctagatcatcccaatggatagaaatgaattcagagcagtattctcttagactgggtgcttctatttcttcag

SEQ ID NO: 8352 - DNA, 1087 bp, Diabrotica virgifera
  SmartBlast Evalue=7E-84; Info=Gap-Pol polyprotein n=1 Tax= Schistosoma japonicum RepID=C7C1Z1_SCHJA
aatgactacccggtgaccatcaagaaggagacaaaagtaggaacttgtgtacccgtgacgtccataatccgtcagacaacaacatcagataattccaacgacaagttcgaccaaatggttgcagttgcaggccaatctctgaatcaagtggagaaaaggaaattaagggaatttcttaggcaatatcgtgacatattcgtaccgaaaggaggaaagacaggaagaacgacagttgtcaaacataaaattgacactggtaccgctaggtcaattcgtcaatcagctcgacgattaccacaggcgaagagagaggaagctgaaaggattgttcaagaaatgaaggaaagacggggtgatagaaccttctacgagcccatgggtctctccggtggtcctggtcaagaagaaagatggaactacgaggttctgtgtggactaccgtttgttgaacaatgttaccaagaaagatagttatcctctgcctcggatcgacgacacgttggacacactggctggaagtaaattgttttctacgttggacttgaagtctggatattggcaggtagaaatggatccagtggacaaggagaagacggccttcacgacaggatctggattatgggaattcaacgttatgccgtttggactctgtaatgctcctgcgacatttgagaggcttatggaaaatgtgttgagagggttatcttggaagaacgtgcctggtgtatttagacgacataatcgttttgggggagacgtttgaagaccacctgaagaatttagaagacgtttttaatcgacttaaagctgcccagttaatgttaaaccccaagaaatgccagctatttcaaagtaaagtcaattatttaggtcatatagtcagcaaagaaggagtggccgtggacaaaggaaaaatcgattccattaaggaatggcctgaaccaactgataaacatcaagtgagaagttttctgggactatgtacttactaccggagattcattaagaagtttgcagatatcgctaagccattaacgcgacttacagaggaagcaagggattattgctgggatggagactgccaaac

SEQ ID NO: 8353 - DNA, 1094 bp, Diabrotica virgifera
  SmartBlast Evalue=1E-21; Info=F-box/WD repeat-containing protein 4 n=1 Tax=Harpegnathos saltator RepID=E2C1K0_9HYME
tagaagagttaaaatttaaaatgaaaattctaaaatataattttagtgatttggaaaagtcagtaatacttatttacaaattttaaatatattttagtttatggttccagatgggtagataagaaatacaacaataataatcccaatcatgtcacatctttgtttagagaacctgtcaactgaaattcttataaaaatattttcatatttagatctaaatgatttaatgcaactaccatacgtttgcaaaaggattaggcaaattgttctaaattgggataacttacttttaaacgatttcccacacctttagtgacaaaccaattcagtgatgaatttttggctagatgtaacagaaaactaagtagttttgaaaaagtacgaatttctcgtaattggatagaagctaaatatactgaatcgccgttgctattttccaaacgaaaatttctaccttatcttcagctatctaagaaatatttgtggataagtcgtggaggagtcattttttgttacaagagacgttatcgaaatctacatgcagctaatccacactatgttttatcacctccagttcagcgcagcaaggcagatgttgttaattttcacgttaagaataatttgatagtagcagggatgagggatggatcactctggatgaaagacttacaagatagatatagcaaaatatttatgctaaaaatatatcatcaggatgatgtgcactccgtagccctaaataacagctgtagcttattggcgtctggggctagaggaggtgatgtaattgtttcgaaagttgaacctagtgttactccccaaaatataaataaagtactttcgtggtcatatcacgatgtaatttggaaagttggattttcagtggaaaacaaattagcaattggtacagcgggtcgccattactacagttatctctatattcgcaatgtagacaggactgacgtagaagaacttgtcttatcttatcagtcagtaaaagaaggaatccatgatataatatgggatggaccgcataagatatggacgtgtggttatgattctaatatcagaatgtgggaccttaggacagggaa

SEQ ID NO: 8354 - DNA, 1095 bp, Diabrotica virgifera
ttgttctgattaataacatatcgtatcattttttatcctaacagtacatagagtaaacaaagatgaccatgttgcattccttgtttatggtatcttgatcaaatcatcagtaatgttatagaactcttctattttcgacttaaaagaggtcttccattaccaatttgaaaaaaatgattcaatatcttctattctacaatcttgcgaatgattcaaatcttcttgcactcaaccgtaatatacttgacataatttcccaaaacgctggaaaatggtttacctctagtgtagaacttgtcgaaactgatcttatcaataatggtccagttcagcttccttccaatcttttgcgaatacggtgacgtaaagattgcagacactgcttgaggagttggttctaatggcaaaactcttccatctagcgagtgctttacattttgcttcattttcagtgcttttgcaagttcagttgatgcttcgcagagttgtaaggcaattcccctcttcgtaaaatcaggtgaggtggctagaaacatgatttccatgacgctactgacattaaatggagtgaatacatccatcagctcgtcacatttttgcatgaataggaatatttctctggttggtcgtgtcttaaacatgttcaagtagttcttgtaataatttttgccgcttggtccgtggtccaactgaattttgttgaaagcaacgccacaaacaatattagttgctttctccactgccactatggacacccctcctttggccacttcaatcatgtagctatccatttcagccatagcttcgaggtcttccgacaaacctgtagcaaaacatcctgcttcatatcgataaaagcttttccgcaggacatccaaggcgtcctcgagatattctgatgtcaacgaaatgtactcgattgcaccgtcgttgctcgctgcccagacttttttctgcaccatatttttttttatttagtaaataacagttaagttataaacagaaaatttgaaataggtcaatattcagtatctaccggtgaaggtcaggaaagagttgaaagttctgaaggtttgtactggtttgtattaccac

SEQ ID NO: 8355 - DNA, 1083 bp, Diabrotica virgifera
atttcccatagaaaatagttaattataaaaaataccacaaggaaatagcttcagaacaacatcactgagcttggttcgatttattgagatgccttcatcaatatcttttagagcctcttcaaaaatgtgatctgagtacagattgaatatcagcggtgaaattatgcatccctgtctcactccccttaagagtaaacagtagcgatcaacaggtagcaataaaatataacttcgggagatagtatcataaactttggcaacattggtaatctttgacattatgtaagattaatattattgacaatttaactcataggcgcgctaaatggaagtaagaaaacaattttgttattagtaaataaatatttataaaaataaacccaaatgggtgaaaattttatgttaacataggtatttgcacgaaaaataataataaataataatttcattgtgaagcgaaacgagagcagtcttattttatttagttcatagagcgccaaaggcactctagaacaccctttaacccatcttagggtcccatcagaggtgcatatttcattctctttgaactactaaaattcgggctaccgttatcggttcacaacgaaatgatggcatgaatgccgtggcggtatctgctaaagacgaacgaaagttttacttctaatattaacaatatcaaaaataaaataaaacttagaactagtcttctggttaaaccaatcgtggcttgtggcttctaaaatttgcaagccaacgaattgccggagctaagaaggccgagggaaatctaccaggttaagtcgtacttcatggaatgattatttattattttgattagttctactcgtaatctgagtattcggaactaagctttgttggaattttaccgtgctggacaggcgggaagtgagatgcagcctgatagatcttcctcggcattgttagctcctgcactttttataaaaatacactttcttcaattttttttatccgatgcccagactttgtgtcattttggaaccactaatgaaaattaaaaaattttagtggttccaaaattacacaaaatctaggcatcgg

SEQ ID NO: 8356 - DNA, 1089 bp, Diabrotica virgifera
  SmartBlast Evalue=1E-105; Info=Aldehyde oxidase n=1 Tax=Aedes aegypti RepID=Q17HF7_AEDAE
cgtttagaaggagaactatttgctgcttgcgttcttagcagcaaacctcatgctaaaattttaaatatagatgaatctgaggcactagccatggaaggcgttcatggaattgtctctgcaaaagacttgaagaaacctgttctatggggatccgttttccacgacgaggaagtatttattccaatacagttactgctgtaggtcagatagtaggcttagttgtggctgatactcaagcactcgcacaaaaagctgccaaaaaagttaaaattacttatgaggaactacaacctgtgataataagtattgaagatgcaattaggcatcaatcattctttgaaacggtcaccttactggagaaaggagacattgatagtgtttttaggcgagcgccacatactcttgaaggagaatgtaggatgggaggccaggaacacttttactttgaaacgcaaagttgcattgctattcctaaacctgaagacgacgaattggagattttttcatcaactcagaatcctacggaagtagcaagactagtcagtgaagttttggacattccccagcacaaaatagtaagcagagtaaagcggttaggaggtggatttggaggaaaagaatctaaagccgctatgttggcgctaccgatagcagtttcagctaaaaagtttaacagaccgataaggtgcatgttggatagagatgaagacattgtgatgactggtgcaagacacccgttctattataaatataaagtagcctttgacgaaagtggtaaaatgttaggtctcaatgcagaactttatgcaaattctgggtattcaaatgatctttcattctcggtaatggctagggccgtgactcatgctgaaaacgcttaccacataccaacttgtaaagtcaagggcactctatgtaaaacaaaccttccttccaatacagcctttcgaggatttggagccccccaaggaatgtacatggctgaggttattgttcagcagattgctgattacttgcagaaggatcctatagaaatcagccaaattaatttatacaacgaaggtgatgcaactaacttcaaccagtctt

SEQ ID NO: 8357 - DNA, 1091 bp, Diabrotica virgifera
  SmartBlast Evalue=3E-52; Info=UDP-glucuronosyl transferase n=1 Tax=Aedes aegypti RepID=Q1HRH8_AEDAE
agtaaatcagactgtggcagccatttttcaatcctgacgtttttgggctttccgggcaaactatcatcttcaaacttccacaaaacactctctttccttttagcaaacgccttcatcagagcatctttcgtctcctgagtcatctcagcactttttaggttagatcccatactaaaataaataactccgtgttttgctgcatctaaatacttcttgaggtctgcaggaagaggtttaggtggcttaacgtggaatccagctatttccttcatacaaggaactgatgcagctggtttgttcaagctgctgtgggaatttgaaagcactagagaaacgttgtactgaaccgctggtagttctaaatctttcgatatgtatttgtggacgagctcattttgctcgggatattgcagaatattgtagttcatgtatgtagctaccgataataatgtgttgactaagcgttgctggaaactcataagttctggatatcctagtacaatattcgggttcaaagacggaagagttgggttgccaacgaagtggttcatccaattgtttgcagcatggttattgaacagcactaaatgagcattgaaatgaggagctagagctttgatagcttcgattgcgaattgcgtagttattactatgtcaaatttttcatcggacttcattaatgtctgcatttttgaatgggagagcaccatttcagaaactttatatccaattgtattgaacatagttagcatatgtagggggttagtgaatgctgactgcttcttcgagaggttcgtaacgtctttaaatataacttgttgctcttccagaacaccgtccaagatcacctgtcgatatgatccatttttcggtggatttttctcttcgaaaaccgttatcatggtaacatcatgacctgcggaagctaaacccttcatcagctcatttcctaaaaagtaatgactgggagctccaaacggaaacactcccaaaattttatagggagtcacataatcaacacttgaaaatattagcactaaacttaatattaacgttagtttcgacatgtttatagataaatagtgtttttg

SEQ ID NO: 8358 - DNA, 1095 bp, Diabrotica virgifera
ctccacctccctcttccttggtgggacaacaatctcatcatcataattggctcaacaatcctctgcgaatcttggcctgttcgtaaagaagtcacttgcgtggatttctagcaacttccctccatcttatgaccgttagaatcttaaggtcttcttccacatttatcaatccctcttctacgcgatcgtcctctacttctgctgccatctggcgttgagaatgtcattatcttcatgtactcattatctgacattcccatgtattcttcgggttttcttatgatatattctataatttagaaatttatactaaaattcgttctcggcatatctagccttacatcttcccattttttcggagttttgaaatatatgtagtaggtatatgttggatacttttttaaaccaaaaattgtcatttgctgacttcaagatagtactgggtttcgaattatgtttgggacgccacatattggtaaatcaccatcatcattctgacttacaaccatgtgtgggtcctagcatcctcaagaattactccccagtcatcgctatccatcaggagttttgcaatttgatgaattttcgattaaccatcttggtattttcttctttatatatcttaataaatcaccagctgttaatagttaatctttgaaacaccaaggtgttaataacaaaactgttgtatcgatttttataccttgtaaatagttatctatataagaaacaaagtttgaattttgcaatgggactgttgactaaaattattaaaagtgcttttttcaatactaactgtcaatattatttctaaaatgtaaagaaattaaaatatttttatacacaatttgatatgaactcaataattgtgaagacaaatattctagataaaattctatcaattcacagactggtattttttattttttaagtacttaatttatgtttttcttttttgtttattttatttatttttaattaaccactagcatgacatttcttaaccctaaagatctctttctaacgctttaattctttttcaggttggagaatccgttgttgatagatggtaaaagctgcatcagaatggctcca

SEQ ID NO: 8359 - DNA, 1091 bp, Diabrotica virgifera
  SmartBlast Evalue=4E-51; Info=Alpha-tocopherol transfer protein- like n=1 Tax=Camponotus floridanus RepID=E2A8Q9_9HYME
tctaaatcatataaaggcaaaaagtaaaaatatttgttcaaaacagttttttaatgctaaactataaacatcaatcaaattccagtgtcttaaagcttccatcgataccaaagaggctctcgttatacttagattttccttgccttttggattcgtcaacaacttgagattcttggaattttagaaaagcttcaccatcctcaattttttgtttctcttgtgcttgcaattgtagtaaagatttgcagttaccaccatagtctcctggtagaatatcttgaggaacatattcaaaaaggctttttaaatcagaatgaactataaacaattcaaacagttctttcttcatcatgggctttattaaactaaaaattttatctaggaaaaatgctgggtagatgaaatgtatatgttttaatctgattggcattgcatcctgtaaatagtagatgaacttttttataagcatgggattcactttaagaaagtgtgcaagactagagttttgcatgtcgaaaactaactggaaaccgcatggaggaccattctcatgtgtaaataaagccaaaacaacatccattaatttcaacattcccaatggagtaaaactatttaaattagtatccataagttttgatattactactttttctcctccaagtgcttgcttaggaaggactgaaaatacataagtatgggtagccaatttaaatacatcatcgtgaagtgtacggtttcctaaaaagtccgaacatagagttttcatcgtaaaataagactctatcacattctttgccatttcgttactgtaattagagctatggaggaaaatagcgagttgtaattctgtggcttttggtaagtgtggttgcttcttcatccattcttccaaagctaaaacatcttgttttttcagtttattatcgttctgataaacttcttctacactaatttctttaaacgtcattataggtctaaaaatgcaacactacgtcttcaatatgctattaaatatcaattattggtattatcaaacgacaatatatttgattccaaaatcacagtgtaaaatcgttatattgtaataaata

SEQ ID NO: 8360 - DNA, 1087 bp, Diabrotica virgifera
cattttctttcaccatgccgttctgcatgctagtaacggcaccattcgacggtttttgcggcgtcccattttgtagtacctcgaaatacggacctttagttccagtagttccgttagaacagcctgcgttttcggcgtcaaaaacccaactttgtgcgtaagcgtcgtacacagtatgtgtgttcggtttcgtatttttcggccttggtatgatgtactcgatatcagagagttgttcgtgggaccccctgaatttcttgttcctgggcttggacacgaattgcattgaacaaaaagcgaattgacagtcgacaaaagacaccaccaacaccacagcggccgccactctcgacacaaaacaagcgtattctatgagcaggtaattagtatatttcttgagtatttgtgacatatcgtgcttgtagaaccagtactcagtcacaacaatgttaacgattgtcatggtgaggattgagactgccaaatagagcaacatttcttgccgtcttggagatagaacacatatacaggcgatgatccctccgcatatgccgattataatgttccaagctccggccaccaagacggcatatatttgtatctcaggtaccgaaatcaggaaaaatattcctgtcatcagttgagcagcaccacatattatgtaaaatgtactccataatacttgaagggcagtccacaaccggccacaaactaggcacattacgcccgtgttagaagttgattgatttccttagaatttacatgttttggttgagtgatctgaaaaacgagtcaatcctgctttcttaaaatccacaacatatccatacaaaacagtcacaaacaaaaatcgtaaaaaaaacacaaaccaaaacaaaacaaaaactggatttgagattaggtaacctcgtatcacacttgcataaataaactatcgatattatgggccgaaagtgtcacacggtacgtccagcggcaaagaaatgtccatctaaaaaatttctgtttacattccccggtcgttacaggtgctgcataagatcgtatcgagaaattacgttacgtacacctctcttcagcgtatccg

SEQ ID NO: 8361 - DNA, 1092 bp, Diabrotica virgifera
tgttaacgtataaactgtgtggttctgaagattgtctcagcttgcatgtatttaccagaaaaatacctagtgaagaaaataaacttaaaccagtaatggtatacatccatgggggaggtttcatgatgggcaatcatagtacatccgtatatggtccagaacatcttatgatggaggacatcgtactcgtcagtgtcacctatagagtaggaatcttaggctttctatctttaagtgacccttccctcgatgtaccaggaaacgctggattaaaagaccaagcactagctctcagatgggtccagaggaatatcaaatatttcaacggagatcctaataatgtcacgctgtttggagaaagcgcaggtggagcttccgtggagtatcagcttctgtctcctactaccaagggcttattccatcgggcgattattcagagtggatcaactttaaatccatgggcgagaggttgtttagatcctgctgatctagccaattttatcggtaagccaaacatcagcgagaaggaacttctcaaaattttggaagaaaaatgtgcgcatgatctgtaccacatacaaagggattatataaaagcaaaagacattgtaggagacttcggcattatttctccagtagtagaaaaaccaaaccccacagcatttttgaccaaggatccaatgaaagtgatacaatccggggaatataacgcagtaccagtgataataggattctgtgattatgagggtggtatatttagtgcattcgaaaagatgaatggagacagagatattagccatcaactacataccgagaggttgcttcccacagaaactgacttttcagatacagatctggttaaaaagctgactaaaatcttggatagttactataaaaacgagaaaagcataaatgacccatacttgttgttaggagactcatattttattgctggagtactaacatctgtaaaaaatcaagcaaaagtttctcggtgtccaatttatctttataaatttactctagacaccaagcttaatacatttaaaggaaattttgccactgatatgagaggtgccttccatggagatg

SEQ ID NO: 8362 - DNA, 1091 bp, Diabrotica virgifera
  SmartBlast Evalue=1E-46; Info=Ventral nerve cord defective protein (Fragment) n=1 Tax=Tribolium castaneum RepID=Q58Y78_ TRICA
ttgataatttgccatcgatcagtttaaatctggtgttggttagtgtcattcttctgctagtagtgtctttcaatcaccatggcgggatatgacgattatactccctatgagaatacttggcatatcattcctccggattatattcatctggaagaggaataccgatatccattattggataccatgaaaatgaccggaacaaccatagccaaccaaagacaacctgccagttttgcaattagtgatattttagaattagatagacaaaatagtgaagaaatagatccaataaccacagatatgtcagtttaccccacacaccacgacctttcctattcaactagacatcagtggcttcaagtacctgaacctggaatgcatcacgcaccacctcacctaaccattccaccccattcgtcacaactaagcccagacagcaccagtcccgcaatatcagagagatccagcgtccccccagacacgcctttgggagactccaacatgacaaacccccttaaccaagctccttcctcaatgggaacgatcagcgaaggagaaatggaagaacaagatgacattaaagaagaggaaggagaacaacagtcgaatggaccgaagaaaaggaaacgaagggttctgttttcgaaggcgcaaacgtatgagttggagaggaggtttaggcaacaaaggtatctgtcagctcccgagagggaacatctagcgtcgataattaggctgactccaacgcaggttaaaatttggttccagaatcatagatacaagactaaacgagcccaacacgaaaaaggcatgcacgaccagcaaaacaaccccatgccttcaccaaggcgagtagcagtcccccgtcctcgtccgtgacggcaaaccctgcttagcaggcggccaaaaaaccgacaatgttcctttacccagttcgatgatgatggccaaccacgcggctcatcctttaatgtatggccaacccagggtttggtggtagaacatatcagtagggatggttaaaggatagcagtgtggtttaggaaagtagaatatttggagggcagctgtgagatttgactagcaggata

SEQ ID NO: 8363 - DNA, 1092 bp, Diabrotica virgifera
  SmartBlast Evalue=3E-49; Info=Perlecan n=1 Tax=Aedes aegypti RepID=Q16PL9_AEDAE
gaaactgaagccgtcgggaattttccttcatcgcttcctgtaatagtcacagtagctctgttggaacctgttgtaccagaggccgatgtaattgtacatatgtatagaccagaaacgtcaggggtagcttttctgatgatcaaagtgcctctgtcctcgtaggaattatatggaagttcgccgtcttgtttgctccatctgatcgattgaccaaaagcgcttgaggtacatctgagcatcacgttgtcgccggtaacacctctgtatgaaggtggagagatgtcgaccttgatgataggaccgacagtaacttcgtgaaccatgattgagaatcttgcggagtctgtgcctactctgttggaagcgatgcagttgtaatcgccggaatcggagactcgcgattggtagatgcggaagagaccattttcgaagcgctgtcctggacttagaggttggccatcagctctgacgatactgatttgtggggcaggtacaccatttcctacacactgaatttctaccggctgtcctgcgttaacgtctacgtatggttgggataaagctattctgggaggcctgtcttgtggaactcctacattcaagtccacactggatgtcactatcgtgtagtcatcgctggcttcacaaatgtatcgtccagaatcagatactcgtaaatctgtgattaccaggagaccattgccgtcatcaatggcacgtgatggtagatcaccatcggcttttctccagttaattctaacaggccttacaacaaatcgtgattttgcggaacagttgtacctaacactgctgccaacttcatagatgccaatgttggtgtcttcaatggtaacctcgatagtgacttctgggttaggatttgtggtggtatctgggttttcagtggttgtggtgaagccgacttcaaattcgcagtttctaccagtaaattcgggtttgcagtggcaaactactctatgatctggacctagttcgcaactttcttcgttttcgttacatgggcactttgaacaagatcccaacggcctggattgatcgtagtagaggtctttgtagtatccggcatcgcaa

SEQ ID NO: 8364 - DNA, 1090 bp, Diabrotica virgifera
  SmartBlast Evalue=1E-106; Info=Protein RUFY3 n=1 Tax=Camponotus floridanus RepID=E2AD44_9HYME
ctcctcttctaacctatgtttcaattcctctacttcactaccaactaatttacttatttcttttgtttccttttcctctactttagtaatttgtacaccactaatacctagagcatatccatcagattctttacctaattctaatcgtagttgtctattttcatcgtaaagagctaagagattatttttggctatagctagatcttctttcatcagtgcgtttgtggtggtaagcgactctaccttggtttggaggtttgctacagttgcatttaggtgcctgttaagttcttctatataatttttttgatctaacactgtaatcatagcgtcgccttgttcttcattactggaatccgtcgacacgtgacttgaagatcttaaatacaatgaaaagtcgataactccttgaggacagtctaaatcttcctccttaacgcataggttacaatctatcacattcaaaccaactagaagaccaatgatgattatagcttcgtcacttaacatcaaagcgtcaggttcgaaatactctactaaggcttcatccttatgatctatcaatacttttaagtagtcggctagtttcttttgcattagtgctaatcgtaaccaagcccgtgctcgacccatgtgtgtccttactgttggtaaatctctaacactagcagtaatatcttgtgcttctggagtatatttttctaccatttgaaggatatcccaaagctcttttttcggtcccagcagacccttcttaggtctgagtccatgccttagaacgtgctccaaaacaatgaagaaatgttgtaaaggcatatgatccgagtccaacattcgtccatatctcaaagattgttcgatcaactctttcacaactagtttgcttatgtttactaaattacttctttctattacgacaggatctcgaccttttgattttttccctttcttctttcctggtttggaaaccagcatacttgtgaatagaaaattatttacagatgaaattgagggcgatctggattcaatggtgtttctttgtaaattaaacgaatcactcggtgttgttggcgaattttcactactagca

SEQ ID NO: 8365 - DNA, 1088 bp, Diabrotica virgifera
  SmartBlast Evalue=6E-10; Info=Endonuclease-reverse transcriptase n=1 Tax=Schistosoma mansoni RepID=Q4QQE9_SCHMA
ggcccatgtattttgtcggacagaacttccaattgatttgtgcgattaaactctcatgcaaaaatcagactgctatttatcaccaacataattcctgccatttgaaatgttctacgtgtcagacttattaaaacgcctaatacctgtttggtcacctcatttacaaagagatattaatttattagaaggagtacaacgaagagctactaagctaccttttaattatgcaagattaagctatgaaactcgattaagaaagcttaagttgtctccattgactcatagaagagagcgaggtgagttaatatctacttatataattcttaagggggattttggggaacatcgaatttttttaaatcaacaagatgctagactacgaggtcatcctataaattgaaaaaggaaccttttaaaactactgtaaggcaaaactttttggtaaatcgagtttttgatcaatggaacagtttaagtgatgacatcgtaggggctattagcttaaatagtttcaaaaacaggtttgatgagaactaactggacattgtatgtgtaatgttagcaatttttgtaaaatgtaaggatatattttatgttttttgttatgagaaaaaaatttgtaatttttaggtatacttattttttttatctacttagttttaatttgctattgttgtaacaacttttatgaaaaccaattcttttgaatatttactttaatttaatttttattttgtaagaatttgttttctgttatattatttagtttaacaattatacctacaattatttagtttaacctacaattatttttgtactttgagccatataagctttgctttggctcgatattattgtataataataataatatatctgtcggacaaattttgtttcatatattatattaagtataaagtttgctattgagtaaacttaaaacaagctgttagttttcacaatcgtaaacttgtcaggatgacacgttccacaattaaaacttcctctgttccagtgttcccatacaccaaagtttgtccgaccagacacagtcaagccattaacaaaccttcagcttgctattaatc

SEQ ID NO: 8366 - DNA, 1081 bp, Diabrotica virgifera
agatgagtgttatatgttggtaatgacagattgaataggtagggtgagaatagccatatgtagaaatatggtggtgggttgtatgtagatgaaaatttgtataatgtggatgtctgtggatgatgatatcagtaacatatatgtatgttatgaatagataaaagtggttagatggctgaagatggcaaaaaggattattgtggctagtaccagatatattattaattattattattgttttaaatatgtaacaatgtattaaatatgttttaaatatgtaattaaatgtataacattttaaaccaatgtttcattgacggacaacttttgctgggctttgacccacatatttttgtcaaacggtatcttggtggttggcatgtacattgcacgtgagtataacctgtactttcttgaccgtagtcaaagtttcaatatctttgcattgttttatcaggttatggtcattttaggtgaacactgatgatgactggtggaccggtcgaggactggttatgttgtgattttgatgtggcccttttgagggattttgagtataccttttgtacgggattttactgttttttctttttatcatgttcaatttcggtgtccgggctgcatgtcctgcccactgtagacggtttcggctgattatagtggtaatatctcttccgccaaacgtatgcttgtaaatattctgtagttcaaagttaaaccatttctctagcacctattgaaaatggacactttctggtgaaacaagggggaatacgtaaattcggtcccaagaaagattgcgtccaaaataaccagtaaattgggtcccaaactttgtttctacctgacactgcatatgtaaattcggtccccagtaaaatattttatgaggggttcaataaataataacatcttgttgggtattgaataatttctgatatattacataaagttaaaattagtgtatctgttcattaaaattattacattacttaattcctacatgctaaacagactatagcatctccacattctcaaaagacacaagaaaagtcataatgaaaccgcacagtgaaataag

SEQ ID NO: 8367 - DNA, 1090 bp, Diabrotica virgifera
  SmartBlast Evalue=8E-52; Info=Protein FAM44A n=1 Tax= Harpegnathos saltator RepID=E2BKY2_9HYME
gaaaatagaagccaaatgtttttaaagttgatactaaagtaaaatcaaaaaaatttgtaacaaattaaacaatggaagtaatgtgcaataatttcatgcccggagatagcaggttagttgagcagttggtgtcagaactcaaatcccagggtatattcgatcaattccgcaaagaatgcatctcagatgtagatactaagccagcttaccagaacctgagacaaagggttgaaggaagtgtctctacatttttgaaagggcagacttggagtgttgaacttaacaagaatcaacttcgggaacaactacgaaaaaacctccaagaatcaggatttttagaaactggagtagagagaatagtggatcaagtagtaaatcccaaaataaactcagtctttttgccaaaagtagaagaagtagtttataagttcttaggtttagaaaacccaaacaaaaatatgaagagggaacctgaggtccctgcaccagacccactaccaacagatcttgaagctgtttctcctgggtcagtgcaaagtgaccaagtagatttgaagaaagcagatagtgatgtttttatgaatgcagtagaagcaggtggtaaaatggaagatgatgatcctccccctttcgaaccacaccctgttgatagtaaagagaatggttctgagaagatgaatattgatgaaaatactagagattcccatttgtcagggttttcaggtcttgaaagtcatgaatccaacctaggcagtgataatcgagtatttcacatggagatatccaatcaagactcccaaatttctcataacagctcagagagccatctttccatcataacgtcagaagaaaccagtaaaatggatatttctgaagactcaaatacaattttaaaaccagaaaaagctgaagtcttggtcgaagacgaagaaaatgtgtctccggagtatgaaccgatcgataaagaaaccattaaattagaaaaaatagacaataaaattgatattgtgagtcaagacgataagaaccaggatgacgaaaaaccgagaagaaaccggagaaaactgaagagagaagatccaaaactaat

SEQ ID NO: 8368 - DNA, 1087 bp, Diabrotica virgifera
ttatagcgcaatattactctatgcaaggttaatgaaattttattttattcgatcggcttagactcgattcttttcgattcgattcaacccgattcaatttgatttaatttcatattttttatttaaatttattagttttattattcaagtttacctaattttattttattttctttaatttaattttattttgttatttaatttattttatttcatacacatattttaaaatcaaaattagccaaatcgatccaatcgttctagagttgttataacaaaatatattactgtatacaacaaggttactgcacgcggcttgacttttcgaataacgttaaatagggtttcgggccatgaaaaacatcataccgagcgataagaagcttacttcttcacctcacttctgaaaatcagctgaatcagttacactgcggacaatatagaacccaaaataaaggttaataactaatttcaaaaagcacaaatgttgaaaatgctacaaatattgtgtgatacaatcaaatacaaagaaaaatgtacaatgcacaaaattaaatcgtgactagcgaggaatcgtggaaaaaattaacaaccaaaagtattaattacatgtttagctctctccctctctctgttgttttgtatactatcttagcctatttattattaaaaaagtagctgtgaccggttttttgtttcctgtcctgccttattagaaaattcaattctagctctttcaaacgtaattacactttttgtcgctttattgtttctctattgtaaaaaatgaaatacatataatgtaatacacactgttgtaatatctacaaagtcaagtatctaaattacttgcagagaatgtcaatttccaccatacaattttgccccatatagttctattttattatttaaaatacacagtaacccccactctactaggcacacaggtacatttagctaatacagtcatggacttttcccttgttgcactgtttacttttatgtctagtgatgtctagaacagaaaccaatataaacatagaaatttgacagtttatacaacagttttatctgaagtttatagttg

SEQ ID NO: 8369 - DNA, 1083 bp, Diabrotica virgifera
  SmartBlast Evalue=3E-89; Info=GTP-binding protein 10-like protein n=1 Tax=Camponotus floridanus RepID=E2APZ1_9HYME
attaactattaagctattgggaaaaattaaacaggcaactaggaaatatcaacggctaggtttcagagacaatttaagaatctatgtacaaggtggaccaggtggaaacgggtatccaaagtttggtggtttaggaggcaagggaggagatgttattgctgtaggcaaagaaaacatcacactggaacatgtctttaaatcaaataaatcaaaaaggtatatcgcaaaaggaggaagacattccacacataattttataatagggcagcctggggaagatattaaatttgatgtaccagtaggagttatactagacactgaacttggtaaaagattaggtgaagtaaataatgagggagaagaaataatattagccaaaggaggcactggaggccacagtaaaaatggttttttgggaaccaaaggacaagcctactcagtaaaacttgatttgaagctaattgctgatataggactagttggatttcctaatgctggaaagagtaccttactaaaagctatttcacatgcaaaacctagaatagccaactatccatttacaactgtaaaacctaatgtaggaatcttaatgtatccagaccatcgacagatatccatggctgacttaccaggtcttatagaaggtgctcaccttaataagggaatgggacatcaatttcttaaacatattgaaagaacgaaattaattcttatggtggttgacattaatggatttcaattaagtcctcagtacccccatagaagttgtttagaaactgtgatgcttttaattaaggaattggaaatgtataacgaaactttgctatcaaaaccggcgatgatggttataaataaaatggatactgaaggggcagttgaaaaattccaggaaataaaagaacagcttaaacatttagaaggtttctttagcaactatccagataatatgaggcctgctaacaatctcaaatttagccaaataattcccgtatcagcaaaagaaaatccagaggatatagattatgtaaaggaaaggttaagaaaaatgttagatgtaattgccgaaaaggaggaaaaggatga

SEQ ID NO: 8370 - DNA, 1082 bp, Diabrotica virgifera
cgaatgaataaaaaaaaacagaatgtcaggaaccctgaggctatagttgggttttaatttcagtgttttataatgctggaatgttcttcagggtgatgcgagctttgagagggaaacacagtttgattggtgcacccggtattcaatgaaaatttgcctgttgggcagcagtattattgcagtggtatttttagggaatcatactgtaacatgtttaaggtcacttgaatcggccaagcaggtttgggaaatatgagacatcaaagtggccaaatttttagtgagccgatttctatgcacgtaagtttatttcatcaattacattaaaatttattaaactttcctacatcccaagaaatatacaaagtaaaaaattattttttatcacggaaccaaccaaatcaagctcaaaaagaagtatacaatcagtcaaaactgcctacttttgtcattgtacctatttagagtaaagagacaacctcattcagtcgcagtataattgtttcgtatttttttaaagccataaaaaggccgtacaaagattttatgacctgttctctgttcgatcttatttctagatcaggatttaggctgctgtcgatccaacatcccaggtacttaagtctattgacctgttctaaaatgtgcccatttattgtgcaaggttgtggtacgttttggttttttttaatttttcttttcataccaaattgctcacatatctgagacctatgtcttaaatagtgctcttttttcttctatacatagctttctccctgttctacagtatttgtccgtattcaataatttaaaaagatattcaaaaaaatgcttattttgtgtttcttaggtcccaactgtaatgtttttaaatattattttagttttgtacatagaaaatatgcagatactggtatagttgaaattttgcagtttattgatttttatctactaatacggtttgtatatagtattaaattttttagactattaaggtttttgtattataaaagggataccgaaatgatgatatagtggaactaattgtaaagtgatagctattttcacttacattgaaaaaa

SEQ ID NO: 8371 - DNA, 1084 bp, Diabrotica virgifera
  SmartBlast Evalue=1E-120; Info=ATP-dependent RNA helicase DOB1 n=2 Tax=Culicini RepID=B0WF10_CULQU
aatgagtctgtcgttgtcggtcgaaaagttaaacattttaaagaaaaagaataattgttatgattattaagatctcatctattaatactaaacatattaaagtataaaaatggcagatttaatagacgacctttttgactgtttcgaagacgagactccttccaaggaaacgataaagacttccgatacatttaaaaggaaagtgaccaacacgacgatgaagaggaggagagtactccagcgccgaaacgagttaaaaacgatgaaatcgtgattgacataaattttgaagaattgaaaatagaatagtggttcacactatagatacagttgattcttgtacccacgaagtggcttgtcctccaggccatgactacattcccctacaacctgccagaggagagcctgtcaaacagtatcccttcaaacttgatccctttcagaaggaatctattttgtgtgtggaaaataatcagtccgttttggtttcagctcatacttctgcaggaaaaactgtgatcgctgagtatgccatagcaacaagtttgaagaacaagcagagagtaatatataccacacccattaaagcattgtcaaatcagaagtatagggaattttttgatgagtttaaagatgtgggattggtcacaggtgacgtcacataaatcctagcgcttcatgtctaattatgacaactgaaattttacgtaacatgttatacagagggtcagaaatcatgcgggaagtgggctgggtgatattcgacgaaatacactacatgcgtgataaagaaagaggtgtcgtatgggaagaaactttaattttactgccacacaatgtacattttgtctttttgtcagcaacgattccgaacgctagacaattcatcgaatgggtgtctcatttacatcagcaaccttgccacgtcgtttataccgattacagacccactcccctacagcattttatatatccagctggaggaaatggaatccacatggtggtagatgagactggcacgtttaaggatgacagctacaacgctgccatggcagtgcttcaaaactcaggcgatgctgccaaa

SEQ ID NO: 8372 - DNA, 1086 bp, Diabrotica virgifera
  SmartBlast Evalue=4E-99; Info="Mitochondrial ribosomal protein, S30, putative n=1 Tax=Aedes aegypti RepID=Q16NZ6_AEDAE"
aaacttccttggtacatacctcttcgttctttcattcagtttcctattatatggattttgaagtagttcaaatggtcttaatttcttatccataaacctcgttttgttgtcaatcttgtaaatcttttcccatgggtaaatttcataacccaacctatgccttgggcgattggatgttatgtatttataaacaccttctaaccattctctcttttcgtcgtcttcataatcggcaataactctttctttgctgcttaaatatggagtcaaattaacgcctagtctgctttccgattgattgatgtaaaatttaagcaaagttttgaggacttcgtcgttaaaaccgatcaccttaccatcctgaatcgaatcgaatagctgcatttcgggggtaccccagcaaatgtttcttttctggttttctttgtaaaacctctcacagaaaacaatcgtatttaactgataagcataaaatgaccagtgtttgccatcagttacaacagtctgggtaacaagaggatacgtcaaatcgttgaacgtattgaaacccaagaagttggcttgcgcttgcaaccacccaaacgaggctaaaactccattacgatgaattgcttctttatcatcctgtgcatctccgtacctttgtcggtgatgcatatagctacgtttgtggaaagacatgagaccgaatttggtatcatcatcaggccaaaaccctggtaaattagctatgtgcctgtgttctgaagtaatcccaaccacccttggatcataattaaattcaggtacggctagctcaggattttctgattccgcatgagatactattggtttcagtggtaattctgaccttaatgataaattagggtttccgatgtataccataagcctatcaaatggttcatctacaaggtccttcatccatttcattccttctctggatttttttgcatattctggaggatcgattccaccacaataccaagaggattcgattcggggatcaatatcgatctttgcatttttaagatggggtaaacttgccgaaagttcatttaatattattctattgatctgtttagtaac

SEQ ID NO: 8373 - DNA, 1084 bp, Diabrotica virgifera
gttctcaatcaacagctggataacaaaatggcaagtttagaagcctacaggaccagagttctcgagttagagcatgtgatagtctcgaaggacgatctaattttatctcagaaacaaatgctggcagccattaatgaagaaaagtttgagaaattggaggctgtggagagcaaataccaaactcaattgacgataaaccgaagcctggaagagaaaattctcgatttgtggcaaagactggaactaggaaaaacttctgtgcattctcccgatactagtagctgtcacgaagtaaacgtaacgacgacagcgggcttcagtcctcattcgtctcctctttcagcgtcgttagcgtcgtccgaaggaagtaccgcgttccatgaaagagaagtaaagaacttgcaggcaattgtagaccaaagagaaacaccttcgggatccaaatccaaatttgacgaatcgggagattcactgcccgaacatgagggatgatacagattttctgagaaaaccgactgatttttcacaatttttatctattttcttattatttaaaatgaagcaagagcgtcaaaaaggaatctgataattttatattgaatgttacggcgaagcttacatactattttgtgtaaacgattttttatcattttttgtattaaaaacagtacccggatatcgactcgtattatcagtgacttcagtgtttgtctggaaagtttcagtcagaatttggttttagtaatttgttccagttttgtaaagttatcaccaataagttatcacaaaaactgattgaatgcgttgattctttaaaaggttgaatgattcgaatagtagccgtgatctatgcttacagtatcagttaccataatatttctagcacatttacctttttcagtcttgcttcagtctcgtttcattacgattaacgcgttttaaacagttttgaacacttaaaggaatttgcgattgtgaaaatgctatctttttggttaaaaatttgcatcttgtattaggtgagttactattggttgaaacaaaatctcactaacagaaaattaatcggttctaattaaggaag

SEQ ID NO: 8374 - DNA, 1084 bp, Diabrotica virgifera
  SmartBlast Evalue=1E-102; Info=Protein Swiss cheese n=1 Tax= Camponotus floridanus RepID=E2A0X2_9HYME
ggaaagtaaaaaatatatctggccaagtccgcaattccggtcaaggcaaaaagagaaaaatggtgatgaaatttgctagaagattattacaattgaaaaaggaaacagatcaagaacaacttaaggtgctagaacctccagcagagtatttacaagaagacatgcttagcgatgacagaatgccgcctgatgctttgtatatgttgcaaagtattagggtgttcggccactttgaaaagcccatatttttgaaactttgcaaacatactgaaataattaacgtccatgcaggagcgtatctgtttagaataggtgatcctgatgaacatgtttatattgtacaaagtggtaaactcagtgtatcgattactggtaacgatggattgacgactttaaagatcgtcaagccaggagaatcagttacatcattgctaagttttactgatgttttaacagggcatacaagtccttacaaaactgtgtctgctaaggctatagaagattccatggtagtaaaactaccgatgtctgcttttcaagaaatatttcaagaatatcccgatattttcgtaagagtattacaagttattatggttaggttacagagagtaacgtttacagcattacatcagtatttaggcttaagtgccgaattagttaggcagcatccaaagcaaaaaaactcaccaatgaagaaaaagaaagaagaatcttctctcaatactactcttacggagactccgacagccactactcaacctataccagtgcctggccataggagaagtaaatcatcgttagaatcaaaatcgttttcaccaagtgggaatttcggaaatggaatggcagagtcggacagtattccaagtggcactgtatcggattgtggttccataccaaaaaagaggctgtcaatacaaaacccggatattaatgacgaagaattaatagaagtagcaaccgaagcatttgtcaaagaattaggtttagaagatttggattctttaaaaggaaaggtggaaattagggaagtgtcagcaggaacttacttgatgaagaagattctaataaggacgcagccctt

SEQ ID NO: 8375 - DNA, 1086 bp, Diabrotica virgifera
  SmartBlast Evalue=1E-178; Info=N- acetylgalactosaminyltransferase n=1 Tax=Aedes aegypti RepID= Q17CM9_AEDAE
gctgcgacagatcttaactctccaaagtgtacattaggcggtggtactggatatttatccagcacatcataggccacattttccatataccactggaagctgtgacagcccaaacgattttttagtgccaattggtcatctatgtttcccatatccaaatattttgccattggctctcttgtatagaaatattctttatagtcagaatcaaaccaagtctctatcactctcttgtaattgattgttattagaggccccttctttttctgtgccaattttccgaaattataaggcataaaacttcgataaacgtgacctactctggaacatggaacccattctatgctacctccgcactgccaaatcttaaaacttaactcaaagttttccccaccccaaaccaacaaacctgaatcgtaagctcccaattccaaaaagtactctctattaatagcgaataatcctccagcatgagtaggactcttgtacggttcgctgttgtgctttctcgtcttcaattccctatgaggcacttcgttttctttgtacaacattccccattcgaatatgcccctaaaatgtcgatcttctccgtatactggacggtattcgaaggtcttgtggtcgatgccgtctataacgggcactgtcatcgttctgtggtctctaagtataggggcgagaagtgggggcaaccagtttgtgtttacttcacagtgagcatctagaaacacaataacttctcctctggcctcttgagctcctctcgacctggttctaatcaagccctccctttggctattcctaataagtctaattttccctttaaattcattaatattgctttcgagttttgatttcaaattttctttatcactaaagtcatctaccaacaagatttccttcaaagcgtttggaggagatcggtttattacagaatgaacagttctcatcagtactgataagccttcattgtggaaaactatgattacactagtgctaggcagttcttcagggtagtcccaatgtttgcattcctctagtctggtatccaatatagaacgatccagtgatatttcatctgag

SEQ ID NO: 8376 - DNA, 1085 bp, Diabrotica virgifera
  SmartBlast Evalue=4E-51; Info=Serine protease 13 n=1 Tax= Costelytra zealandica RepID=B0ZBP1_9SCAR
aatttgtatctcagataccactattagtccacatctaatagttttatgtatatgtacctatttcaaaatgtataactattactgtgtatatgttgcgctagtgagtagttgtttatatctgtctaatgcaggaacaccaccactagaaaactctgaaaagtccaataaccttggaattattgatggacaggaagtcatacctcattcgatgccatacatggctgccattcgtagtgaaataaattacaccacagttttatgtggaggatctttaattagtgattccttagttctgacagcagctcggtgtgtttatggagctagtgaagttacggttactttaggtgctcataatttgacaatcaacgaagaaagtcaagtcactatgacttccacatcatttgttatccatgaagattataagcattctggggtacttcacgatattgcagttattgaattgcctaaagcagttactttaaatgactacattgccacgataaaattgccagattttgcagacattagcaatagctatgaagaacaagcagcatcagttgccggatggggaagagtaaatgatgcagaacaattaaacagcgatgttttactctaccaaaattttaccattattccaaacataatgtgcgagctctcatatttattccaaatacaatcaaaccaactttgtacatcaggtgtatcgggaaagaatatttgcttaggagataatggtagccctttggtattgaatggcgtacaaattggcatcgcttcctatggtaccgtatttggatgttcgttgggattccctggtgtgtttaccagagtaacaagttatttaggatggttaatgctttaaggatttgaacatcatgatcctgatcgactagtattagaatggttcataatgaatggctattattttacctgtagattatattaataattaagcttttagtttaataactgagaataaaattgtaaaacctacgtactgagatacagctataaaaataatgaagtaaggttgtgaaatattttaatgtaaatagaaatataaaaatgaaagtgcacgtaaaaaa

SEQ ID NO: 8377 - DNA, 1081 bp, Diabrotica virgifera
  SmartBlast Evalue=5E-13; Info="Ankyrin repeat protein, putative n=1 Tax=Trichomonas vaginalis RepID=A2D8N4_TRIVA"
ggcacattagaggtgtacgtttattccttttggaaatgcttagatttgccccttgctttttaagataccttatttaagtgcattattagaagctgcgctgtgactgggtgtaaatccatgattatcacgtaagtctaaatttaaagaaaaattacattaatttttaaggaaatctagaacatcaactgcatcgccttcagcagccaaatgcactaaagaccgtccttaattattacattgatttaaatcacttccaactgatttaagatgtcttaaaatctcaactatattagaaagagctgccaaatgagccggtacattcccaatatctgtagaaacgttaatgtctacaattttctactaaataacgtaggatgtctaatgccccatattgagccgctatgtgagcaagtgtacgtttttccttgctaaaaatgcttagatttgccccttgctttttaagattctttatagctttaagtgcattatgacaagctgcgtagtgactggctgtgaatccatcattatcacgtaagtctaaatttataccaaatgcacaaaagaccatccgtgattattacattgatttaaatcacttccaactgatttaatatatcttaaaatctcaactttattacgaagagctgccaaatgagccggtaattcctcattatttgtagaaacgttaatgtccattttgcaatctcctactagatactgtagaacctctagtgcgcctccctgagcagcttcatgaacaggtgtacttttagtcttgttggaaatgcttagatttgccccttgctctttaagaaaccttatagttttaagtgctttttaccagctgtcaagtgactgggtgtaaatccatcattatcacttaagtctacatttaaagaaaattacattcatttttaagaaaatctagaacgtcaactggatcacctgcaacagccaaatgcactaaagaacattgatttaaatcactcccaactgatttaagatatcttaagatctcaactttaatacaaagagctgccaaataggccggtaaatcgccaagatctgtaaaaccgtaatg

SEQ ID NO: 8378 - DNA, 1084 bp, Diabrotica virgifera
  SmartBlast Evalue=8E-46; Info=p-nitrophenyl phosphatase n=1 Tax= Glossina morsitans morsitans RepID=D3TMD7_GLOMM
ttgtaaatactatatttatttcaaataatatcgtcataatttgtgtacagtttttattatcttattcagttcgcctagattctgtatataatacgtaggtttgtactcttctgggtgcttccagtctttaatatcatccatttttgtagtaccgctaagaacgagaagtttttggtacccacctacggtaccaaatcccatatcctcgttgatcacatctccgataaaaagtgtacgttttggatcagtcacatttaatttttcggctacatattggttgtaaagatgtgatggttttgccaattgaactggttgtcttccacttatctcagataaacacgtataaaaaaatttattacctattaatggtcctataggtccaacaggaagagctttgtctgctgcagctatgaaaaacaagcaatcttttctctttaagtaggtaagaactttttgcagctttatgtaagttaaatttgcgtcaaaatcgtaaagaacagccccgatttcttcgtcatcctgaatgttctcaaatattcctttgacagattcttctatctcttgaggagggtcgtcagcaacgttaaatccatctttctttaaattttctttatactgcttgctagctaccacatagagtttcttctgaaagtttatcttttttaaatgcgctactacagccatgtaaggattaaccagttcttctatattttgtgatagtttattgtttttgagtctttcaaataaaacagatacaggtgcacctgtgtaatttgttacaaatccaatttttttccctaaggtcctaagattgtccatgcattccacggcatccggaaatggtttccataatatccacaacacgccatctaaatctgtcagaacataatcaaaactatcaataaagttaagttgttcttccttaggaacttccgcaagattcttcagacttttcgtcgtcatattaacaaacaattacctacttaaagcgtaagtttaacgtcaattgttacgtctaaacgagtaacggtgttatttaagtacaatgtgtttgctatatattcgcaggtcaggcctagttgaa

SEQ ID NO: 8379 - DNA, 1081 bp, Diabrotica virgifera
  SmartBlast Evalue=1E-29; Info=CG1105 n=9 Tax=Drosophila RepID= Q9VI53_DROME
attgattttaaagtgatacaacaactatagtgatatttcagatttttttgtaacttctatattgtattttttagaaaatgagttgccaaatagtcttgagtaacacaggaccttacagtccaggagacacaatatatggaaaagtagtatgtaattttagatccagcgaaagatttagaggtattatatgcaaattgcgaggaagagaatgtacgtcttggaatgaacgacagagccattacgacactcgtaccaaaagaacaaaatggcgcacagttaaatacacgggcgataataaatttctagcgttaaacataaaccttatgggcgaaagtactttgccagctggttgctatgaatatcctttcaccttcacgcttccacaacctggaatccccagtacttttacaaatatctatggatacgttacatactacattaaagcaaacgtagataaagcatttgctattgattatatagatacagtgggattacatgtgattgcaccagtaaactttaattatatgcgacatgagctacaactgaatccaatcacttatcaagatgagacaacaatgtgctgcttgtgttctggaaacggtgttattacaatgaacttgtatttggacaaggaagcatatgtagctggtgaaatagcaaacattaaagtgatagtgtataatatgtccaatgaaaatttttcagacctaattttatctctaaaaaggcatacagaatatacaactacctcaccaaatactcatcacaaacatgaaactgatattatagcacatgcatcagatacaggagttggtgcccacggcgaaagaacgtacaatctcaattttatgataccagctaccgctccgataaataatttttctggatgcagcttatttaagcaatggtttgttttgaaagttaaaggagtgataaaaggatttcatgcaaacttagaaatatccgctaatttaaaactgggtcatattccatttcttggaaattctgttggcttacctcctgcaccaagtatgccttattatgaaccaggtgcactttcaccaactccactatttaaccc

SEQ ID NO: 8380 - DNA, 1084 bp, Diabrotica virgifera
  SmartBlast Evalue=6E-73; Info=Calcium homeostasis endoplasmic reticulum protein n=2 Tax=Aculeata RepID=E2B5C4_9HYME
gatcgtctttgtcttttttggcaatgttttttgccttgtagaactcatacaaacctagtttttcccaaccttcgctgtctctaggcctatcatggtttggtaatgagaagaaggcttcgactgcagctagaagtcgttcgctaggtggtgctggcggtggcaacctaatatctttaggatctaacggtttatatgtcgtttcttccaacttgacgaggggaactgtaagtccaaccggtaactcgtagtagggcgctgagggcattaggtcttccacgtacggttctggtggcgacacaaaccctggcggaggcttcgaaaaatccggaagcaaccccagcgccggaaaataacctgggggcggttgcgaaaacgacatactctctacgccgttttggttcaagtcgggcgtggcagggaagacgggcatggaagtgttgttggaagagtagctttgagtcattccgtgttggttcatctgggaagggggcgggatcgaaacgttcatgtctatatagttgtcgttctggtgggaatttatcgtcggaatggggaatgcttgctgtggtgtactgtggctcaggctctgtatggtttgctgaaggctctgctggattgtttccaaaggaagcgtgctagaaggagctgctggtggtgtaggttgagctattattagttgctctaacgtttgcttctgttgttgcagatccatgatctgctgcatggcatggcagacaaaagcctggtgctgggcctggtacccatcatacgtgactttcgtctgttgtgacaagctagaaacttccgactcatatttagctacttgatcggcttgatactgggcataactctgtacaggatttctcattcgttctaatgtatcagctttcaagtaatttgttttcgattcccacagttttaacaatttatctagttttagtttttgttcttttgtagctgttatgctggcattgcaaaacataggaacgactactctttctaaggcttctttaatatcactggcattttttcttgcactatgatgaagtaaatcgtttactaaatatatcacatgtaatttttg

SEQ ID NO: 8381 - DNA, 1074 bp, Diabrotica virgifera
ccccctcaaacaatatattgaatttaaaatggtttttatcaaaagcacttcagtggatatattatgatgtcgtatttaaacttaccgattcatttgatctctaattttataaaatgcaaaaatttaaggctaagcattctatgcacacgactaagcggcatttacataaaagaaaattcttcttgtagtacctgaccgttccggatgttggcgaccatcatggcaatctgtactttgcacactgctgctttaaaaatatttgtggttgttgtattgaaccacgtacgtagattttttgccaagaaatccttcgccttccagctctgcgttttctttgtacttttccctgtaagattagttacagccgtccacatacctcgctattcctcacgctgtgaccgatgtattcaattttgactgttttattgtggttagcagctctttttctttttgtatacttaataaaacaccctgatcagtaacgtggtcggtataagacatcttcaggattcgacgataaagcctcaatttctttcaggtgccgactgtgagagtccacgactcaactccgtacaaccgtatagggaagatataacgtcgtagtaacctgatttttatgggtattgataaatcgtgacatttgaatttattgctccactctcttattttagaagcagtaatagtttgtaaacgagggatgttgcggtcgcggttatgaaggaaagattacaagagcgctccctggtgttacaggaacggaagtaaaacctttctagcatagtatttaccaaaaaatgacatgacagtgaagcgtgcttctatatgcatctatattccttaatttaaagctaagtattcccagccccacttttccatattatttcagaagcactagtagtttgttgacagcggacggcgcggtcgtgaagaggggatcagaacagcgctccctggtgttaggggaacagaagtaaaaaaagtattggttcccgtctcagcatatacagggtgttagcaaataagtatgaaaaactttaaggggcaattctacatgaaaaaataatgacagtttgc

SEQ ID NO: 8382 - DNA, 1082 bp, Diabrotica virgifera
  SmartBlast Evalue=2E-46; Info=Benign gonial cell neoplasm n=2 Tax=Tribolium castaneum RepID=D6X4B1_TRICA
ttttaccgacgtaaaagtactttcaatccctggcagggtgtttcccatagaaacccactttttagaagaaattttagcatcaacaaactatatgtcaccgaaaatgttagaggcagactgcaatggaaaatccaaaaagaaaaaaccagtaaataccgcttatgaaaaggtagaaaaagtggatgaagatgtcgatgaaatgaacgaatgtatggatgaagaactggatagctatcttacgttttctgacaattatgattatacagtagaccatgaagaagctacggcccagatttttatgtattttatttcagagggagtttctgtgaactatcaacattcacagactggaagaactgctctaatgttggctgcgcatcttggagacaaaacctttatcagcagattatgcaacatgggcgctgatcttaatctccgatgtaaattaggacaaactgccttcgattatgcatgtaacgaagaaataatcatgttgttgaaatatgtgcaggacgaaagagaaggtgaaccggttgcagatccacaaaccgagggcctccgcttacttgatttgtatgacataacaacaccagaagatgtcattgacttcaatctcatagtcactgtgataagtagtatacataatagtgggatccctggatctatattagtttttcttcctggttacgatgatatcatgatgtgcagtgatagtatagaaaggtctgatgctttaagagataataactacaaaatcttctacctccatggatccatgaacattaaggagcaaaatgacgtttttaaagaaattggcagaagaaagattattttgtcaactaacatagcagagaccagtattactatcgatgatgttgtgtatgtgattgatgtaggaaaagcaaaagaaaagcatttgacgcctataataaggtatcgtcgctgcatacaaagtggatttcacaagcatgtgccaaccaacgaaaaggacgggcaggtcgtaccaaacctggcagatgctttcggttgtattccaaacacgctatgagaatatggatgtggaaagagttccagaaattctc

SEQ ID NO: 8383 - DNA, 1082 bp, Diabrotica virgifera
ctctgcgctgactaataaactatttcgaaaatcattcctaggcttgacgagtaataaataccctgaattatattttcgaatatggtcttctttaatttgtggccatagtctggttgaagtaaaccaacaaaatgtttgtagaaactgatatagaaatcgatacgtagattatactttagggtagtggaaaaagttttgtcgaacagggagatatacggagatcttcatttattccaatgtgatggttatcactgtgttattaagtaatctttgtttaattttttgtatatttgctgtgattttaatggtgttggatgatacatattctaaaatattaacaatttatagcatcggtaaaaatcccttatggttattaaatcaaaccccaaaaagcacaattgcccccaccctttacatgacatataatttttgataagatttgagtaaaatttaaagtaaatttacaacgaaatatgtccagatgacacaaagctatatttcttcaatttctaaagaagactgacgaatcaatgtgttaacttggttggtttaatacctaagggttctagttcactaagtaattcacagtgcagcttaatacaattaaaaggtctgcgagtcagcttctatgtaagggttatagaatgtaaatgacataacatcctttttttcgaaatatctgtcatcattgaggaaaacatttgaatattctcataatgttgtaatagtaattacatctaccacaacaaataattatttatatggagatgtagctgcaatgataaaccgaaaaaattatttttgaaattaatttaaaattttggataatagtcaactttaaaataattttcaataaattggactaaaatcattctgatgaaacagtacattaatattattcgttcatcatttctaaaaatccttcactacccaggcacaaatccaaactattactactcgtttgggcttataattttattaagttgtactagcttaacaaatatattttctaaatcgataggttattttaactcagcgaagactatatattttaattaaaacaacaaacaacgataaaataa

SEQ ID NO: 8384 - DNA, 1084 bp, Diabrotica virgifera
  SmartBlast Evalue=7E-95; Info=Focal adhesion kinase 1 n=1 Tax= Camponotus floridanus RepID=E2AKA8_9HYME
gttcgtattaatatatttaccactaaatattaattgtttttaattaattatttcctgtggatgtagctacatagaatttaaaacaaagcgttcattagtgcccagactacaatggcagctataaatactcgcctttcttttttaccttgatgtatctccgacaaccgccgtgacacaaggctctccaataaggtgcgtgtcgagaagaagtaacatggagagcccccagaagtctcctcaaaatagtccagctacgggtgaacgggccaccgttaaggtacacttaccgaacggtggcttcaatgtcgtcagatacggcgattcggtggaaattaaagctatcattcagacggttaccgagagattatctacaggggagagatattacaatggactttatgctatgagattatccaggtcaaatacagaaatgtactggttacatcaggacattacaatgcagcaagtttatgaaaagtatcttaaaaaacatccaaacgcagattggaggtatgagttgaggatcagatatttaccggtcactttaaaagaactttttgataaggacaatgtgacgtttcattattattacgatcagatacgaactgattaccataccgagttccataaaaagatcgatcaagatacagccattcaactctgctgtctagaaatccgaaagtactttaaagaactgcctccgaacggcttggacaaaaagtccaacttcgaatacctagaaagagaaatcggtatgcagaagttcattcccaacagcattctagaacagctgaaaccgaaatcccttcgaaaaaacatacaaatgcagttcaagaagatagctcatctttccgaagctgacgcgatgttcaagtacttggaaatcttgaagtaccacaccaacttcgatcaggagaggttcagggttgatttcggaggcagttttacagtacccgtggagctggtcattggtccggatataggtatctctcacactaacgtacaagcctccaccaccaagaacatcgccgattttaagcaaattcaggccattcaaactctggttagtgattgtgaagagcat

SEQ ID NO: 8385 - DNA, 1062 bp, Diabrotica virgifera
caccagaaggaccttaacactgtcagtttatgtgcagggcttctaataagtttctgaaaaacacctagttttgccataagtttgttggtggcaggtaaacgcgccacatttgggcttccagaccacttccattggattcagcgacccaagaacatgtaatagcaccatcggatcgaggcgagctgaaggtgtccacgggaccccctatgttgcgactagactagtagtcacaaaatagtataaaatattatcaaataacaacaaatttttaattggatcttaaataaacgtcccgaggaaatgcaaaaaataaatataacatggattaacataaaattcatataaaatatttttgttgtttattattgatatttttaatcaactcattgaactcaagtctgtagctactttcacccagttttcaaatttttaatacaatgtttctttggataacttttgagcaatgtgaaatacagtgggaaccccgaaaatccgaactaattggggggacagtctgttcggattccgaaaagttcggattatccgaaagttagcctgactagtaattccaagctttcattgtcgttgattttgagtcacaaaacgttctcgcaagagtgtggacaataattttggactcaagttgactacgagagaaccaaagcaagtttatgtttagcctgtataagcactacatattaagtacgtatttatttttaagaaattttaaatgtcaaagtcctattaatcttacattgttcaattctctggttttactctgtataataaacatgtttttaagtttttgtcttgaacgttttcatttttttcactttccgttggttcggatttgccgaacgttcggattagcggggttcagatttgcggggttctactgtatattaaaactttttctcactaaagctcagaacttatctaaacacaaaatactattgactaactacttattttataaaggtttattagatttaggtaaaacctacgggtgatattttcgactgtaattgcctaaataggctctaaataaattttttttatatt

SEQ ID NO: 8386 - DNA, 1084 bp, Diabrotica virgifera
  SmartBlast Evalue=1E-101; Info=DnaJ-8 n=1 Tax=Bombyx mori RepID= C7AQZ6_BOMMO
cttcccactccatgattcttaagatatcttctatattgcttatatttattgttttcagctaactgtttcttagcattttcttcttcctgtttatgccattcgtcaaaattggccctgatccacaactcttgttttaagaaatcttcttttttctcatcttcttgactattaaactgatgttcactcattttcatatattttctaataatgtacagtttttcttcttcactatatggttgttttaatatactatgcctccaataccaagacacataccaagaaatatattttactattgtatacggaaatataattaattgtatccagagcaaatcagtaatagatggcttggcataagcccctttaatatccatcttatcttcgattacttttcttatgatggtttcagtttcttcttttaactcttttttatttttcttctgctttttatcattttgtagaagcccgtcttctttggcgatttctagcgctttgtttctatactttggcacagtcataaagtacttaatagcaaggtcatatttctgccaaccactgtaatactggattattgatattatagaaattgtcactattaatactattcttacatctactttgggagctactcttcttcgataatatctataataatgagcgtagtattcatctggattatccaacatataatcataatctgatctagcttcctcatctttaagaatttcatatgcatttgcaattattttgaatctttcttcagccttttccttggcttccggtgttctgtgcagatcagggtgatactgtctggccagttttcgataacttctggatatttcatttttggttgtctcccttgtaacttccaacacatcatagcagttctcttttccacaatatattccttctaaaagttgaccacttgccgaaacacataatataaacagaatggatgttactgctattaaataatgtagcattttatatctatttattatatatcattaattcaagaaggaaccaacactcccattcaaattattgaattagactaaaatataaaatatccaatccaacatgc

SEQ ID NO: 8387 - DNA, 1074 bp, Diabrotica virgifera
atttatgtttaatttacaatgtgtgtactgattttcagccttagtgaatggattaattgccttcgtgggagggcagctttgataccctctcagtggcccctgttctgcgtttcgcttgaccgaccgcagtgtgtttctctacacagtcacagtggtcaactgtgaaaagtctggctttggtgaattcatagagatttttcggcgctgcctcttggactattaggtcttttcatgtacaaagggaaacgggaagctgtgctttctgttgtgtatgctaaagattggagtttagttttcgtattcgaaaaatgcaaatagacgtagatttatcggtgaatttcagtaaaactctattataacattactacattggctttcgcagtgaattgactgtaattgtaataacttgaataattcggtaagatcattgttcagatcgtgatattctatgacaaatctatcagcagagagcgaacttatagatcttttaaagtagaacaaatgtaagatccaagaaagtaaagtaatagcaaaataattatgaggtaccaacgtagcgacaaaaaaatccacaaatatgtcgtatagcttttaaaaattgtactgtgctgcaggtcagcaaacaaaaaatatcttttgctcattgttttctgtgtttataagccttggtgtggaattttttcttcgtggttttccctctaccattgaggcagacttgtgttaaaaattcaaaacttttcacttgaaaataatttcttaaacacttttatacgccaagaatacctgtatttcatattaagcctaacttcctcacactttaataccaaaataccaccaacatcttcctcatcatctgtatttttctataacttcttgtcttccagtataaacaaattttttaaccattcttgtcttcaaagagaatggcatatgacaagtgataaatgacagaaataacttatagcgtcatcataactgtccaaaaaaattggaaaggcaacaattcctcacactttaataccaaaataccaccaacatcttcctcatcatctgtatttttctataacttcttgt

SEQ ID NO: 8388 - DNA, 1076 bp, Diabrotica virgifera
cataggatgaacccaatgaattcggttcctcttatttctctttcttcgacgataaagtaaccacaacgctataatttgatttcgctccatataatataactataccttttattctacgaaattatatttagttttatagggtaaacgactcggtgaagactggagtagggcggccagtcacgtcttgtgtgaaattatctaaaaacaacatttaaaacgaggggaacaacatttaaaaatgagtggatgacagagggtcttttaaattctgtacatggaaaatatagattgtaatgttgttctgaagctgtttccttgtgaatttttacaataaactagtctaaacgggaaatcagtcacaatttaaacaaaaaaaaataattttattaacgtttcgacgctaaaatcggatgtctaaacgttaataaaatcatttttttagttcaattgtggcttatttcccatttagaatagtttattacatagattgtatgatctaattagatgagctaatccaagatcccacaaataacttagtagaacaacgatcataaaaacaaattaagtcttttaattaaaaatataagaaatattaactgacaaaatagacattgcaaatgaattaaataagcattacagtacattaggacaaaagtatggacaaaaaatacccatttgtaatgatacatcgtaatgatacatatcgacatcgtatcatgtacctacctcagccacaaagtgtaaataaaaataatataccaaacaacacagcaaaatatcttcgtgcaactcaattcttattgtgtgaaaaggacaagtgcgacaaaactacggcacgagaaatccctcgcacgttcaaaaatcgtataatgtgaaacagtacttagaatttctctatcatattaaaataatatacgtatgatttatctatcaaaccaacatatatctataataatctacttcctagtcgttaatctaatgcaggtatcctgatatcataaagctattagctgtattttccaatattcctccattctctcttattttccgccattctagcatattctgtcaatgga

SEQ ID NO: 8389 - DNA, 1077 bp, Diabrotica virgifera
gtgcttgtaaaaatgaatgttctactaaaaaattcttggcttagaatgctgttgatataccaatctaaagagctgttacatcagttgtatattgttttgatttatgtttcatgtgttatttatcgaataaaataatcttgttatattattatatacaatacaaagttttttttgtaggaattatcatatttctctaatagatatacaagaatcatacaattcttacaaaaaaatataggtatcttgtgtataataaaattacaagattatttttatttaataaacaactcacacaaaacataaatcaaaacaatatacaactaatttaatagtttttagattattatatcaacagcattctaaactaagaagtttttagtaacacattcctaattgcagattgtgacccgcagttattaataatataattttcatattaaatttcattaatatgcatcaagaaatccctactttgttaacactcaaactaggtgatctataaatgtttaaggtgatattgttagagattatttgattggtccacattttttgacggttgaggtttttatacgacggtgctccagttcttccaaaattgatttttttcaagtggggctatataaaaaaccttgtataccagaagcatccaacaacgcttgatgatatgaaaaatagaataaaagaagcttttaataatattgacttacaaaaatgttagaaatgtggctcggtcatttgaatatcggttacaaaattgcatagacgttgaaagtggtcattttcaacatttactttagacttatatccttaacatcacattaattggtacattcattaaattttgttatggtttattatttttttgttagttatttattgaatgaaaatatttgttatattattacataatacttatttgttaagttatttatatttataagaattgaatgtattcccggcaaatgaagaaaactaaaaatatctcagaaactaataagtttaggtataggagatgctatataaaaatgaaagagtatcataaatacaatattcaaaaaaataaaatatagggtgatc

SEQ ID NO: 8390 - DNA, 1083 bp, Diabrotica virgifera
  SmartBlast Evalue=3E-63; Info="Coracle protein, putative n=1 Tax=Aedes aegypti RepID=Q170K4_AEDAE"
gctggacgctatttagacccagttagtggaagaatcgattcaaaatatggaattatcgatcaaataaatagcacaatcacttcaaaagatccaaaatccggtagggttgaacagtaccctgtggaaatcgatagtaacttgggccatattgttgtaaaacaaggagtggtagatcccaaatctaacaaaattgataacagcttgggacagcttattaagatttcagaacaaggtgattctattgttcctgtcacagctgtaacagcccaaagagatccaaaaactggtcaattagatccatctaaagctcataaagaaacgaccaatggcaaactcgatcccaaaaacggtttgatcgtcacaaaatatggatcagtcaatgttaatggcaagaagattgttagtcgcgaacctaaaactggcaaagttgaagaacatcctatacagtttgattcaaatgacaatattattgtattgagcggtgttatcgatccaagaacaggtgccagagataacaatttgagtcaaattttgcaaatagattctgaaattgaaccagatattgttgttacctctcaagctggaaaactcgacaaaaaaggtctcgaccccaaaactgtaactgctccagaaaaatcgattggtatgtacgatccagaaaataacaaagtatatactaaatatggagtaataaacctaatacacgaaaccctatcctttattgatcctaaaactgggaaaaccgaaattaaacaagggatcagagaaccttccggtgatatactgtttaaaggactggttaatcctaaaacaggaaaaattgacaaggattatggtagagttattaaacttgaactaagtgaatcaaaggtagatccttctgtaaccagtacacccttgaaaacagataagaagagcgtacctgtatcttctgtaaaagtaccaagtcctgtagcacctacaggaaagggtaaagttattaagatattaacggttactgctaagagagatccaaaatctcatcaactagatcttgaacatggtcatgttgatcagtcagcaggaattctcactcccaatgga

SEQ ID NO: 8391 - DNA, 1079 bp, Diabrotica virgifera
  SmartBlast Evalue=2E-70; Info=Glyoxylate reductase/hydroxypyruvate reductase n=1 Tax=Culex quinquefasciatus RepID=B0X7N8_CULQU
aagataagtacctttttatataactatttaaatgattcaagtttttctgattagtattaaatctgtgttggtgttaaattgactaaacgaatatgaacaagtggaaggtgttagttactaatccaactatacaacaatgtggattaaattttttgagagaaaatggatgccagattacggtagtagcagctgaaagtcgagcagagattttaaaaaatgttaagggcatagatgctcttttttgggcttccggcctttccttggatgctgaaatactggatgcagcaggtccacagatgaaagttattggatgcaattcagctggctataatcatattgatgtacaagaaattaaaaaacgtggtattcgtttaggtaatactccaaatgtactcgacgatgctgtagctgatatggcagtgttactcgcattggcagcatccagaagacttcacgaaggaagattaaaaattgagagaaatgaatgggaagtctataaatggaaatggatgcttggacaagacatagcgaattcaacagttggtattatcggtttgggcaacattggacaagccattgtggagagattaaaagttttcaaagtaaaacaatttttgtatactggtcatagggaaaaacctgaagctgctaaactgggcgcaaaatttgtatcattaaacactttactagaagagagcgattttgttgtagtggtagtcccactaacatcggagaccaaagaaatgtgcaatcaagaatttttctcaaaaatgaagaaaactgcagtatttgtcaatgtaagcagaggtcaagtagtggaccagccagctttaattgatgctttaaaaaatggtacaatatatgccgcaggtttagatgtgatgaccccagaacctttacccccagataatgaattactagaattagccaatgttgtaatagttcctcatttgggtagtgctactaacaatacacgagatgccatgtcaaatttaacagctcaaaacattttacgaggtctaagaggagaagaaatggtgacacctgttgtctaaagtgttatacatatagctatattt

SEQ ID NO: 8392 - DNA, 1082 bp, Diabrotica virgifera
  SmartBlast Evalue=1E-146; Info=Probable O-sialoglycoprotein endopeptidase n=2 Tax=Xenopus RepID=OSGEP_XENLA
ggttatgtggttatgtcctgaaaggtgaaagtgatttaaatttgcaatttgtataatttatagagaatatcatggttgtagcattaggtttcgaaggaagtgcaaataaattaggtattgggataattaaggatggcaaagtactttcaaattgtagaagaacctatattacaccaccgggtgagggttttttacctaaggagacagcacaacaccacagggaaaacgttttagtggtattaaaggaagctttacaggaatcacaattaaagcctgaagatatagatgtcatttgttacacaaaaggtcctggaatgggagctcctttagccaccgttgctgttgtggcaaggactgtagctcagttatggaacaagccacttcttggagtaaaccactgtataggacatatcgagatgggtagactaataactggagccagtaatcccactgtcctctatgttagtggtggtaatactcaaatcatagcttacgcaagaaaaaggtatagaatttttggagaaactattgatatagctgttggtaactgcttagaccgatttgcaagagtattgaagatttctaatgatcctagcccaggctataatattgaacaaatggctaaaaaaggatctaaatatgttctattgccttattgtgttaaaggtatggatgttagtttttcaggaattttgtcgtttatggaatcaaagacaaaaagtttactgaaagagggatacacgcctgaggatctctgtttctctttacaggaaacaatatttgccatgttagttgaaacaacagaacgagccttagcccactgcaactcccaagaagttcttattgtcggaggtgtaggctgcaatcttagacttcaagaaatgatgggtgtaatgtgcaaggaaaggggagccgaactgtttgctaccgatgaacggttttgtatagacaatggaataatgatcgcccacgcaggtgcggaaatgtttggagctggagttagaatgaaatgggaagattcctttataacacagaggtataggactgatgaagtggaaactgtttggagaaatgattgattg

SEQ ID NO: 8393 - DNA, 1079 bp, Diabrotica virgifera
  SmartBlast Evalue=6E-17; Info=Raw n=1 Tax=Culex quinquefasciatus RepID=B0WSL4_CULQU
gaccatatctttattaaggcccaaatagaaagctgccaaaatgatgctggtcattgatcgagtgtcgttcgtgatcacaattagtagtactttacttttgtctaggcccttcttccaatctagaacatctgaggaattgcttcggatatacttatcttcatcacagccattaaacgtatattctccttccctcaatgcaggattgtaatatttcaatccgtgttctttgattaaaggtatcgctatctcgcttctccatttatgtaacgacgacatggaaccacctaaaaatatatcactgctgggtacactctcgtcgttggtttcctccggaggggcttccattagacaactgacgtgcgtgttgttgagactgcaactgttgttatttgtagaacattgcctctggaaagactgtgtcgcccaaacatctgtcgtacacatttcgcagttgtccgtggttgaaaactccgccatcaaggcacaaaacttctcgaaactaacggtggaattgttgtaattgctcgtggagtttagataattgtatacttggttcatttctagggaacggttggttaactttttgaacgcttccaagacatttgctggcttcatcccgcctccataggagtcatatatatcccttagtttcctaagtttacttgtaatttgttcctctgcgctggtaccattcgtagaagaatttcttaagatatttgcagtgcattgtagagtagtgaggtttttgtggacttttacccccttacttttaaccagatccaataaaattctttgtgcgtttactaaatctctatattccctatctgttataacttcacccattatggtctgtgccttttcataaggctgcgcaactactacaacacaccttccagaagctatgagataggcgacttctatcatccccactgtacttctagtttggctatctatcacaaaaagtaacactgaagctgcctgctttgcatcatactcttgtgccacgagttcaggagcccacattgacacttgaggattaataaaaagagatgccatgtttttgtaactctggaattgct

SEQ ID NO: 8394 - DNA, 1082 bp, Diabrotica virgifera
atttactttactctgctggtactacgaaatcagcatgaagggtttcgtagtttttgcggtacttttcgtagcagccttcgctgctgaagtttcagtggaagaaaatattcctctacgagaggaaagctccgctgcagtagtagatgaaaatgtaaaagtacaacaatctccagagctagtccaacctatagacgtacacacaacagctgttcaaactaccaacgtcgatactattagtggacctcctagaccaaaaagaacacttggagtgttactaggagctaaagctcttggagcaggtttaatcggagccaaagccttaggagctggattaattggcgccaaagtcttaggagccggattaattggtgctaaagccctaggagccggtattatcggtggaaaaatcttaggagccggtttagtagctggtggtttatatgctggaggttacggtcatggaggatacggaggttacggtcatggaggatacggaggttacggtcatgggggatatggaggaggatacgaaagttatggaggctatggaggtggatattatggaggtggacatggaggatactatggtccatcatatcacagttatcccacaacaactgttgtagaagaatattatgtacccgtttctagcggttatggaggacatggtggttatggcggatactctggaggttacggtggatccagttatggtggatatggtcatggcggatatggtcatggcggatatggtcatggcggatatggaggctctgtaggttatggccaaggcggatatggaggaaactacggatatggtcaagggggatatggaggaagctacggtggaagctccggaggctatggccaaggaggatatggaggaagctacggtggaagctccggaggctatggccaaggaggatatggaggaagctacggtggaagctccggaggctatggccaaggtgggcatggaggttatgtgggcggcggcgaaagttacggaggaaatggcggatatggaggacaaagttatggaggaggttgtggaggaagttgtggaggaagtcgtggcggcc

SEQ ID NO: 8395 - DNA, 1082 bp, Diabrotica virgifera
  SmartBlast Evalue=2E-81; Info=RNA 3' terminal phosphate cyclase n=1 Tax=Aedes aegypti RepID=Q16VD8_AEDAE
tggggactaaattttagaagggttttttttatcataaagtaacaaagaacaaagaacttgctaaatatttgaaaaaagtaaactgtttacttaattggtgaaagaaaaattattttgaaacattgaaaaactggaaaattataaactgaacacaattaacagaacagatcaatattaaaaccaatcctaacctataaatgccatcggtataaaatttataaattagctattttgaagctgttttccagtaatttaagaatatattttaaatatgattcaagaaattgatggttcgttattggaaggtggtgggcaaattctgaggattgccctaactttaagcgccttaaaaaagataccaattcgaataaccaaaattagaggaggcagaagtaagccgggattaatggaacagcatttaaaaggagtggaacttttaagagacatttgttcagccaaagtaaaaggtgcgcaattgggttcaacagaaattgaattttggccccaagaaatcaaaggaggctcctacagagcacaagtaaaaaccgccggtagcatcagcctattacttcaagtatctttgccatgcattatctttgcagatacacctacaactcttcttctccgaggaggtaccaacacagaaatggcacctcaaattgattatctaactgaggtatttaggcctattttagaaaaatttggagcaacattcgatctcgatctaaaaagaagagggtattttcctaaaggtggtggggaagttattattaatgtaaaacccgtggaaaaattaaatcctattgaaatgacaacacaaggatctgtaacagacatctttggatggagcttcgttgcaggaaatttgccagaaaggctctctcaccaaatggcagacagtgctgcaaatgagttaaagaaaatagcttcggtcaatattgaaaggtataaagaggatcagaatatagcaccagatagctgttcaggtattatattagttgcaaacacaagcacaaattgtgtcctaggagcatctgcacttggtaaaaggagtgaaagtcttcaggaaaccggaagaaggg

SEQ ID NO: 8396 - DNA, 1080 bp, Diabrotica virgifera
  SmartBlast Evalue=7E-72; Info=Transmembrane protein 41-like protein n=1 Tax=Camponotus floridanus RepID=E2ACS3_9HYME
catttttgaagtttcacgtctagtcagaacctaaatgttgtttttaataattttactaaaaaatgaatatttgatataaccgattcatttctgaaacatataattaaactaaaagtgacctggttacatcggcaccataatggcttcaagagttacaggaaaccaagtacaagaaaaactatcaactagagtagcaacagtatctgtgattgtgatatttttaacttcattattagctttatccctagtctacaaaacattcccgaatgtaacagaagcagaacgccaacatattaaaattccttggaacatagaagatgcaaaacaactaggaattgtattgaataaatacaaaattgacaattaccatcaagtgatgactggagtttgtgttacatatgtatttcttcaaacatttgccataccaggttcactgtttctatcaatcctttcaggatttctattcccgttcttcactgccttaacgttagtgtgcacttgctcaatggtaggagcctcactctgcttcatgctgtcccagatattaggaagaaaactagttttacattatttccccgaaaaagctaggaaatgggctgtgcaagtggagaaacatagatcaaatatgttgaattacataatatttttaaggataacaccattctttccgaattggttcataaatttaacagctcctgtgatcggggtccctttgtacccgtttgcatttgggacattcattggagttgcacccccttcgtttatagcgataaaagggggccagacattacacgatatgacagctagtgacactgcatttaatatgacgtcatttgtttggctcatagtgtttggagttatgtcgcttatcccgatactattgaagaataggttaagagaaaagatggaataaactagtagatatatttatttaggttacttatttatttgatttcaaaggttctggtttggctcaaatagtaaaatcacagtattatgtgcaacctaaaaacctacttggtttttataaaacagtcatgatagtatttaatttttttgtaatatttcctttaataattt

SEQ ID NO: 8397 - DNA, 1079 bp, Diabrotica virgifera
  SmartBlast Evalue=5E-32; Info=Feline leukemia virus subgroup C receptor-related protein 2 n=1 Tax=Harpegnathos saltator RepID= E2BA17_9HYME
atatactggagaatccgatcacatatatcataaaatcgtgaccatgaacggagcgcggtactaacttgctttggatgtcattaattgccttatttacaacaggtacttgcagcagttgaaaaatagacacgtttctgtagtttgtttataatatttttgtttgtgcactatgaactaaaacgacggatcatttcttgctctgccccaaaacgactatgaaaatgcatcaggaaacagaagcagctcaagatgtagaaataaaagttttttcgtaccgatgggtccaattaattatattttgtttattaggtgtgataaatacaatgcaatttttgcagtttactatagtagcaaatgtgatagctgagtattataatgtagatagttccttagtagatttgactggattaatatttttataataaatataatattctttttaccaattagttatcttattgaaagatacagtttaagagtgacagctatagtgagttcagtattgacagtagcaggttcagcagtgaagatacttggtaatgatccttcccgattctatgccttaataatcggccaaggactttgtgcttttggtcaagtatacatatttaacattcctacaaagtttgcatcggcttggttcggaccagacgaagtatccactgcttgtgcgttggcagtattaggaacacagttaggagctgctgttggagctattattccgccgtttatggtggtgaaaggagaaaccaaagatgaaattggagatggaatttttaacatgactttgtataatactatcggtgctgctgtaattttaatactaataattttgttttttagagccagaccaaaactaccacccagtcaatctcagttacaacttttaactttagacgaagaaaagacgaatttctggaaggactgtaaacttttaatgaaagacaagaactatatattactttaatgtcatttggaattataaatggtctatggaatgcttttggtattgttattaatacattttatataaaatactttcccaatggtgaaactgacataggtataatctccctaat

SEQ ID NO: 8398 - DNA, 1070 bp, Diabrotica virgifera
  SmartBlast Evalue=0.000000003; Info=Non-LTR retrotransposon CATS (Fragment) n=1 Tax=Bombyx mori RepID=Q3V5Y4_BOMMO
ataatattgactttaatactatggaataagttcagggatacttttttaagggactatagcaagttgcctatatctttaagaaaattagtgtttatctccgacagttcacaaatgttcaaagattattgtatgctatatacagatgcatcaaaaaaatattgaaggtgtgggatgtgcctattgggatagcagtaataaaattagtaaaatgtttaaactaaattctattatgagtatatacacagctgaattaatagcgataatggaagcactaaaatatttatctaatataaatcattcaaagtttataatttttagtgacagtaaaagttctcttagtaaaattagtgctataaatcctaaatcaaaagtgaactacattgaattatatatcataaataaaattaaagaacttcagcaacaaggaaagtctgttaagttggcatgggttaaaagccactgtggaataactggaaatgaaatggtagatgaattggctaaaaacgcggtgacacaaggagtattaacccattatctttgtacgccaaaagatattgaatcaaatttattcaaagagattaagaaagaatggaaagaaaggtatattgatgaaaacgtaaatacaggaaaccactacagatcaatcagaaactatataacggataaaccttggttttctaaaatggagtcgacaaaagatatgataagaaccatatgcagaatgagatttgaccactgtcttactccatcatatttatttaaaattaatatagctgatagtccacaatgtatttgtggacagttgggcaatctacaacacaaaattttgacctgttctcttatctctaataaagttaatatgtttttaaattcactgtattctttgactgatgtccaccatcccattaatttaaattatttattaacattagaaaataatgagttggtataccgactattgtataaacatattttagatattaagcttaaattgtaattgtaaaatatagagtaagtattttttgtaaattgttatatgttaaaagaaaaagaaaagaaaaaaaaagaaa

SEQ ID NO: 8399 - DNA, 1080 bp, Diabrotica virgifera
  SmartBlast Evalue=2E-38; Info="Neural/ectodermal development factor IMP-L2, putative n=1 Tax=Pediculus humanus corporis RepID=E0VX35_PEDHC"
ggcgactcgcaacgagaacttatagattgaaacgcgtgctgtgatatatttatttcgtaatagtttttttatcttttatacctttatttaaaatgatgatcctatcagtattactcatcgctgtcactttcagccagttagaatgtaggagaataatggacgatctaagtaacgaagtgagcattaacccagaagaaaattttggctattcttcacgcgaatgggtaaagatcagtaaacctccagtggcagtaatgagcaaaaaagtcggcgcacacatggaactgcattgcgaagcgatgggttcaccgcctcctactatagaatggtacaaagcgaataggaagataacagaaaatggcgctttcgagactaatgtcttaacaaggggtccagctctagctgaggtctcttctagattagttataaattatttattacctaggcatcaagatgtatatagatgtgtagctgaatctggtaccaaagtggacactgctccaaccaagttattagttaccgacggtagagaaatgaacttcacgcagttacttagtgcgaagattctcggagcacaccatcttcccagagttactttctgggccagtacttacatggaagtcatcggaaacgatcttgttcttccatgtaagtatgtgggtaacccgaaaccgagggtcatctggatggacccctacagcaaagttattgaaaataacgaaaaatattcagtatctcaagacggcgaacttagaattagatctatagaatggtcggatatgggccaatacgtatgtgcattggaaaattctgtaggagaagattctatagagacttttttatacccaatgcagggttcgaagtagcaaaacgtatgaaggtgttccacgattctggttctagtcacaagtcacaacatcttgcgccctttatgaatgcgccgatctgaatatttttttaaattaactaatttattaatgtagtatttataaagtaggtattagtagtttaataaattatgtacttatttatattgatatataaaactgaaaatttgaaaaaattaataaatgtattatg

SEQ ID NO: 8400 - DNA, 1081 bp, Diabrotica virgifera
gacgacgatgaagaaagtgacgtagaactagaactagaaaaaccaaaaaagaaaactgtaaagaaaataaagaagagaaaggaggggcctgtagatacagaaaagacttcggttgaggaaattgatgaagagcctttagctacagaagaacctgaagaagttattgaaaaagaagaagaagaaatactacctgaagaaccggaaaaagttgttgaggaagaaaagcctatagaacctgtcaaaccggaagataaaaaagaagacctgaaaccggaaacagaagaaactcctaaaaaaccagaaaaactagatgaaattaagctgacaaagcctaaacctaaaccaaagcctgtcgaaaaacctaaggcaaagaaggactttaagcctagactaaagagtagaataaactatgtagattttccacctacattacatattcccaaagttactgaaatgaatacgatcagaggtaatggagaaatatctcgaaacattaaagaagctgagaaaataattaaaactaagagaaggaagttaaaagacaccaaagaagaaatgcctgatttagaaaaacttgatttggaatttgatgaattaaagaagcagaagctagaagaagtggatgatttatacaaatatgaaaagaaagagaaagagaaacctgaagtaccagaaactgtgattccgcttaaaaaacaaaaaggcaaagtaccagaaaaggaggaagaggtggaggaaattaaacttaagcgcaaaccttctgtacaaaaagaagatgttgttgaagaaactgttaaagaagtcaaacccacccctgaagatagcaaagtcgatgagaagagaaaagaatcatctcccgaaagaataccttttgaaccgtttgatatagaaagagaatctccagaaaaagaacagttagaacttcctgaaatcgaaaaagaaaagccagagaaacctaaaaagcagaaaacaaaaccaaaaccaaaagaaacaagagaaacctgaagttgagcaggaagaaatagttttggttaaaggaaagcctaaagaacctattaccagaagagcaaccagaagtcaa

SEQ ID NO: 8401 - DNA, 1077 bp, Diabrotica virgifera
acgatgagagggaaattatgtacgagaatgaaatcatggagggcaaagatcaccctgagattaaaattacagatccgtatagaaattatggagatgacgaagattttgacatagaggaggaagaggaaatggaagaagtatacattccagaggctccaccaagaaagcaaaagagtatgaagagtttaagtaattacgaaaatgactccaacagactagggtcgaaaatgcagcaagtgttctttgaacgaagggttacggaacccaatattataagctataccaatgacagtgtcgtaccagaaagaaaaagctttcatatgaatgctacagagcctcaatatagaaacattcaacagatcgaaccagatgaatatagacaaaatatagaacacctcgaacaaatagaacctgaggaacacatagaaccaatcgaggaggtgcttgaacgttacaaatatatggatgaagatttggaagatgttattcccatggctcctgtcaggaagaacaaaagtgttaaaagtttgaacatttctgagaacgaatcgcttcaaggatctttgggagccaatagagctgtatttagttctgagaaggacttagaagtaccgatagagccaatcagaactgagtccaaggtaataataccgatagcaacagaccctctaccaccaaaaagaccatctagatcaagatcacgaggggactcccgggcaacgtctcagtcaagaactgctccacagagtctaaacacctctcaacgagatctagatagtttatcgctacaaacaggactaacggcggaagacgacatagaaccatgtgtagaagaaccttgcgttcaaaaaatatgtgactacatggggtattccgtcatagataaatcaaaaatcaaagatccaccattaccacctcctagaagtttgaggcggaagaaaagatccactaaagtcgataaagaaaacaagttctttactgttccaaggtctaaacctcctaaggaagatgaagtactaccagtaagaccactgaggaattatagtatctagggccttctagactatcagtcacgcc

SEQ ID NO: 8402 - DNA, 1078 bp, Diabrotica virgifera
  SmartBlast Evalue=1E-108; Info=Sorting nexin-25 n=2 Tax= Formicidae RepID=E2AR00_9HYME
cctggaattgcgtcagatttctacatacgacccatcctgtgcaaatcgcttcttctccctcgggagagtcgtcttcggccatctgcactaccaacacgaactgagggggttctttttcatctgagacctctgcagattgcacataagctctccatcttcccaaattatccgcccatatttctgttctagatatatgagcttccagctgcctcttttcaccttctaaccattccacctctttttccagtttacttaaaactttagattcaggtctcatcgatgatttcaatgcagccaaagcctgcgtcttgttatttaacttctcctccaactgatccaacttccttctggcgtagtttgaatgatctccaacatttaaggtattttcgataatttctgcagagtctgtcgaaatctggcgttcttccatagctccactttcgtcactgatgttttcttcgttgtcaattgcattcaccatttctttgtagtaatcgctgattagaaacggttggtagtacttgtcttcgatggtttgaacgacttggttttggacttcgtagaaaacttcaggccctttgtctcctaataaaaaagcttccatgcgctttttcgtgttcttgtcaactttaatttcggaaacaggatttcgaataaaggtgtaaaatatttctgctccgatttgatgccaatttgtcttctgggaggtgcgcaattcttccactgctgaccaaaaacggatcagatcgttactggcgaccgtttgtaagaattgggatatgtattttctgcctagcacatgttccaaaattgttggaagtgataaaactcgtttcatctcttcgccgtactggtacccagaatcccaacctaaactgatcaatttcttctcgcaattctttttcgctaacgttaactgattgatatgtttcttaagcttcttcgctgcatttatatcagactttggtataccagctgatgataatatgttcttatcattgtcgagatcaacacctttggctctgtttaagttttgcagggtagtagcttgcatgagtttcgtgacaatggtgtatct

SEQ ID NO: 8403 - DNA, 1076 bp, Diabrotica virgifera
gaatggcgacgtctgtgtttgcaggtaaagtatttgtttgttgcctgatctgagttaaatcatggtggtgatgtcaagactgctgtaacagaaggttattaaataatccacgaggaaaataaacttcctgtagctggctgtataccataaatcacaaaaattttgtgaaaacgttttgtcttaatgtgacccttatttaggatattttaaaatataccttttacaacaaatctagtatttttttagaaggttattacattcgactatcctgtggccctctcaattcttcattcttaagggttttctctatatccatctaactgctgtctgggccgtctatgttccgttctttggttttcgtcgtagtaagtcaattctcttaataagctgctcggatgattcctgatattgttggatatttcgtgtgctctttcgtctatcattctcacgactctgttgcgtatgtccaaatacgtatcttaatgggacatatccaggtatattcagaacttccctgatcatgtgatttgggatttttgtatttttttttgttggttttacacgtgtgcccccatgcggctgaggcacatgttagtgttgacaaacttatacaatttgtaatcctaatctttgtcttaaatctcagtttactctttcgacctattagcgatgagagtttgctcctaagtgctttagctttgttgaccgtttgtttcacgtgttctgtaaaggtcagcatgttgtccaccattacgcctaggtatttggcttgatttgaccattcaatttgggtatcgaataggtatagtacctcacttggtctgcctcttcttttttggtacatgacggcttagttgtgagtgagcatcgctttcgaacaaacgtagtactatagtacacagaagtacaaacaaaaaaccgctagagtggtattgtttatggttttggattcgcaatgtaaaagcggtgtaagtgtgttcatgacatatttcgttacttaatcgtacgttagactaaaagtatgtatcggatctcgttctatttaatggcacacgagtaaatctcaacggtcccta

SEQ ID NO: 8404 - DNA, 1079 bp, Diabrotica virgifera
  SmartBlast Evalue=9E-85; Info=Cathepsin L-like proteinase n=1 Tax=Diabrotica virgifera virgifera RepID=Q70EW8_DIAVI
atctaataacttttatttatcactaaacttatattacaagaggtctgcttgcatcatcaataattccgcattgattattagcatttctaattaacctaaaatatccgttttctccatagtaagttccccaggagtttttgatgatccaatagtctgtaccatcttccgtgccatatccaacgaccaatacaccatggtttagtttatcgggtctattttcacaacttgaattatttaagatgccatcttcgtataacatagcagtactagcgtctattgaaacggtaatggggccgtaagtagctactgcatatttcaacgcatcctcacttggttctatctgttgatatccactaagatgtaaaacatttttggaaggttggtaacgacagccgaatatttgcccatcgtatggataatcctcctccgtattaataccattgtcttttatatagtcaaatcctctactcattattcctccagcattgcaatcgccattaccataaggtcctgcacaatcgaccagattttgttcacttagagagaccagcttattatatttaagagcgtattgtccctccaatccaccgatagcactaaaggcccagcatgacccacacgatccctgatctttaactgatgttactgcacccttatctcgccaatccacagattctggaacatctgccaaaacttcccgggaaaagctcataaaagtaacattctgtggacgagttggacgagttcttttactgagacccaacatttggacaaattcatcacgagtcaaatcggcgaattggttaaggcccattttgtatgtttcttgtcccttcttgtaccgggcattgtgttccttgattttacgtagattatcttgaaaaattttaaatcggtcaacttcttcattcttgttgctgtacgatttttcatatgtttccttaaaattattccatatatgtatatctttcaggcaattgactgtcactatggtaataacaaaaataaaaagtttcatattacacaaatttaaaatatattagttcaaaaaatacgcacacactaaatcagaacaattt

SEQ ID NO: 8405 - DNA, 1077 bp, Diabrotica virgifera
  SmartBlast Evalue=6E-19; Info=Chymotrypsin-like elastase family member 2A n=1 Tax=Sus scrofa RepID=CEL2A_PIG
atcattatgtaagagaaatcatgtaaaaaaattacaagataatttttcaatagtatatatatatcgaaacgttcgatatcgagtacctattatagagagatatattatagagatattgtaattttatttaaaatatttacaagatgaaacctattgttttgtgtttgatgataatagcagcatctaaagctattccaacaaacagattaaccaatgatgatgccaacttgggagattttccatggatcgtcgcgttgaatatttacgcccgtatgccatggtacgagataacttatcacgaatgtggaggcgtacttgtaagcaaatcttgggttttaacttcagctagttgcgtcaaatctaatgcccaatggaatacagtgacagagatctacgctggtttcgtacgacaaaacgacccgtcgcgtcaatcatttacgatttcaagaattgagcgacatcctggttttaatatgaatgaatctcgcaatccatcttttgacgatattgctttggtaaaactggatcgtgatgtggaactaaacgaaaatgtaaaaatcgtcaaacttccagaagcagatgcagacattactaaaaattttacctctgctggttggccttatgcggctattactagggaaaaccaagacatcctacaattacgaagtgtaccatttttagattataaaacttgctatgatcaagtagcagcctacgtagcccttggtcgtactgaacctctcgatgaagcttgggataatatctacctaaacgaaacacaaaacatctgcacaggaccaaaagatgcggaaactgccgtttttacaaaaggttaccatggagggcccttgattcaggacggtgtcgtgtatggcgttttgtcctacacgttgaatgtgtacatataccataaggacttctatgagccatcaggagtatttattaatgttttcaattacatatcttggattaaaggaatagtcgatgatttataaaatatagaatcgatgagtttgttgatacagatgatttgtaatttatttttaattatataaaatatattgataaatagatttc

SEQ ID NO: 8406 - DNA, 1079 bp, Diabrotica virgifera
  SmartBlast Evalue=3E-56; Info="RAB-33, putative n=1 Tax=Ixodes scapularis RepID=B7QDW6_IXOSC"
acttcgactgacagattgtggtgacgatagaaacaaaaaagattaaggataaaacaaaaccgaaaagatttatagtgtaatttgatattctaataatactaaagtttcattacaataaattgtcacatattatctaatattaaatttatattataaattgatcagaatcattaatgactctacatcaattacagctcaccacaagataagaaatataatatgagtaaaattaaatagtgtgccgaatcagaacaaaatatggcagaagtaccatcaaataacttgcaaccagctgctagtgttagtcatgttcaaattcaaaaacagggtaaaatttttaaaataatagtaattggggactcaagtgttggaaagactactttaacttatagattttgcgaaggaaaatttttagaactatgtgaagctactgtaggtgtcgattttagaagtagaacagtcaatttagatggggaagatgtcacactccaattatgggatacagcaggtcaagaaagatacagaatgtctatggttcgtcattattacaaaaatgcccatgcagttgtctttgtgtatgatgtaacaaattccggttcctttgattccctgaagaagtggatagatgagtgcaataataattgcttacaggatgtaccaaagattttagttggtaataaatgtgatggtgtggtagctgtaactactaatgtagctcaaagatttgccgatcagtatagtatgcctttatttgaaacctctgcccgcctagattcccagtgtgataatgtggaagctattttcctaacactagctcataaactgaagaaccagaagcatttcctacccatgcagacaactgctttgaggatacatgatagtgttcaacctaaccccaattccaagcagtctggaatgtgttgctaaactggaggcatatacaattttagactatgtggttttatcaattttatatataaaaatctgttgttaaaagttaggagtattgtgaggtagacagagtagaggtatgtgaacatcatctttttatttaagagaaataaatatatatttattat

SEQ ID NO: 8407 - DNA, 1080 bp, Diabrotica virgifera
  SmartBlast Evalue=1E-51; Info=Adenylate cyclase type 2 n=1 Tax= Harpegnathos saltator RepID=E2C8S2_9HYME
ttataattgatgcgaacataacagccacattatcatgctcttcaaaatacaattctttttgttctcggctcacatccagatacagattcgctacgtgctttggcaaaatgtttactaacaaattctcgttgactttttgtagtaaatttgcctcgttttgttcgaatttgaattttctatttaacaaataatccagtcgattcatgtaatcagtctgtcgatctaccaaatgcagagtgataatcagaaaaaccgttgacatgatatgcgcaacttggggatcgagaaggtggttgaatgtttcgctatccttataatatcctttgctgacactgagcacgcaataggcatagagagtgatagttatcgttcctaataacagttttatccaaataaagatccttagaaataaaaacgtcattatcacagtcatggcacatgtttcagtcatatgccaaggaagcacgcaattgagcatactcaaattataaatatccttatctctataaattaataaatttaaaaaacttgttttaaaactagtgccattatggtcaattatgttaatttcttcttctaaactatccctgcattccatcacgtcccccataacgcagaccaaaaaacttatgtagatcattaaaaaaatgaccagcctcacagcgaaattgttggtcatcacacccgacatcttatagatacacttcagtaagatattgtttggtgtttcatcgccatgtgaagctatgtatttgttatatagatattcagcccatgatatcggaagaaaaatgaaaataatgggaaccgcggtcgcaaggaatggccacgtggtaacgtcccattgtttaagcgtcagattctgaataatgtacacgcaaattattaatgctgcagcactcaacaaataatatttgaatagagcatccggtattttcaaatattccatctctattttccatttattgaaaagaagaagaacgtttatatcttttactttaacatattgctgatattttgagaatgaaatcaaatttatagatttccccatctcctcatttacatcattcgtcctttcat

SEQ ID NO: 8408 - DNA, 1070 bp, Diabrotica virgifera
ccagaaacgtttattaccacataatctacaatatcacaaaaattatagtgcaatatttagagacctatatattagaataaaactaaaccgtaaccagattacattactaaaatctacctttttaacgctgtagagtaagaagcagctgctttcagtctgctctagtcaacgttgatgtaatcagaaaaatatccttttggaatctttccggtctatctaaacaatttttagtaaataaacaaactgaaataaacatgttattcaactcagaacaaattacaaactctaaacaaattacaaacacacaaaggcagagccacttactgtctattcataatattcgaatgctgaacaattaccaaaactatacttttcaactaaagccaaaactttccaaataacggaaagagaagtggagacaagtaaataggcgtttggtttgaactaaacacactacatatattgaaatctgtaaggataacacgcagactaataaaaatataaaattaattaaatcagaacttaaaatgcaaggaaattttactaattaagagaaaaggagatacaagtagaaaaaaattctaaaactaaatacaagctcacagtttcttaaactctttggaaactgaaaaaacggaaccaaacataaataattaatcaaaatgaaaggctaagaagaccagcaataatattgtgggactgacatgaggctcaacagttgagacaaaaccagatgaaatactggttataggctaatgattatgtactttagaaaggaactacaacgttaacgggattttattatttcatatgctcaatgaacctccatatatgaaaaaaccgcggagcgccaccattcaaaggggtgcgttcccgagaaatgggtgaatcagtccctgggcacaggttacattaggatgagttccacgcacccttggcacaaacacgtctacacaataattgttcctggccaaatttcccatccaaacataacctttaaagtcaaagacacttttttttacaaaaatatattcaaaagaaaaagcacaaagaaacccaaaagaaagaaa

SEQ ID NO: 8409 - DNA, 1079 bp, Diabrotica virgifera
  SmartBlast Evalue=1E-101; Info=Cullin-1 n=34 Tax=Euteleostomi RepID=CUL1_HUMAN
caagaacgaagtgctttccctcatgtaaaatcgttcggtatcttctagaaaaacgttttcaaaactgtccttgtaaacacttaagttaggccctttcgctcctggttcttcttcatttaaacctagttctacataacagtttattacaccagatactaaacgcgtgttaattgtttcgccatttctttctttttctatcagtttgagaactgcattggtaactgccttatttaattgtttgaagagatgatccctccatgtaaccagtgcgagttgatatatttcatatatacctttcctaccttcttcacattcccttttcacccaatgtctattaagatatgcacatacaccatcgagcactttactacagaactgataatcctcccactggtttgtataaaatttgagaacgtcttcatccatacgatgtagtccatcactgagtaaagtcacaagatagttcctaagaaagtctctcagtctcttataaagttctaatccaactagttgggcacctcctccgatctgattctttttaccctttgtatttgcatttgccgaagctcgtccattgttctgttgatgaacggaagtgcaataattatagacgtgtgtatagagctgtatgtaacgtgatttatgcatcgtttctcgattgtagacttgctggatgccagcatgtagatctccccatatttgatccagatcgaactgctttaaaacagatgtattgttacttagggagctcttactagacatttcctttgaattcgaggatatatcgtcacagtctgtaactttaagccttacaatagaattacgcgaggtgcataactttaaccacagtcaaaataaaaatgttcaaactggacaacgggcacacattacataaaaattactattcatacacatatattacatgcctcacaagatccagatctccatgtaattataacataacaaaagcgtgtacagtatttacaactctcgattctaacggagaactataaatttacaaaatattacagatttttattaattttctaaaattctcaactttaccatcacctagaatg

SEQ ID NO: 8410 - DNA, 1069 bp, Diabrotica virgifera
  SmartBlast Evalue=1E-119; Info=Cytoplasmic protein NCK1 n=2 Tax= Aculeata RepID=E2AX91_9HYME
tttctgatcgccgttcactctgattgttatgtcgaaaattaattcctgttgtgataaatatttgtttgtgttaaatggtacatcgtgcaaaacacatatgagtggcagaagaatatgtcaagtttgaaaattgcattggagctgagcaaattgttgtagcatagaagcatgtatgtcagctagcactagttagttgtgcttgttgtcatgttggagaccagatctataaggggaatgcctgaacactcttggaataactacggagcaagaatatctcctcaccaaatggctacaccagttagacatggcaaaagtagccaagacgacatttgttacgtggtggcgaaatatgactacgaacaccaaggacctcaagaattagatctcaaaaagaacgaacgttacgttctcttggacgattctaagcattggtggaaagtacaaaattcgagggggcaagcaggctatgtaccgagcaactacgtgaagaaggaaaagccatcgttatttgacagtataaagaaaaaggtgaaaaagggatccggctcaaaaacacttccatcaaacaattcaccttcacgtacggtagaatccccgaatatggcgcggcgtctaccagctgatccttctgaggcgatcggcgtagctattgtcaaatataactatcaggctcaacaacctgacgagttgtcacttgtcaaaggttctagaattcttattttagaaaagagcaatgatgggtggtggagaggtcaaagtagcaacatatcgggatggttcccatcgaactatacccaagaagaaggcgatatcgacgatactgtccatacatatgcgatggcagaaaacgtcctggatatagttgtggctctctattcgttttcttcgtcaaacgaacaagaattgtcctttgaaaaaggagatcgactggaaattttagataggcctgcaagtgatccagaatggtacaaagctagaaattctcaaggtcaagttggtcttgttcctagaaattaccttcaagaactgaatgattatttggaccgtcccttacaagagagaaacagac

SEQ ID NO: 8411 - DNA, 1077 bp, Diabrotica virgifera
  SmartBlast Evalue=7E-90; Info=Tetratricopeptide repeat protein 27 n=1 Tax=Camponotus floridanus RepID=E2A5R3_9HYME
ccataaccttcacagttcactcttcatattttgaaataaattaaattataaagttttagttttatttttagcttgtttttttctcttgttgtttattttatagtcgctttaacaagttactgtcttgataagataaacccgtctgttattcaactagtagcactgtctgtagtagtacttaaatactttacagaatatacacatacaaagatacaactccatttattttaaagcatttacattacagatatggcatttaccggaaaagtaattctaataaccggtgctagttcgggtattggggctgctactgcgaaacaatttgccagcctcggtgccactttggcacttgctggaagaaatgtggataacttaaaacaagtggcctcagattgttcaacaaagtccattccattgctgttacaaggggaactaacgaatgaaaaggataccaaggcaattttggacaaaactatcgagcattttgggagattggatgtcttggtgaacaatgctggtatcctagaaacaggaagcattgaaaacacaactctcgaacaatatgaccgcctaatgaacaccaacgtcagatctgtttaccatctcagcatgttggctgttcctcacttggtaaaaacgaaaggaaacatagtcaacgtgagcagcgtcaacggaatgcgggccttccccaacgttctagcttactgtatgtccaaagcagctgtggatcagttcactcgatgtgttgccctggagctagcagacaaacaggtcagagttaacagtgtgaacccaggtgtgacactcactaatcttcagaagagaggtggtatgaacgatgagcaatatgaagcgttcctacaaaggacgaaagacactcacgcccttggtaggccaggaaatccagacgaggttgccaaggccatcacttacttagccagtgaggatgctagttttataactggagctagcctgccagtagatggcggtagacacgccatgtgcccaagataattactgtttgtttgtaaatatgtgtatttgttatgggtacattccatgtcaaatcactcgggc

SEQ ID NO: 8412 - DNA, 1070 bp, Diabrotica virgifera
  SmartBlast Evalue=9E-15; Info=Endonuclease-reverse transcriptase n=1 Tax=Bombyx mori RepID=D5LB38_BOMMO
tatagaaatggagctgtttttcaagatatatgctagctgtatatttggttttcctagtttgatgatatgacgttctccaagaaagatcaaaaaactacctctataaagtacaatgagaatgcaacaatttctacgtaggagcaactgcaagatcgctaattgtcagcataaaagagcatcaagtatacatcaagaacagagaggtcgagaaataccagatatgcaaacatgcttgggacaacgaccacagagtacaatggaaagatgcaccaataatcatgaaagaaacagacatgaaaaaaagaaaagttaaaaaaagcagccctcaaataagtatagtgtgaaggccacagtatcaatggagaaggcttctatcagtggagaagttttgaacaacttacggttttgcagacgatacattaataataacggataacaatgatttacagaacataatgcaacatcttaatgaacgctgtcatgattacggactgaagatgaatttatagaaaactaaatgcatgaccatgactaaatcagcacagcaaacatccaatagattattgaagatactgtaattgagagtgtggataactacaaatacttaggaacatggataacatcaaatgtagaccaaaccaaagaaattaagacacgtattgaaatagcacgtgcatcattcattaaacgtaagaagtttctttgttgtcgggatataaggatagaactacgcctaaggatgcttcgtgttacgtgttctctactcttctttatgaattagttggccgcctttgaattctgaccaaagaatgtcaaacttggaagtaactagaaggataggaagtcaagcggaaataatattaactatcaaaagacgaaaacttgagtagttacttaggacatgtggtgagaggacaaaaatacaaggcaaaattcgaggaaagcgaagtgtgggaagacgaagaacatcctggcttaagaacttgatggaatggtttgaatgcagtagtacagaactgtttagatagtccgcataaccatgatgatttccaaccttcgatagaagatgg

SEQ ID NO: 8413 - DNA, 1077 bp, Diabrotica virgifera
  SmartBlast Evalue=1E-117; Info=Nucleolar complex protein 2 homolog n=5 Tax=melanogaster subgroup RepID=NOC2L_DROME
agtatttgaaggcatactttacagatatattaaagcttctacaaggcgttacatcgtcaaatatacaaacagtgcttttaaagcatctgcattatatgtcctctcttttaacttcattcccacacataaccaaatccatagtgaagaggctagtaactttctggggaaccgcagaagactccgtccgagtagtagcattcttctgtatcttaagaataaccaacaaccagcaatccaccattttggacacagttttgaaatcgatgtacatgacttacgtcaagaactcaaaattcgtcagcttcaagggcttgcctgtgattaacttcatgaggaggtctttagttgaaatgttcgctttggatgtgaattttgcctatcaacatgtgtttttgtacattcgacagttagctatacatctacgaaatgccataactgtgaataagaaagagaatatacaagctgtgtataattggcaattcgtaaattcgttgaagctgtggggaaatcttctagcagtgacttacaataagaagataatgcaacagttggtgtatcctttggtgcagatttgtataggtaccatcaaattaattccaactgcacagtactaccctttaaggtttcatatagttcagattttaatggatttgtcgaaagaaacaggggtttttattcctgtattgccgtttttgttggaggtgctgacatcttttgatttcaataagaaacacaaaaaagtgtcaatgaaaccactacatttcacttgcctgctgagactgtcaaaatcgcaactacaagaaaatggttccaaagatatggttatagaaacagtctatggaatgttgctggaatacctaagtgcccaatcacacactcttgcttttccagatatgaatttaatttcaattttacagatcaaaaagttcctcaaatcttgcaaaaacccaaactattccagaaaactgaagcaagtgttagaaaagatcgaacaaaattcaaaatacatagaaaatgaaaggacaaaactcaatatcaacataaacgattttaaacaaatagaaggatgggaagcgc

SEQ ID NO: 8414 - DNA, 1079 bp, Diabrotica virgifera
  SmartBlast Evalue=1E-114; Info=L-3-hydroxyacyl-Coenzyme A dehydrogenase n=1 Tax=Acyrthosiphon pisum RepID=UPI0001A81EDE
atcgaattgtgttgataaagttcaacatttttgtgcttttaatcagtcacatttttgttgctgagtgttgaacgcatcgtttcaaaaaaaaataatacaatggcagcaataggaaatgttttgtctagaggattttctacaactacagccaggaatgtgattcaaaatgtgaccgtcattggtggaggtttgatggggtctggaattgcacaggtcgcagctcaatctggtcaaaatgtaactttagtagacgtcagctcagatgtcttgaaaaaatcagaaagcagcattcaaaacagtcttggtcgagttgctaaaaaactacacaaagacaacccagctgaaggaaaaaagttagtagatgatatattatctcgcatccagtactcaaccgaaccacaaaaaggagtacaaaacgcagatctagttgtagaagccattgtggaaaatatggatataaaacataagttgtttaagagcttagacgaagctgcaccagagaaaactcttttcgcctccaatactagttctctatccatcgcagaaatcgcatctgtaacaaaacggctggacaggtttggaggacttcattttttcaaccctgtacctatgatgaaacttttggaagtcatcaggatttctgaaaccagtgaccaaacctacaatgccatgatggcttggggcaagtccattggcaaagtctgcatcacctgtaaagatactcccggatttgttgtcaataggttgctggttccttatgttgctgaagcggttcgtatgttggaaagaggcgacgcttctgctcaagacatcgacactgcaatgaaactaggagctggttatccaatgggccctttggaactggccgattatactggtttagacactggtgtgttcgtcctcgaaggttggcacaaaaaattcccggaaaatccgctttttaacccagtagagctccaaaagaaactcgtaaaagagggtaaactaggaagaaagactggagaaggattctataagtacacaaaataagatagcttgttataacctattgattttaaatatatttttgttattacgcc

SEQ ID NO: 8415 - DNA, 1077 bp, Diabrotica virgifera
attattatagagattgattagtgcactaagaggctattgcagaaaaccttcattttcttcaagtgtcatcttcgcgataaatgttagctaacttcagggcaattttagtacagatactgcagttttaattaacaactcttttcgtttgttcatcatttggagtctttcctggatagctactttattattttaagatacctatgtgtcaaatgccttcgatttattcttgcattgattgtcagcgtacatgcctctacactatataacaataccgagaaaatttaacagttaagcaccaaagcactacaaagggagaaggaaaaataagatcagaccacagaaatgtgagaaagttgtgaggttatgaacattttaaccaattaaatacactgggaagtatatgacagacaacgatctaagctgttatcactgactaaagctttaatggtagaccgatataatgaatggctgtcaactggcactggacaggaaagtttaattgaatcgtggatgaggcatatgtcatacgagccatagagtcagaaaaaagactatagttgaaaaaatagaaagagaacaacataatttctaaataaacgtatggctttaaatatgtattttgtacaagtattttgtcagaaacgttaaaagagattatttaaaggccatgaaacaaaattagacataaaacagttgaaagagcaattgacagatgtcgccaccatctttgtgggcgtggcttatgacgtcagagcggagtggtggggtattgtaaccgatcaaatctacaagaagtggactgtaaaagggtccttaaactagtaatggtataatggcaaataaaacgatttatttgtggaaattaagacgcaacggtgtgcgaatcttggtatactcattaaaatatttggaggagaagcatgtacgatgtgaatatatgtaaagaaagctgtaaatgaagttgaagaacaaatagccagctaaacaatttcttcaaactcctttaatggtgtaggtcacaaagggcataggcatagagatgtcagagtgttgagagttgtcccaaccgtgtactgg

SEQ ID NO: 8416 - DNA, 1070 bp, Diabrotica virgifera
  SmartBlast Evalue=1E-103; Info=Pre-mRNA-splicing factor cef-1 n= 1 Tax=Culex quinquefasciatus RepID=B0WEY0_CULQU
ccccttggccacccctaaatcttctttcctgaacgactcatatggatgctgctccaaaaacgccaattgatgggcctgcgacatgttggatctcttactttgcgtcggaaccggatttttaaggttatcgaaatgtaacatagtcaccatctcgcgtttgatgagttcttcggctcgctgcaggtcggataaggaatagctctcgtgggacggtcgaaggacggtcatgttcacttcttgaggtctcggtaaatcacgttggatgacttgagagcggagcgccagctctctggcggctttagccttgagctcttcttgttttcgtgcatctacatcagcttgatcttcgatcatttgtgactgagcttgctcgggttcttcctggtcttcattttcgggcaccacgatttcatagtcgtttttcggttgtggtagactgctcaaccccatttttaattgatctttcatcgacatctggtacattctgtgctcagctggtgtgcttcctacgtccattgcttcctctggattaatactaagcttatccctaaccgaaggcgtcattcctaccggcgtcttccccacaggcaccaaagcgccacttctaggcgtcataaatccaacgctactgccaggagtgccagctccgtcactcctactggatctgaagggcgtagcaagcacggtattcggggtgctgacggtctgagcgttggggcaggaccccgctgaaatctgaattgtgtaacggagtgttaatgccgcctttgaggggcgtatctacgtgtgtgagcgccatcatgttctgagcttcttgcaaaatcctatcagtctggggcgccggagtccttggtgtagcagccgcttgaggattgaaagtataatcattcaacaaagtgtcagtggtttcaacaccgctttctgtaactatttccctagctgcttcactcgctttgcccaacttcaccacttggtgcatttcctggtctgaaatttgtggttccggaagcactaacttggatcgtttcttagctggttcctggttttgtaacatagcttgaggaatgtcg

SEQ ID NO: 8417 - DNA, 1077 bp, Diabrotica virgifera
  SmartBlast Evalue=1E-155; Info="Developmentally-regulated GTP- binding protein, putative n=4 Tax=Neoptera RepID=E0VST7_PEDHC"
gagcatattttgaattgttgagctaacgttctgtggatcgcatgacatacgtgctctacactgactcctttcctcagaataagtccgtcagaaaaatctggtggctgacctggtttctttgtatacactcttatcaaactaaggtattcccaaagggttgacagaaggtagtcgaggttcagcttcatgttacaactgacaactatactattaggttgtctagctattctatcgacttcttcaatggagatttgatcgatcttgttgtaaacataaaggcatggcagatatactctattagcacaaataacatcaattagttcgtcagcagtacaatcttctctgaataaaacttcagcattaaaaattttatattcatgtaatatcatctgcactagtttttcatctattttggttaatggacaagtggagttgaaagaaaggccaccacctttctttatcttaaaataaatattaggttttggtttgttgagtcttattcctacactctctaattctctctctagtaatgatctgtggacatcctttttagttgcatccaacatcataagaaccaaatctgctgttcttgctactgctattacttgtctccctcttccttttccttgtgctgctccttctataataccaggcaaatctaacagttgtatattagcaccattataatctataacacctggtatacatgttaaggttgtgaattcgtaagaagcagcttcactttcagtttttgttagtgtagaaagtagggtagactttcctacagaaggaaaccctataagagcaactctggcatctccactttttaatacgtcaaacccttcgcccttttccgacttcttagatggttctaataattgtgatctatatttagctaattttgcttttaaaagacccaaatggtattcggttgctttatttttttgagttcttgaaatttccttttctatttccgagattttttctaagatacccatgtttaaatgtttataatttttattttaatttaaaaattaggattttccaatttaataatccacacacactacccttgac

SEQ ID NO: 8418 - DNA, 1076 bp, Diabrotica virgifera
  SmartBlast Evalue=1E-90; Info=C2H2-type Zn-finger protein n=1 Tax=Glossina morsitans morsitans RepID=D3TNE6_GLOMM
agaactttatgcaactttttattatttttggaaggcacgacggcgagggctttgttgggattaagactttgcttgtagtatcgcattaggctgcgatgtcctatagtcactccggagggtaaaacgagttggtaatctgaaccatctaattccggaacggtaacctcttcatcagcatcaatattttctgcatctgcatcaggatatgatgttgaataatcataaaaatctgcatattcagcaagagctaccccctcatgaatcatcttacaatggcctctatcaaccatatgttgtttagctgcttctgcagtgtggaaggtcttgcctttttcattacaccataaacacatgaaaccttctgaaattttatcccccaaatatctcaacaacccttgaagatcactacaatattcaatgtcaggaatgaagaaggaatgtacaatggtcatatgatccaaattcttgtaaaaattaccactgtgatgtgaacaaaacaggcaatcattgttatcaatgggattttcggatacatcatcccactcatctgaatctacttcttcagtttccatgtcttcatcttcaacatcaattgttggtttatttgtaggtatgatctctatgttttcgtcagtgctttctatctttctacttttttcattatctttgtgtttcttggagtttaaatgattatcataagcattttggtttccaaatgatttgcggcatacggaacagtagacacttttatcctgagtggctatttcgtcagcttttctctgattcaacactcttatctgaaattcttcagcagtaactggaggtaactctgctacttttcttttcaaattgtatctgtgccagtctgttgtgtagtgtttcctttgcaactctgcatctttgaaggcgactctacatgatatacaagtaaaagaatctttacttgggttgaccgcagacatattatagatttttgtaatttaaaactgtggaagtatattatatgcaactaaaatgaacctatttctgatacaaaatacaaataaataattctggccagtggctctagccagcca

SEQ ID NO: 8419 - DNA, 1077 bp, Diabrotica virgifera
  SmartBlast Evalue=1E-140; Info=26S proteasome non-ATPase regulatory subunit 6 n=2 Tax=Culicini RepID=B0W8P3_CULQU
ctgtgcttgtcacgtcaaaaatttgttggtcattttgatttaaaagaaagttcatttcattcacaactaaacaaaatgccgattgaaaatttagaagaccagggtcttgagaaaaaccctgatttagaattagcacattgtaagtttctgttaactttaccagaatatcgcagtgataaaaacgtccactccaaaataacagaagctataaagaaagatgatatggccccatggtatgaacttatttgtaaagatgctggttggaaacttgatgctaatctactgagtgcattaaaagctaagaacgctgagaagatcaagcttttggatgaagccatagaagatgccgagaaaaatttaggtgaaatggaagttcgagaagcctacttaagaaaagcagaatactacagccgaattggtgataaagacaacgcagttagtactttcagacaaacatatgataaaactgtatcacttggtcatcgtttggatattatttttcacttgataagaattggtttgttcttcatggaccatgatctcatcacaagaaatattgaaaaagctaaaacccttattgaagaaggaggtgattgggatagaagaaatcgtttaaaagtgtatcaaggtgcatattgtatgtcagtacgagacttcaaatcagctgctaacttgtttttggacacagtaagcacttttacatcatacgaactaatggactataaagcatttgtcaggtatactgtatacacctctattattagtttgccaaggaaccaattaagagataaagtggtcaaaggttccgaaatattggaagtactgcattcagaaccatttgtaaaagattaccttttttctttatataattgtcagtatgctgaatttttcacaaatcttgcagaagttgaaacagttctcagaaaagattatttcttgaatcctcactatcgtttctatgtaagagagatgaagatacttgcttatacacaattattggagtcatataggtctcttactttacaatacatggcagaagcctttggagttactgttgaatacattgataaagaactg

SEQ ID NO: 8420 - DNA, 1075 bp, Diabrotica virgifera
  SmartBlast Evalue=1E-113; Info=Rho-associated protein kinase 2 n=2 Tax=Formicidae RepID=E2A893_9HYME
ctccaagtgatctttgtgaacctttattctacatcttctacattctaacgcgggtggcggcctaaacatgtgccacatctgcttcggacaaacctcgcacgtcgtcggcatgtgataggaaatgttcagaaattcgtggcctttatgtgatatcacgctgggcttgtcgtcgaaattcctcatcgattggctcacgtccagagctaaagccgactgttcggcatcggttttcctagcttctccctctcccgcatagagtagctggaatatcctgggaatatcctttgaatctgcccgtatgacatctccttgggttaccgaacggacgtgaaatactttgcataaatccaggactataaccggatcagaattctgtttatcattatccgaattataaaagataattttccgactagacacgacgacgtactgtttcttccagccgtgtcgtttgatattctgtttcgaaggtatcgacaaccacccctcgaagacagcatctatttcatccccctcgttgtcggccgaactgagagacgccgtttcgctgttcatagaccacaatttggtttgaagctgctccaaatcggcgtctttactgtccaactccatttgaagtcgttgctttccggatagctcctcgcttaattgggcacttaaatcttgtatattcttttggtagttgctgatcatctgattatacttgtccttttctaagcttagttcttgttgtaatttcttcaaatccttctctttcctcctcagatccgcattggatactttggacttacccttaccggattctctgatatccttcctgtttagtatttcgtgtaacttgttgaccgcttgttgtttaagaagactttcggtattcaatttggcgaccaacttctcgtattcttcggtattgttagtcttcctattaaattcctcttgtaattgtttgtactgcctattcatttcttcctgttctctttgcaactgttcgtttattctcttatactctaattccttttctttaaaattatttatcacaacttctttattattcatttcagttctctgtttcgcc

SEQ ID NO: 8421 - DNA, 1077 bp, Diabrotica virgifera
  SmartBlast Evalue=3E-42; Info=Tetraspanin n=1 Tax=Anopheles darlingi RepID=B6DDW1_ANODA
atggtttattaatgaatcattataattaagttttgtaaagaatatcacacgttaagatagtccccctaaatactaaaatctaaaacatgatacaatatttgttgtaaattgaaacatccatattttaatagacatatacttgacattatggagcaattaataaattcaattatcaagtagacctaaaactaatattttgtaatgtattgccatcatacaagttactactttttattcatcatttttaaacagtctcgtaatcacttcttataaatttggataagcagcaggaaaagaggatacccagaagctgaataacggccaacccaataccaaccccttcgacatacgaaatgttttgttttacgaaatcaccgaacttttccaaacatcctttatggtaagcaaaaatgggattgcaggtaaattgcgtagaacctgcaggaattttgcaacaggacaatggtaagcctgtagtataattgacagcaggaacatttttccagtcggtgaaattatggaccccacaacattggaactgtgattgtatggtatcccaaactactgtagtttcattaaagctgtggttgttataagtatgcattgtttcttctaatttatcagctaaaaattcttcggttttacccttgaggactacagcagtaattccaacagccaactcgagaataaatataataaccaataaagttgagtatgtggtagtcatgcatgcattttctttcatcgctccacagcagccaaagaaagcgatgaaaaatattaccactccaatgactatcagaaaatcggaaatgtagaaatatttgttatccataagttgatcgaattcattgaagtaagctttagagctcagacccacagaaattattacaataccagtgatcacaaatatgaaattaaaaagtattaacatgtaacgggaatagcccctcatacacatagcgcaatccatgctcaataacttttataaaacgttaaatttcacccgataatttaatttgctttttttccaaacgtaatttattattttatcatgaacaatcatgaacaatgcac

SEQ ID NO: 8422 - DNA, 1077 bp, Diabrotica virgifera
aaaacaacagagaatacaaaatttatttgaaaaaaaaaattaaagttagtaatggatgtggtgatttaatcagaaaaacaaaaacaggcctcaggttcagaatctatttctattattaggtcatcctggtcatctacattctgcatttcaatgtactgatgagaagttgtggaattttatttttcacgagtcgtcagctcagtcatggattggtctacgtctaagggcatttagacgggctagttcttgaagcaatatgttgccgaaaatatatatttggtatgtttctggcaacaatacagccatctaatggaaatatcgccatttggctgaactatgtggccgaaatcttactggcactattgcagtgcctgatgcgttgccgactgaactctgttgaaattgaatttggttttgtcaaaacatacaaagaaaagatgaatatgtggtcaaatgaaatcacaataaggtttattaatgcagcacatctacgtctagagttgtggaacttggcatacttctggaactatgagacaaatggaagagtagtgcaccctgaataaatacattaaactaaaactgttagtatattaaataacaattgctaatcttgttgagattggtactgcgtttctcatgtttgatatttcttctctattcttggccttatcatatttatcaatagttcgaaatcactttttgacattcttgtaaaattcttaaacaaataattgtctagcattatttccatagttaaattactcattgtttcgcgtttacttagaaaagccgtatccacattttccttttttcaaggacgaagcgactctcgaggacgaagagaatattctcgagaacgatattattctggccgagaatgttctcgttctcgagaatattttcttaagaatattctcttcttacatcattacacttgtcatggtcaacgtttcccctccgtaagtcaacactggcaaagcacactaaaagacacattggtatgtcggacatttgaaaatgtggtatgtataacttgccgaacgctgcccaagtcagtcttatacgacggagcggttt

SEQ ID NO: 8423 - DNA, 1072 bp, Diabrotica virgifera
  SmartBlast Evalue=0.000000006; Info=Clarin-3 n=4 Tax=Catarrhini RepID=CLRN3_HUMAN
tactacaaacgacagattaagataaaatttttatgtaagccaaatcagcattctaagtaaaatcaacagaatagctcacagctatgtacaagtgaaaataaattgttcaaatattttgattttaaaatagtgtgtacttagtgaaacaatttgcaaatattacaatggcaaggataaaacgaggatttgtttttggtgcttctgttgtgtcgggaattggtgttttatttacgattatttcgcttgcgactgaacaatgggtttattcggatcaagcgcagctggctgtcaacgcttcaacagatcggtatttctccaagatcaagtatggcttatttcaagggacgctaagaacgggcgttacttacaacacggtccaaatatcaatgacatgtattgcaaaaaacaacatttgtgctatgttatgtgcaaagaacagcacagagcgatttaacattttagaggacctttacgataataagggaatccatatccagaacgacaatgaatgtccgatggtagcaagtagtaccaaattacacaatgaatttgcagtattaagatctacacaagcaagtgccaataaggacagaaaatttatcaacttcggagtatggatctcgacaatatttttcttatcagtgtccatcttatttggattactagcagctggtctatcattgtacaacactgtgtccaatccaatacaaatatacctcagtatatatggaatatttatatataacggaattgcattaggcactgttattatcgcagtaacagtatggggaatttttttccaaataagcatttttcatgatatagctatttattatacattagctggaaatatggagtcagataagacagcagttttaggatactcttactggctaaatatcgtccccatagtattatacatagtaagtataacgttgctagcagtacgcgaatacatggtttcacacgacccgaaacaaaaaattgtacaaagggaagaagctggtgatcctgtaatatacctttattaaattaaaatatgtaccaatttttgttttatttatatatattt

SEQ ID NO: 8424 - DNA, 1076 bp, Diabrotica virgifera
  SmartBlast Evalue=4E-21; Info=Interferon-inducible double stranded RNA-dependent protein kinase activator A n=1 Tax= Harpegnathos saltator RepID=E2CA48_9HYME
tagtaacaaaaggtaaagtaaacaacaaaatgggcaaaatggctaacaataggaaaactccagtaatggcacttcaggaactagcagtaaaaaaaggttttccggttcctcaatacgaaatagttgatagtattttaggtactcataacgatcgatttgattgtcgagtaaaagcatgtggaatggaagcagagggaaccggcacttcgaaacaaatcagcaaacacgaggctgcatataaactcttaaaattactcgaagagggtggtatttatgacccaaaggaactaccggttcaagaatttcaagtcgaagttgctggtttagaaaatggtagttcggtagaggcacctgttaactggataggtccattgatcgaaatgtgtgctaaaactaaaattgaagatcctatgttcaaagaaatatcagctgttggattatcacattctagggaatttacctatgaatgtcgcattggttctttgaaaacacttgctgttggcagaacaataaagatggctaaacacttagctgcaaaagaaatgttagaaaagttaaaagataacgatattctatcgattttaatattagaaaaccctaagaaggatcaccaacaacgctacaataagttaatgacatcagttgtacgtaataaaatggccaaattgaaggattttataacagtttttcatgacctgatggaaaaatatgagaaaaacagtgacgttttcattaatgatttgcgtgaacgtacagaagaatctcttgttagaattttaaagcagcttaagctaaaacatgacattttggtcgtaaaagacgaatctccagttattatagttttacatgtcaattgcaatgtaccctatgctgtaatgggtatgggtgccacagtagaacaagcaaaagaggaggcactagacgagacattcttgctgctggatggcttgattcagcaatagtattcagatggtttaagaatcagatagtttaagtttaatggactgtttaatggaatggaatttttgttagatttaaaaattgttttttatttttgtaaaatctagcaggaggac

SEQ ID NO: 8425 - DNA, 1075 bp, Diabrotica virgifera
  SmartBlast Evalue=6E-14; Info=Mariner transposase n=1 Tax= Bombyx mori RepID=Q1HPJ3_BOMMO
tccaacgggaaaccaatttcgtaacacccagttcttcatgtaggatcttttggatcgagttctttgaaatgtccaaaaatgtctctatctcaagtatattacacggcgttcatctttaattagctgacgaaccacatcaatgttttgctgtgtgactgctgttttgggtgaacctggcctggattcggcgctgagactggggcgaccacgttgaagttcgcaataccagcagaaaaaagttgactaatgtgatgctaaaagattgagattacatttttgtcgcaaggttttattggtaacgccctttagcggtatatgcaagactaaaaaaacaaacctcgtacgataaatataaggtttgttcccactcgatacaaaactgttcttgaatcgttgcgcgcatgcgcaataacgaataattatgcacagtaacacatttttcgttactgcgcatatctcgtaccgttcaggaacggttttgtatcgagttggaacaaacctattgtctttaccaactaattaataaaaggaaatgtgacaaaatggagaaaaagtaatgacaattgagatgtaaggttcgacaaaacaagtcgagagagagagtgttgtaatacggtaaacatttttatcgcaaaacagtgtaccaaaatacagtatattttcaaggcaaacgttgtaattatatttgaaatcgaggtaattatgtgtgccaggtcaattgcgaatacaatatttaccaattttctagtctgttaaaaatgaaaaatttatctaaaaaataagagtaaaaatggagttactgtgatatttgttgagttcacatagtgataatgataataagaacctaagagaactgaaaagaactaaaaatctgtaagagacccttcggcaaaatccaacagtaacaattaaaatatttaaagaatatggagactcatagacagccgaaggcgccgaggaagatcttcaacgagatggattgaccagatcacaggaaattgcaaaagacctgtgcatgatgtaatataaatgatcagacaaatttaaggaggcagaccatacacgatatcacgac

SEQ ID NO: 8426 - DNA, 1076 bp, Diabrotica virgifera
  SmartBlast Evalue=2E-38; Info="F-box only protein, putative n=1 Tax=Pediculus humanus corporis RepID=E0VWS8_PEDHC"
tatgttcctctatcggttgtatactttcaaaaaagaaatttgacgacccctcctgccattttacttccataatgtcctttccaaaattgtgtgtcgacaccttcatgctgaaatactagcgttttaagggttttagattcatattcgtctaccgttatctccatcttattccattctttgccttcccattgcggtataatagcaggtttcaaaagagaaaataaaacaatttcatctccttctgttctatgatactccattctatcatactctatttccaggtcttcatcctccataggtttctgcatactttcagaagctagacctttaattgttagtttgtactcacagccacaatcgaatctcccagcataccattcacttacataaatatggggtttaaacttattaattacatacctaagaagtcgtttgttttccaaacgtattacctgtattttacagcattcgtaaaatgaggttgtaaaacagctcttacgtccacaaaattccggaacaccctcaggaaggggatcacttcctttagggactggttctataataaattcatcaccaaaattttttaatattgtccaatgcttaaatccttcctgcccgttgccattttttagtaagtttctgaaatcatctgtcgaataatataagtagtacacgtaccaaggcaaccttttagctttattaggaaattgattattatatacatccatccaaaaactatcagatttaataatgttgcaccactttttacacaccaaacttaaaggtaataattgttcaggtggaaggaacgtgagaattttgattataatttcctctggaaaatagacgtcattcaaaaataacccattgctggtatcatcttcaagaggaccatgaaactgaaactcctcaacaggtacatataatttgggtattttagcttctttagcgtcggatatttccattgtatcgaataatttagatttcaaactacccatactatattttatatatcactttaacatagtttaatcacattccatataaaaatgactcagaaaatatttttacagctg

SEQ ID NO: 8427 - DNA, 1074 bp, Diabrotica virgifera
  SmartBlast Evalue=6E-97; Info=Monocarboxylate transporter 12 n= 3 Tax=Aculeata RepID=E2BUR4_9HYME
gtagagcagtgtgtatttcgggaagtattattgccactattgctttcgtattatcgatattcagtccaactgtgaactggcttatgtttacgtatggatttataggaggaatcggtttcggtttgatctatctgccggcagtagtttgtgtcgggtactattttgaaacaaagaggtcgctagcaacgggaatagcagtatgtggatcaggtgtaggtacattcactttcgcgcctctagctactgctcttttggaagaatacggttggagaggtgcaaatcttatactggcagggctgattctcaattgtatcttatttggtgctttgatgagaccattggaatatccaaaagatggcggagagaaacctcttttgcagcgaatggcagaagaacggaagttggcgatggaaagaggcagtatcggtggatcttactttatggtgcaacttcctgatggaactatggagaaaagacagaagcaacctattaatagagatcctggagttcattctagtttagctttagatcaactagctgcaggaagtaatattacaccaattcccactgtacctacgcttccaactataacagaagctaaagtcaccgaacatagcggcagctctggaacacctagtccaagagaaagtattacggagatgaaatccggtaaaaaagtagaaaacggtccgtcggaaacaagccaaagagtaagaagagattcggataacagcgccatcgaagtacctagaaaccctaaaattatacctagaaatgctagtcaaccggcttttacaacgcacgttcaaggtttaccgaagaatggatctgtgcctacttttgatagaatgaggaaaacttcgttcggggagaggttcaaaccaacgttagttcctattatatcgtcttcgagaaatgcagtcaacagttccaacggagatatgagaagaaagagaaacgactccactggttctttcatcagtagaaatattagcaggaatgcaagtgatgttgatgtcgagagtttggcatttacctccaaattgtcgatcaatagtcgcagagagcctcgtc

SEQ ID NO: 8428 - DNA, 1074 bp, Diabrotica virgifera
  SmartBlast Evalue=1E-105; Info=Probable chitinase 2 n=6 Tax= melanogaster subgroup RepID=CHIT2_DROME
tagattttccagtctgacgttgtattcttcagttctttgcagatctcattataacccaaaaatcctccttccctagtgtaaggacctgcgaatccaaggtttgaagcaactgaacctagtcttggttttcttctactctgaagaggttcctccagaagaaaagttctgccatatacaggtattcccagcactagcttatttgcaggagctcccaaacttaacatgtagttaatagtatattccacatttagaacatctggtcctttcaaaggtgagtttgccccggttcttttgtcccatgcgccatgataatcgtagcacatcatgtgaatataatccaaatatactgacaacgcctcaacgtcataagcgacatctatagtatcttttccagcaccaaaagcagctgtaaggagcagcttgtcctttctataagctgctcttaattccttaacaagcaggaggaaattgtttttgtcttctttacttccgcctctcttaccgggaaactcccaatccaggtcaagcccatcaaaattatacttcttaataaaatctaatgagtttgcaacgaatctgcttcgtctgtgaggatcagctacaagttttgagtaatttgcagaaccttcgttccatcctcctacagctaacgttactttgaggtgggggtatttgtgttttagaccagtcactctcttaaaacctcctcttccataatcatccgttaaatcttgaaatgcatctaatgatcttaacgaatcttgtgtaatatctaatccactaaacgaatatattatgtgtgtgcagagacttggatctagatgttcaatggtgaaagatcccctatctggtctataaactgcccaactgcccacataacacactacaagctttccgtgggttggacctgtagaagcatcacacatccagttgttgaaaaatagaaacagtaccacagaaacacaagccgaaaacatattttgtcgtcgaaatactgtcccgtatggtaagtagatcgcgaatgaaatgataataaaccaccgcggtaacttttgcgatctaaaagctgatggc

SEQ ID NO: 8429 - DNA, 1074 bp, Diabrotica virgifera
  SmartBlast Evalue=1E-143; Info=Ribosome biogenesis protein BOP1 n=1 Tax=Harpegnathos saltator RepID=E2BI62_9HYME
ggatcaaaactagggcagaacaggagaagcttagagccaaaaaagagcctcagttttatatgttatggcagactgatgaccaagcagaagaaatgagaagaatatataaacatatatcagctccaaaacgttttattgccaggtcatgctgaaagttacaatccaccaccagaatatctatttgatgagaaagaacttaaacaatggaataagttaaagaatgcaccctggaaacgaaaggttcattttatacctcagaaatacgactctttaagaaaggttccagcgtatcctcggtttatcaaagagagattcttaagatgcttggatctctacttatgtcctagaactataaaaatgaaactgaatatcgaaccagaatcacttgtaccaaaattacccagtccaaaagatttacaaccatttcccacagttcttgctctggaatataaaggtcacactgatatggtaagaactattagcttggataaaacaggccaatatctactgagtggctcagatgataccactgtcaagatatgggaagttaacactggcagatgtctaaaaacgataaaaactgataatattgtcagatctgttgaatggtgtccaaacgctgcattatcactcatcttagttgcatctggacaggaggttatgataatcaatcccaatgttggtgattttgtagtaaacagcaaaacagatacagtactgcaagaagtaccacaatcagatgtggttatcccagaaagagtccgcactgctgtccaatggtccgaaactgacgacgagcaatacaaacgtggcattaggttaaatttaaaacacttcaaagacgtttctcaagtatcatggcacggaaagggagattatttcgcaacagtcatgccagatggacaaaatcgttctgttattatatcacaaatatccaaacgaaggtcacaactgccatttacgaagtctaaaggtcttgtgcaatgcgttcttttccatcctacgaaaccttacctcttcgtagcaacacaaaggcacgtgagaatctatgatttagtcaaacaaactatgatg

SEQ ID NO: 8430 - DNA, 1073 bp, Diabrotica virgifera
  SmartBlast Evalue=1E-70; Info=Alcohol dehydrogenase [NADP+] n=1 Tax=Camponotus floridanus RepID=E2A7P0_9HYME
tgcaggcctcgcgagtaaggttgttgttgttgattttagttttatccggactgtcgcttattcaacatcgacgttcaaaatgaagccactattcttgaattttatgctttttatttatttaacattatgtataacaaaaataaggacaatggaatatgtgaacagtggaggatacaaaatgcctgtgttaggacttggaacgtacacagtaacacaggaagaagaactaacaaatgctattaataaggcactggaaatcggttaccgccatatcgacacagcagctgtttatagaaacgaacatataataggtaaagtacttaacgagtggatttcatctggaaaagttaaaagagaagatcttttcatcaccacgaaactaggacgttttgactttttcccagaccaagtagaaaaagctctaaatacgtctttacaaaaattgcagcttgactatgtagatttgtatttggctcattttccagttgcgacaaagctaaatgatcaaaataaggaagtcgtacaaccaactgacattatatctgtttggaaaaaattagaagaacaagtaaccacagggaaaaccagaactatcggtctttccaattttaatatttcacagattcaaaggatacaaaaaattgctaagatacaaccagctaatttgcaagttgagatacatccttactttcaacaaaaggaattacgtgattttgctaaaataaacaatattactgtaacggcatattctccattaggagcacctggtcttaacaaatattttaaagaatcaaataaacctgaaattactttaccagatatcctaaatgatgaaactgtaaccaaaatagcagcatcccacaagaaatcgcctgctcaagttgtactgagatttttgatacagctagacctaatcattattcccaaaagtacaaatccaaaacgactagcggacaattttgatgtatttgattttacgttgaatgatgaagaaataaaatccttggagaaattggataaaggaaaaaaggctaagatatttaatatgcagtatttggcagatcacattgtcg

SEQ ID NO: 8431 - DNA, 1071 bp, Diabrotica virgifera
  SmartBlast Evalue=1E-111; Info="Glutamyl-tRNA(Gln) amidotransferase, subunit-B, putative n=1 Tax=Aedes aegypti RepID=Q16UG2_AEDAE"
ggttacatttgctgtcagaagttcaaaacttttttagtaattcaccaaaagatgtatttataaaccaaaatggttttgaagaaagctagcaaatattttatgaagcttggtgtagcaaaaagaagagtttcccaagtatctaataaacaaaaatggaaaagtgtagtaggtttagaagtacatgctcaaattaattcagctagtaaactattctctggagcttccacaaaattttcatcgcctgtaaattcaaatgtttccctattcgattgttcaacaccaggaacattaccagtcttaaacaagagatgtgtggaagctggggtacttacagcattaagtttaaattgtaaagtcaatccgatttcatattttgataggaagcactatttctatgccgatttacctactggttatcaaataactcaacaaaggcaacctctagcagtaggaggtcatttagaatttcaagtatttactccaggtgttcataaagctccttatactactaatgttaaaataaaacaactacagctagaacaggacagtgggaagagtcttcatgatgaacaaaggagttttgttgatttgaatagagcaggtgtacctctcatggaactcgtattcgatccagatcttaaagatggtgaagaggctgctgctctggtcaaagaactgatttcaattttacaaaggatacagacatgttcctgtaaaatggaagagggagctttgagagtggatgccaacgtttcgatacacaaagaatccgaaccattgggaacaagaacagagataaaaaatattggatcagtgagaggagtagctggagcaatcagttatgaaatacaaagacagataaagctgaaagaagctggtcaagctattgctaacgaaacgagagcttgggatgcttctacaaagactacagtggcaatgagagataaagaagtacaacaggatataggtatatgcctgaaccaaatttacctccacttcatattgcaatgggtccggtagagatcggttgtgtaaatgctgaccaaataaaagaaaactataccagaacta

SEQ ID NO: 8432 - DNA, 1070 bp, Diabrotica virgifera
gatataattgcacattaaaacaattaatttttggttctaaacaacttttcataatagcaattttccatattatgaattaaaatacgtaaataaacaaagttttcgtaatgttcgcattttcagcttgtttaagtatgtttaggagactatttcgtgagtggaaatcacaacttcaaatacatattagttaaaaatgtaatttttattacaatcgattgtggcttaatcccaaataaacataataattagctgtgaaaattaagttgtcattgttaagttaaaagtttttttttggcagaaatggtaatagcataagtgattttacggtgaaaaccgttcgttattcggttggtaagatttgatcaaatttgtacaaaatactattcggtacatctctaatattgaacgagttttgtgtagtaatgtactgcttgcatgtctctacattccttcttggggcagattagtattatacggaaaaacgtaactttttaaaggtggattgatgggactacctctaatctaccccatctcatgttgacaacgatgtccatgcaataagtgcaaacaggagttcacaatcctctttttctcctgtaatataacgaaagaactccgcaaactacccaaaaaagtgatggtgcaattaataattttataattgaaagtgtacacacgatttttacttataaactcttttatatgaggcaaaattgtggtaataaggagttgaagacaacaaaattcactaacttttgttttataccataaactttgtaggtgcggggttcttgaaatttttattttctcaaccatcagtttagttcccccatttttatttctgaattaatttactttgcaatcttggtcactagtaagtataagcaaatctctatttatgaacttttctttttaaaatatatacttaaatcagttgttaggatattcattttatggatgtgtgtatgaatgtgctgattgaattgtgataagaaaaattttgtgcaaatgtacgggatccaattactattgttttcttttttgtatggataataaaaattcaaagtttc

SEQ ID NO: 8433 - DNA, 1075 bp, Diabrotica virgifera
  SmartBlast Evalue=8E-11; Info=Endonuclease-reverse transcriptase n=1 Tax=Bombyx mori RepID=D5LB38_BOMMO
ctaaggagatcatggacggacaagataaccaactagaccgtactacgaagaatgggaaagaaagagaagtgatgtttacaattaaaaagagaaagttagaatatcacggacacataataagaaacagcactaaatacagattactgaaaataatccttcaaggcaaagtattcggaaagcgaggtacagggagaagaagaatatcatggttaaagaacctgaggaaatgtttctcgacaacgacaactaatctatttaaagcatcagttaacaaaataattatagccagaatgatcgccagtattcgaaacgaataggcaccaaaagaagaagaaagtacagggcaaaagatcaatagcaaggcgccagaaatcgtggctgaaagacctgaggagatggtttgatcgctaatctatagaaatatttcgtttagcagttaccaaagctacaattgccatttggatcgccaaccttcgaaagaagacggcgcagtaagacgaagataataaccatggccttttaaaaaacatcttcataggactgcattctatgagactcccttcggtctgtataataatgaatatatctaagatttaaaccgtgtattcttcgattgtcttaatcatagggatcagactcgaaacttatattttaggggagtgcaattagaacgaaaacatgcattgtttcgaaaaaattcaaacaagcctatatttttttaaaactttttttgttagtttatatacatgttaaagtaaaaagttctactcgcagattttgccgctaattgtttattaattgtttaaataataattgttttgtgcaaataattttaaaaatatctttaaattcatcattttactttgatcaatattttgtttttgattatgctgaattcgaatatggcatttcaatttgaaaattcttatacagaagctcttatacagtgtgtctgcacagctaggaaccatatggaaaacatttttattttcaattttacgaaaaaaattattcttaataaaatgctctggatagtaaaaaatctaaaactcaaccatcagatatcaaattttat

SEQ ID NO: 8434 - DNA, 1070 bp, Diabrotica virgifera
  SmartBlast Evalue=2E-11; Info="Ribonuclease p/mrp subunit, putative n=1 Tax=Pediculus humanus corporis RepID=E0VNI2_PEDHC"
cattgtgttgggtggatcgtaagtggttaaataattataaacaaattgcaacattcgcttgtttgttgtattcagtttgtgtgtcagtggagtttaaatgcggtatgttgccgtgactttattaatcaataatataatgcggtacacaatagcagacactttcttgttttatgtgaattaatttgactcatatacagaggtattggtctaagcctggcgtacttcaacatttacaactttatatgaaagcattttggaagatgtaactgctaggttttagatgcatatttgatatatttaaggaataaaacaacatggaggtagaagatataatgtgcgatcaaagtattttacaccctgaagtaaatgttcagtttgatagtaaatcaccatatccagttattccagcaagcaaattatggatttttatagacttagtggccagatctatcgttccaccaatttcaacaatttgttacacagtctttaaaaatcctcaagtggttattcagaatgtaagataccaaattttcccagcagttgtagcatttttagttaataatatatctggatcattagcgtccgtccaaaatataacattaccagtaactttaagaataacgcggggtccagatggacgcgacagagctgtgattagcgacactaatgaagatactgattctgaaacgccagaaaaatcggttgattgtttggttttatttgaaccagaagatatcgatattgacgttatatttttgcatgggcttcacggagcaatcaataaaacatggaaacaaggagtttggagaacaagctcccacaagctcaacaaacaatcgcctgtaagaaggctatcgacaggcgatatgtacgtcccaaccaaagaccatacattaaaaagaaccatttcaagtatttattccaaaatacccaacaaagtggcgagacgagaagaaaatgaacaaaatgaagaaaataaagaatataacgaagaagacgaaaggaggaagattgaggattatagtgactgttggcctagagattggattccaaaggattgtccaaatgct

SEQ ID NO: 8435 - DNA, 1066 bp, Diabrotica virgifera
  SmartBlast Evalue=7E-28; Info=Transposase (Fragment) n=1 Tax= Teleopsis quinqueguttata RepID=A5WZ66_9DIOP
acagttttaaaaattggagaacaaatataagaaatagtatttatactctgatactcctggagagaagtttaaggtgcacaatatccaaatttccaaaagcattcttatttcatgttttctttcagcataaactgtaaaaacagtatttgttttatacgaggtttgtcttttagtttcacatatagccgcttagacggcgccaccaataaaaccttcaacaaaaatgtaacctgaatcttttgttgacataaatcgacagttccattgcgatacaagacgtgtagatacaatgaatttttaaaattagcaagtctgtcgaaaaatgaaccgagaatattttcaactggatgaagtacaccagtcaactatttcccgctggtattgcgaatttcaacgtggtcgctccagtctcagcgacgaatccaggccaggtacattacacagcaaaacattgatgcggttcgtcagctaattaaggatgaccaccgtgtatcataccgggaaataggaaaatctttgggcatttcaaagatctcgatccaaaagattctacatgaagaactgggtgttactaagttggtttcccgttggatctctcatttgctcagaggagcaaaaagcggttcgcgtcaattggcgtcaaaaaacattggaacggttggaaaggaagctcaaaaacgtttataatattgttagccacgatgaatcttggatttactccaaggaaccggaaaataaacgccaatccgcagtgtggatgtttcacgatgaggaaaaagcaacaaaagtgatccagtgaacaaaatgaaagtgaacaaaagtgttctcgaaatgtatcaaagaaaatggtctcaacttgtgtgtcaaaatctggtcatgtggcaacaattgctttagaagatcgaataacggttacttctgattggtatataaccgtttgtttaccagaagttatcgcgaaactccgacaaagcaacacacaatggcgaatcatcctacatcaggacaatgtaagtgccacactgcccaaaggacaatagagtttttggagcttcaaaacattgaa

SEQ ID NO: 8436 - DNA, 1070 bp, Diabrotica virgifera
  SmartBlast Evalue=3E-75; Info="Aspartyl beta-hydroxylase, putative n=1 Tax=Aedes aegypti RepID=Q16P21_AEDAE"
tacaattcaaaatctattctactcgaagaataaaaattggaatcttctccacactttctaaccattaccccacttttaaagtaattttcttgcgaccatttcaccatttgtgaagtagaatacggtccttgtacgtcttcatcctcaattttccattttaattcccacattaatggtgctgttgctttgggaacatctgtatcatcatgttcctctttgttactcgaagttgttactatctttgccttctccttctcatcaaaatcatcagcatacatatctagttcagcttctttgacaactttctgttttttattttcactagcgtcaactttactttttatatgctcgtaagtttcctgataaacatccatattacctagctttgttaaaatttcatttgctagttcagtgaggtctgtaacatctttagagctagttaaagttccagcctttttacgttttagcctttctacacttgataatttcatatcagcaccccctaagcgttttaacgctttattaacggtctctttgggattcatatagttcaacatttttttgtatgaaccaatttcatcaaaatgttcgtcatcagtttcagaatcactttcagcacccaagccttcttcatatactttgtactttttgtcatttcctgcgttttctttaattttctgccagtcgatgttgtcaagccaactgtcttttatttctttttcattgttccaaataaaatgaccgtccttatcaaaatgaccttcttccatttcttcattcatgttaaatgctgtcattttttgttctccatcttgtctagctattccgtcttcctctccctcgatatcatcagtatttaagacattatcctcttcaatctcgtcatcttcctcatcactatctaaagtatgttttttgttagtttgacgtccagtatctttagttgtaaattttgtatcgctaaaagcgctatcgtagtttcttttggacatattttcaacagagtggaaaattggttaaagatttttatcaaaacttaattatatgtttgtggaaaaccagctaataaa

SEQ ID NO: 8437 - DNA, 1068 bp, Diabrotica virgifera
tgaaggtgccccttgcaaattgtacaagtgccctaaatgtttacgccactttgattgtacaacacgactaaattcatattaatggaaggataccacttgtattaacatgccagcatactgtttgtcaagaatgtattcaaaaaatggcaaaggacaatgcaattgtgtgtccaatttgcaaagattcctcaaagttaccgacaggatataagcacagcaatctacaagagatattttctccaaatttttttttggttggaaccatcttgtggcttaaatctcatgaaaataacagaagtatatcactagcacctgtaactgacacagatttgagaagtgaacttatctctcctatatcgtcatctgtttcaaagcacaattcagacaaaacctgctgctttttaacttgcaagaaaaacgcaactatacaatgtacagagtgtaatgatttctactgcgaaccatgctgtaatactatccacaaaagtgccaagtccatgtggtcacataaccgagttcctcttgaaggcagtgcgacaaagaaagaaactttggagctagaaagatgtgaaaatcacaacatgcattttgaattttactgcactacctgtagcatggaagtatgctgctactgttatattgaacaacatgacggacacaaaaagataatttgttgagattggaagaagaagaaatggacgaatttaaagtaaataaagaaagtgcacgaaaaatattaaagcagcttattttctctcagaagaaacttgaagatctgtctacatctagcactgcttctatcgaggcagaagtgaccagttactttttgaacttacacgccaagctacagtatattcagaataatctcaaagacgatataatcaggtctactacacttggatctgtcaaacaagatatcaaagagacttatacggaaattgttcattcaatagaaaatttaaaagacatcattattgcttgtgataaagtggagatgagaaaaatgaacatgagggctatttacaacaaattaaaggaagcaaagaatactccttgctacttattatc

SEQ ID NO: 8438 - DNA, 1071 bp, Diabrotica virgifera
  SmartBlast Evalue=1E-143; Info=Ankyrin repeat-rich membrane spanning protein n=1 Tax=Harpegnathos saltator RepID=E2B4F1_ 9HYME
aacaacatacttttctatatgtccaactcgacgcacttttcactggtttaggtttgaatgctctgtacaatctagtagcgactgatccatagcgactttcaatagcatcgtaaagagaaccgatcatttgaactactgagttttcaccgccggctgtactgcttactctagtttgatcagtgaagaaaaatctgattggttgaacggcaagtccgtcgtgtgtggcaccaggaggatggcaaaagagaatttgcaacatgagtctgagattgttcatttttctagtgagttgaacgttgaaattgtaggcccaatcccagtcgtactttttactagcgatccaaatattggcgagtattacgtaacataaaattataacgccggcactaacagataaccctacttcccatgattgaaaggaaaggcctaaaactatagctataactatggaaatgtgtgcaataacaagaaagagcaatgtggaaaactggaagacgggatccacccattcacgggcgaaattcttcatttcatctctaagtttactgagtagaaatgactttccgctaccccacttggcatagaggcctaccattatgggcatggaaagggaaggttcgcttaatatgtcagctaacgcactactatacagatcataacctaacatattttcgttgtcttcatttgtatttaatctccttgcaccaaaaatttgtcctaaaatcgtcttctggtgattcacatcgatgttatagggagtctcccccgatctattcggtctatacaaaagctggctattcttcggattcctcaacaatatctccacgatggctttcgacctagctctcatcgctacgtgtagagccgtatctcctttcttatccgctgctgaaactttggctttcttatcaactaacaattgcactatttcggagtttcgagaccgtaccgccttcagtagcggagtatcgccgtctttcgtggccaattctaggtctgggttgcaggttagaagaagtttgagcacgttcaagttgcctttttcaaccgctacgtagatggcggtcttgc

SEQ ID NO: 8439 - DNA, 1068 bp, Diabrotica virgifera
  SmartBlast Evalue=2E-14; Info=Endonuclease-reverse transcriptase n=1 Tax=Bombyx mori RepID=D5LB38_BOMMO
attgtctaatattatctacgcagccatgaaagttttttttcgaccaatccatctctttccctccaattttccttgtattataaggcaaagtagatggtatttaggtcctctaattatatgtccgacgtattctatttttctcctcatgatatttatgagcagacgttctgaattcatcatttgaagaacatcttcattggaagtgtgctaaacgatctttagtttccgtcaatagcatcacaattcgcatgcttctaatttgtttggcattgtggttcttaacgttcatgtctcacaaccatacaataggatagatcatatttccataatagaccacatataccaaaatttcaaggaccttcttgcgaatattcatcgatatgcttttgttacataaaactagtttccaggtcataaaagccttacatggtatttctatcctggttgttatctcttcatcagtcacaatttacatttaatcagctgtcagggtatttaaaatggttttcgcgttctatctcctctccgttaagacaaagcagaccttgatctatattaatttttccaactgccatccactttgtctttgaaatgttaatttttaaggcctctccgataacttgcttcactaactaccctataataagtactttttattagatttagctctttttccttaagaagtgtttattatctaaaaagaactgacttttgaatggttttaggtggcataatgctcccaaagctgaaaataaacttaataaaaatttcctttttctatgccatattatctttgggataaaattgtttaccgatttgtcattttttattaaacccactaaaacaaatgtttatactttcgcatgctaaaaattgctgagattttcaataaatacggcaacaaaatgtttcttggttatacagtaactttaaattttataggaactttacctaccaactattatttatttttctttaagtttccaaacagtgtttttcggtctgacgtcagtttcagtcaaactttgtatgccatcagttcttattagtaccaattcttagaatatt

SEQ ID NO: 8440 - DNA, 1065 bp, Diabrotica virgifera
  SmartBlast Evalue=1E-113; Info="Mitochondrial ribosomal protein, L38, putative n=1 Tax=Aedes aegypti RepID=Q16QR9_AEDAE"
tctttgttgatttgttttggatctcggtatttgtccatatacaagttaaatggttctttaattggaaaccaagcttgttttttaatatatggaggtgcaaagtcgtactcaaatattggttccttcatatttaatttattatgataaaattcttttaaagacgcatcccaatctgactgaaagaatgccagaccagctggagtcatagtatcttggaattttttgtaaaaatcatatgtattaaaggttctatctgacagggttaaacaagatccttctttcttatatgatgaaaaatctaatttcttatcttgtttatacaaaacaaatatcaacctgtgaaatccaatgccctttggcggaaaaggttgcaaatactccaccaacttctctcctttttgcaagtcatttcctggaatgttgccaataaaccaatgaatatattcacttgatgtttcagtaaaatgtccatctggattgaccaacgttaatgtccatagtgtatcactatcactatcataagaaacagtaggggcgtttgctgattcagaaggttttataacatttccataatatacaggcaaacttccgttctctgtttcataaagaatgtttaaaggaactcgtggatgaaaatacgcatcgccatataaatgttcgaatacaccatagtggtcagcaaccttttttatatcaacaggggcttgcgtttttaaccattctttatttgtttcttctaagtttattaacaactttttatctctggctaatttttctaaggttggattctttttctgctcttttaaaatctttaatctttcttgtaaaacttttgatctggaaatcttaggaggaggcaatccaatatctacacgataatgaatagcaggatctttataattagcctctgctaatttggtttccaatgatttagcaacgcctggagctaaacctcttaaatggtgaccatgtcttacagatatatttaccgcagagttaatgcttccatttatatttttacaacaaatattccataaagaactagccatttcttgaggtaaaatg

SEQ ID NO: 8441 - DNA, 1066 bp, Diabrotica virgifera
  SmartBlast Evalue=1E-67; Info=Phosphatidylinositol glycan anchor biosynthesis class U protein n=1 Tax=Camponotus floridanus RepID=E2AVG3_9HYME
gccgaagatagcttattaaaacccgaaaaaatatttcgaaccccttactatgttcttttggcctacttgtttaatccgtatactttattgaactctgttggtttctcaaccacagtttttacaacttctacctctcagttgtactattttcgatggtttatggattaccattactatgtggagtatttctggctatgtcagcatcagtatcattctatccggtagttttattgttaccagctagtttttactaccaacagatctttaaaagtagtctgaaaactgtaacttgtgtagttagttttattgtaacctcgttattgattgtgtcagtgtgtagtgacagttttaacaactttagttatatacgaaatgtttatggttgtatattgaacgttccagatttacaaccgaatattggactgttttggtacttttttactgagatgtttgaacactttagagaactatttatatatgcattccagatcaacacaactattttatatttggtaccagtttcgcttaaatttagaaaacaaccattcctactagcaattgcgatcaattttataataacgatatttaaatcgtatccgagtgttggggatgtaggatttgtgttaagcataatgccagcgtttccacatctatttcagtttagccagcaaggatttttggttggaacaatgttgatcatttcttcgtgtttaggacctatagtgtactatttgtggatttactgtaattcagcaaatgccaatttctattttggagtcacgttagctttcgcagtagctcagatatttttgttaacggacatcttgtttgcccaagtgcaaagacaatacatgttaaaatttggaaaggaaagaaaagttgatggggaagaagggactctttgtttagaatagttttgcaataaaattgtgtttgtaagaaatggtttttgtatggttcctgtaatacacaatgagggtcgttcgtagagtatctgccgcccaggtgaaagagtaatttaacatttaacagtaataaaaatttactctagtctaatttatcaggc

SEQ ID NO: 8442 - DNA, 1070 bp, Diabrotica virgifera
  SmartBlast Evalue=8E-56; Info=Inter-alpha-trypsin inhibitor heavy chain H5-like protein n=2 Tax=Catarrhini RepID=ITH5L_HUMAN
atacgtcgaaatgaaaggtattctgctggccttagtagcgagtatttggttgacatgggtggtttgtattccctacgtggctgtaaaaggtgttattagcgcaaaatgggtggtgtttcagggtccgtctggtccaaaagctttaagcgtatatccacttacataccaattcaacatccgttccgatatctcgaacagatatgccaaaactttggtaaccagtaaagttgaaaatgcagcacccaattcaaatgaagcaacatttacagttgttttgccagaaaaagcattcatttctaaatttgtaatggaaatagatggcaaatcctaccaagcttatgttaaagaaaaagaagaagctaaaagtatttatgattcggcagttaaaaaaggcctaagtgctggtcatgtcgcagtaagtgctagagactctaataaattcactgtgtctatcaacgttgagccacaaagtaaagcaagtttccagcttacctatgaagaacttttagagagaaagaacaaccaatatgaactcgtgctaaacatacaccctggtcaaatagttagggatatgaacattgaggtcgttttgaatgaaagccgtcctttgaaatttgtaaaaactccttcgttgaggtcaggaaacgaaatttctaaagacgattcaaagcttgacccctcagcagatatccaaataatcaacaatagaagcgctgttgttaaattcaaaccgaactccgacaaacagagagaatttgcgaaaggactgggaaagaaagaatatgagggtatagctggacaatttgttgtacaatatgatatagagagagatccccataagggagagattctactcaaagatggatacttcgtacatttctttgctcccgaggacgtcgaacccctatcaaaacacgtagtgtttatcttagataccagtattagtatgaacggaagaaagctcaagcaactgaaggaagctatgggcaacattttggatcaactcaaaaaggccgatgcttttcatatagtggaatttaatagtgatatttttgtgtggaacatgaaca

SEQ ID NO: 8443 - DNA, 1069 bp, Diabrotica virgifera
  SmartBlast Evalue=1E-87; Info="Rna-binding protein nob1, putative n=1 Tax=Pediculus humanus corporis RepID=E0VNE2_PEDHC"
gttgtcatgtaataaaaataatattgtttaaaaaaatatgaccaataacttagtaaaaccagtaagctacctagtagtagacactacagcctttatacagaatgcaccattgcaggatgttggagaaaaaatgataacatgtccagaagtagtagatgaaatcaagaacaagcgacagctcagacgtttagtggtgttgccatacgatttaatcgtgcaagatgtctttcctgaaaatatatcaataataacggaattctccaaaaaaactggagactatcccagtttatcagcaacagatataaaagtaatggcccttacctatcaacttcataaagaaaagagtggcactgaaggtctaagaatggaacctgttatgcaaaaagctgaagttactactgagaataaagctcttgaaatgaatccagatgttactggattctatttacctgggaaaacacaaacatcggaagataatgtagcaggggatgatcaagaagaatatacagaagaaattgatcaaaatatagaaggattagacaagttagatacgaatgatgttgataatattttgacaccagttaaagatgtagaagaatctgatagtgaagattcagacagcatagaagatgaaagtgatgatgatagtggctggataaccccatcaaatgtaaaaaccgccaaacaacagttaaactcagaaatcatggaagaaaaccatgtagaagtatcatgcatgactacagactttgccatgcagaatgttcttagacaaatgaatttgaatgtatcagctttagatggaagacttataaaacaacttagaacttacattttacgttgctacgcctgttttaagacaactagtgtcatgactcataaattctgtccaaaatgtgggaataacacattgaaaaaggtggctgtatctttagatgcccaagggaaaatgcaaattcacattaattccaaaagacctcttacaggcagaggaaagaagtatagtttacccaggataaaggggggtaaacatccaaataatcctatattggtagcagatcagcctatg

SEQ ID NO: 8444 - DNA, 1071 bp, Diabrotica virgifera
  SmartBlast Evalue=1E-141; Info=Phosphatidylinositol-5-phosphate 4-kinase type-2 beta n=2 Tax=Aculeata RepID=E2BSN4_9HYME
actcgcgttgtcgctggagttcttgttctcctctttcgacttcgtgaatacctaacagcaggctgtagtccattaaatgtaacttagtgagaaagtctacatctgccgtgagagtttccataagttttgccttggcttcttctcctattgtcaccttcatctgttcattgacgaaatcgttatccttcaacgtgggcagctccttttccctctctttttccgaggcttccctgtcgacggtggatcccttgagatcaaactttctgtgtgtgcttaagtgatttgagaatacgtttctacttacgactatatagtgctcgacgttgtctaccgttagacgatacataccaaggtactgcggcagaagcgtcttgccgtgtctttctacaatataaggatgataatgtttcaaaaatgaatgcattctttctacctcttcagaagtaagggttttaattataaaaattttatcgtagcttagataaaacttagctccgcttttgcctgacgaatcatctggcattggttgtgatcttgttagtgactctttgtagtcaagatcatcaattccaaacctttctctgatatttctgaacaccataggacaatattctttgactttgaagtgtgatggcatattttctttattgaaaaggtgattgtcaattttaattttcgaataagctctgaagtcgtcgggcaacaacataaccggaatggtaacatgcataagttcattaatcgtatgatttatcccccacatgaagaccgaaagaaacggttcattagctctaaaaagctttactttttgatgtttaactcgaaaatgtttctttttgagtttagaaagaccagggacactactcattttgacagtcaattttttcaaaagtacgaactgaaatcttatacgataattttcattttttaaaacactaacgacgcgattacagtttttgtgttttctcgaagtttaataacgtttttattgtccgttcggcacctaactgaataattttttacacatcatttggaataaattaggtacttcaatacacaccttcattgatt

SEQ ID NO: 8445 - DNA, 1062 bp, Diabrotica virgifera
  SmartBlast Evalue=4E-56; Info=Bitesize n=1 Tax=Culex quinquefasciatus RepID=B0W228_CULQU
attgatgctaccaacttttgataaacaaaagcagttctttattgagtccatgagattcgtctataataccaccgtccccttcgtctccctcatcgtcaactctattatcaaatttattaatgatttgcttgcagctgtctgaaatttgttgttgcagaactgtttttgaagttgttatctctagatcggagctggtgtagtcggacgaatcataagaatcactccaagtatcttcactgcttaaatattctacgatttctctcacttgatcatctctaataccaggaacagtcttcatgagccgagtaagttcattttcgaagtaaactagttgaggaggtttgcatcttttggcacgaggacttggaagaggtttggcagtgcaagataaagtaggcgtcgagggtttggaggaagaacttagctgagaattagcaaccatagtcttaaagaattgtctcattttacacatcattagattagtctcttcatctgaactccagttgttaaagctatcctttctagtaagagatgtcgctggaggtgttgataacagtattgctttatcttctgattttttttcttcggtaatgtcttcgagttcgatttttagttcgtttttaccagatgtgaaatctggagtgttgttatctctttgttctcgtaacagatcgtcacaacttccaacaaagccactatctcgactctgctggttcttcgttgtggtaaggttcgtaacggcagcaggtatttctggttgtggtgttttgtgaccgtcctcgtccgtctcactatccttttcttcaatttcttgagtaatctctaagtttttggattcctctgcattcgagctctttggttttttactctttttccttttaactgtatcgaattgtccgtctggtttttcaaaactgtttcatcgtatttctgaatctgaactagacgaatcttcggagttaagttgagcttcgacggtttgttcgctaactgcattgtctaggttatctaaagaagaagaatgagaccttcctgtaccacgagctcgtaccagtcgctttc

SEQ ID NO: 8446 - DNA, 1065 bp, Diabrotica virgifera
  SmartBlast Evalue=2E-80; Info="Centromeric protein E, putative n=1 Tax=Pediculus humanus corporis RepID=E0VUT3_PEDHC"
atgactatgacaaggttaacaaaattcaaagaaatattaatgcagacagtaatgcaatggaaaaagaaatcaaacagttgaggataaaattaaacaatctcgagaaaagtaaaaaatactgatctcgccgaactgaagatgagatacgaaagccaaatcaatgtggtaaatggtgaattacaatctcttcagaatcaagttattagatttaaaagagaaaaagacacctataaacacatgctagaaacagctcaaaaaactattggagatctcaaacaatcccctaagttatccagagatggacctaaaaaccttaattatgatgagctggaagactcaaaatccagagtagcaagccttgaagaacaaataagttgtatggaagacgaactttcagaagcaaggctagaatgttcaagacttaaaactgagttagtttctgaacgttcatccttcgaagtaaaattatcagaaatgcattccaaagtaaatgaattagaagaagaaaaggtgttgagtagcggtaggaccaaaatagtaggtttacgaacgagaatggagctagcatggcaaaaagaaagagaagagcagcaaaggctgcttcaagaaacggcaacgcttgcaagagacctgcgacaaacgttatttgaagtagaaagggaaagggataaagaaaggctagaagctaagcgtaagcaagaccaattaaagaaaacttctgatgaagatcaagatgaaaacaaaaagaagattacagagttgcaatgtgatcttttggaacttagagacgcccatgctaagttgagaactacgaatgagaagcttagaagagaaagagaaaggtatgaaaaagaaagggaggagcacagatcaataatgcatggcaaaaaacgtgttgatttggaagatgatcgaaaaataaatgctttggttgagcaaatggatacattaaaacaattagcaccagaacttttcttctctcgcgaaagtgaagctccatatacccccacacctccaagaaggactaaatctaaatcaagaagaaagttctccagctctagaaag

SEQ ID NO: 8447 - DNA, 1065 bp, Diabrotica virgifera
  SmartBlast Evalue=1E-38; Info=Polyprotein n=1 Tax=Phanerochaete chrysosporium RP-78 RepID=Q45W66_PHACH
tgatttacatatacttggggatcaggatagctaacatttcaataccccctctcaatttatacaacatttacataaatagtaaatttggatgaattgtcgactaaacaacaatcttgactctaaccaagtcttgacaaaaaattgaactaaatgaaatcataaaaacatacttatacatcctacattactcaggttacaactcatacctatatagaaaaatattcaaaaaataactttcattaactcaaaaaatattaacatgagaatatgataaaaaataaaaaaagcaaatagataattcacatgagttgtgcctaaagtataaaagtactaatctataaaaactttcaacattcttgaattttgatcaaagttctgagacgtgagaatatttcatttgaaggagctttagtgaaaatatcagcacagtttgattttgtatttatgtactgtaaagtaattacattgttttcaattaaatttcgaatgaaatgatattttgtgtctatatgcttagaccttttacctttaaatgaatttgttgcaatacatatagctccctggttatctatatataatatactaccagttattttctcgttcaataattcttctgctaagtttttttgtgaacaataactcacaacatgtaacagttgatgaaatatattcggcctcagtactgctcaatgaaacagtgctctgtttccttgaataccatgaaactggattgtctagaaaatatactatacctcctgacatgctttttctatcatttacatttgctgcccaatctgagtctgaatatgcaaatattaaaggttttctttttatatttttactgtatataagacagaaattaattgtattttttaaatatctaataatacgtttagcagctttccataatatatcatcaggacaatcgagaaattgactcaaataagagattgaaaacattatgtcagggcgactacccaatgcaatatacattaagcttccaattaattgcctataaggcacattgacagagatttgattattagcattagttttgtcaacctg

SEQ ID NO: 8448 - DNA, 1067 bp, Diabrotica virgifera
tttgtgagaaagttatagaggtaaattcgtgttttatttcctatttatatttaaaaacattagtttctaaaatatgaaaattgctataaaaattgttttttattttatctcggcagtttatttttgaattttaataagaaatccaataagactgtcgtaactaaaaattaacagttaatttgagcagcagatatttttgttttatcaaactgtataaaatacagaactattgtcgttggacatctattttatgaatacacaaaaattaaaacattaactcatttatgaaagcaggttagagtcacatttaacaaatcatgggacggtagagcaataaggaaagtaagatctaaacttgaacctggttatttcaaaagcaacgttatctcaaaagttctgtatagtatggcgaagccgaatttatgttgtaaccattgttgccatattcaacacgcgaaataattgacgttattatttgcatcaaattaaagttcgtatattgtgcttctcagaggtttttttcagtgcgtcacaagtaaccgaagaaaaggtacgtccgtgattatacacatgtataacatttcttctagttgttgatagatggcgctacaatatataaaaatgatttacctatacgataaaatctaaagtttttctcagtctttcagtgtggcattaattttgacgtcatatattataattttaagaatgtagagaatccttgcatggcattttagttaaatctgacagttgtcagaaaagtaatcagccaaatatgaaaggttattgcagtataacccttttatttgcaatttggtataaaaacaaatcaatcgtgtttattgaatttataaaaaggtatgttctttgatttgtatagtcgtataaattacagattttagacgtatagataatacgtaaatcatttttttttattatagcgccatttaacaacaaccagaacaaatattataaatgattataatcacggacgtaccttttttatgtcacttccaacttaatgtgttagaaagatatcgaaaaactgtgacgcactgaaagaagcc

SEQ ID NO: 8449 - DNA, 1070 bp, Diabrotica virgifera
accacacacaaagaggggaattgatcaacatttgccaaaatgagaaagatccaagagtttggtcatataatgagaggaccttaatatcgcttactccggctatctctcaggacaaaattgaaggaaaacgctgggtctggctgagtaacattagaatatggtcaaacggtcaaggaattgtttgttctttaaaatccatatcacaaaactataattaatagagttaggtttatgaattgaaagagtgcaacagtaggattaacctatctattttccaggaaaaatatacttcatactaaataaataataaaaattaaataaattactaaatatataagtacgataaatcacagcaagttatagatctcatgagttatttcaaatacagatatgtaggacactaaaaaaatcactctgcagatctaaacgatgataaatcacttatttcttaaatttgattaattatcatgttagtcgcttcttaaatattcaaagttttccatacagggatgaaaaccaagaacaaaatacaagtgtataaacagtaaaaaaaccaaaaagtgttgtacggaaagtccttcaatgcctttcaaactcgtaagcatgttcaattgtcaaaattgtcaaattttcaataggcgactttaaagccacgacttaaatggtttaaaaactctgaaaaaactctcatattcttttaacactaatctagtagtacactttccttattaaacaatattcctaaaattctttcataatagagaaatctactgtacacaaaacaaaatgtaaaatagactcccttgcgtgtaatggccattatataagtatatgtaactataaacattgcaacattttgaaaaatggaccctcttacacatgtcataatgaaaatttgaactatattttttaggaagatcataaggccttttcttgaaatactaatttttctttcaatactctgtagtacttggatccattattcaaatattttttgaaaacacatatcataactttttgaaaaacctcatgatatgcatctactcgttatatatgggtacgtaatccat

SEQ ID NO: 8450 - DNA, 1068 bp, Diabrotica virgifera
  SmartBlast Evalue=6E-78; Info=CG6218 n=5 Tax=melanogaster subgroup RepID=Q9VF86_DROME
gccggtaaagtatacgtgtagtagttgtcaacgtgtaaagggaataatttagttttggtcaattttgagtgaaattttcagtaattattttaaaatgtctaggaaattaattggtggtatagaagggggagcaacacattccaatgcaattattcttgattcttcaggaaatatattaggacaagctccaggaccaggaacaaaccaccatctagcagggatgaaagaagctcaaaaaaggatagctcaacttgtagatgctgccaaaagtaaagctaacatatcgctggatactaaattagatgccttgggtttgagtcttagcggctgtgaacaagaagaaactaataatatactaaaaaaaggacttctagaagactatccaaatttagcagaaaaagtattggtagctagtgatactgaaggttcagtagctgccacatcaaagacaggtggtgtagtttgtattgcaggtacaggatcaaatacactcttgataaatcctaatggatccagagttcaatgtggaggttggggaaaccttttaggagacgaaggaagtgcctggaatatatcccacatggccataaaaacatgttttgatgaattagacaattttgaaaaatctccacatccgataggtgcagtttgggatgtcattcgatcacatttcaaaataaaaatacaagcagatatacttgattatttttacgccaattttgataaggcgtttatagcgtctttagctaaaaaaatctcagaattggctacacgcaagaacgatcctctggctcagcacatatttagcaaagcaggaagctctatagcccaaaatattacagctgtagttttaaaagcagatccaaagttgactgacagggaaggtggaatacacataacttgcgttggttccgtgtggcatagttgggagttactaaaaccaggtttcttaaaatatttggctacaactaatgtaaaagagctaaccctaatgcgactagacgttgagagtggcgtaggagcagcttatttagcatcagataaactaggcttatctttggatagaga

SEQ ID NO: 8451 - DNA, 1065 bp, Diabrotica virgifera
caacagagttcgagatggtccatagagggatggtgatggtctctgaatcgaagttaaatatggtgccttttatctacattactacaagtttattatattcttatgttatgctttgagaaggtaaccaataagcttttaaatgaacttactcttaaatgctgtataagatacatgtatctttggtaattaaatgaatataaacaaatattacatctctaaacttgccaaataatctttcggtattcatttttagtctcaataacgatttctgcattgtaaatcgaactcttcaaaattctttcatgtcctacgttgtatattattatatggaagttttttctggtttttctggctatcccacgagatttttcagggtatctaaatatttataaataaattaaaaggtttttatcaacaccaaacgcgtcatttgaaaattgttgtatctgttaaatcactgttcgtataagccacaaataaaatatttaggaggtaaacaagtaatttctcaaagtaagtacagggagaaaataaagtgattttaagattttagagcaattcacgttttaccaaaattctgataaatggatgttgctaacgcgtataatgttaaatgaaataaaaaaaaaacaagtaaaaacttccattatcgtataattaatttgtagtttatgagtatgacgtagaaatattaaatatttgtgaattgtggaatgaacctgatctattagtcactgtgaaattttaaaataattaaatgtacatgttagtcttttaatccgacacgtatttgtacgttttacaagagaatgagttagttcgttttaaatgtacaataattaaggtatgtaggtacatacgtgaaattattagcttacagcttctccttagaaattccatctctgttgcgcttattttgtttttggatttcttatttattatccaatttttcacacccataagtcaggatgcttcttgtcatggtgttatatattcttttatttttatactgaggttcttattccacagtatcggcttcaatcttcgtatgtctcttgtttgtcc

SEQ ID NO: 8452 - DNA, 1068 bp, Diabrotica virgifera
gctacaaaacattttgatctaaaactcccgagaaaacttctttgttctgtatattttaacataaacgtgattaaaaatctaaatttcaaattttgtcactcaacttttgcgatttaactttgcaattcacgaatgttcaccttttactttaaaaaatcataacttattagaatatgatcgaaggcttgcaacagatcccatggtcttcagaaagctgtaaaatatatgctataaaaaaatattaaaaccgaatagagttgtagtgagttcgcagaagaacatgatttcttttttattttagggtaaaattgcgtttttgacaatgtttccccacttgaacaaaataaacttcattttcgttttcagcaccatcaaaaacataaagctaggaccaaaattggacatttacctgaccgtggtcagtaccatgttattttgggggtgcgtgccgcgcgtctattaatacaacaattttaaagatagtgaaagtagaagtgtcagaaatgttgggtagatgggcattacttttaggaattcattcacaataatcctgtaagagggcgaggttattcagaagtaaggagaagaacatttggcataaaaattgacagattattttttgaaaaatataaatataatgtataatattgatatttatgtaatgatcattaaatgtaaaataataagagtgtatgcatgatattttggaaaaatacatatgatattggacaaattttctccttattgttgaattcgcgacaggcatatagaacatttagctttgttttttattcgatgccatcttggacgaaatatcacatttcatttctttgttaaagtaaaacgttgatattaaaagttgtttattcttgtaatattgtataaaattgattgttcgattagggcaatgttaagatcaaatttctatatacctgtcgtttggttcgagtgaacaaatttgataaagtgtgtgattagtttttaaggatcgcgccgactatccttgccttttgatactgattttttcccaggatttttgttttgatgattttttacttgtgccataca

SEQ ID NO: 8453 - DNA, 1061 bp, Diabrotica virgifera
  SmartBlast Evalue=1E-51; Info=Zinc finger protein n=1 Tax=Aedes aegypti RepID=Q16NQ1_AEDAE
ccaattgactcgtgcaaggaaaagaaacgatctgatactgttaacggaaatacgcatttgccgatatatgagcaattgggaggtgacgagaacgtagtgatggtagtggacccgcaagcctacgactacgaatcggacttcgagtcggagaaggacgccgccccgagcgacgcagaaaacggggagtccaacgacgtcgaaccggaaccggagcccgagggaagaggcgtgataatgtgcaagtactgcgaccacgcctttacagatagctcagagtgtctaaatcacgaagccagcgttcacaataccgatactccgtacagctgtggcagctgtttgatgagttttgctgatagagcagtgtattcggcgcatctgaagagcgtgcacaagaacgacaaaccttataattgtccccagtgtaatagaacgtttgctaggcgttcagatctccgcaaacacaccatagtccacaccggtgtaaaacccttcacctgccccatctgcttcaagtccttttcgagaaacactaacctctcgaagcatatgcgaatacattccggaacgaagccgttcgtttgtccaaaatgccccaagacgttcacctcgaaggccgatttgtccaggcacgccatcatccacaacgggcagcgaccgtttagttgtaattattgccatttgagttttgggcgcaaggacaagctgcagcggcacgagaagaaacatttcccgcaagagaaagaagacaagtcgagggagttgcagattatgagggagaatctgtcgatttttaccagtgatcagaaagaagaggcgaaacaagaaggttcgtctgaaaacatgatcatagacttggacccattcagtcataatgactacaattcggaggccactccgcaaagaggagagatgttggaacacgatccaccagctgagatcgacgatgacaaagacgacagttcctacacggggagcaaaaataccgcaaaaccagacaaaccatttaggtgtttgcaatgtccaaaaagcttctcaaaagcagaaaatttattatctcatca

SEQ ID NO: 8454 - DNA, 1067 bp, Diabrotica virgifera
  SmartBlast Evalue=3E-21; Info=Endonuclease-reverse transcriptase n=1 Tax=Bombyx mori RepID=D7F157_BOMMO
gcctgagctcacgcgacgcttataattttcggttaattttgagggctggaagccctatttgctttgtcgcaactagttactaggtaggttatcgttgtggttgttcaatattattatatttgttcacttttattttttttgttaattattgcgtatttacgtactaaatttatttatttatttttaatagataatttatacatgaggtatcgcttaatttcatttgttccatacaacacatgatttgtacagcaacgattaggtaggtttggagttgcagtctgctttaggcgtgggccaaatctgcctggcgcccagttaacatctatattaaggtggaaaagaagtctcaacgaaccccccccactagagcatagcgggctacgcctttgttgtcatccgatagccggtgtagcaacgtagcgtctgcgcacgagcggcgaggctttgcacgctgaatgttaatctgagcttcaaattggctctggtttcttaaataatatcctaaaatagtgcaaaatagcggtttatggccatttctgaggttatgtcaaaccgttaattttttctgtcctaaaataatacatgaccaaattagttccaagtgatgttatgagagtaggtgggcacgaagaacataaggtttttaactatctatttaggacatgaaattagaataggaaaagacaatcaaacttgtgagaaccagcgtcgtataggcttgggatgagcagcatttgacaagatgcgacatattctaaaaggaacgctacgatttgcttgaagaaaaaagtgtacaaccaatgcatactgccggtaattacatacggttccgaaaccacaactttaactaaacattctgcaaataaattgagaataacccaatgaaaaatcgaaggagcaatgttaggaagagaacaagaagatatatggtaccaaaataggatagtgagagagaggactaagtaacagatatgatatggagacctagagaagataaaagacaccgaggtagaccaccaaaaagatggatgaatgacttgagaaaaacagtgagaaattggata

SEQ ID NO: 8455 - DNA, 1068 bp, Diabrotica virgifera
  SmartBlast Evalue=5E-70; Info=glutathione S-transferase O1 n=1 Tax=Nasonia vitripennis RepID=UPI0001C4CFEF
attcaactaagtaggaacaatcctcaaattcagaataagaatcaataattgtgtaatcaatagtttgtcctactttgtgagtgacatcatctcttaatttggaaaatgaatagttctcatttatcaaaaggttccaaagcacctccgccattaaaaggccataaaatccgattgtatagtaatcgattttgtccatactcgcaacgtgtaatcttagtattggatgctaaaaagatatcatatgaagtggtaaatataaatctatccaataaaccagaatggctgtttgacagagtacctggaggtaaagtacctgcattagaagtagaaaatggagaatttatctgggaaagtttgataatagtggattatcttgaagagaggtatcatcagcaccatctctaccccaaggatcccttacaaaaggccaaagatagaattcttattgaacaatttaatagggttattaacacaatgtaccgaataatggtgaatattggaagaatgaacgtcaacgacgacgaagtaatatcaacaggcctttccactttcgaaaaggaactaagagaaaggggtactccattctttggtggcaccaaacctggtatgttagactacatgatttggccatggtgcgagcgagcggaaatcttaaaagttttcggcaatcagcatcttctaagaagagacaaatacaagaaattgatggaatggcgaaaccaaatgactgaagaaactaccgttaagaaaagcctactacactcagattaccacataaaatatttacagtcgtaccgagcgggtatgccagactacgatctgattctaaattccaactgaactgcatcatcaccaacacattaagtcccaacaaaagaataaccatagttttaatctcgtatttcttttaaagtctgtttttatactaaaatatacaaatgagtcattaagtttgattcattagcaggtacgcagagagaatttaattttttgttaattgtttaaattattatagcattacacataaaaatgctttcacgtgctttaaacataaatatattattagtt

SEQ ID NO: 8456 - DNA, 1069 bp, Diabrotica virgifera
atcataatatatgtatcagtggcgactctgcttcatctacaccttgacaattgtaacattataagactttttgtactacttttttttattgttgctttattttaaattggataaagaaattatatgaacatgcacaacagtctagcctataacttatcctaacgaaaccttcaactgttttgtccttaccaaaaaactattattaagaattgttttcttgaagaaacgattataaatcgtttaaataaataaataaaatataaataatttggcaatttatgcttttgttatgccaggtgcaaaggacacagcacacatcttgtgaaaaatttaatgtcactcaagttcaataaaatttacatgaatagattcgtctctaaagtacaatcatttgcagaaagatttttatgaactactaattcacaaaatatcttttctcactctaacttacgtatataaccatttgattttagatttatttatataaatttacgccgtttttaatcaaaattcagagttggcgcagtctattcatgtaaatttgattgcatttgagtgacataatattttcgacaagatatgtgaggtgtcctttgtaacatatagtgtgttaggccttagtattagagttattcgaattttatttttgctgagtttatagaatttcttctatgttggaatttttcggattcatttgttttaaaatgaatccgacgattgtagtgatatggttgttttaggcactagcatgaatctgagttgttgctgatcaaaaccatagatgtaatgtaccattgccatatatactataactttatgtattaccccgacaagccatcagtattgtttatgtatgaaatcgtccatcaattagacagaatatgtatcagtcgatcaatattgatttctaaattatttattactctggtttaatcttttacaaaatccaacaagtgactatgtcaattagcgttaagtaactttaattgtctatgtagctcttctattccatttcaaaaaaactttcaaagggatttcaaaaacatattggtcctaaaaattccctctt

SEQ ID NO: 8457 - DNA, 1066 bp, Diabrotica virgifera
  SmartBlast Evalue=6E-81; Info=CBF1-interacting corepressor n=1 Tax=Harpegnathos saltator RepID=E2BI47_9HYME
tggatatttatcaagaaaaaagaaaaaccaaaccaagtttgtagatagaggaggaatttttcgagtgtagataaataaacacaagaatttttacaaaaatatttcatattagatcccctcattagagaggcctcactattaacagtggattgaatattccagttttcttaattttgcaggtgttctgataaactatcaatatggggaaaggttttaataattatatgtgtaaaaagttcttccacccagcttccagggataatttaaaaagggtatggatggcagaacagaaagcagaagcttacaaaaagaaacaagaagaactccgtcagcagtatgaaaaagaacaggatttacatgataacaaagctatgctcagcaaggaaagtaaagacaaattgagcattagttttatgtacgaacctcctcctggagcaagaaaggaaagggagagagaggataatgagcccgaatacaaatttgaatggcaaagaaagtataatgctcctagggagagttattgtaaaggagatcaagaaattcgagatcagccgtttggaattcaagtgagaaatgtgagatgtattaaatgtcacaagtggggccatatcaatacagataaggaatgtccaatgtacagtctttcaatgagtgcagccagatctttagaaaatgccacagtaatggaccaaaagtctctggtgcaacagatgttggatgatggattggctttaaaaaacaacatgttaatactgttgaagctaacaagcatcttttagttagtgaagatgaagatgccaatgaagaaaccacatttttaaagtcgcttaccaagaagcagaaaaaagctttattgagaaagttagaaaaacttgaaaagcagcccgaaaagaaaagtaagcccaaatgtgacagtagtgacgaatcatcagatgacgaaaggcaaagaaagaagtcttccaaaaaggagaaggtgcacaccagcaggaatcgggattctgatactgacagtgataaaaggaaacacaaaaatagagatgatcgagacaggaaacgaaacaggagt

SEQ ID NO: 8458 - DNA, 1055 bp, Diabrotica virgifera
  SmartBlast Evalue=2E-27; Info="Huntingtin-interacting protein, putative n=1 Tax=Pediculus humanus corporis RepID=E0VES6_PEDHC"
tatgaccagcgccgggcagtgtcgtcttgctccgttgataccttgtatactcgatgcttcgaaactatacgattattgtgtgaagattatgttcaaattacatatgactctaccgcccgatacgctctcggggcatagagagagattcctcaagcagtttagattattgaaaaagttttatgagagcaccagcaatttgcagtattttaaggagctgattgcaataccgccgttacctgaggtaatggatttagaagaagatttaattaaatgtatatctatgaaagagtacgaaaatagccatgttgtagaactaaataatggtagcgctagtaattttaacgatgatagtattagtggttctgctagtagtactaacaatactaacactaacaatactaaacaatctgaagatgaaaatgtaggtatcttgattgatcttagttaatttgtgttgtatcttaaaaacagcttgggttgtttgttgccattttttgtcccttagagagaaaattaatatatttaatacaaaatcataacactaaataatacaatgtgctctaaattttcataaaatttatttattaacttacgttaatgtttcgttagcagtgcatctttcgaactgtagtggttgtattactttatatgggttgataacatgatataatgaaaccgaagatatgacaccacgcagctcctgtcaaatgtcaagtgacgtcaatacgtgacgatcccgaccacaaaccatacatactcatagacgttgcacgaccatgttaatcttttgaatcgaattaacgccatctcttgattggcatgggaactaaattgacaaattttagttacgtgggaatttcaaattataacttttgctggatttttgatgaaatttcgcaagaaattgaaacaacagaaagacaattcaatgttttactgaaaacttcaaatattccaatttgttttgaaaatgctaaacacttctgccatgtgtcacgtggcgtgaaagcactgatgtaatattgagttgaatgaaaatttttgaaagaatcttg

SEQ ID NO: 8459 - DNA, 1065 bp, Diabrotica virgifera
  SmartBlast Evalue=1E-119; Info="1,4-dihydroxy-2-naphthoate octaprenyltransferase n=1 Tax=Aedes aegypti RepID=Q17BA9_AEDAE"
atattatgttcaaaaataaatttacttagacaatccataaaattaaggcaactccgtaattatgacagaaacattagcagccgaagaaaaacctttaacaaacaatggacgagcagcttctagtcccgtaccaactaaaagaacatctggaggactgatgaaactatccagttatgtgctagctcttcgaccatggtctcttagtgcaagtttaattccaactctattaggatcgacaatagcttacaaatatccagggtcttcggattttaattatataactctattttttacgatattaacaattatatcagtgcatggggctggtaatgtagtgaatacatactttgactatgtaaagggcatagacaatcgaaaatcagacgatagaattcttgtagatcatatattatcgaaggatgaagttgtatcgttgggtgctatcttatatttcgcaggatgtattggatttattatattagcgaacatatctccagcaaaaatggaacatttagctttagtgtattttgggggcttatcgtcaagttttttatacaccgggggcattggttttaaatatatagctctaggagatgttttgattttaattatttttgggcctatatcagttttatttgcatttatgtcacaaacaggtcacgtcgaatgggctacgatttattacgccttacctttagctttaaatacagaggctatattacatagtaacaacactagagactcagagtctgataagaaagtaggcattgttacgctagctataattataggacatacagcttctcatgttttgtatgcgttttgttgtttacgccttacatcatgtttatggtcgcttcattgaaatattctaagtggtttatgctacctctcgtcacgttaccaggggcatttaaaatcgagaagcagttcagatcaaaagatattcatagtgtaccaaaaaagactgcaaaattgaacttattttttggagtgctctatgtagtggcttgtagtatggtttcgacattgccatatgttactcagagatagatctgtattttc

SEQ ID NO: 8460 - DNA, 1066 bp, Diabrotica virgifera
  SmartBlast Evalue=1E-83; Info=Coiled-coil domain-containing protein 6 n=3 Tax=Aculeata RepID=E2B485_9HYME
accgtgtgacaaagcaaaaataatgttaaactaaaaaagttgaataataatcagctgctcctgatctggtggatagttatttctggacgtgtggagaaatgtcgaatatactcgagctctgcacgtacgttatagcataattgttgtaaacaccaggaacgattacatccaaatatcacttttatcttactagtctttattgacggaagtgtccattggactagcgggctggggtggtgcagctggtattgccggtttgataaacctctcgctgggcctgcgatgcggtgccgtgggactacccgaggaaactggatgtaaagcagcagaaatgcaggccggattgacgggatgattcaacaactgtccgcaagaatgacaacggggcggacctaccactagcgagtctctcggagattgtaatgtgtttagacctggactcaatggccgactttgactaggcgatggattatacggggctggtactggagagacagtgtgttgtctcacgcccaatacctgttcattataatgtctctcctcctccatctccagggaactctcgctttcagacaagtgcctgcacaatgcctctcttctttccacttcaagctgtagctttctttgcaatcttaaattttcttccttaatgtttctctcctcttgggcaaaacgctgcatcttctgagtgtgctcctgttggctcatggccaaagtggaacgcaatctggccacttctgaacgtaatgtttgaatgtgcgagctaagattactggcagtatcgccattgctgatctctctaggactggctggatcagacaccggctgatcgagctttatctgcagcatgcgtttttccgcttcgagtttatccattcgtttccatagtttgttgacgagagcttcttgttcttgctctaaagtattttcgagctcaaccttttctcgacgcaactgctccaggttgctttgcttagccaacgtttcggcctccaacttctcgatctttctcatgagacgattcacaaggcactcctgttcttgttcgagggtctgttctaggcgg

SEQ ID NO: 8461 - DNA, 1062 bp, Diabrotica virgifera
  SmartBlast Evalue=3E-68; Info=BEL12_AG transposon polyprotein n= 1 Tax=Anopheles gambiae RepID=Q4JS97_ANOGA
ctgcctcaagctagagtttccccggctcctccattttacacaacaggcgttgattacgcgggtcccttccaactcaaggaaagaaggggtcgaggagtcaaatcttggaaggcatatctatgtctatttatttgcttcacaactaaggcggttcacttggaactcgtgagtgacttgactacggaagccttcttggccgcgtttcgaaggttttgtgctagacgaggcaagccgtcagagattcactcagataatggtactaactttaccggagcaaataatgaactcaaagagttagcaaaattcttatacgccaatgaaaataccttaggcgagtctataaacaatatcggtgtgtcctggaactttatcccagcttattctccgcacatgggggggctttgggaagcaggtattaagtcggcgaaattacaccttaaacgcgtaacacaaaatgttatttttacattcgaagagttatcaactttgttagctgaaatagaggcagtgctgaattcgcgacccttaagtccattatccaatgatcccaacgattcctcagcactaactccagcgcatttctcattggtcaacctttgactcgatacctgacccaacactcgaaagtattcctatatcccgtctttcccgctaccagctagtgcagcaaatcaaccagcatttttggaaaagatgggctcaagaatttgtcagtgagcttcaaaagagaaccaagtggaaatttcacaatcaacctttgaaggagggaacactcgtcgtaattaaggaagatcatctacctccattaaaatggatgcttggtcgcatcatagagttgcatccgggtagcgacaaaattgctagagtcgcttccatccgaacctcaagtggtatcatccgcagatcagttgccaagatctgccctttaccagtagaagatagtgatgattgaaaccttctgcaagcttccaatggggggagtatgttaaggacaatttaatcttgttataattttgttatatttagggcattattcaagaagtggcaaccgcggaacgcgag

SEQ ID NO: 8462 - DNA, 1064 bp, Diabrotica virgifera
  SmartBlast Evalue=2E-53; Info=Zinc transporter foi n=1 Tax= Camponotus floridanus RepID=E2B260_9HYME
caccggctaaactgcccgaaaacgctgctccaattgccattccatcggtgaaattgtgtaatccatctcccattatgaccatccacgctacagacgaaaaattcttaggtgctgcatgaacatgtccgtgtttatgcgaatggccgtggtgctcgctcttatgttctcttacaattacagtatagtcatcatttttgtgttcgggagttaacatcttattagcttcagtacatatgttcatatcagaagggcagtccaggttctggttattgggttccattttctctagggtagaagatttagaaattttttgagtatctgatttggaagcggggtccaggacagtagtggccgttctgtccgtgtcataatatgtattgtgaggattatccattatatccttatagcaataaggaaaggaattgtatttgtccatacactgtgtttcatttttctgatctgtgctttccctcctatcgttgatgacagtaatatgagaatgtttcttctgttttcctttcctccatttaacgcacaatgaaatcagtctctccatgacgaagaaaaacgtgaggcccaacatagcaacgcaacctttctggatattttcatcgtgcgatgagtcttccgccaaatgggtgtgatgatgagaatggccgtgtgtagtactcatggcatggggaagaagatgtaggagagcatctccggctaaagtgccgacggcgagggctacgagatattgtatgagaggtttgtagaacctcttctgcatcactgggataataactaaggataaaactccacaagcgcttataactataatagcgagaatagaacacagccagacaaatccattatttacaataggagcaatgtcgtccatatcatgatggtcatctaacattttggtacagtctttattaactaagctatatagtaaaatgggacacattttgtagaatgagtcttcgtttattttttcgtacgaactatttaatcccactgatgatggaatttcctcaacttctaagcacgtattgtttttgtcatcagaatggctgtgc

SEQ ID NO: 8463 - DNA, 1063 bp, Diabrotica virgifera
  SmartBlast Evalue=1E-69; Info="Ubiquitin-conjugating enzyme E2- 17 kDa, putative n=12 Tax=Neoptera RepID=E0W2J0_PEDHC"
gtttactttttgtatgccaccattgacatggaatctgaaaaaccatcactggccattctattgtccctatcatcacactgttttctatggtgtgccaacgtgccatcatcacattggtgatagtttatagtggctttcacatagtgccttgaatacagtagaattctgttggtaggtattaggtatacaattatgaagtataaaagaagatgtaataataaaagtcaaatatacactattgaataacaatgaaggttgtgatcaaaatataagaaaactgaaacaattaatttagaaagttctctcattagcaatagttttatacaactgtatggtaacaaacataagaattctactttgatctataaattaaataaacgtaacatacactagtaaatgtaaaattattatgttttttacccatatttatttggagcacaattaattgtccatagcatatcgtcgtgtccattcctttgcatttctaattgcttctgattcatttattttccatagttctgcaacatcattagctaatggatcatctggatttggagcactaagtaaggcctgaatggataataaaactgtacgaatttgtagagctggactccacttatcttttagaatgtcaaggcatattctaccaagtctatcgatgttaggatgatatattttagttataaatcttactttaggtgcagacatggggtaatcttcaggaagaaataattctaatttaaaaagccccccttcgaatggggaatcctcggggcccgttacgattacgtgaaaataccgagcgttactatcatccggtacagcactaattcctggtacgggttcagccattaaacgctgagtttctttaattattctgcgtggaagggctgccattttttacttatcagtgtcgataattttattatttttgtgtccacaaattatagcactagaacataaaatcctatctgtatgaatcagcacttcgtctaacacaattattctttcattatttacctaaatctacttttatctaacaacgacgggtgatcatgaaatc

SEQ ID NO: 8464 - DNA, 1056 bp, Diabrotica virgifera
gccccatcgaaaatttgttgaaggcatcaaccatgatgtcctgaattccattgcctggtgccgtggcagttagtaggcgttcgcatcgggtaaatttttttggaaaatatgaaaatatacattgttttgagctatattcccgaaaaaaatttgcggattactcattcatttaaataaaaatcaactttaaaaattggttttttccatacataaccttactaatttcagacatattttccccaaatagaagtgtatattttatatttgtaggtactgaccttttatttatatcttattaatccatattagtgcggtataattcattatttttattagaatactggattatattgaaaatattataatccaacacaattttaaattctctctgtcaacatttttgcaatcaagtaatcaagttcacaacacaaaatcacaaaatgtttatgacatttagatcgacattcgacaacgactgtgctaggttgccaatttttatcgtagggttttctgtttcaaatattgatgtacataatttaaataaatcaaaatatctttggaatttgaaaatttgtcaaaacaagattagttgtcattcacgtttagtatcgaaaaatggatgtaacttcttattttgatattaataatatcacacaaaaaagcgatttagaattaatccaacatttgcaaagtgtttgattaattaaaaaacagtttaagtgcaaagaaagacagtgtcgccgtttatgtacggtgaggtcaatggagagatacaaattaaactatgtttattagggtgggttgtgattgcgcgcagcggtcaaatacctcctgcggttctctcactctgttacccgtaagttaggtttggaccgaagggttaggtcttcctcctttctgaccgctgcgcgcaattgcagtctgcccgtttattaattgtaaactgccatttattatgtaaactgccattaccatttgtcagctgccaatgtcaacaaaaaaagaagaaaatgtcattgtcagctgtcaatgtcaacaaaaaaagaagaactgtca

SEQ ID NO: 8465 - DNA, 1060 bp, Diabrotica virgifera
  SmartBlast Evalue=2E-80; Info=MYG1 n=1 Tax=Culex quinquefasciatus RepID=B0XKE1_CULQU
aaaaagaaagttcatggctcttagcgccaaatttgatagagttttacgaatatcttcaagtattgcgtcccatgtgtggaacgggtaacctctggtgttagtttttaatacatatttattaaataacattttatagattttcgaccatggccacagacgctaaaactcctcgtattcttaaaagaataggtacccatagtggcgtttttcattgtgatgaagccttagcatgttatatgttaagacagttacctgaatatgcggatgcagagattataagaaccagggatccgaagattttagatgaatgtgacattgtagtagatgtaggtggagaatataatcccaaaaaacatagatacgatcatcatcaaagaggttttgaagaaacgataagtactgtacgtccagatcttataaaaaacaaatctataaagttaagttctgctggtttagtttatgctcattttggttttgaagtattagacgcaattttaaaaaaggaaaaaatacctacaaatactgaatgcttaagatctatttttgtttttatttatgagggatttgtggaagaattagatgctatagacaatggagttccaatgtttactgaaggtaaaccaaaatatagaataaacacccatttaagtgcaagaatacacagattaaatccagaatggaattctccaaatccagttcctagcaatgaaactttctttaaagctatggagttagtagggacagaatttaatgaaagagttatagatagcgcaactgtttggtggccagctagagaaattgtaaaaaaatctatagaaagcagaaatcaagtacatgaaaacggacagatagttttactaaacgaaagatgtccatggaaagatcatcttctggctttagaagaagatttggggatttccggacaaattaaatttgttatttttcatgatgctggcgattcatggagagtacaagctatacctatccaacctgatagttttatatgccgtagtttttctacataaagattggcgaggcgttcgtgatgaccaactcagca

SEQ ID NO: 8466 - DNA, 1061 bp, Diabrotica virgifera
gacgcacaggcggtcaaggtcaattaataagaataagcaatatggatccatggatgtgttgtcaaacagacatttcaatttcggaaaataacattacaaaatttgaatttgaagataattttacgccctcattaagtaacaaattgcccgattctgaggaatatcttgcattattagaagaaaaactaagaaaaataaaaaacgaccccaacattttaactcaattggcagcaaagagagaggcgtgtatggagcaactgcttaacggtgttaatggtaacggtattgatcattttgatgaagatattctggatttagatgaacctacagctaataatcaagtacttagagccatagctcctcaaagacaggctttaaaccgaggagagattgtagaattcataaagtacgaccagctagagaatgaagacagtgattcacctataaacaggagttcagactctattaacaactaataggaaaacatgaaacctttgctgtttcttttgaaactagcttgggactgtaggtatcgtcttccacttctcataacagtaggttttatggtattagatgtcagaatgcaattagatatcaatgttcaaacaagaaggattcctagacgccctcctcctagagtgaacccagttcaagaaaatgatttaggcgacaatgataattcatcaaatgaatcttggagtaccgttgaagttgaagatttcgacgtctcagatgttgatctatattcataatgtaagactgctgttaaaagaagtgattattttatattatttatctatatatacatgcaggtataataattgcagcttatacaaaagtatagcaaatattattttactagattattgatcctaccctatgcacttattttactaaaaataattacaactatatttttttttcataatatatttaagtctattgttactcagaaattaaatattgtaagtttttgtgaaatttaatattgtgatttcagtgatggttcatgattggattttgtgttagtaatgacatgtattagtccatgtggtgagacc

SEQ ID NO: 8467 - DNA, 1059 bp, Diabrotica virgifera
gcaagaaataacgcagattctactttagaagaagaaactgttgatgaagaggaagatagttcaggtgatatccttgaagaagttaactccaagaaaacatcttcaaagaaaacatcatccaaagctgctactaaaaggaaaggccaaggtgtttctgctgttagtccgaaaagaagatatgcaaggaatggtgatggagattctactctagatgaagaggaaaatgtggatgaagaagaagatagttcaggtgatatcattgaagacagcttcattgaagactccaagaagacaacttcaaagaaattaccatccaagtcacctacaaaaaggaatgacaggggtgttacctcgagaaaaagatatgatgcagattcaacgctagaagcagactatcatgttgatgaagaggaagatagtcaagatgattgggccgaagaactggattcatccgttaataaagtgtcgtcaaagaaaagtccttcaaagaaatatcctaagaaaaccgtccccaagtcgcccacaaacaaaaagactaacggaatttctgaggtcttaccgagaaaaaggtctacaagaagcgaaggcctagattcaactctagaagagaaagaaaactgggatgaagacgaaagtagtacagaggacgatgtagaagaatttatctcaccaagtaaacctagaagaaaaatcacatcaccagttagtagaaaaacaaagccaattagaaagaagcccacgacatcttcatccaataagaaaacaataagcaatggcatacctggagaaacgaacgccatgagagaataagacagcggatattggaaagggaaaactcaaaaaagaaaacgaaggcacgacagccaacaacaaacggagataccggcgtatataacgatgccatgaaagaagtcgcgctaatgacaggtggtcgcagaaaagtcataaactgagactgaagttgcatatttactaactgtggcttttagtatagtagatcaagttattatatacacctgctaacattggatttttttttgcaaaagggtttttatttgg

SEQ ID NO: 8468 - DNA, 1064 bp, Diabrotica virgifera
  SmartBlast Evalue=1E-106; Info=Acetyl-coenzyme A transporter 1 n=2 Tax=Formicidae RepID=E2B0W4_9HYME
cataagacccaatcgttcttttggaatgccagcttcaactaattttaatcccataacactatcagtggaagaaaatccaatcttacaagttaacaaaatcacaaccaaagtttgtacagctggcaaacccattatactctttaaagatttatatgctgatttcaaatcacgttcatgatctacattcgatgcatccgtttctcttttaagaaacgctactattgtggtagtaataacaaatactattccccagaaatacaaaaatccagatagagtcacaataccttccgtctcaggtatcgtccttaaatactgattacaaaatgtggcggattccaaagccataaaaagaacgtaactcaggaaaaaaccagttgtctgtcctacgctgttacaagttgaagcatgtccaacattttcttttctaagcatcgtcaaagcccatccgtcaacggcaatatcttgcgtagctgctaaaaagtttaacgaaaaaaacataaaagtcaaaacttctatgttcggcgcagatccgtcttctccgagccacttgttgacgtgactagaaagaagtaacataaagccaccgattaaatactgcgaaggaatcatccacgtttttcttctacctattcgtgacgaaaatatactgtccactatgggggcccataacagcttcaaactgaagggccaggttacgaaactgaattctgcttgttgtttataactaactcccctattttgtaatatcatagggatagcggatgacaatccaaggggaataccttgcagagtatacaggaagaacagaagtaatatgtttctttcatcgcctctgatgttactacacgttgacgaactgggcaaatctccgttttccatttgagaaggaatactagacttgtttttgttttttcttcgttccattacattcattttatttaaaaatttgctagcactactcacactctttcgatacaatattgtagaaataactaataaattattaatattatgtgctttacatatttaaacatttgcaacttctgaaaatgttagcaattaac

SEQ ID NO: 8469 - DNA, 1043 bp, Diabrotica virgifera
gggctcctcttctctctaattcagttaacgttaaattttgtttatcggacctacaaaaatctctaatacaattcaacaaaggattgcgaaaacttcggatgggattcttctggcaggacttcgttttctataagaattttcatgatattttgaaggtgttttatccattttcaccataatttttacaatttaaatatttagaagtgacttttgaaaatataatatataaacgtatataattaatacacacaacaataagacaaacaacactataaaatataacaaagaaataaacacaactatttagtgacgacctaaatgttcaaattgttgcccatcaccctcgatgcaagcatttaatctttcaagagtagattgaacaacagtctcaatttctgctttcgcaatgctttgaatggcgtttcgtattctctagattctagatcatgatttctcgagtagtgggcctagcggcaaaaacaaggtctttaatccgtccccataaataaaagtctaaaacagttaaatctgttgctattcaacctactctttaaagagtaaatgcttgcatcgaaaatgatgggcaaaaatttgaacatttaggcagtcactaaggctaagtaagtagttgcttttatttccccgttatattttatagtgttgttttaattaactatatacgtttacatctgaaaactgtttatttgtttttccacggcacaccacccctccttaaccccgtcaccggtgacagtaacagttatgtttaaaattcacacatttccccagatatctcgagataaaacaaaggtatcgacatgcggctttcggcattatgttgctaatttggtccaattttgcaatacaggatcaaaaatgcatacttgtatttaacattttccaaagaaaaccagatttctgaaaataattaaatatagcaatcctagcttgcatattacttattaggcaatttccaaataagacacacattgacgaaaaagagctgtcctcaacaagaccaagtatgcaaaactcgatttagc

SEQ ID NO: 8470 - DNA, 1060 bp, Diabrotica virgifera
gtgaatacttctgttgtaattggtataaatatttaatcaaaaatgcaaatggattacaatacttgattattattcagaacgaatgttttcggactttcaggccatcttcagtgaactttaaattacttgcactaataaccacaaaatcagacagtggctgggtttaaatagacgactacatacttaaaagtattaaattaaacgacataaagtcgatgaaaatgaatataactattcgagaccagtatgtgtccctacaattacatcagtcttggtctgcaatagtctgcgaagcttattactaaaaaaagtaaagtagtttgattataaaggttttttatgccaagtggtgaatctttaattttaaattggtacttttagaaatattgtactatcagtacaatatgtaaattagaaatgtagtctgtcaacacatacatgcacagaacacatgaaacctgatgtttataatgtatactttaaagaaatgtatgtgtttatattatatacatagggtgtcatgtgttctgtgttgacaaactacacctgaaacctgatgtttatattataaacatcaggtttcatgtgttatgtgcatgtgtgtgttgacaaactacgtttctttaaagtgaatatactatagtaatactctaatattaaacacgttattaacggttgttaaacagatcatattattatacaaagttgaatatgacacaattttcaaaatttaagtaagactgaagccgcgttgggaaccaaatttatacttacaagttgttgttgctttgtgcttcaaatttaaaattatagcagattgtggaaacagagtggattttgatggcaaaaaaagttttgaatactccataatttgaaattaattagaagatactattattttaaattccatgtaatatcgaagtgtcaaataagaaaaacatgatataactaaaatgaacacatcctaatagtcagtcccggcgctagggtaaaaggtgcctgcctgcaaaactagcataggcgctcttatgttttttaaattagcattttgtatatcagc

SEQ ID NO: 8471 - DNA, 1062 bp, Diabrotica virgifera
  SmartBlast Evalue=2E-28; Info="Splicing factor, arginine/serine- rich 7 n=1 Tax=Lepeophtheirus salmonis RepID=C1BVE4_9MAXI"
tattgtatatgagcagtggatgaagtaacgaaatagtaggaaaatacaaggtatatcaaaaacgttctaaatattaaaatcaaataaactccacatagttcactatgtgtactcatgtaacataaaacaccattttacaaagaattaataacataatttcatacaccttatattcctaacaatcttagaaactttatccacaaaacacaaaattctaaatataattattgtaacaaaactcaaatactacctggatatttcaaacaaattgaacataaaaactaacttatcttctgtatctactaccaccacctccgctgcgtcttgatctgtcatcgtatctgctgcttctgctggatcttctaccgtctctgtcataatcacgttctctataacctctagagcggccgtaacggtctcttttatctcctcctccattagcttctgggcaatcacggtagaaatgaccagagtaaccacattgataacagcgcatattactgttatataatcttctgccagaaccacgagtccttggtctggcatatgttacacgaatgcggctgccggctacttcaattccatcacaagcttttaaagcggctgcagctgcttttttctccttaaaaacggcaaatccaaaacatggggtactgttagtcatccagacttctctaagagggccatacacagaaaaaactttttccaaatcagaccttctgatctcgtcaccaatatcgccaatgtgtaatctaaatccatcgatttcactactacggcttcttgaacgagaccttgagccactagaagcacttctgcttcgactttttctactggcactactattagtgcttctgctcctgcttctttttgttgcagaatctggcgaatccctcatgttaaattatttactttcgaaacggtttagttgtcttgatattttagataagaacagaaaactgattttcggtgtggactcccaaataataaattactttttcaaagaataaaatataaaaattgtaaaatggaagcgcccactctactcttgttcacgtcgca

SEQ ID NO: 8472 - DNA, 1060 bp, Diabrotica virgifera
cggcttctgcaatttctgaaacatattgaatttcatataccaaacattgatagtgccacgttattgcgcattctgagggattcccgtttcgactataatttataaattatatagtattagttttaatccattgatttaaaatctatgactttacattaaatatatctccgtgtctttcaccagtcttaaatcttatctacctaattcgatatatgcttaaaattattcttaatttatgttcaacatcacccaatcaggcatcagtctatttcgaattgtacatattgctgttaaaagttacaaaaatactgaaaatatgatttcctaaaaacgactatcaaaaattccacaacaatatcataaactatataaatatatctaacatattaaggcacgtatccactatgatggtgctccgtgctccctgcaactgctccaatcgatagggcatgcgctagtctacatataaaccgccaccgattggagaaccgaggcgaagcgcgcactgtcgcaccgaaggggagcgccaacgtatccattatgaggagcaattgcaagagcaccaacatagtggatacgtgcctttaggtgtcttaagaagatgttatttatatacaaaccacatttaaaacaagcaagctaaaacttgatctatacgaatgtcatggtgcattgtaaaattatcatgggcacatgagttaaaaaggcacatggtatagttctcttggtgcttctatagtatgcggtctaccgcagcgtttctgctatactttgcggtctaccgaacaacacagtaatcgtttctcaaaggatttgcatgcaataatgaaaggcagcaaaatgttttttgctaagtagtaattaacattttcaggaatctacaaaaaaagttatttctttactattatataaataacaccataattttgttggttagggtgcctgtatggctttttaatctagaaccattgactgcctttctctcttaaattgaatcgcatgaattttttctttaataataattaggctgtatcgttttgtaaataattaggatatacat

SEQ ID NO: 8473 - DNA, 1059 bp, Diabrotica virgifera
gctaggccactttttgtaagtcatgatcaagatggctggcagctgattacgcagagaagccgagtaccaactaaacattgtagagtcagcactgggcaactaggcctttaaccaaaactactatagcaaatacagcccacgtgtcaaacttaggaattccttaaaccttctaaataacgttcaaacgaatagataaaaataacagagggtttacttataacatataattaggtaccgatattgagattgattaataagagttgtgcatttttatgtacagttaagaaattactatttacaatttttagttaatttgtgtttaacgttactaaatattatgcaatgttacaggtcctttagtacttatttaacctatacaaaaactactgtggaagatatcgagaatttagcggaaagctgtttaaaactttttagacaagccccacgttgggcgccattaatgtgtagcacacaagtgcgtaacacaaaaagaacgaggccgctgtatacaggatcgcataaaagttttttggagcgttaaaatataaggggaatgaaatatttcatagaccctacacaaatacctcaaatacgataaattaagtaaatgacgtaaatcctacaaaatgaagctgaatttaagtaaacaatatcatgttgagaaagctcatttgagctcaatcggggagattcttttgcgcaatagatatatctttagaatgtgtagtagaagtatttaagatagtatacaaagggcaacgacagtggataatggagatcacaataattggtaagtaataattaagaaactagaagcgcagaacagaaatagttggatttgttacataatcgaggcagagtaataaaggcatgaaaattcggcgaacattcattaaggtacaatattgaggactggaacagaataacttctacagcctatgaaattattaactcaaaacgaaaattgcacataactgataagccaacctttcagtaaacctattaaatagaatttaataataaacacaatttaaaaatataatgtaataaaataatcgg

SEQ ID NO: 8474 - DNA, 1059 bp, Diabrotica virgifera
  SmartBlast Evalue=4E-16; Info=Sugar transporter 4 n=1 Tax= Nilaparvata lugens RepID=D4AHW9_NILLU
cgtttttacagttcctacaataatggcgattgtgtttccagaaaggtttgaccctgattcgttaaaaatgggtgctaacaaagacatgacaatcggtacacctgaaaaaaattgagcaagtatacataacatagccaacgttactccaactcttccttctttttctccaagaagtttccataaactaaattgttagttttttttaaactttccaaactaacaataatttcgttgtagtcaatttctaattctttatctgatttattactgcgtaatttccttagccatttcttacattctccttttttacccttggataaacagtaaacaagactttctgggataaagacggatgatactaaaaagaaaattaagggcgttactattaatattgtaaacatcttaaaatgaaacgccgggccaatcaaaaaacataaaagctgacccattggtgaagcagctgtcattaggcaaccgtaggtagctctattccgatcttcacatatttcagttatgtacatgggaagaatagacgtcccagccgctgccatactagaagaaatgcaaatgcagaaaaccatccagttaacggactgacaaaaagctagtcctattgtgcttaaaaatattcctaagcctaatatttgtagactcttctttcttccaattacgtctgccagcttgggtaacaacgctgcacttagaagagaaactactgaaggtattcctagtaaagcagaaatttccgctgtagttatcggtcttcccagtgggtttacactactatcgtttgactgtagctttattattgctggagatgtccaaactgataacgctgatccttctaacatcacaattactcctgtaagtactgtaaatcgcaaataaaatgtatcttctgttcttcccatatttgtatccctttctccttgcagatcatttactgttactaatgaatatttattatttagtagggcaagccattttcagactttttcttagtatttagctccatcttgttacttatttctattgatgagattgttcttaatgtgcaag

SEQ ID NO: 8475 - DNA, 1055 bp, Diabrotica virgifera
  SmartBlast Evalue=6E-24; Info=Zinc finger CCCH domain- containing protein 10 n=1 Tax=Camponotus floridanus RepID= E2A3Q6_9HYME
ctcttttcaaaggatacttcgcggggaatcccccaccacctatgttgaccagagctgacgcgaggactctaatgctagaagaagaaaacaatatattgtacaaagaaatagcacagctgaagaaacaggtgtcggatctaacggcaactaacgaattccttttagaccaaaacgctcaattgcgtgtcagcggcaagcgtaacggtaccgtcaacgtaccagctgtcagtttaaccaacacccctacaccccaagtgaatagaactgttatcgctagcgtggcaacagttccagtgtctttggctactgtttcgacttgtaatcctgtctcggggaaccattcggtgtccatagctggttgcccagctgtcagtatggcaccagcccaaattttagcaaacagtcaacaaatattggtgactacaaatcccaccacccaactagccatcgcgaacagctcccaagcacaactggccatagctcaacagaatctcgctacgaacctagccgctgcgcagcaagcggcgcaaccacagctgacttcacaagcgcagcagctcgcgttggccaccactacgcagcagttgacgtcgcaggcgcagcacatggccaatcagcagctcgctttagccagcgctgctggatcacaattgacgactcaaacgcagcaaatagcgttggctaataacgcgcaagcgcagcagctggctttggcagcagggacgaatcagcagttgacgtctcaggctcaacaattggcattagccagtaccaaccaacaactaacctcccaagctcaacagctggcactggccagcaccaatcagcaactcaactcgcaggcgcagcagctcaccgtgaccaacgtccctccccaactcgcgctggccagcaccaatcaacagctgttggcgcaacaaaacctggcttccgaaatccacaggaacacccagatcaacgcgatcagcacatcgcaagcgatcgcgatgtcgaacgctgcctcccagccaatggtctcatatccgataatgactcaaagtattaaccacgctctg

SEQ ID NO: 8476 - DNA, 1060 bp, Diabrotica virgifera
atattatttgcttgcttaagccaaaaaccgtagtgtgctttattaatagtacttgcatggttttatagaagtgttcatccagatattggtcaatttccagagacgaaacaattccttcaggagttatgtaatgagtacatttacatcgctcatggtttagactgattttatgtatatttctttttaaaacgcggcatgttctatactcacgatatgacgatcttcttcttcaattgccctgtccgttgcgaacgttggctattaacatggcaattctgatcttgcttacggcagttctggatagttcaaccgatgtgagcccgaaccatatccgcagattttggagtcatgagaaacttttcctggccctcgcttacgtggtgtcgtatataggtgtcgtaatattgaataggtgtggggaaaagatacacccctgtcggacacctcttttgatctccacattttcagtaagttcgttgccaatgtttgctcccagtataggtttgccacaatccaaatattcttgttatcaatacctgtcttttgcagaatatctattaatttttcatgattgacattgtcaaatttatgatgatattcgtcataaatatgaatgatactctattttattctgtcgttgttcaaattattcactatttttattgggaatgaaccacaatttcactttaaaaaacttttattttgacgttttataaaataaacattacaaagcgtattttaaactgatattgtgatcaatttttcataaaaatagtaaatagtattaaagtttcacaagaaaatacctttagaaaaatgtctttcgaattgagttctatacaatgccccaaacattaattactatatggccatttatagtttggtacttgcaactcgaaatagatctatggtgttgatgttaaaccaaattttatagcataactaaaatattatttaaatccttccgaattctttacttagaaaaactatttgtaatttacttctacatctactttttcctagataaatcgtcaacatcatccttccatctttttctggg

SEQ ID NO: 8477 - DNA, 1058 bp, Diabrotica virgifera
tttattgtctagagtctagagactggccggtctattgaacctgaggaagaggaaaatactcttattccgagtaagaggcggttcatcctgcactgtttcaaggaagattttcctggattttagtcgctttcgtggtgtttgaactttgtatagggcatacagctcgtcctcaacctgattcattttctctatgtgctctgcaacgcctctgcgcgttgagggctctgcaaaacccgctgctttatatagacttgagagtggcgttggtttcatgcaccccgttactatcctgcatgtctcatttagcgcagtatcaactttcgatgacgtcagtggtattattccttcgttaaactattatatagaaaagttggtgaaagaaatgaattacacggcaaaaagaagattttgtgaaaagaaattcataaagaaggcaaattttgttgatgaattttgttgaataataatgttatttgatgttacgtctgcataagatttgcggggaatttgtttgttggcatcatggtaattaatattactattagtcatgcattctttaattaatttctgtcttttgaattctggacatgacttaagatttgttgtgaagtggtctcccatacaactaaaacattttggggttaatgttgtttcctgacactcttttgtattatggtctttctggcaattgttacaacgggggttactcctacaatgcttccctggtggccaaatcgcaaacagttgaaacaaagtagtaccttttgttgatatggttcaatttatttcaacaccttatttatagtaacgtattttggaagtacttgtattttaaaactaactacacacgatctagtaggaacataatttattttatcataggtaaccgtttttctatttattctagaaacgtattcacgagttcactcgacatagcttgtattcgacatatcttgattttctgctcttgccatcgagattgctattctcgaaactccttgttcgacatatatcgaatgataagcgtcgagtgggttaccaccgctcgatgcttatca

SEQ ID NO: 8478 - DNA, 1058 bp, Diabrotica virgifera
  SmartBlast Evalue=3E-10; Info=Putative uncharacterized transposon-derived protein F52C9.6 (Fragment) n=2 Tax= Camponotus floridanus RepID=E2ALS0_9HYME
tgtcgctatacacaatacctacctactgagaaatacgattttcgataatatcatgattacctcatattatgattaccggtactcaaatacaaaagtaattatagtaatcaaagtaacgaatactgtaaattattactttatcgaaagtaacgattggaaacgaatactcgaaagtaattaaaatcaacatcactacaagtcaggcggtttggaagtctatgttgggcaatcagtgagtacacgttgaccgcacgatcgatttcaacgtagatacacagttgtttatttctggcgtgtattgaccccgagaaaccactcaaatgtgtgttgacgggaaacttggcttgaaaacgagcagcgtgcacgcaacttgaaaatacgcaaatgtgcatcgagcctaaggtcttttaactcaatacatttatatacaggttaagtcagaatgtactaggatccaaattaattacggaatagatttctataaaattaacatgaagtaaaactactgtagttggtatattcaataaaaattaatttttttttaaatccaaaaggatcacgttcacaacgttctcggacttatcagtccatcatcagtgaacctaaaagtaatctcttcttcttctttttatatagacattaccctgtctgtttttcaatgtgcctccagtaagttgtcattccatctttttcgtggtcttcccactgatcgtcttcctattggggagccgtctctcgccgtccttactactctatttgctgtcattcggcttatgtggtcgttccattctactcttctgcttttcacccagatattaatgttgtccaccttgcaaagtctgcacttctagctctatcccacagcgtcttaccatcgatttttcacaatgttttcatctctgctgcttctagcattctttttgtcctttctgtatcaggtcatgtttctgccgcgtatgtcataattggtctgatgactgttttgtaaattctgcctttcacttcttttccgatgtttttatttctccatattgtttcattcaggcaacctgcggctc

SEQ ID NO: 8479 - DNA, 1062 bp, Diabrotica virgifera
  SmartBlast Evalue=1E-101; Info=40S ribosomal protein SA n=1 Tax= Bombyx mori RepID=RSSA_BOMMO
gtgacgtaaaaacaacaaacacgctctttctcgtgcaaataacccaagtggcatcttgtctcgtttatcgtaactcaaattaaacgtaaagatgtcgggaggaatcgaggctttaagccttaaagaggacgatgttaccaagatgttggcggcttccacccatcttggaacagcaaatgttgattttcaaatggaacagtatgtatacaaacgtcgtcatgacggtactcacatcatcaacttaaggaaaacgtgggaaaagattctcttggcagcccgtgccattgttgctattgaacaccctggtgaagttttcgtaatttcatctcgtccctatggccagcgtgctgttcttaagtttgctgctcacactggagctacccctattgctggaagatttactcctggtgcttttaccaatcagatccaagctgcattcagggaacctcgtctgttgatcgtcactgaccctgcttttgatcaccaacctatcactgaagcctcttacgtaaacattccagttattgctttgtgcaatactgattctccattacgttttgttgatattgccattcccggaaacaacaaagcctcacacagtattggtttactgtggtggcttttggctagagaggttctccgtcttagaggaatcattccacgggataccaaatgggatgttgtagtagatcttttcttctaccgtgaaccagaagaggctgaaaaggaagaacaagctgccaaagaagctgtggctgctgttgtcaaacctgtagatatcccagctcctcttgaaggccaagacttggactggaatactactgaaactactgattggaatgctgaagttgcaccagttgctcctgttgctgcacctgcatacaatgttagtgctactcaagattgggcttctgaagttgctcaagaggaatggtctacaagtcaaccagctgctcctgctgctccagctgctgctgctccaaattggggaggtgccagtgaatggcgttaaaaatactgttttggaccaataaataaaaccctttattacccgtaaaaaaa

SEQ ID NO: 8480 - DNA, 1059 bp, Diabrotica virgifera
atgtgtattaatatgttgctgtttattttggtggttatatatttatattgttattaccaattgtttttaaaatatatttgaataaattttgaatattcgtttatttgcatttatacgtttcacagtgagtctgttccactaaaaccagtgtgccaaaattttatttggctttgcatttcagtcacttggttaaaaatattaaagaaatctttttttataaatgtactattgttaaaaataaacaatttcttttctcccatttatcatttcatttagatatcctaaaaccgtcgattgatacattgtatcagtataccagtaccttgtatatgtatcaatcaacgctaaaacgttatgagcaaaatgcattaagacatttgatgtgaactggacattagacatatccagtattgtagagattttacataaacgatgagaataagaaaaatcataaaaagaaaatgtgaaagttgaaactttaaataaaaatattttactaattgtggtatattcccaataagatattaaaaaactaagtttactcaaagaaaccttcagcacactagaagactgtcgtagaactcttctggaaattagatttacgcgttaattatgagagaaatcgtaattgcgtataaactgatcaaccgaaaaaatatcagaagatatacattacattctatgatgaatattcgacataaattcatagtttttggatggaataaaactagtttattgtaatggcaattctccttctccaagtgcgatctacgcgacggaggtcagcaatcatcgtagatattcggacttcagagacggctgcgctgagaagttctttgatgtacatccgcaacattttctcaggttgcgcagccatgatatgctttttctcatgaggatctttcagtgcgtcacagtttttcgattcctttctaacgcattaaattgtatgtgacagaaataaacacacgtcattgattacatttcgtcggtgacatttataacatttattctagttgtcaatagatggcgctataatcgaaaataaaataatttgcg

SEQ ID NO: 8481 - DNA, 1057 bp, Diabrotica virgifera
  SmartBlast Evalue=2E-45; Info=Endonuclease-reverse transcriptase n=1 Tax=Bombyx mori RepID=D5LB38_BOMMO
tgtggtagaaatgtaactgaacaaaaatatttattagcactttttgtgtagaatgaaccgttttctcagaaacaacggttgaagcgattggccattttgaatgacatttcctcgcgttaaatcaattttttttataaaatttgtattaagtcgacgataaaaattcgatttcttttgatcagtcgcctatcgacaaaaatcaaaatgcgttttataggtgaaaagtacagctttcatatgcaatttttgaatttggtcgcaattgaagtttctatacagttgttaaataaataaatgttgcgcgatttttgtcattttttatggtatccataagatcaacgattgttaaatagaattaacgattattgcattcgatgtggactaaaaataaacaagaaaaaaaactaaatttatgatcatctcaaaaacacaacatggaaatgaaaggttaatgatagagcaaacccaaatagaaaaagtaagacatacaaatatctgggaacctgggttgatgacaaaaatgaccaaagcaaagaaattaaagtccgaattgaaactgcaaggcaagcatttataaaaatgaagacactgcttacaaacaaagaccttcagttgcctctcagattgagggctctaagatgctacatattttctatattgctatacggaatggaagcttggacattgaagagacaacacataagaagaatagaagcgttcgaaatgtggtgttacagaagaatattgaaaattcagtgggttcaaaggattaccaatgttgaagtgctacgacgtttaaataaggagttagaaattatgaaaagtataaaaactagaaaactggaatatttgggtcacattaccagaggagaaaaatatgagttgctgagaattattatgcaaggaaggatccaaggaagaagaagcataggaagaagacgcatctcctggctgaggaaccttagagaatggtttaactgtagttcattacaactgttcagagcagcagccaacaaagtgaccatagccattatgatatccaacctccgataggaga

SEQ ID NO: 8482 - DNA, 1050 bp, Diabrotica virgifera
gtttccaatatggttttaagttgcgcagacacactgtataaagttagtttctttgtaccatatcaaaaaaaattattttatagattgccagtcctaagccttggatatagtgtaaagggaagtttattttcacgagttctttactttttcattgatattgactgattattgcagtcaaaacattgtaaggaaatgtctcgattccctaacaatttatttcctcagcatctcgcatatttcgtcttgtccgcaagtgcccccaaatttgattggtccggaaatgctccgttcgcaagtccgccgacaccaaaaataagaacggtacaacatcactaactggtccttaaaggcaaaatagagggccgtagaggtgtcgaaagaaaacaagtttcttggttaaaaaacattcgtgaatggactcagatatcaaatgcaggacaatcattccatatcgtaaggtcgagaagccttcgcagtggtgatagccaacgtcggataattctgatatggcacgtgaagaataagaactaatgtttaaacacctcaatggtttacttttccttctcttctgctttaaaggttttcttatttaacctcagatttcagagtaacacatacacagactacttataatggtgcacgacaattagaccgaaatcattagaccgaactcactggacctaaaagcactttaccgaaacctcactagaccgaacagcattagaccgaaatggtacataaatttaaaaagtttgcaataaattatgctaagattttgtatatctgtcgttttgtttattgtatttttttgtattattttatatatagactgtgtaaattgttactccgtacattctgatatgaaataattttcatccgttaaacaaaagcactgcagagagaacagagtttgaacgaactaagaacagaacaatatttagctggcgaacaaccacccacaagccagaaaaaatacagagattctgctgacagattaaaacacctcgtctgtaactttgatgttcatggtaacatacttaattacttaag

SEQ ID NO: 8483 - DNA, 1058 bp, Diabrotica virgifera
ttaacaaataccgtatccacgccatacgagtcctattaaatatcatatttaatataatgaatgaataataaatatatagcatgatattactgaaagagacaacgctaagtttaatatattttagctaaatatacccttagaaaacctaacagtggcgtaaccaagggggttttggcgattataacccacccccccattgggatgtactttgagctctatacgcttaacaccataccccccagagactccattagtgtaacgcccctgcttaggatcatcctagttacgccgttgaaaactaaagaacttataaaaactaatagcaggggagacaaatgtgctaaatttgcagttactcgagcgctatggggacctattgggtgatgaagattagaaaaaaaaagttgagttaagtttttcattttagtgaggactttccattttttaatttaatttccatttccaatcgttttttccgattatagcgccaactatccataattcgaaaaactgtctcaaattaaagttacttatttttacgtaagaaatccaaatctgcaataaaaaatgggggctcctatttaagattttaaagtaacccccacccccacctccgtgggggtcgcgtttggtaccattcgatagatttttaaaaaatattaaacacgtatttttcagttcttcgctctgacgttaatttcgcaaaatattcgctttttttgtgaaactttgtgactcgcccatctccttatgccactctcaaatcgtcagattttttaaatatacactgttccgcatgtacctaacttaccttatcctgacgatttcgaatttttctaaggatatattttttttctcggaccccccttaacgaactcctctgtgttaggagccactatatggtaggggtacatttgcaggatacaagatttctccccatgtgattttttgacgcgctcgaataactgcaaaaatccccgcttgggctccctaccataagtatttataatgatatagcaaataacagtagaccaaatactttcaaaatgttctgtatt

SEQ ID NO: 8484 - DNA, 1059 bp, Diabrotica virgifera
caagatgaactaggaatgtatcctgattcatatccatacatttctgggtcagcagcacagtttagttagatgctacatatccctagtgtttttatgaatcatagacacttgcagatacagctgcgtacagcgtgtattggagaccgtcgattaaatcaatgaaatactgaaaggcgcagtatgtagaaattgtttcttcagaaaactctaacaaacatgaagccttgagaatatatctgagaaagctcttcaatataaacactatttacatacacattttactgatgttgtccattaagaaaaaatgttcaacagaatgctcttgtcaatataatttgtagtagttattttgaataacttaattctttccatatgccggtgtcttgtgggagttaaggagacctatgtccagtagtgaacgtatacaggtttatgatgatgatgatgatggcgatgattttggatgacataggtctggatcgacgatgaattcagataatagccggtttgtactgctatcagctatctgacattaaaattaaaggacagaggtccaaagattaagaggagtaggctatctccggttttgttcaatttatttgagaaaagacgtttgaataagctctgcaatacagaacagaagatataattgccaaccgaggaatattcaacaacttaagatattctgaaggcacagttttgctatccatggatcaaaatgatttatagattgtagatacttctatcagtggcaccagacaatagtaaacgaaatataggtatttgaaagttaatacaaagaaaaccaaataaatgactatcagccaaaaatatagctaacaagccatatgatatcagactagatggaaaaacaaaaaatgaaaagtcggatttatctcaggaaattagaaaattaaaaacaggattgtaaaagccagggtgatggactatcgtgtctctgatttaacctggcattagaaaaaaataattcgagagtcccagattcctacgaatacgaatggtactttctttaacaaatcagtacaaactctcggatac

SEQ ID NO: 8485 - DNA, 1060 bp, Diabrotica virgifera
  SmartBlast Evalue=5E-64; Info=NSFL1 cofactor p47 n=1 Tax= Camponotus floridanus RepID=E2AKL7_9HYME
ttaggatgatgatgatagacgtttttctgtttttgatgtgaaactgaaaatttgtatttattaatattagtgatattagtaataaagatgtctgatcaagaagagaaaattactcaatttagttcaataacaggagccgacgaacctagggctcgcttctatttggattctgctgcttggcaactagaggttgctattgcaagatattatgaaaatgatggtgaagagtctgatactgtagaagaagttccatcaatggcagactctcccagatctccagcatcagtcaaaaaacctaaacccaagggcaaaccatccaattttgctactattaacactattaatagctctagtgaagatgaagaggaagagggccaagcctattatgccggaggctctgagactagtggccaacaagttttaggacctccaaaaaagaaggactttgttgcagacatgtttaagtcagtgcaagaacatggggttgaaatactggaaccaagtgcttctacgtctagttctagagcatttagagggacaggatataagttgggccaagatgacaatgactctgtagcagtcccgggtgttcctgaaccaatgacttcttctgaggtaacattaagactgtggcaaaatggttttactgtaaatgacagtgagttaaggccttacacagatccggccaataaagaatttctcgattctattcgtcaaggggaaataccccaagaactgcgaagaggtgcatcggaagttcatttagccatggaagatcatcgaatggatgcttttaaacaaagtaaacataaactaaaagctttccaaggacaagggtatactttaggaagcccagctcccgtagttgttggcacatgcaaagaagaagataaaccaaataatgaagcgaaagctaaagaacaactgaaattagatagttcccaaccaactactaatttgcagattcgacttgcagatggttcaagattagttgggcagttcaatcatgaacacacaattggagaaattaggaattttatacagaccgcacgacctcagt

SEQ ID NO: 8486 - DNA, 1056 bp, Diabrotica virgifera
  SmartBlast Evalue=4E-19; Info="Protein FAM107B, putative n=1 Tax=Pediculus humanus corporis RepID=E0VGX2_PEDHC"
attttaattaatgatcaaacttgtttagcgtagaagcgtagtagatatttctttggcatcctattaactaacaaaaaaatataaatttactcattagacaccttatcataccggttcaaattgggttaacaagtgttactattttacttgagcattaactctttctgcagataatagaaaaattggccgcccatccaaataccaacaattcaactttaatgtttacaccacattttcctacctacatatttattatttgaatggaaaaatatacgtattttctatatcctctccacgcaatttaatacacatattcatactgcctacattttacgtgaagttaattatttttaataaattcggtaaaggatacatacacaaatacataatagacattaaaatatgattatcttttattgtgagctacttgttagcgtcagttcgagtctttaggttcattcgcatttggagcaattctttgtttataactttgtcatcttcatttttatcttcgtgggagctctgcaggcgtttcactctgtccgcaatcaccttttcgagttctggcgtttgctccgctatatgttcgtctaatttctttcttgccagattgtccttttgtttctctagggctcgttgtagttcggatttttggtttaatacatttttacctattttttgattaaataatagctccctgtgaagattttgtcgttcaatgttttccttgacaggatttggaagttttttgggtataatcagtccaccttcgtttaatataggttcagaagttcgatctgaatcgggaatcattgtggatagcttttcgaattttcttagctttacaatatcatgactttccaatttggttctcagatggtcaatgctgtctgccgtgatgtcgagttcgtcttttgtcaaatcctaaatagataggttttcttacaattccttcctttatacccccagataatccacaaaaattacaaaactgttaaatatatcactttgacactcttaagataaattgtactgccgaattttacacatattcac

SEQ ID NO: 8487 - DNA, 1045 bp, Diabrotica virgifera
ggccaggactttgtcagatttatctaggagacagtgtttgggtaattgatttgaggttgtacggaaaaatttcatccattttaaacgaaccaagatcttatatagtaaaaaccaagtctggaaattacagacgaaaccgtcatgacctcattccaccatactactttgaacctgaatttactccagcactgcctctgcccacttctgattctaattttaatagtaaagaaggtaggtgggaagattgtgcgagtcggaaggattgtgcgggaaacagtgagttgtgtaatgataacaatattgtgctaacagttccaaatacagaaaataactgttctaatatggaacaggattcgtctcgtccgaaaaggatatctcgacggccagcttatctgaaagattatttaatttcatgaaaatttgtttttgtaaagagggagatgtactatcggcacaatctggcaaccctgtaagttgtgaagtaaggcactaatacgtcaacgcggatggccgatggcagatctcatctcttctactgactgtattgtagaatagaatagaatagaatactttattggtatagctttacagctgccatcataaagatggatatacacgtcagatatacaacacaatatagtcacagacacataatcaaatacctatacatacacttaaattttagatttaacataatgtacattgataaatatgaaaattattaatattagacagaactcataacagcaatctagttgctaagtattcttctacactgtagaatgcatgtttacatagtatacttttcacaactcttttgaatttcaccggatgcaaagatctaacttcatttggaagatgattatatagcctgacccccacataatctgtggacttctcaaatttggatagtttgtgaccaacagtaacaaactgattggcattcctagttgagtatgcatgtaaatcagaatttctcttgaatgaatgtaaattatgcttaatatacaatatggatttcaagatatatatggaaggcaacggt

SEQ ID NO: 8488 - DNA, 1051 bp, Diabrotica virgifera
  SmartBlast Evalue=2E-84; Info="Nicotinamide mononucleotide adenylyltransferase, putative n=1 Tax=Pediculus humanus corporis RepID=E0VUZ9_PEDHC"
aatctttgatcacttacgataataaaattcattattttcagtacttgtatgtgatgttattttttttatatctaaaaagcctaaaacataatttgtagcatatagagtctgaattatcaccttgtagtttacaagcataccacagatacttatatggaaagaaactaaagacatgcaggtcgtactaaagaggcagagttttttgtgatccatacaaaccatttttgtgaatataatctataactttgtcaggcaaaatgtacttgacggattcatttcttcttagtgctcttcttactttagttgaactaatttcattcgctatccattccgttacaattgtgatgtttgccatatattttgtcagtaaatctgaattgtaaatgaattctgcaggatttgaatttgatctagttataactaccagtccatgccttccaacaatttcttctaaatcttcatttgcccatagacctggtgtcccaaatgattctaaaaggtcagcaccacataataattttactttaacagggccagtatcaccattcctaatagtttctggaatccacctcaattcattttcattaacgtcataaaggttgttgatgctttcatttacggctgcatttatatggttctggtgatactgtaaaacttctctagttctagtccacgactcttggctacattcccaattagaataactaacccaatcatgattttgtaaggccaattttaccatttcaagcctgtggttggaatgtgcgagatcttctttaccataaccatcatgaacaggagatattactccccctagcactacatgttgtcccatacgatgaagataatctctggcaagttcaaacattctaaggtgcatattagtaggaggattataagatccacatgccaatagcactatatttgttgcggaaggtggacccattgttacaggtgataacagttcgctaaattttaataatcatcaatattatctgcagaaaatagatattcttttagtttgttttcttaaattgattaaatgacctca

SEQ ID NO: 8489 - DNA, 1058 bp, Diabrotica virgifera
  SmartBlast Evalue=1E-103; Info=Spermidine synthase n=1 Tax= Culex quinquefasciatus RepID=B0W658_CULQU
caacaatttatttattcagctaattctcttaattctctctttacaaaatttggtaaaacaaaagcagctgaatgcatttcatcattgtaaaatctcaagttgagattatcaagttgctcttgagtaaacttgaattttggagttcttaggtcattgctgccatctgtggatgccacgaggtaaccaatttgcccatcgggatagcttggaatggttgaaaacccatatcttactgttttaaaatgtttgcggcaattggtgagggttttcttgacgtgtggtagatcagaccagacagttccagcttggcaactgatgataccatttggtttaagtgcttctttggcaagtttataatacgattcagtaaagagattcacagcaggtccaattggatcggaagagtcagttataataacatcgaattcatttttgtgtttcttcatatattcgaatccatcacagatctttaacgttaatttggcggaatcgaaacctttggccatgaaaggaaggtgttttttgcttgcatttaccactttctcgtcgatctcaacctgaacaatttccttaacaagtggatgcttctgaacttccctagctactccaccatctccacctccaacaataagaactctttggggattatcatggcagcataaagctaggaatgttagcatttcttggtacgaaaattcatccttttgggtacattgtattattccatccagcaccaaagcagttccattgttagttgattcaaatattaagatatcctggtactcggatttctccttgtatagaacttcttttacctttaatgaaaaacactgaccgggccacagttcggaaatttcgctaaaccaaccattcttaacttgatccatctttaaccttaaaaccgctgtttctcagtcaacggtcgattttaaaagaaagacactatcaaataacagtaacaaataacattgataatattttctagctagtttgtgtgctcattatctaaatgataaagacctacacgacattaacgttaaccaagagggatcaccgcg

SEQ ID NO: 8490 - DNA, 1057 bp, Diabrotica virgifera
  SmartBlast Evalue=3E-91; Info=Endopolygalacturonase 1 n=1 Tax= Chrysomela tremulae RepID=C3UTC2_9CUCU
tcctccatatattgagataccggaccaattaaagtttgaacaagccttatttccgcatagaatatagacagccttacctgattttaaagatccagtgacactctgaagatgcaaaccattaatttgaatattgcttgttgcgtatcctgaagaaccacctccattgtaatcttgttgtacattgattccgtaatgagttattcccgaaagcttaatgtttttgtatgtgacccctctgatgtatccattggcaccatcggtgtgtgttttgatatgaataccgtttcgagaattacttactgaacagtctgagaaatttatatcctcggcatagtttttagaagggtcagtggtacttgttcctactgatagacttagtccatggcctcctacacatgtcagtttattgaagtgataatgtttaccagaattgacagcaacgcaatcgtcttgattatgaacaatagagttttggatggtgatctcttcattctcacataggtcaaaaccatctgtgttgtgtcctagactgtttatgtctccagcagcgacatctatattccaattgttaagtgtagttttcttagaattttgaatcgatacgcactggtgaggacaattaagaagatgaatactatcaaatgtagatcccgtggtctccctaattttaaagaatttaggttttttagcacctttgtctccttttccatcccaatatttagatccgagaccatctagaactgctccagatccagaaacgtggaggttgctaccagaaattgaaatcaatggaccctcccagttagtatgttggaaagtagtggtgccttgaaatttcaaagttgttccagggtgaaggtcaagcttcaaggttttgccgccaggtactgaaaggttatttataactatgtttttacaatttttcacaacgttatccacttctcctatctttgagattgtacaaccagcaccaacattagttgaatttaatgatatggcacttgtagcaacagccgcgcatagcactagaaataatgtaagtgtagccattgttgtc

SEQ ID NO: 8491 - DNA, 1052 bp, Diabrotica virgifera
aagtagcacaataaaaacatttgttttatttaaggtttataaaggttttattgtggtaaataagaagataatggttttaaagttaccttgtagatatactgccagaactttaaaactgttaagcatttgtcactagttttaaagtatctaataagagtatcaaataagactaattaatcttaatagataatttgtcttattgtagttttaaaatggtttattctcagttcactttaaaactaatcagttttatgaagaacttccggactgtttggttttattagattcttgtttgttaccttttagttttattgcagttttaaagattctcctaatataactaataaaacctattattaaaactacttgatctcaagactattatgtcagtaaaacatatgccttaaaactatttttttagttttctttaaagttgctttcataaaagcaattagtaggctatattaaaaccaaacgctcttaactgaatcaatttggttatcgtaaagactaaactatgcttcttgttagaaacaataaaactaaacttatcccctcttctttcatgtccaaaatggtcggcatttgttttagagcgaaacagtggtgtagtgtgttgtaaaaagtggaagtacagttagtatggaagaaataagtcgcaagtacttaaaatataaacgaactggtcattttaaaagaaaaatacaacacacacagcactacgacgcctcgattttaggttagattcacattaaaaccgagtggattattgacagcagcattaaaactaaacggttttaattccaaggcaaccttgcttttatgtaggatatatgctcttggaaaggtataaaataaaaccatttgatcttaacaattctctgtcgtagaccaaatagttttatttggatttcggccatattgctttctggagatgctgaaagccatgatagattacaatataaggcttacataaaaattataaataagcgacttaaagacataaattcgatttattttaacattaaaacattaaaattgtagataaaatt

SEQ ID NO: 8492 - DNA, 1049 bp, Diabrotica virgifera
tgaataacatttcgtgtgatacccaaaaatacaaatgttaacataagatttgataattttatgattgtcgtaatggtacattctacaaaattatctttgcagtttttgtgtgaagaaagactgccatatacatgttatacaattgttgaaaagcaaaaaaatgcgaagtacacattttgtagatttgtttagagggtagaaaaaagacaagatgttttattcttttcagattttttaatctgtcggtatacagaaattttaacacgtaagaaaatatttagaaacataacgttttatcaattttaagattatgatctgaaaatataccagaataaaagattttgtcttactgattacgtatgtgccaatagaaataatcttatactcttgcaaactttttattatcttttaactacgataatggtggaacttacgaacattttacaaagagttgacgcaacctacatcgcttaaaaaggttataaaaaatcataaattttccatgctattgagatttcttgttaaaagcacatttaacgcatggtgtaattattttaatagttttacccgattcaaaaatggtaactttataaacggtaattatattatggatatatggtatcaacttgctgttacttacagactacagttttcgtctcccagaacaagcgaaaaaaatcgtgttgctataatttttgatcctacgttatacaggagtgctttagtgattgacaaccatgatatcacagtctaggaatattattataagccgtgggatcagaaaattgggtagtcaaaatagtatcctacatatcgttggcatatctagcaagcccaacattacgcgccttatagcgataccaatgttttattatgccccactttatttatttgtaattgtgttacatattaatgatttaaaaaaaaaatgaatgtggtaatattagagaactttaaaaaaaatttaaataattgtttaataaaaaaatattaaataggcatacttcaaataagtatagtcggattaacttatattgtgcaacggcttg

SEQ ID NO: 8493 - DNA, 1055 bp, Diabrotica virgifera
ttgccgagttcagggccatgtccccattccgtatagtagtgtcgaaaaaatataacgccttgccaacctaactcttaaattcagcttcagattccttgtattttccattttctgcagcctttctcattttgttaaaatttgcacgtgcttttctatgtgcattctattttctttggagtaatcattcctgtgattaattatggtgccaagatatttttagttgcttaagagttttcccgttaactgttgagctttcatcataatgttacgacatccaaaccagccagttcaagacctatgactccaggcctatcattattaaaagtcaaagccaaatctatatctgtcatctaaaaaaagggcactcttaccttcaagatattgtcaaaggaggttccctcaacctccaagagcttcatttcaacaattcccgactcttaagttcaggaactcaggactcaggaaaagctcatacgctttttctacaaaatatttaacatcccatccacctatgatacccagaggaagcccttctaactggtcaatacccaagtgattctgaggagtatcatgataaacctaaaaaatggtcacaaatgataacttagcgttctttgagaccactcaaacggtcaatctcaaggaaatgaccgagcggcttcaggtcagaaccgggggcctacaatcactatcgagtctaagagcttacaagcccctagaaatcctaaaccaaccacatcgaaatcgtcaccattccagatagtagtgactgatcgtgatccagaaatcatcaacgaggaactcagctaaagcctactggtaagacgtttgtctcacaaaaatcataggataatatccaagaaataaaataaacccactaggctattctgtctgtacctcgactccagtaggcattttcctagacgtctagaagatcttaaatcagttctggcactcagctctgctatataatcatgcacatcatccaatccataaactggattcccacaaggttcaattttagctctaattttatgcacagtctacaacagtga

SEQ ID NO: 8494 - DNA, 1058 bp, Diabrotica virgifera
  SmartBlast Evalue=1E-58; Info=Aldo/keto reductase family protein n=1 Tax=Glossina morsitans morsitans RepID=D3TRK6_GLOMM
aatcaaaaatttatttaagcatatttattgatctgaatttttaaatcattttttacaatacaggtttcagactttttaaggtgggtttacaaatgttttgaacacatttttatccaaaccttctaaaattttgacatcctcatcgcttatgataaaatcgaacacattaaaattttgctctattcgttctggagtcacactttttggaattggtacaatgtttttctggatcagaaatcttaaggctatttgggaaggtaatttattgtactttttggcaatttgttttacagtctcgttgtcgataatatctaatcctactccatattcaccccctgggcctcctaagggagtataagctactactgtgatattgttctttttgcaatactctacaaattctttacgctgaccatacaaatgtacttgcacttgtaaattgacaggctttactctgccgttctgcaaaatatattctatttgttcgatagaaaagttggacagacctatatatttgacccttcctgcatcaacctgttcttctagtctcctccatatttttaggttcttttcattatcatcagatggattatgaattagatataagtcaacataatccagctgaagatcctctaaggtttttttaagtgtatcttctggatccaattcatctcttggttgaaacttgctggtaataaaaatatcttccctttttattttattgggaacccatttctttaaaactttccctataagagcttcgctttgataaacgtaggcagtatcgagatgacgaaagcctatttctagggcatgatctagggcattttcttgagcgtcagctgttccatatccaatagaagggattttgaacccgttaggcagagtttgaaatagcgccatgattgaagggattacactgaaataatttcaccaacaattgaattattatattatattttattatcgtcaaatcattgtttggttttatatctaaacattccaaataaaattgaccttgattcagaggatgaagtacctagcactgacgtagtaga

SEQ ID NO: 8495 - DNA, 1057 bp, Diabrotica virgifera
  SmartBlast Evalue=1E-103; Info=Deoxyribose-phosphate aldolase n= 1 Tax=Caligus clemensi RepID=C1C061_9MAXI
atgccgtctactcaagaacgaaacccaggctgtgaattggatttgggttgggtgaacagcataaatgtaaacctaagagcaacgaatgaattagctaagaacatagttgcatccagggaactaaagggtgaatacagagcagcctggattctgaaagcaataactttaatagatcttactaccttaggaggagatgacacaaagagcaacgtgactagactctgttttaaggcagcaagacctgtagctgaagatattctcaatgaattaggatttgagtacaatgaggattctcctattcatactgcagcagtttgcgtttatccttcaagagtcgcagatgctgttaaagcattgggtgatatgggaatgcttggaaagattaatgtcgctgcagttgccacgggatttccaagtggccaatatccaataaatacaagattggaggagattcaatacgcagtcaaaaatggtgccaaagaaatagatatcgtcatcgatcgaagtttggtgttgactggaaaatggcaagaactctaccaagaaattcaagttatgaaagaagcttgtggacccgatgcacatttgaaagctattctggcaacaggagagttaggaacacttgacaatatttataaggcttctttaatagcaatgatggctggatcggattttataaaaacatctactggaaaagaagctgttaatgctactttacctgttggtttgataatggcaagagctatcaaggattactttgataggatgggctataaggttggtttgaaacccgctggtggtgttcgaactgcctccgatgcaataaattggttagttctcataaaagaaaccttaggaaatgactggctgaacagcgaattattccgttttggcgcgtctggtttattgggagatttggaaagtagtttataccagtacgtcactggaaagactccggctggttacgagtttatgatggggtagtttaacttgtatataaaattatatttgtataaaatattttttctatataataatgctgtaaatagtttcattt

SEQ ID NO: 8496 - DNA, 1049 bp, Diabrotica virgifera
gggcaggacacatagctagaatgacagatgtgtgatgaacaaataggttattggaaaagagaccaagagaagcgtcggccgaccatttacacggtagactgacgatttaaaaaggctaaacaaaaactgaataagagcagcacatgatagacgaggttggaaacacgaggaagaggtatatgttcagcagtggacttttgaagctgaatgatgatgataataaacaatcagctacataagggcctctgtaaagtggttctgaatttcatctttcattacgtcaaaagtttcgagttactgtagtacttgagttgccgtgatcaacagccttccgtagctcctgaagaagcggctttccataatatcgaaacgttaagatggactcgcatacgaatcgtctaaaaaagatgcggtccaaaccagcgggacgagtagttaattgaccaaagattttgcaggaattaaagttaactccaataaatgagagagtcagaaaatgacttttatacgtaaactacgtatcataaaataattcttctagttccagattttccgtaacattgtcttagatttttcatttattcttgatcttttgattttattcttctaccaggacctcgtttactttggatctttcactaaatgatcagatacaaaagttcatatttttagggtcttttataatgtgacagcagtattccagcttgcgtctctttattacattgaccagttgtattgtctgcttcagccgattaaggacttctccatttctaactctgtcaacccagattcatattagtagtcgtctgtatacccacatttcaaaaaaaaataataattgaatcgaattaattgtattatttccttgttttgttttaaaacgacatcaggtatgaattttacgtggtcaacacgtcagtcatgttcgggacacttgagcagccaggttgcaaatggggttttggttactatacacccaatacattataaatacaaaaatgtccgtcacagtttggacgagaaatttagttattagcaaataagggtca

SEQ ID NO: 8497 - DNA, 1053 bp, Diabrotica virgifera
  SmartBlast Evalue=1E-59; Info=D-amino acid oxidase n=1 Tax= Culex quinquefasciatus RepID=B0WJC4_CULQU
gcctcttcagcgcatcctaatgataaggtgattccagcaccgccatgtccgtaattgtgaattactgttaactctttatcaccgtgtggcacagtttcgatatctactcggacttggcttcttcccggtcttaatccaacgacatctctcagagttttggctgattttagggagcgatctaattggttacaatctctgacaatattaattttatcagtctcgctaatagtagtgtcatgtacatcgtagttggccgtgcctcccaatgtcaattggtgtgtgttaggaattatataagctaccttaggtttgacgtctaacacacaagattcatatatccaaggtgcttcgactttcctgacttgtcctcgaattggtatcatttcctggtcaccaactatttctccagccccaagtcctgcacagttaataataacatcaaaatcttttaattcttgcaattttttaacggcctgaataacgatctttcctccattttcagtaaattgtttttgcagcgttcgaaggaagagaccaccttcccaagagaaagagataaaacttactccagctgttaactttacatctatacggttacttatcttagctagttcgtccttgggaagaatatagtagcctaacgtagagtccaaccactttggaagtttaaagtctgatttgtctgttaacattactgatggcattaaacatacgccatatttccttgctttaccctgcttccaccatgttagcaattgctcatatgtttcctgggaccaataagcaattttatcatccggagtatctctcaagtagaccggtccccacagtccggctgcaacgtcactcgtcgtgtgaggactcacttctttcgtgaaaattgtaatgtctatattgggaaattttctttgaattgccaatgcagtcgttagtccgattgcaccggctccgacaatggccaacttcttactcatgctgatcgattaactcattgtgtttaataacagtaacaaaataacactaattataatattaccgtgtatctaactagag

SEQ ID NO: 8498 - DNA, 1047 bp, Diabrotica virgifera
  misc_feature (84)..(84): n is a, c, g, or t
tacattttagaaatgtcaacataactcggaacactctgtacatgggtatagggaagctttatgaaactataccttattttttgnggacaattaaaaatgcaataaaatacagggtgttccataagaaaaaatataactttgatacaccgccatttattgggacaccctgtatatttcaaaataattttaaagtgtagcctccatcaacccacaaactattaatttaaaatttttttcaaatactttaccatttagctgcaatcctccgtcccgttagtggtgactcaccctgtataagggtctattgaagggaacacactgcgtaaaaacatcaactaaagattcaccagttttactcccaaatttttaataaatatacatgtactgatttctagttcatcttcaaaaacactaagattccataactgaacgattacacgagcgatacactgctttttaacaatatttcgactcgaaaaatactctagaaaaacatcacaaaatatgaactaatggcaacattttttttaaaggtcagaatttagtgtgaagtaaatgactgaagaaacattttagatatagttatttcctttacagtgtgtcccacttttggtgcattgtgcttttaacacattcgctgcttatcgaacatgatggaattcggaagccattttgtggaatggcacctgactgaagtaaccatatcactcgttggcgcgtgatcggtagggaatgggttaaactaaaatcggagtttcaatgcttcaacactttcttctccattttaaagattccttgtcatatcttcctgaactatgtaaagacagtgccaaagattccaaattttacttcaaaatcttgccgaagcaatatttgtaaaatttttggaacaccctgtagttacaccaaaatactgaacaatgaacaataaaaaaccaaagtgcttacttggctatcaatatgatacccactcatgaagtattttataaataaatgtttgtcataccctgccgtgaaatcgacaaactatacattgctgtttgaagg

SEQ ID NO: 8499 - DNA, 1055 bp, Diabrotica virgifera
aattaataattatttatttacaccattataatgtattgataacaaacgagaaaattatttatcgtacaaattaaaaatattttgatataatgaatgaaataaattccacaaaattttatgagtttagtatacactcccactattttcaataactcttctttttttaatgaaagattaagttgatttgagcagaaaagagtgtatggtaggaattttttgttttgtattgttttgtgttcgctcggctgagcgaatttagtttatcaattcatttcaactaaaattttacaaattagaatgggactttggtcaaaacccgagaataaataataaacaaaagcttcagttttcttgggttgagtttcagtgtgggtataaagtacactttggcacgcacaggcataaagataaaaaattgataactttttatcgtacaaatgatgaaattaaattataactacataacattatttagtggaattctcataaaactgacaattctgaaaagatctggtgatagattgccagcagcaaattttgatttatgtttcattatctgcgtatcaagtttatgtaaggaatagcctgtctactaccttttatatacccttcagcaattgacatactcttctatccaccgtgctgcttcaactttgtcatacgggctccagcgtctgccagaagagttgtcgatgttcgacgaagacagtgacctgtaaacttgtcacgatccctcaaacccgtatatcttccaaggaaaaaggggttgttccaactggttgtacagtggccttgtctataggtcagaaataatttctgaacaatcacgtagccataaagacatgtaatctattagtagcttcaaactattcatgttgtcttcgtcaatattggaaataatgcgtcttttgtcagtttatgtttctgataagtttaccacaaaaactgatattttcgcaaactgcagtcttatgactcacttttacttttgcaaatatgtaataggtaaagttttgctggtaaaaaaaataaaagtttgaaaatgaaaagttttg

SEQ ID NO: 8500 - DNA, 1055 bp, Diabrotica virgifera
ttaaaacaagttttgtgtttaataaaatggctccagatatattttgagatggtcctatgaggattcgaatgtttgcgatgacttttatgaatcttaaagattttataatttaggtaattttattagatctcttttcatactgagtgttctaaaattgacgttcttttgcgcaataaacaatcccaatttgatttcaccaggacatgtacttaaatatgtaactgaactacacaatgtagtttttgaattaaagtatttacaagaacaaagccacaaatgaataatagatataactggcgaattacttaatagtagtagtagatcaagacattaactgcgaaattaatagatacaaaatatacgctaaatttactctacttatctttttgacaatgctagaactaagtaaatttcttacactgtttgtttgtgttataacagtacatacctaatctttaaatagtcctcaaaagcaaaaaatcttatctaacttccatgaattctgactgtcttatgtgttttcagttctagattatagaaaataagataagtatgagtaccaaggccactccagtaaagtgcagcggtttgtgttgtcggggatatacacaaaatctagttattagttaaataaataataatttgtaattttcaaggattttgtgcataccaagatgcatacacaattttggattctccataatgctagggtcaactgaatcaattcttcttactactctatttattttgttgtcattcggcttatgtggtcattctattctactcttgatgtcctccaccttgcatctccgtcgtatatctgttctatctctgtcccataagtatcttaccttcgattttgcgaagagttttatctccattgattcgagcaatatttttgtcccctctgtataaggtcgtgtttctgccgcgtatgtcattattggtctgatgactgttttataaattctgcctttccgatattattatttattcatattgtgtcattcaggcaacctgtggtcctgtttgctctattcacttcatcttccact

SEQ ID NO: 8501 - DNA, 1053 bp, Diabrotica virgifera
  SmartBlast Evalue=1E-114; Info=Abhydrolase domain-containing protein 4 n=1 Tax=Harpegnathos saltator RepID=E2BMM4_9HYME
ggttatcaaaatatatacagacatagagaaatctaaattacaataagtaggaaatgttagtgaaacaaaaagaaagtgattcagaaaaatgtgaggaagaaagttgggtgagcccaaattggttgtcatggaataaatattcagaaagtatgttaagagcgctagaaaaaagaattttaagcatactgaaagtcccatacaaaggattttatgtagacatcggaccagttgtaggtcctgctgacaagatatggacactctcctttaacacagagtctcaaaaaactcccttggtgctcctacatggcttgggatcaggcgttgcgctgtggtgcttgaatttcgacgcctttgctaatacgagaccagtatatgctatagatgtattaggatttggtcgttcgagtcgtcctacattcagtcaatctagcaaagaagccgagaacgaaatgataagatccattgaagaatggcgcaaggaactgaaattaaaagacttcatcctgttgggtcacagtatggggggcttcttagccgcatcctattccatttcgtatcccaagagagtgaagcatctaattctggctgatccttggggattcccggaacgcccccgagaatacaatagtattcccctttggatcaaaacggtagtctatgttctgaagccctttaatcctctcgcgggaattcgggtggctggaccgtttggaccaaagctgatcaataccataagaccagacatttcaaagaagtatgcaatagcactagaggacaccaacgtaataccagaatatatttatcaatgtaattgccaaaatcccagtggcgaaggcgcatatcacgccatgatggccgattttggatgggcgaaaaatccaatggttagacggatcgaccagctcagacaaaacttaccaattactctcttatatggatctcggtcgtgggtggaccattcagcaggcgaaattctcaaagaaaacgactcaactccgtcttcaaattacaagtggtatcaggtgctggccattacgtttacgccgacaaacc

SEQ ID NO: 8502 - DNA, 1055 bp, Diabrotica virgifera
  SmartBlast Evalue=8E-43; Info=Acid sphingomyelinase n=1 Tax= Glossina morsitans morsitans RepID=D3TQ63_GLOMM
gtattgtatctttgacttcatcgatgggcatccatttagatagtttttgaaaaagtaagtcatataaccatttacttgaaagtgaggggtctgtttcttctgagtaattatcgactgggtttgcttcatgatttcctaaactgggataaactggaactttatagtaatcagcaaaggcgtccaatatttgagatattattttactgttgtcttctacacttgtgtcccataatctgtgaggtacaatatctccagtgaaatatacgtagtcataattgtggtttttagtttgctctaaggcatttactacagttctccaagggatatctgcgttaatatagtcagaccagtatccacaagcttctccggcagttgttgcgttaggttggtcatcctggcaacacactggttcattgcatgtattttgcttgcctacagtatatctgggatcataatggatatcggtgatgtgaagaatattaaatggtttttctgctgttacttttttcgtttttattgtttgagttggcggaggaacattaacggtccaattatatcttgttccaagagcacaatcgtcgtattgcaaagccattccgcatgcatcaataccagttaaattgggtgtgttatccataatgtataaaaatataggagcattaagatctacccttcctttacaaactctttctgggtataccttgtagagattacaaaagccaagaagttcctttttaaactcttcatcactcattccatctgctctgtggtgtttaaacatatctactattagtgcgcaagtgtaacatacttctgatttatcaaaagtaccggttggtactaggaaataattaggcttattgtatttttcgacagccgatttcagatattgcggtggagtgcctgttttccggtactccaataaaccttttgtcatttgtttaaatgcatcttcttttccgattgacacacaaatcacaaaatgtaaaagtattgtcgcaatggataaaactaaaacagtcttcattttattatagtttttgaatcaaacgtga

SEQ ID NO: 8503 - DNA, 1051 bp, Diabrotica virgifera
taaaccattttaatattaacaatcaaaacgaagtgaaaaatatgttactgatatacctaaaaaacagaaaacaaaatgtatatgaataacatccacaatttcacttcaaattaataagttatcctttagtgtacaaacacacgggccactttgagcgccacagagtagctcccagatgattacaaaagtgcaattccagacgagcgacagtggcccgccacgtttgctatcagtcgccggtccccgctactagtggcatccacaagtcgcaggaaccttttcagacgggccacttttctagctggcacagttctttacgagagttcacacgatgagcaagtaaaacgtctttccgatttcgaaaggtttttgatcgaaattccaaatataccggctatatgacatacaataaccccggactacagctcgtatttatatcgattctttcaaatgttctttagataactataaaactcgtcgaagtacctttggacattctacagtaattgaagtacttttcagcgtctgcctttaattcattattaatgtacagtattgtctggttaataatatgtccgatgtaatcggaagcatccatagtgatcattgattacgtttacttcgacgccgtaatacaagcactaaagtaaaagccagagttagaatgcaatgttagtcttacggcgcgcatggatgccgctcatgtcggcacagtggtacagaaccgtaggcgattgttgtgtgcgcgtatattccagtgctataattcttaaatccggtcctaatgcaccgctcggggtaaatcggcaacgtggtcggccgttctccggtaagaaatacattaccatgctacccgcactgcatactaactgtggcttttagtatagaagaagactttcctcgtctgaatccatcgttgaactgactgatttttctcactgattacattaaacgcaaaacctttccacacgaacacttcgctacaaaatcacctgcctaagccactttgtggcgctgcagagtggctcgtgtgttcttacacttatattta

SEQ ID NO: 8504 - DNA, 1054 bp, Diabrotica virgifera
  SmartBlast Evalue=1E-58; Info=Translocon-associated protein subunit gamma n=4 Tax=Apocrita RepID=E2C5D7_9HYME
cattctttcatttcacttagtttctgtgcccagtcatcaactgtgtagtagttttaaatcaagtgaatttgtgttcttgtgaattaaatcttcaagaaaaatgtcgaaagcacaaaataaaggttttacaaaagaggaagaacttctccttcaagatttcagccgtaatgtatcaacaaaatcatcagccctgttctatggaaatgccctgattgtgtctgcagttccaatatggttattctggagaatacacatgattgatatttattcctccttgatcttgttcgcagtcatcacagctatttctacctatttattggctatggcatacagaaacacaaaattcaccctaaaacataagattgctgtaaagagagaagaagctgttaccagagacttgagcaaaaaactagcagaagacaagaaaatgagcaagaaagaaaaagacgagagaattctatggaagaagaatgaagttgctgacttcgaagctactactttctccatattctacaacaatgccctatttttagccattgttattcttgctagcttctatttgcttccagcattcacaccagcagtcaactacaccctttccattggctccacatctgcgttattagccttattgtcaactggatcacattaagacttgtttattgaatctgtggtattgttttatagtaccattttgttcaagtgtaaataagaggatgaaattaacatcaacaatatctaaatatcctgtaaggtttgagtagagctgttgaaaatatatgtatatattgtttactttttggaaaacatatggtttaattgacatcttttctttaaatcatgtatattatcaaaacgtaaagaattttaaagactatttattatgattttctgtataaactagacattaggttatataaaacaagtgactatttcatacttttcattacaccgttaattgagctctatattcatataatttatactgtttcaataaaaaaaccattttttaattaactgtttttattttaaaagtaatataatgtcagtacat

SEQ ID NO: 8505 - DNA, 1054 bp, Diabrotica virgifera
  SmartBlast Evalue=1E-106; Info=Triosephosphate isomerase n=1 Tax=Tenebrio molitor RepID=Q8MPF2_TENMO
gtgcttcgaccttcttgtgacctcctctgctactaaggtcccacaatttttaaataattttaaattttaaatcctgaaaaccagatatattaagcatcaaaaatggcttcccgacgatttgtagtaggtggtaactggaaaatgaatggaactaagaagcaaattgaggaaatttgtaattttcttcaagctggacccctagatcccaacactgaagttgtagtcggagtacctgcagtgtatttagaacatgttcgtagcaaactcccagcaaccataggagtagctgctcaaaattgttataaagaagaaaaaggtgcattcactggagaattatcccctcttatgctgaaagacattggtattgactgggttattattggtcattcagaaaggagacaaatcttcaaagaaactgatgctttaatcgcagaaaaagtcaagttcgctttagaaaagggactcaaagtcatcgcttgcattggtgagaccttagaacagcgtgaaagtggcaaaactgaagaagtcgtattctcccaaactcaaaccatcgcctgcttggtaaaagactggacaaatgtagtgattgcctatgagcctgtgtgggccattggtacaggcaaaacagcaacaccacaacaagctcaagatgttcacaaagcactcagagaatacattgctaaaaatattggtgaagatgttgcaaagagtgttaggattcaatatggaggatccgttactggaggaaactgcaaggaattggcagctatgcctgatattgatggatttttagttggtggagcctctctaaaacccgagtttgtcagtattgtaaatgcaaggcagtaagtgttgttttctgtgaagtgtagaagtgaacgatcaattcatatttgttatattaaaatagacacttacaaattgtattttattgttaaatatttcgaaagtatgcaagatgaaatgtactggaaaattatgtactcttgaaaggttaatgtgttgatgttcagatgagtattgcgttggaataaacagtaaatattccttatat

SEQ ID NO: 8506 - DNA, 1049 bp, Diabrotica virgifera
  SmartBlast Evalue=8E-30; Info=Zinc finger protein 598 n=1 Tax= Harpegnathos saltator RepID=E2BQ19_9HYME
atgtcttagctttggctaaatgacaagaaaatcaagattcttgtctaaaactgaaactagattttccaacaaaataaaaatttactgttaaaaaactcttactttctccaaggattgtttatttgctgagttttcctaaagtaggaaactggttttctaaaatatgactgttataatgttccgtcaactccctcttgaagataacttgcttgcagttctcacaaacgagcagatactttttgcttttaccatcgtactccctatacagttcctgttgtttctccaaatccggtagaaggaccaacaattcaggaaatacgtcgtcaaactgatctctaagaacttctttgcaatgttcgtagtatttactagtaggatacgctccgtttctgaacaaatctgaataagttttgaattccttgatgctatcgttgtccaagacactcatgaaacgttttatgaggtcttgatttctggattggaaattagcaggttgtatgtagttgttaacaggcattatggagtagctttggccactgctagaggtgaaggtgaagtcactagcacctaaagcgggaaaagaagaacggtttaaaccaggagggggtttcacagaaaagccgggaggaggtttagtattctctgcgtggttatttgttacagaagactctgtcggtgttgtcagagttccgattttgagttccgaacgttttttaacaaaaccgttcatgttaggctcgtcattattattgatattgttagtttcgtcagctctgttggcctctacctcagtcaacttgcctttcttcttcttgtttttgttttttgaatcgttgtcgctgattttgagatcgttcagcttgctctcgacatgactttttggcctcgaactggtcggcttattatcgactttcttactgctagtatcaccactactttttgagttatcgctataagtctttgaattattattactagaattatttttagaatttacactaacaaaattgttgaggttaacccagttactggatgcaggcacagacgca

SEQ ID NO: 8507 - DNA, 1051 bp, Diabrotica virgifera
  SmartBlast Evalue=1E-153; Info=Inositol-3-phosphate synthase n= 1 Tax=Tribolium castaneum RepID=D6WV33_TRICA
atggttcaccattcaattttgaattttctatcattaaaaatggcaacttgtgttccaatgtcatgttgttttctggtggtaaacctatgcaagcctttatgacgttttcaatgcatgccctctgcttgtttaaagcattgactaccggtgtgccctttggaactaagggtgccttgcaaagataactcaaaagtgacaatactgggtggaatgaagtgtattcatcatctgaggagttttctctctttatcttgattctcgtaaatagttctcccaatatgattaggtctaatattattggagttgcaagcaaagaatcttcacaggtgttatgaattaccaatgtgtttaaacctcccatcattatttctgaggtgtattcatctaaggctcttttgcagtctcccacatatggaacatatttgatgaccactacatgatctggcttttcccctggctgatagagaatatcattggagtttaccatgtcatcaacaacattgctttttgaaatctctttagatctgaactgtggaggtgcagataaattctttccatcgttattcccaagatgattatagctaacaatactgacaggtttaataccagcacccaccaagaaatcgaccaaaacgctctttatcttcgtttgaccagatttgaaatcatctccagcaataaatactccacgtttttcagcgaagtcaataattcctggaacaaatgtattctgtggagatccgtttatgtaagtacatcccttagctatagcggcgtatgcaaatagtgtagatggtgatatattgctgtcattgttagcgatagcaattttaatgttttcagctgtgtcgttaacaccatctaagacgtcgctgaagcattccgtattcgctgtccataaaatgatgattttgtcaagattattggcgtctttaaattcggctatatcgtggcatatatgttctaactgctcctgtcttgtacctttaattacatggtccgctctggatttctgattggcagcaataaattccggtatatagacagaagg

SEQ ID NO: 8508 - DNA, 1045 bp, Diabrotica virgifera
  SmartBlast Evalue=3E-10; Info=Cordon-bleu protein-like 1 n=1 Tax=Camponotus floridanus RepID=E2AN35_9HYME
caagatgttacccaactttctaaataacattaaaaatctaattaaactttgacagacttcagtccctttttgcctccaaaattacgtatttgagatagtaattgatctctgggatccaaaataggctcaacgtgtttaatagtgggcttcttaagactaactttgggcatcattggcggaggaggtggtttcacctcgggctctttcggttcatttaagattttactggattccgttcttcgaagagtgacttgtgaaaaaggcacttgtgagtttggttggaatgattctttttgtttaggcaggcttttaaaacctctgacaactggtgctccgtgaggtgtgaaactatttattctaagggcggctttcctgtcttctaagaaaccattatgtggtttattatctgctgtagcatctggagatatttgagttacactagtattaccgaaatctttaaaaggttttttaagttctacagatctaactactggcactctggacatgtcgtattcggaactgaaggctattgagtacggcctttggtttttattaatatcgttaaagggttttctgtaacctacagcagttgtgtgattgataaatgtttgattatctattattttaggttgtgaattagaactagggcctattttaattacaacgttgccagttttggtatcagttgtcgtagtgggcacttcagaaccatttactttaatgcttatacttggttcatttgaggattgtacttctttgttgctagttttgatttctattcggttattactagtaacgttgttattagtggtattaactattagtttagtagatacggtgttcccaagagtatagtcttcatcttcttttacgctaactggaacctttggacggtcacaccatgtacccatattgatagaaggtggtccccgatatttataaattctttcagttgacagaggtttctcgatggtttctacaggagatagtttcgtgattggcgtttctcttggatgatcgattttagcttttgactgatctggtg

SEQ ID NO: 8509 - DNA, 1052 bp, Diabrotica virgifera
gtgttgggagacaacgtaccgtcccgattatggcatctaggccgtattaaagctgtccatcctggaagggacggcataattcgtgctgccaccgtcaaggactccagtggcaccttattcaaaagacctgtggtgaagttaagtgttttgcctcttggcgataataaggtgtaaagtgtttccaagtgagtcgcttataaaggactaatacttacaagcgtctctgaatgtacttttaatgataatttaatgttaattttgatttttattcaggggtataaatccaatttaatttttttctaatttttggctaatgtgacaattttgctgtataatgcccaagttttttgtattttattgatatgcgcacattgttagttacgctttgtctagttttattttttctgaaaaatgtacgacatatcaacgtgggggccatgtttgcgccatcccgtgtaaaaaggtagaaatgtgtgtgtacgcagcgagctgctacttgattgattgcagaaatcattactatcgacctgtgtagggatctgcatggtagcgtcgcgcgcaggcgtgatatgggaatgtagaccttaataatatccattagaaaattgtatgtacttgtaaccgctaaaaatgtaaccaagtttgtgcttaaaataaattgtgtttgcatccggattttggtaataatacaccctaccagtgcacccatccttccgtcgacgaagttgttcaagggaaccatccatttgacagtccactgcctcaccatttggtcattcgaagccgtatcttttgaacgcatcgccggcaagctttcgccattgtggaattcacgtttgtaaatagatgtcgttagaaagcaaggaatcagaagcactaatcgccgagcaaaaggagaaaaacgaactcattgaaaaaatggcagtcacgatgaaatatttctaccagcttttacaaggccacggtgttgccccatccaatgttacaaaacaataccaagaaattagtcagagtatcttaggacgtaaacatataacatggggaccacttcc

SEQ ID NO: 8510 - DNA, 1052 bp, Diabrotica virgifera
  SmartBlast Evalue=2E-85; Info=MOG interacting and ectopic P- granules protein 1 n=1 Tax=Camponotus floridanus RepID=E2ABF8_ 9HYME
tagtcgaagcgccctcttttatcgtcccttatgtttacgaaaaacccctgtgaaagacttcaaggatttcgttaaggagatccaaacacagattaaaaagaaggaggaaaaggacgaggcagaatctaaaaagggcgaagatggagctgaggacgagaaaatggatgttgatgaaagtgaaaaacctaataaagctgaggataagtctgatccaaattttgttcctgattctaaaaaggagttggaggatgccaagaagccttattcatacttcgatagccctcttggtaaattcttcataaatataggatttaatttagttcaagaatttgtacaaactgatctgttgaaacagcagaaacgaaaacatagtagagaaggtggttcaaatccagaaacagaaaagacaataaagtccttggtcaagaacctgcagtacagtaaagaaaataacgaacatttcaagactgtattgaaaaaatgtgaattttgtaacttcaagacagaatcggcgctggctatgtcgtatcacttggaaactcctcatatgaagaactttgtttataagtgtaatttctgtgcatacgaagtcagaagcccacatgatattctgtttcacatggaagccgaacatgcagtacggggtcatttggagagagctcctgcgttccatcaatgtcccaattgtccgtttgaggacaaccaaaaaggtaaactgtcgcggcatctggtgacctgtatgagaaaattcaaacctgaaaggaacttagatccgccagtagactgggaacccccagcgaagataccaagagtgcctaaaatgagacagcaaggtttgaacgctacagctgcagcttatcaagccttgtctaagaatacccagtaccagttcctgtcgaagatgcagttacagagtactcagagcgcaatcaacaggggtagaggacggcccacgttaggtccaaatatcaatatcaaatctcagggagcaatgatacgaccaccaggtatgctctttaagcaacaaacaatgtctggagggtcagttttgg

SEQ ID NO: 8511 - DNA, 1051 bp, Diabrotica virgifera
tcattttccatattgaaatttatgctgcatataatgctttgaactattttgatcttatcttttctgatagtatatctaattctataattgtatttttaagagtcaaaaatgttcttagtgagatgtcatagatcgacagacacttcgatattggaagagcacaatatatccacctttggacatagaactcacactattttctccgtttttctttccttaagcaattcaactctgtattggtctgtagtaaagtattaccattccaagttgtgccttcatgttgatagcttcacaaatccagtatatatttaccttattccatctgccagtatcaacgccaacgaatatataacctttttaaacaataagaaaccagaaaaggttgaagtaatgtgggatattcggcatactttgagtttcatgtatctgcatctgtcttctatcagtaacaggcaaaaggcctacattccttgacaaacaggcgctacactccacttgtaggatttcgaatataatacctaggtatagattcgcttaccatatctcgatcgactgtatgaaataattcgaagtcgtggagtaggtaaatgatttagtggtaggatcaaaataaatacaatcgacgtaactacaaactgacttatcattctttattgaggtaaatattctgttagactacgaatttacaagagttcaagttcaaccccttataagctcaccaataaataattcgatctaagaagttattgcaattgcaacagcatttagcaattgattaaattctacaggatggtaaataacctcgtaatcaaaatatattatagatatcgatataatttaggatgttaagattaatgtgagattacaaatgaagggtttaatttgtgattgaacaccactacctcaccgctgagttgtagtgttcaatcacaagttaactcagtggtgagttagtggtgttccagtaccataagtttaaatttatttacgccaagatagtaaaaagagaacaaaataccaatgtgactcatttgaaatttctgacttcaaa

SEQ ID NO: 8512 - DNA, 1042 bp, Diabrotica virgifera
tcataaaacatgtagttttgattgacgtcttaaacaatgaatcgacgttaagacagtggcgtattaagagagaatgagaggaaggttttcgttaattttacgaatggtaagcggaactaagaaaatcaaagaaataaataataatagaaaataaatgtttcttttatgttcaattttttaatttaatttcttagttggtaggcagtttaaagtatatttattctaatgatgaaagaatattgacaattttctttacctaaccattattatttattcggttttttacttcagtgcatatttatatttgacaatgttatacagtaaccgccaccctacttgacatacggttatattgagctaaaacaatcctggacatttctttctttgcactgtttactttcatgtctagcgacgtctagaacatcagaaaatatatagaaaccaatacaaacatagaaagttgacagtttatagaacagttgtaattaaagtttatagttgttgttgtgttgtaaaagttataaagtagatattgtaatattgttggtgtttgaataaaatttttttaaagcagactaacaatattattaattaatgtaatttttgtgtggaagaacaatcatttttaatagtttcatgacagtcacatggcatgaaagtcacaggtgagaactgaccggattagcccaaacctagcaattaagtaaccgtgtgtctactagcatggcgcttactgtataataatttattattaaacaacacaattgttgctaatatcatttaattttaaatgagatatttcttttttgcatcaatggggtatgagatatatgagataatgaggtatgagataaggtaagagatacaaaagataaaacaatgatttttttggctctaacagcatgcgtaatttgttataaaggtaaacgtcaacatgtgatttaacgcatagttatgttcttcctgcttctttcattttggtttttacctactggtgcttcaaagtgacaacaatatctgtgaactacttttatttttctgt

SEQ ID NO: 8513 - DNA, 1051 bp, Diabrotica virgifera
  SmartBlast Evalue=2E-33; Info="Juvenile hormone-inducible protein, putative n=1 Tax=Aedes aegypti RepID=Q17DF4_AEDAE"
ttttgaaacctcgacaaaggaaagatttcatcgggatccaaactaaaattacgaagctgcgaagatagtttgtcgtgatatatttttatgtaggtttcaaaatcatctaaaatctcttctgagccatttgccagaagaaaataggaaacgtctgtacaaggacttccaaatgaagacatttgccagtcaataatacgtaaactttgaggttttgttttaacgtttggatcctgatattgaaacataaaattattacaccaacagtctccatgtgttatgacaactttgtattctggttcttgtaatttagagaaagcttcaggcaataatttttgcccatatttttctaaatattctgtgaaaactggatcatcctctacagctttgaaactatcagttaaagaatgagtaagaaacgctttcctatgttctatcttttcctcatcttcttggtaagtgatctcgtatggattacgtggaccattttctgtcaattctttaaataattcaggatgtttgtatttcattgctagtgaagctgcgtgaaatttggcatactcaatgagtactgcttttgtgtgtcctgggtttattgggactttcttattccacaactggtattgttgtgtttttagattctccatcactaaaccttcaagatcatcttcagtaaaactcaaataaaatttggggacactgtcgaagggatcttcaatgctgtattcttcttgaagcttcttaaattccttgaaaacccgttcgtacaaaaatatttctctcttataaaggtccctaaagggagtagagtctctaacttgtttattggtctctgaagtctttaaaataacatccaaactcttttccttgtttttaatggtaatagcagtaaggattcctagaaagttgtctcctttgttcgacccagaactagttattatttcataatcggtgaatccattttccctagcaatacggtccactaatgctctgtgctctttagcaatctccattttggctaataacttcaatcaaaactgtctaactaaataac

SEQ ID NO: 8514 - DNA, 1052 bp, Diabrotica virgifera
cgcaaaattaaaccgcctgtccatagaaaccacaataagttaaacaaggataagcgatacggcatgtcttgatacattatttactaataattttgacgtttatcattttcagtgacattagcgcatttgttgtgttcagaaatggtttttcatttattttatattacatagtaatagtcggtatgatgtttaagctgtttaatgttgagtccatcaatctccccaatagtgaaagaaaatcaaacacttcaataaaataactttataaaatacgtccaccgggataatagccatttcctaatacataattcttcttcgttctctctttgttgactttacattgacagttcatgtcaacgtatgtttcacttaatgttttgatttaacttgtttgcaaatgaattattatgtttgtgcaaagctccaaagaaaattggaatatctcagacatattacacatgtagagagatacatataacttgcttcaattgattatgcaggaaaagattcaagaaaaaaaaagcatagatagacgcagaatatcgtggcggcgcaacctgagagagtggtacggatgtacatcaaaggaacttttcagagcagccatctctaaagtcagcatagctatgatgattgccgacctttgtcgcggaggtggcacttgaagaagaaagatcgaacggaacaactgtatttactttattcatgtatctcgaggtcttccacatctctattactgctgctcattctatctcccatgacaactgttttcttttttctttattcatccatccgttgttaattccgaattcgttttatacgtatggatctctccaaactaaaaatctattgtagtaactataaatcttagctcatagattttctccaattataaattaaaaataggtgtttagatttgaatgagccttatataatatcgcaattttaaccaagccattttgaaactaagtacaaattggtcaaaatccatatcgtctctctattttaaaagctttgtgtacaaagtttttaatatctgtaataattatttg

SEQ ID NO: 8515 - DNA, 1051 bp, Diabrotica virgifera
  SmartBlast Evalue=1E-163; Info=Probable ubiquitin carboxyl- terminal hydrolase FAF-X n=2 Tax=Formicidae RepID=E2A416_9HYME
tagatcaggctcgtctcccattaatttagagaaccacttgaaacaggcttctctgtcgctctggaaaaccgcgttctcggcgagacactgccatatttgcttcgcttgttcggcgcatagccacaattgtccgtcttttaagaggaatctaagaaaattcagtctttcctggacttgcagcgtgtggccgtaccgtccgtcgggtatgtaggtctcgctggtcaattccgggttctctttgattaattctcttaatctatccatataactacaaaggctgttggttactaatataactagagaatgctggttttgcaatcgttctatcacttcttgtctgtagtaaatgtggtgggtacgttgagtgtggctgccgttcgtgttctgttcgtataacgtgcaaatctcacggatctgcttgagagccggaagcgcccacatttctccgttcttcagttcttccacacatttatccaaccaaactgtcttttgggcgtcccgctcctgcgaacaactataatccaatatcttaacatgagcagctaaagcttgatccattatttcggttgggacatcttcggcgtgtgccagattccaaaacagcgtcaaaactttgtgcgccatgacgccgtctttgtcgtcctccgccaatcgacgtatcagttctaaaagtctttctctctgtcgcttcgacgccgaagtccagttgttttggaaacactcaaataaatggtctaattgttcggcgctgaagtcccaagcgagtttagccaacaaatcgtggacgtttttaactatggcttcgtgttttccgacttgagctgcccaaacggcgtccaaatcgtgcaaacttagcgccctctctttgatgacgaacctcagtatcttctcgagtttctctacgtactgcggctggtgtagcgaatcccttaacactatttctaatactttattttcattaatccacttggccatacgttcaggcgtgagatattcctcctcttccattccgtggtgtcgattcgggtaataaataacgctcgaaataact

SEQ ID NO: 8516 - DNA, 1049 bp, Diabrotica virgifera
  SmartBlast Evalue=1E-147; Info="GTP-binding protein 128up, putative n=3 Tax=Neoptera RepID=E0W1M9_PEDHC"
tttagaaacatatttgttcaaatttcaagctgacacgtgaattagtttaaaactgatattaaacgattattattttttggaccagtgaaattaattaagaaaaatgagtaccattgtcgaaaaaatcgcggctatagaagccgagatggccagaactcaaaaaaataaagcaacagcaggacatttgggacttttaaaggcacgtttagcaaaacttcggagagaactaattactccaaaaggtggtggtggaggtacaggcgaaggttttgatgtagctaaaactggagatgcacgagtagggtttgtaggttttccatcggtgggaaaaagtactttactaagtaatttagctggtgtgtattctgaagtagctgcctatgaattcacaacactgacaactgtgcctggttgcattaaatataagggagcaaaaatacagttgctagatcttcctggtatcattgaaggtgccaaagatggtaaaggtagaggtaggcaagtaatagcagtagcaagaacatgcagtttaatctttttgtgcctggacgtgttaaagccactgggacataaaaaattaattgagcatgaattggaaggcttcggcttaagattgaacaaacaacctcctaacatatattttcggaaaaaagacaaaggaggagttaatcttaactgtatggtaccgcaatctgaacttgactcggatactgtgaaaagtatcctgtctgagtacaaaattcataatgctgatgttactttgaaatatgatgccaccagtgatgatctcatagatgttattgaaggcaacagaatttatgtcccgtgcatttatatattaaataaaatagatcagatcagcattgaagaattggatgtaatatacaaaatacctcattgtgtaccaatatctgcacatcacaggtggaatttcgatgatctattggaaaagatgtgggaatatttgaaattagtgaggatttacacaaaacctaaaggacaactgccggactataattcacccattgtttacattcggaacatacatc

SEQ ID NO: 8517 - DNA, 1045 bp, Diabrotica virgifera
ttagatcaagataataatgaagacaataaaagagaaaacaatatataatatagaataaaataaaagaaataagaacagtagagaaaaccaagaaatagatacattttaaaatataatagtaaattgttgtaaagaagtagttggatttaataagaactcattttaaaatccagtaaagaagattaattaaatcaagataatctcttctttaaccttcctatcatatctatctgcctgtaatgctattcaaaaattatctcctgaatggggtaggtctatagttatatctataagacgactctgcaccagtggggttaatataactctcatacttttcgctatctctgatgctgttcaactgagcttgcttataatactgaagttgaagaacggagggaacgtatgagtccaagaggctcttaggttctcttttgaaagtgaagtctgtagctttaacattatatgcgctctttgccagtttcaagagtgggttgtttctctgtgtatgtggtatattggggggatgattgtggttgttggtacgtctggtcgttgtcgctatagacgacgttctcgtagttctgggtttggtcagttgactgctgttgacttccctggttggacacatatgttgggatatacattatgtactgcaaacccccttttgggtccaccacagcttgtatagacgtagtaggtgcttggtactgttgttgcaaataataatactgctgtgggttgtagtgctgctgtccggccccttgatcaatgttgttgtctgctacatactgtacgttatcataattcaaatactgagactgctcttgctgaggcacgtaatactcttgagtttgatctaccggggctttttgtactcctctttgtggcgttccttgacccgcacccgtatacaccggtcctgtatacactggtcctgtagtgtattgcgaaccagaagcgtactgtatagtggagtactgtggttctgtctgatatttaatttttccttggttcaaggatatatattgaggtggggcataagtta

SEQ ID NO: 8518 - DNA, 1050 bp, Diabrotica virgifera
aaatcaggtcatcatcatcttgttaataacgactaaaaagtatgttaatgtacagttacgcctttaagtgatttcaatttcagttattgaacaaatcgatgagaaacattttttgtttgtgagataaaaacaacaatatccttaaagcgaatatgctataaggttacaaagtggttgaaaattggttagaattgattttccaactactaccttcttcgatgtcgtttctggaatccgtttcgaaggaccaaagtaaatgcttgaattgtggcttttcattattttcttcttttaacttaatgttttaatacattaacttttaatgtataactgtccatctccttttagtttatgtaatggttccttctaagtactaagatcgagctgtacattgccgacattagttagggcgtaactagaccgaacctgggggaaaataccgggtgaagtctcaactaaaatggactggtggactgaaatgcgtgtacttaagtgaaaactacaagtttctcgacagatttcaatcgaatcatcctacatatagatgtttagataagattaaatttgtgagaagaatattttaaatatgtatttatataagtactaatggtctggaaattgctttaagtgtagattatgataagaaagtctttcacagttttgtgacagagtcaaatagatgcaaaactaaatttttatacttactaaggatttgctggcctttcaaaagtattagacatagtagaaggtacttttcatagaactgcggatgattttttcaatgtatgagcgtgaccgatgtaaaatctttattgaaaaattaattttttgttttgagttggttttcgtactaagaattagaatagtttgcttttttcgtaaaatgtgagtctacatttctttcttagttactcttggagcatccaagcccctgtcaccaccttaacactactttctgatcttccagaaatctgtagtccttgaaaatttagtgctttgagcaccaacattgatgtgtactaattttagttactctctgagcatccaagc

SEQ ID NO: 8519 - DNA, 1048 bp, Diabrotica virgifera
  SmartBlast Evalue=2E-87; Info=Phosphomannomutase n=1 Tax=Culex quinquefasciatus RepID=B0WHH5_CULQU
actgatttgtactttgttgattggtgaaaacgtatatttacgtgtcagaaattccccacaaagtacgacaaagtacaaatctacaaatagtagtgaggtgctgattcattatttcatacattattttgtagttgtttgaaactaaaacatggatcaaaaaaatattttgtgccttttcgacgttgatggtactttaacaaaaccggtaaacgtgatagaaccagaaatatattcgtttttgttagacaaagtaaaggcacgttgtactgtggggctagtaggaggctcagacttcaagaaaattgcattccagatgaatggggatgatgtaattcataaagtgcattacgttttttcagaaaatggtctagttcaatacaaacatggaaaagaaattggacgacaaagtattcagaattttttaggtgaagataaaattcaaaaatttatcaattttgtgttacaatatctctcaacgataacacttccagttaaaagaggcacctttgtggagttcagaactggaatgctcaatatatctccaataggtagaaattgttcacagcaagagagagatgcctttgaaatatatgataatgaacaccaagtacggaagactatgatagaacagctcaagaaagaattcccagatttcggtttaacatatagcataggtggccaaattagttttgatgtctttccaaatggatgggataaaacctattgtttacaattgttagaaagagaaggctttgacgaaattcatttctttggagataaaactcataagggaggtaatgattatgaaatttatagtgataaaagagtaataggccacaaagttactggtcccttagacaccaaaagacaattggaagaattactcaatttataataaatgtaatatcttatgttttattttatttaacacattcacggacacgcttcacatgtagacacgttttcttatggagtaaatgacttcatatgcagtcgtgtccgtgaatgtgataataatatactgttaattttcattatattttatacc

SEQ ID NO: 8520 - DNA, 1050 bp, Diabrotica virgifera
  SmartBlast Evalue=3E-59; Info=Ubiquinone biosynthesis protein (Fragment) n=5 Tax=Gryllus RepID=B3GC59_GRYPE
tggactaagctgcaaagttcagtttctcaaattattatatttttaaacagttaaattgagaatataattcagatttcaatgtggtactggtatttagtatttaatttattgtaaattatttacaattaacacaagtttaacttatataaatttaattaatccagaagatgcctgtcagttattcctttgggtgattagaggttatccaaaaactaaaacaaaaacataagtcataatcgtcataatattatgccaaaaatttaaaatagtctttcgaggagaaattctttataaaaaaaattgtatctttctttatatttctggtgatatttatgaaaaacacaccagcaatatgtttgctatatcgaggagatcaatagctgctttaacacaaatcagatcaaagacagacaaggccgttttggacgaaatcattcgagtagatcatgctggagaattgggagcagatcgtatttatgcaggccagatgttcattctaggcagcacttcaaaagcacctttgataagacatatgtgggaacaagaaaaacatcacaaagctacattcgaagatctaattagaaaaaaacgtgttagacctacagtaatgactcctatttggaatgttgcaggcttcgccttaggagcaggatcagcattgcttggagacaaagcagctatggcgtgtactgtggctgtcgaaacagtaattgtagatcattataatgaccaactgagaactctgttggaagatccagagtgtgataaagagcttgtagaaactattaagaagtttagagacgaggaacaagaacatcatgaccatggcattgatcagggagcaaagcagactcctttttatgaagcgtttactaatgtcattaaagctggatgcaaagcagctatagcaatatcgaaagtagtttaacttgtgtttatgtacatattatgtagttgattgtgaaatatatgttgttaaatttataaagtattgacagtattatatatttttggatataaagttagtcccactatgtgtacagaaaatct

SEQ ID NO: 8521 - DNA, 1045 bp, Diabrotica virgifera
gtggcatatatatttcaaagcctcaacagcatgatggcaaaaggtttcgtccatttcttctacgtcggtatcttgaaattactccaacgtatgtttcagcagactgattataacctctattgccctagcttgcagaaggatcgtctactgttggaaattacatgccagctgagtgctttatacttgtgtacaaataaaaaagctaaagcacatagttcagtatacaaccatactgattctaacgttttaaatgcagtggagagaggcacaatattcgacgtttccgcatcctcacgcgacgatcgaacggtagatcgagagagattctctgcctagtgcgtgaaaatgatgaggccgagtggcttaatgaaaccgatattggtcttcaacaaagcactctgacaacaactgacttgcaagatgtttatccagttgttggtgttaaagaaagtcttgctattccgtggtccgaggatactgtacattaaataataatgtattagtacaaaaaattttttcgcatttctttcattatttttatgtcagtgaaaaacaacctgcaacttttctattatctctaaacgttattattgtagtttttaattttctataataaaattaaatgattctgtattctacacctaatagtctcccgttttataccgctgacgcggctttgggattatagcagggtagtctgctatatctaggacctacggtatacaaggaaggtaacagggccagtgctacccttcaaccgcccgttattacccctggttttacccaaggctgagtcgacctggggcctatagacatttttaaaaatgtcgagttgttcttgccggcggtgggatttgaaccccggcctaccaacactcgagtcaagcatactactgcctgagatacgccggccctgtattttataaaacaaatatttacaacaaaattaagatttttttgtagatactaaaaaatacacgtgattaaattaaaactagattgtagccttaggctttcttaacattttgttttttgattcatttgc

SEQ ID NO: 8522 - DNA, 1048 bp, Diabrotica virgifera
  SmartBlast Evalue=4E-85; Info=Annexin-B11 n=1 Tax=Harpegnathos saltator RepID=E2BQC8_9HYME
cgtcatcattcaagagaatacgtttcggtattaccattttacatttatttttaccattctttaaattacagtttagtggaagccggttaagttcacgcttatacaatagtattaccttgaaaagtgttcaaaataatggctccaacagtggttccttatccagatttcaatgccgaagaagatgcaaaggctctaaaacaagcattcaagggtttcggaacggacgaagaagctgtaatagaaattatcacaaaaaggagtaatgaacaaagacgtgaaatagcgattacattcaaaacaatgtatggcaaggatctcatcaaagaactgaaaagtgaacttagaggaaatttcgaagatgccatcgtagctctgatgacagagcccatcgagtttcaagccaaacagttgcataaagctatcagcggattgggaactgatgaaagtacaatagtagaaattttaagtgtccacaacaacgatgagattataagaatttcccaggcctatgaaggattgtaccaacgctcattggaatctgatatcaaaggagatacctcaggaacattaaaaagattattagtcggattatccacgggttgcagagacgaatccggcgtcctagacgaagaaagtgcctttaaagatgctcaatcattgttacaagctggagaacttctctttgctggaaccgaagagtcagtatttaatgctgtattctgtcaaagaaataaaccacaattgaatttgatattcgacaaatatgaagaaattgttgggcatcccattgaaaaagccattgaaaacgagttttcaggaaatgctaaacaagccatgttacaccttatccagagcgtaagagatcaagttgcatatttggtaaccaggctgcatgattcaatggcaggcgtcggtactgacgatagaactttgatcagaattgttgtttcgagatctgaaatcgatctggaagaaatcaaacaatgctatgaagaaatctacagtaaaaccttggctgataggatagcggatgacacatctggcgact

SEQ ID NO: 8523 - DNA, 1031 bp, Diabrotica virgifera
  SmartBlast Evalue=2E-22; Info=Chymotrypsin-like proteinase 6D n= 2 Tax=Tribolium castaneum RepID=D0R8R5_TRICA
ggtctgactgttccaaattttcaacctgttccacaaccaaaaacttaacctgttccagtgttcccacatatcaaagtctgtccgaccagacaccctcaagctattaacaaactttcagcctgccaccaatcaacttcccctcatacgcgggatccagacctattactttttattaaaaatttgtaagtaaaatattattacgcaagttttatttcttcgtcaatattttcctgaatccacgaaacgtaaggttcagtcttgatagacaacagtgctgatcccatcactccacatgtcaaggatgtaaagtcgtaaagacctactacgactccattttgaagagttggggttccggaattaataaaacatatatcttcgcgtccagtaaaatctccagtgcataacaatgtttgaccaaagtcaggaagtttgtattccagggatggttccactacggccatacacacatcataatcaacaataccggtgtctacagtctctaagttttccacacttattggagtgccgcgtccatctttattaataaaccatcccagttgtgttactttttctaatggtacgtctgatccctgctttggcagtacacctggttgaacggagtctcccaaatctagaggtgtttttagtttcagtagaccgatgttatttggggaatatggctgagaataattgaattctggatgtagtatagctttttcgacctctcgaatttgtgcgtctggactgcttaagtctactactcctgcatttaccctcacatttccacgatatatacagctactaagtgttagaatccaactcttggaaagaaccactccaccgcattgtggaaagcatggcactggtttttggcatgtttcaagtgctaccaaaaatggatattcattttgatcagcgtctcgacccaagactggtgaaaatgccaaaattggcagaactaaacaaaaaaatatgaaggcaatcatattgtaaggtggcaaagtacaaaaccaatactttgcagtttaaga

SEQ ID NO: 8524 - DNA, 1048 bp, Diabrotica virgifera
ttaaacttagatctttcttaaataaaataactttctgaaattgtgtgctacatctcttggaagatgatgatagcattggcttcttgttgttcctttttagatgttcttatcaaaagcttaacagtcggaggcgagtggtcagtttttccgagatttactgatcatcaggttaccctgtgaaaattattcagctgaatttacagcaaattacatcatattttactcgaatcgatttgaagaaattatcatttcatttattaccaataatccatactcttaatactgttcttggataactacttatttagtattcataatattaagatttgaccatgaaatggcaaatgtagcaagaaattgaatgtctactatgtactgtcagtgtataaaacgacgaacgaaagtaacaaaatggtttagtactctaaaaattttgtatctttggatgactggcatatttattttaaatttctggatcaaagagcatgacgtcaataaatttgtaacgtaaaaatactgtagaactgttaaatcgttcaatattacaagaaattagataaatattgatacaaaaatgtacttggcacaaatgtacaaaggtttacttggcagtaaattacccatggcaactctggaaataacagttcccatcatttgtaacgggtagctttgttagataccaaactcaaatagcaaaataaaatttaatcatggcgaaggcatctatcgacaacgctacgattcactgctgatccgaacaaaagatatggttaattgaaacgaaaatacgatgcgttagtaagtatacacacacaaatcaaagagaaagaacgatcagtgcttgttctggattagaggtggactggttgatcaatactcgactcggtaaggatcgggaaggcgtccaatcaatacttgatcgccgcgacaggacagtttggccctaagtcaagattttaagagccggttcgggagccgctactaaataaatactttagaggaagcgattggccttaagtcaatactcttcggctaattccctgctcta

SEQ ID NO: 8525 - DNA, 1047 bp, Diabrotica virgifera
  SmartBlast Evalue=1E-79; Info=Cathepsin L n=1 Tax=Tribolium castaneum RepID=D6X521_TRICA
acgacaacaacgactacaactacgccacgtccattcgaattttctggtcatatcccaaccttaccagtgcacgattttactgctagtgctcctcgacctgtccaagattttgaaaacaatcttccacaacctgtccaagattttagaaataatcctcacccacctgtacaagattttagaaacaatattccgccacctgtgcaagattttggaaacaatcctcctcaacatacacaaaacgttaatcaactatctgcggatttccctcaggtaccagctctgtctggacaaagtttcgaagaggttatagaacaggaatggagttcttttacaacgagatttaataaagtgtatgccagccaagatgaagcaagatttaggcgagaagtttttatcgaaaacagagcaaaaattatgcggttcaatatggattacgccgaaggaagaagaaactttgtcttcaaaattaacgagtttgccgatatgttgcttcacgaattcaataacaactttaacgggttcaatagaagtagaagggaacctgatgtacctttgaaaccagcttcaacattcgtcccgagtgcgaatgttgttttcccggacagtgtcgactggaggatggtaggagctgtcagccctgttaagagtcaaggaaagtgcgcaggttgttgggcttttgccgcggccggagcattagagggtcacacctttaggaaaactggaaagttagtcgaagtcagcgcccaaaatttgatcgattgcacacaaccgtatggaaataatggatgtgcgggtggactaatggatcctgcattcgaatatgtaagagataacaacggtgtcgactcggatcaatcgtatccttatgaaggagtgaacggacagtgcagatttaggagagaggatgttgttgccacatgtactggttttgtggatataggagagaacgacgaaaaaggtttagagatagctctagcaactttaggtccagtgacagcagcaatcgatgccggtaaggagactttccagttttactcagagggaata

SEQ ID NO: 8526 - DNA, 1046 bp, Diabrotica virgifera
tctgtggtggaagctttaggctttgatccataagcttctcactctttgtatcaacgtcaggagtcaaacacttttcatttttattgtcttcaagtttcacttctatgattctttctttaggagattctacgtaatcatcttttgtaccatctgaattttgatctactgacatgacgaatacctttaagttgactttttgtccaggaatcggagtaaatttactagtgtctttctgaagcaaactatcatttaattcagccttgaaagcgtcagtatgatcactaccatccgaatctaacactctaggaggactaccgattagcatatggtttcctaaatctgtaggtatgattggacgctgtatcggcaagtctataggaggggaaatagctgtctctgcaagatagttgacggtattttgatcaacatgaccaggtgatctattaactatataagtatgttctggtgtgtactcagaagctgtactcgtcttccgagatactgttccactggagttcaagctctcacgacatctcagattctgatagatattttccgacaaactggttttcattccatggaactcatcgtgggtaggtgaaggatcgacgtacatagatttgacaaaggtttgtccgctggagtcgtccctttgttgctcgtttagatcgaggtcttggacggcgttgatgacttcctgcgatggttgtgactgagagattcgactgacaggatcgtctccaacggggtcgggtatgatggaagggcgttcacgttttctacggttagtggttgagattcctggtactgtgagaccggaactggagctgcctggactggaggaacatattcttgactaggtacttcagtaatatgttgctgttggatcgaactctgtatgtaatcctgtactgaagcgggttgagaaatagtcgatagtctcctatggtctgttgatgtctcgaaagtagccatcggaggtaaagaaacggtcgaacttcgatgctgttctggttgtttagttgcctgcatgtgctgttgtgcta

SEQ ID NO: 8527 - DNA, 1048 bp, Diabrotica virgifera
agttggctgtcataatgttaaaaaaagtgggtccctacggctacgagtctccattttttatgcttttgacagaactatggtgtgccacgcggctcttatcaacaacaacatgagacacaacgtttatgtttgacggcagccaacgtgttaaggaacaaattgcattttgcaaaagtgatttattatatttatcattttacgaattataatcatttaagcaattcagaatggtacggatttacatcaaatgaacttttcagagaagctgtctctaaatagtcttcgaatagctatgatgattgctagaagaagcaattaaattgtttataactaattcccgtcacttccgatgcaaaagcaggtttgaaattcgaattaagccctggccctagatgattattaataagttctaaatggacattttcctgtttagtcatacattgtgtaaagttaaaaatatgtaaacacaaaataaaaaaaaacaatttattttaataaatgaatttaaaaaataaacttataaaaaaataaaaactgataagccataaaaggaccattagcatctatagagctatgactgaaactaattttgaaattggtgaaataagaatataggaaaaacgaaaaataccttcgaaataagttagagttggacccaaaaaggaaatactttttctatggaaggaagctgtccagtaactctccagtattttatttattaagattcttcggccatagttgtcatacctcttcgtctcaattaattctagatttgatagttcgatgatgtgtgatatatattctccttccttatacattagttcatctactacatcattatgtaatttgtgtactaccctagatctctgtttaatatcattctgaaactattttggcattttaatataatttactattttttttgggaattaatcataattttactttaaattttgtttattttgacgttgaagtggaaatcgaaacgtgaaaataaacgtgttttaaactaaaattttgaaacacttttacttgacgttatttgctc

SEQ ID NO: 8528 - DNA, 1044 bp, Diabrotica virgifera
  SmartBlast Evalue=1E-51; Info=5'-nucleotidase domain-containing protein 1 n=1 Tax=Harpegnathos saltator RepID=E2BZJ5_9HYME
gaaagtctacaatatatggccggatctgctcaatgctttgatgcatatgtttaatagagaacatttcgaacaagacgcaggaggatactttcctgagctaaaatacaacccagatctttattattacaaatgtagcccaaatgttcttaactggcttaaagaattacgagatagaggtaaaaagctgtatctaataacaggtgctcatgcagacttcgctaaccatacagcttcatctacgctgggtccaaattggagggactacttcgatattgtagtgtcttatgccaaaaaaccaggcttttttatgcacgaacgagattttctagtgttgaatgactcctacaaggaaactggaccagcactggagctgcgaaatggatctatttacacacatggtaactggaagatgctaaaagaacatttaactagattgtcaagtgctcaaactccaaaattcctctacattggtgacaatttggtccaggatatctacacacccaatgtccactccggttgtgatactgtgaatgtttgtgaagaactagaagtagaaaaattggatttgtatactggtgagagtcatccggatagacacattttgtcttctagtttatgggggtcttactttgaaatcaaggattcaaaccaaaagactgtgtggtacaatattatgaaaaaccattcaaaaatttgtgttcctagtgtagattatttagcgaggtttcctatcgatcatgattttaaatgtgcgattgcttaggtattttaaacaattgtagataatagttagcatgatccatagaattaaagagttaccagtattggccaaatattgctttatggtgcatgaattagtaggttgatcttttgcattcaataaaaaagtgtagatattgttcgtccgctataacttttctcatgcgtcacgattcattttcaaacaaattaagtcaaaacataaagtgaaacatacgctgatgtgtgtaatttgtctgaaatgaatcgtgacgcatgggaggggttatagcggatgaacaatat

SEQ ID NO: 8529 - DNA, 1041 bp, Diabrotica virgifera
  SmartBlast Evalue=1E-154; Info=DEAD-box helicase Dbp80 n=2 Tax= Formicidae RepID=E2APZ4_9HYME
gagatgggatttaatgctccttccaagattcaagagactgctttacctgcacttttggcagaccctccgcaaaatttgattgcacagtcccagtcaggaacaggtaaaacagctgcttttgttctcgcaatgctgaccagagttgatccctctaaaaaagtacccacaagtgttgtgtttgtcaccaacctatgaattggcaattcagacgggagaggttgcagctcatatggcaaagttctgcccggaacttgagctgaaatatgcagtagctggtgaacaagcagcgagagggagccaaataactgagcacatacttattggaacaccaggcaaagttttagattgggctataaaatttaaagtatttgatctaagaaaattcacgtaatttgtattagatgaagccgatgtaatgatagctacgcaaggacaccaggatcagtgtattaggatacacaaggttttagatgccagtaaatgtcaaatgatgtttttttctgccacttacgaacaagaagtgatggagtttgctgaacatatagttaaaaatcctataataataagacttaaaagagaagaagaaagcttagataatatttctcaatattatgttagatgcaaaaatcagaacgacaaatataacgctataaccaatatatatggtaccgttggaattggtcaagctataatattttgccacactaggaaaacagcatcatggttgtcagaacaaatgtcaaaggacggtcacgctgtagcagtactgtccggggatcttacagtagaacaacgtataaacgtattagataggtttagagagggaaaagaaaaagttctgattactacgaatgttttagctagaggaattgacgtggagcaagtgactattgtcgttaatttcgatctgcccgttgatatgcgcgggagagcagattgtgagacttacttacataggattggaagaacaggcagattcggtaaacgaggtattgcaatcaatctcgttgattccgaagagtctatgaacgtgtgtaaatc

SEQ ID NO: 8530 - DNA, 1039 bp, Diabrotica virgifera
  SmartBlast Evalue=3E-46; Info=Gag-Pol polyprotein n=1 Tax=Lotus japonicus RepID=B8YLY7_LOTJA
gttggatacagtggtgctggttatagaatttggaatccactgaccaagcaaatcaaaatttcaagagatgttgttttcgatgaaacacagtataaatattctccagaaatatcgtcgaataatcaaaatgttgaggaaattttaccaagccaaaatgaattggaaacatttgaacaaattatgaagaaagtacagtccaaacattaagaaacactactgaaattaattcacaagatgaagaaccagtaaatttacaaaataccaaaattacttcctccaatagagaaataaaacaaccttcgaagttcaaagactatgaactttattatgcatattgcttagttacatcaacaccagtaacttatgaagaagcagtagaggaggatgaatggaagcaggcaatagaaacagaactagaatgtcttgaaaaaatgaacacgtggagtgaagccacaaaaatacctcatgatcaacaaatcttaaatacaaaatgggtatttaaaacaaaaagtgatggcacgaaaaaagctcgcttagtcgccaagggttatgaagaagaagtgtttttagatatatattcaccggtagctaagatggcaagtgtaagaattttattatcactggctctcaataacgactggaaggtataccaattagacattccttcagcgttcatcaacggagtgctacaacatgatgtttatattcattgtcctaagggttataaacgacaaagcaaagttctcaaactacaaaaggctttatatggactaaaagaatcacccaaatgctggaaccaacgattcaacaaatgggcaatcaaaattggttttaaaagtgcggaaagtgactgttgcgtttatacaaagaaaaatgtgtgtatgtgtatatgggtcgatgatatcctattgtgcggtgaagatagcgattcgattcaaaaaattattgaaagtttaaaaagtgagtttaatgcaaatctcggttgtgtaaacaactttttgggtattgattttgaatattctgtaaataaaaatgatgt

SEQ ID NO: 8531 - DNA, 1047 bp, Diabrotica virgifera
  SmartBlast Evalue=1E-116; Info=Brix domain-containing protein 2- like protein n=1 Tax=Camponotus floridanus RepID=E2AFS7_9HYME
gtttaatcttctttaatagtgttttaccagtattggtcccattttctttagttataccctttagtttcttcttctttttattttttacttctttaataatggctgtttgggcttcctcattttcaacttcctgtttcttatattcttgtgctttatctaacggatttccttgaaatatatcatcaagcggtctcatcttataactttctgttggcctggtggcttctgcatgcaccttctgttggattctgttgacatatttatttttagcagcaattctaacttgattcctgtaccttgcaggactcatgtaacttgcgttttcccatagagccacacctccaaaactcccagagaatatttttactggatttaatacaaatctaggccccacttccgctaaggctccatcttcagacaatatctgaaaattcctaaaccaaattctattatcaagcacagtaaaagtgtatacatgatcaaaaaatggttggcttttgggatgatgcctgggaactccaaatgtttgagtaagcaattcctttaagagactgtaatgtggtttttctgtgaacacaggatcaaaactaagtattggtctggagcctcttaagcaatttccagttaacttgagttcctccattgtataaacattttgaactaaaaacttcacactaggaccattgggtgtatttgataaccataaatataaatctctcttctttctaccctcaaacatcacagctttattacaattcttcatttcacacatctcattgataacagaaagtgtctttgagcgttccatttttgcctctggtttgtggtgaggcattaacttctttacatcttccataagatgccgatctctatggtttattcctcgagatgcaaaaacgagcactctttgtttgtttatccattttctctttgtatcaactggatcatcagattgacgaactgcaggaggaaccactgatgcttcctcttgggccacgccaggtttttctttggtttttttaacttttcccattttacttatacacc

SEQ ID NO: 8532 - DNA, 1045 bp, Diabrotica virgifera
  SmartBlast Evalue=1E-57; Info=Pancreatic triacylglycerol lipase n=1 Tax=Harpegnathos saltator RepID=E2B986_9HYME
atcaaaatgaaatattgcaagatttatatcagtttaatgttattaggagcgtgccacttgttgactggtgacgatgaacattccgaagatttagaatacttcttgtacgaggacaaagacggcaatcttcaagtagagtatctcctaaataatactgaaccaaagctcacatcttcggcttccgatgtaaaataccttttctttagtaaatccaatcctgacagtgccgtagatattcatagcaacaatctcgagaaattggccacgacatcatttacaccaagacgagaaactatttttgtcatccatggatggaagggaagtcacgaagcagatattaactcacatgtcagagaatatatactaagggaccacgatgtcaatatttttgtcgtcgattggagtccaattgccggaagaagttacacaacagcacagggttcagtgaaacaggttggagagtatgtagcagatttcgctagatccctgaatcaaaaatacagtttacgacttgataagttgaaatttgttggtcattcccttggagctcatatctgtggaaatgctggagctgctttgaatggccaggttgatagaattgttggtttagacccagctggtcctctcttcaaagacaacaacaaagacaaccgtatagacgaagacgatgcagtaaatgtacaaattatccacaccaatggagggctgttgggatattatgccccatgtggagattctgatttctatcctaatggaggaaaatcccaaccaggttgtggaattgacttaacaggaagctgtgctcattctcgggcatacgaactatacgctgaatcgctcactagcaaagctttcgttgggcaacgatgcgacagttattcagactacgaaaagggtagatgtgacggaccaaaaaccagcatgggaatgttccaaattgataaagacgcctctggttcctactatcttaaaaccaacaagaaatctccatatgctcaaggttaaaggtgtttattataataaagaattatattatcaataaaat

SEQ ID NO: 8533 - DNA, 1047 bp, Diabrotica virgifera
  SmartBlast Evalue=1E-117; Info=Phosphoglycerate mutase 1 n=2 Tax=Formicidae RepID=E2AP75_9HYME
gacgcaagtccacagccacatagaagggcacagcgatcaggttatcgctagtaaggtgccccataaccgcaacgaaaaaaaacgtaaaaatactaaataataataatggcaccctttaaaattgttatggttcgtcatggagaatcagaatggaatgaaaagaatctattttgtggctggtttgatgcaaatttaagtgaaaaaggtaaacaagaagccattaatgccggaaaagcactaaaaaatgcaggatacaaatttgacattgcatatacatctgtccttacaagagctcagaacacacttaattcaataatcaaagaaattggccaagagaatttggaaactataaaaacttggagactcaatgaaagacattatggtggcctcactggcttaaataaagcagaaacagcagcaaaatatggagatgagcaggtagctatttggcggcgcagttttgacattccacctccaccaatggaacctgaccatgcttattatgataccattgtaaaagatgcccgatatgctgatggtcctgcaccagatcagtttcctaaatttgaatccttaaagctaacaattgagcgtactttacccttctggaatgaaactgttgttccacaaattaaggctggaaaacagatcttaattgcagcacatggtaacagtttgagaggaattgtaaagcatctagaccagcttactgatgaccaaattatgcagttgaatttgccaacaggaattccatttgtctacacattagatgaaaatttgaaaccaataaagagtttagaattcctaggagatccagaaactgtgaaaaaggctatggaagctgtagctgcccaaggaaaagccaaataagcattatttattatttattgttttaatttatatcaaaatcatttattgttagatatttgatgtgtaatgaataaatggttaggctgaattgtaaaactcagcagaaatgttatgtgcaagacattaaagcatattcttagataagaaaaacatgtctgaggatgataaaatataaaa

SEQ ID NO: 8534 - DNA, 1029 bp, Diabrotica virgifera
gcattgctgtgcagagtgtttaacgggttatgaccgtttttgtttcgaggtcactgtgagattggcaccctgtatacaaatattcgtcaatgatgtgaattggacttaatttaactacagtatattgtttgtcttattacataaaacaagttattgtctacgaattgcttctttgtatacagggtgttggtctcatagtgatttcgaaatgaaaatggtcataacttgttaggtgctctgtatagtggtgcaaagctctatattgtgtgaacaagagttgtgaggggaatgtaaatgtgaaaaaagatatagggtgtcccatgcagttactgatcaccctgtagaagtggacatattttccgggcgtggagagtgtcatttcctacatttttttttaaataacttttctcgatgttttatactataatggagttatcgaccgatccctcactaaaaactcaccctgtatatttcagacaagcaatccacgtgagaagggcccaattccatgtgggaagtcatatgatgtcaaaggctatatctgtaagaatttcatctatcgcttgaatttattaataataatgtaactttgacatattttcataacatttaaagggtttttacccatgtatttttggtggctcagcatatatgattggcctgtatcagcactgatgatgatctgtttagatcgggaacgttctgtgatttggatgtggtcctttgagggtttttagtaaatgtgtgccttttataaaggatttttcaataaaatttttgttcattttttattacttacatgaccgtattgcaacagactttactcgtagaatttaagaaaccgacgaagttcagagaatgagagaatccttttgggttttgaaatattccttattaagtatagtttagtagcctatgttatcattatcagcattttttattgttgtaatatttttacaatgtacataagggaccagagtagcttcgcaaaatttatcttgatgtttgtgaatcgttgttgatgtaata

SEQ ID NO: 8535 - DNA, 1035 bp, Diabrotica virgifera
  SmartBlast Evalue=6E-56; Info=poly-(ADP-ribose) polymerase n=1 Tax=Tribolium castaneum RepID=UPI0001A4719F
aagatctaaacaccaataactgttccttccggtcggccttaccaacaactgctaatttataataactattccttccccgactgaatgtcagtcaaacctaaaatggcggtatatttatcgttgccactttggtacacatgggttgtattttcgagcccagagtctggatcaactgcagttcctcctttgagcttcaacttgacggattttggtaccgatttggtgtaaatgctctgcgattttgacttagagctggtggacgctggctgtggcaggcggactgtaggatcagttccccaactgcaaatactcttcttaacgatcagatctgggatttttccagttttgcctttggccactttcaagaaatcttccgaacagcatggattccttcagattccgcttcttgcattctactgcccagctttccacttcctctttcgtcgtaatgacagccatgacggttttgtctattttggtaacgactttacctcccaaagctgtcacttctttctttatggcttctttgcttttacccgaaagtccaaggatgacgaatttcatttcgtatagaggtggaagctctctcttaacacgtggctcagcattttcttcttctttctcttttttaacaccgttagtaggaacttttactttaataattctattccttggtttatatttatacgatttcaagaacgaatagtgttgcaagtcgtcgggtatcttgaaaggcttccgtttaggctccatcactgtcttgttacattttgtccagtctgtaagatcacccttacacacgtaacctgcgctggaatacacgaactggcctttgcatgtgtcgcatggaacgagggctccgaaggtcatgatgtctgccaagtggtccaatgtcttttctctgcctttacaatgtgcttggccattgtgttccagcaaagccgtagtgagtttgttgaattcacttccttcgtactggctaagggcatcccggtatttaaacagtaatttgttctgcttgcggtactcctcatc

SEQ ID NO: 8536 - DNA, 1043 bp, Diabrotica virgifera
cgttagatatttccttttattacggtctaagtaatgtcatatctaactgatataaatttaagtcgtcgaaagaacaattgtttttttatcaaaccattttataagaatttacactataatatactgactacatatagacatttttctccaaaagatcagttgcagtggattgtttagctgtcactaacaaagagcgttgataaaatttgagaaaaaactttgaaaatactcaaaattaaacaaattactcacactaagggttttgtaaaatataaatagtaaggtctactatgtcatttttgtttacagttttggtttgtttgcgcattttcttaattatttcttacgaaactaaaaattttattgtataaaacaggtaggaccaattatgtttcctttgatgcctaaacctggcatgtttatcttttttccttcctcaatagcgttacaggtgccacttgtcagttctgattcccgtcaggattgcacgtccttaatcatctttttttttctatcgttgcccctgtaaagctttctacaccatattctattgtctactgcttctattggcaacctgtcctaacccgtcttcactatacagccaagcgatttaaatttgttgggactagctaattttgagatgtttctttgaacagttcctaaaagctatattatatcccttgtatgtgtctggatctccttaacctattttcgttggttcagccaaatatctgcacgattttgctttaaaacatttatttatatattataattactttttatttgtctttatcgcttatatctggcatccataatctattgatcttctaatgtattgtgatgccatctgttttcattattattttttgagtttctgcttcttctgttttctctaattgtatgtattttttagatttgtgaaagtttttactgcttcagcattatctactagtactctaatttggtatgcttatttttttatcaatatactcggcctttcttttcagtaagtgtatatttttttcaatttttgcttgtcttat

SEQ ID NO: 8537 - DNA, 1042 bp, Diabrotica virgifera
  SmartBlast Evalue=2E-31; Info=Glucosyl/glucuronosyl transferase n=1 Tax=Culex quinquefasciatus RepID=B0VZ91_CULQU
cagttgacccaatgcattaataatactgttctttttatcatctttaaggttagcggaatgtatatttgttccaaaaggacattaagattacaccatctttggtgttgtccattatattcataaattcttcaggtaattttttggccggggtaatatgtaatccccctacaggtacaatatttggagccaaaggttgcgcaggatgaaatcctggtatggtgttacataaaaccagtgatacatgattagtcaaagaatccagtggtgctaagtctttcccgaatcctttagttgcatattcttttattttatcattcagatagaaatctcgcagaagagtgtccatctttaacaaagcaaaattccgcaatcggtcgaaaaatgtaaattttccattgtggtttaatacataactagctatataagcaggctgaacatcacttccaaatgtttcagctaaaaatgctggcaaaagaaatggtgttgttacgactgtcggcggataattgaaagcttgtatcaaatacagtaaacaagggctaagggagtactgaactaagagtaaatcaaaagaatctctcggatatgacaatagctttgagaaccctttactttgtactgtatgttcgcatgtgaaagttccccaatggtgatacaataacagattttcaaaatcgttattttcgatgatatcatttaaattaaaaacttcttttactctatccaatagaccttcaatttgaattgtatggtaatttttttgaccttgtccttgtttgggaagaggactaaacatcgtcacgttgtgtccctttgccactagtgcagccgctagctcataattccatatttcatggcttggacttggcacatcatatgcatacagtatatttagtgcaaatgatggaacatagtttacaaccagtattaaaaatataagcacgaacttcatgattaaaatacgactgtgtaagattctttaaatcatccttaatttacccaatcatttcatttagtttattaaccttgaggaccattgcgt

SEQ ID NO: 8538 - DNA, 1035 bp, Diabrotica virgifera
  SmartBlast Evalue=2E-45; Info=Pol protein (Fragment) n=2 Tax= melanogaster subgroup RepID=Q18LA1_DROSI
agagccatagtgtactttacaaatatagtgaacgcgatattaagatataaaatattcccaaacagatggaaagaggcccatgtcatcatgatcccaaagcctggcaagaatcacacattcccacagaactacaggccaatcagcttacttccagcgatcagcaagatagtggaaagagtcatcctcagcagactgcaagcggaaacaacccgactaaatatcatcccagaggctcaattcggatttagagcagagcactccagcgaactacaagtcctcaggctaaccgagtacatagcagccggtttcaatgataagcagtacactggagcagcgttcctggatgtaagcaaggcattcgacagagtctggcacaaggggctcctattcaaaatgcgggattacgggtacagcggagcgatgacgaggctaatctcgtcgtacttaggcggccggagttcagggttcggataggacaagtcctgtccgactcggaagcccggaggctggagtaccacagggagcggtcctgtcacctctgctgtacacaatatacaccgcagatgtacctagaacaccaggtaacccttatgagcctctacgccgacgatacagcgatagcggccaaacacagaaatgtagacatagcagtgaccaacctgcaaacagcgttagaagacatcgaggaatggagcataaaatggaagatagccatcaactcagagaaaacgcaagcggtactatacaagaaaggtaggacaacagccagaagaacaagctgacggtgcagaacacccccatcgagtggaaagacgaagcaaatacctaggagtcatcatggacaaaggattaaccttccaaaaacacgtagaagccacagtccagaaggccaacttcgcgagagcaacattaagaggactcacaggcagaaaaagtaaattaagactaaaaacaaggttaagactaataaacagcataatattaccggtattaacatacgcatctctcgcatggggacaagtatgtaaaacccac

SEQ ID NO: 8539 - DNA, 1045 bp, Diabrotica virgifera
  SmartBlast Evalue=8E-35; Info="CG3884, isoform C n=5 Tax= melanogaster subgroup RepID=C6SV36_DROME"
tgtttaaaataatttatttatacaaatcatctaatatatctaactcacatattatattgaataacttgtattattttatgacaatattttgtagcaatttttgtataccatatactaaactaattggaaagtctatgtaaatagagaaaaactagttcctagaaactaatacatcataagcggcatatgctatttctcttccgtcgaatggtatataacaatttctgtgacttggatgtatcttgcccacagtttgggaatgttgatgcataactcgtccgatgtaaagcttttcgccattaacagttctaccaccttcaattgcattatgcggcacttgtccaccaaatcctggaacccaatgtgcagatgtatgagataaaacctgaaaattagttttagcatattcctttccatcataggaaacataacagcagcgtcgtcccggaataactttggccggcaaccaatcaccttcatgaaaggctctaccaacataaattggttgcccatctatatcggtaccacccctgactgcagagttaggcatcggactgtgaagatagcagtccacccagattgcataacttgaatgagatggtccatggtgggttggtggccaatttgaatttgttggcggttgtggatatgttggcggctgtggatatgttggtggttgtggatacattggcgctgagtttccattgtaatagggattatacgcaggaggtgctggataagaagggtaacctgatggtggtctattatgggaatgatgcgggcaagtggcaggttgtgacggatagttggtaacgttcctctgacattgttcacaattatgtgttggatattcttgtttaaatccgtaaccagccatattaatttaacttgattaacacaagtaaaccaaaaaagaaaatacggttaaccacactcaattgtcgtgcgcactatgtaggtatttgtagaatataatagactcggatgatacgttatcagtagtttatctacataatatttatatttctactcggaattgatgttt

SEQ ID NO: 8540 - DNA, 1040 bp, Diabrotica virgifera
  SmartBlast Evalue=3E-45; Info=Putative acid phosphatase 1 (Fragment) n=1 Tax=Diaphorina citri RepID=Q0PWU9_DIACI
tagtcttctcatcaacaatcatgattccatttatattgctttctcttctgtattgtgtgcaagcaaatgatgagagtcttgtagcagtacatttgctctttcgacatggaaacagatgtcctgaaacgtcaaatttgtacaaatcgagcccatattataacgaatcctattttaaacctttcggctttggccaactaactaatgaaggaaaactgaaagtttataatttaggaaaggaaattcgtcaacgttattcaggctttttagacgaagagtatagcactgatttaataaatgcacgaagtagtgcttatcgtagaagcaaggagtcattactagcaatgctggcaggattatttccgcctaccaaggatctaacttggttacctggatttaactggcagcctatagcatacgaatatattgaaaaaaattccgacgaggaaatgttctgttttggatgtcaaacatggactgcgacattcaatgaattcatagcttcacgagattataatagcaaatatgaccagctattatcaactctcacggaaaaaaccggtgaaccctataacaatttggcgaaaccatattttttatatttcggatttcgaatgttgactgaacttaattatgccctaccagattgggcacatgatgtttatccatatccattaaagaatttgacattggatcacaatgtcatggttacaggatctagaaaactacgacaaatgtgtggaggatatctattaaaacgtattcttgatgatactcggtcaaaaattgatggtaaattatcggccaaaaaaatgtttatatggtccggtaatgagaataatctcgtatgtcttctacgtgttatgaatcttttgaaagacgatacgattcctaactacggaagttttattgcacttgagcttcataatataaattccacttatggttttaagatttattttaagaacgataataatgaaccagaattgttaacggtaccaaattgtgacagcttttgtcccttggaaaagttcgaagattta

SEQ ID NO: 8541 - DNA, 1038 bp, Diabrotica virgifera
  misc_feature (988)..(988): n is a, c, g, or t
tatctagccagttgcgagtttagcgaaccgactatatcattgatatgtactgtcaatgtaataattaggaaatggttattatcggtggacgtattttatacaggtagttatattgtacatttatatttaacgatgttatatctttaatacaatataactttataaaataagcacaatataagttataaattccaataaacacaacaaatgaaatgaaaagtcactgaaaatgataaacgtcaaaattcatagtaaacaaggtatcaaagacatgccatgttgtttatccttgattaagttattgtggtttctacggacaagcagtttaattttgcgatactagtttctgtgagttaaaaagagacctagtataaaaagtacttcatgaataatttcatgcatgtgcaaagatataatggaggaactatatatttgacactattatatactatatgttgaggatcaggttgaggataaaagtgcttctttaattattagatacaactacgcaacgatttcatatagtatctattaaaaattattcattacaaaaactggattgagagcattaaataattttttctattttgtgtcattaaataattgtggttgaaaagtcatttttgagtccgaattaagtccaagatattttgcttccaatttaatttctaggtattcattattaatagaaaacgtaatgttgtttaatgttaacaggtttttatcagttatcacccttggatttaaagttaggttgtgtttaagagatatatcataaactttatctacacacaactgcaatttgtgaacacattcgcccatgttattttttgaaagtaaagcctgatatcatcagcgtaggcatgaaactctgtcaaaatttggtttaaaatgtcagtaatgtatattagaaggaataatggtcccaatataggtccctgaggcactcccgtatgaacgaaacaagaatttgaacaacattcattangttgtctaaaatgactataaaattgactaaaatctgtcaacgtatcatga

SEQ ID NO: 8542 - DNA, 1042 bp, Diabrotica virgifera
  SmartBlast Evalue=5E-87; Info=Probable multidrug resistance- associated protein lethal(2)03659 n=1 Tax=Harpegnathos saltator RepID=E2B3S7_9HYME
taatattacagatatggagatgctttttgtactatcaagtgtgcatgagctcatctaaagcattacacaataaaatgtttcataatatactccaagcaccgatgagattttttgataccaatccgtcaggtagaatactaaatcgtttctccaaagatatgggagctgttgacgaattactaccaagctgccaaattgatgcgattcaaattttgatggtttttgttggtatattggtaatggttgttatagtaaatccttggatgatccttacaaccataattatcggtccggttttgtttattcttcgaaaaatgtacttaaaaaccgctcaatcagtgaagagacttgaaggaatctcaaaagcgcctgttttctcgcatatatcagcatcactgtttggaattaccactattcgggcatccaacgctgagaaaatggtcactacagaatttgatattttgcaagatcaacactccagtacatggtttttgtttttggtcagcggaagagtatttggattctatctggatgttatttgctgcatatttttggctattgttacaattcagtttttactttttagagacgagaatacgttgagtggaaacgtaggtttagccatttcccacagctacatcttaactggtatggtacaaatgggtatacgccagagcgtggaagtagccagtcatatgataagcgtcgaacgaattttacagtataccaaattagaaaaggatggtgtatttgaatcactgcctgctaaaaaacctccccgagactggcctaataaggggaagattattttaagaatactttcttaagatacgcgctcaacatgacaccctccctaaaagatttaagtgtagacattaagtctggagaaaaggttggcattgtaggtagaactggtgccggaaaatccaccctaattgcttcattgttccgcttagcaccggtcgatggtgaaattattatcgatgatatagaaactggaggaataggactacatgatttgaggacaaatatttctattatt

SEQ ID NO: 8543 - DNA, 1043 bp, Diabrotica virgifera
gttcgaattcttcaagtgcaagtacctatacagtttagtagtgaaaaatagtgttcagcggcaattttaataggtaaatctaacattaaatttgactttttgtggtttgtattgttttagcgttatggagacagatactcctcaaactgcagcacccgctgtgacacagatacctgcagagattgaggctataattaaagcaacagttgaacaaactgttgctactttaatggaaaaacggcttggtaaacgtaaacaccgcaggtccaggtctagatctaagagcagaagccgttccagatctcgtagccgtggtggccgttctagatcaagaagcaagggtagatatgacagatccaaaagtagaggtaaacatgacagatcaagaagcagaggtaggcatgacagatcaaaaagtagaggaagacgtgacaggtcaagaagcagaggtaggcatgacagatcaaaaagtagaggtagacgtgacaggtcaagaagcagaggtaaacatgacagatgtggaagccgcggtccctgtgaaagatttggaaacaatagagacgagtggaatggttgggtaggttttggacacccaccgcatcatcatgatcacttccaccatcatcatccaccgggttgtttcagtgaacattttagacctcatggtagacatggtagacatggtaaaaggtttccatttccttgtggatgctcttgcagctcgagaaaagaggaagaacaaaatatggaaagtgaaaaggaagaacaaaatgttcaaagtgaaaaggaaggtactccggccgccgataagagtttaagagaaaattttaaaaatttggaggtggataactgagctaactaatggaaagatgttttatatattttaggtgacaaaaattttaaaagactgtggctgtggagtcaaccaaaaattaatataaaatattgtataaatattcgcattatcagtatacatttatgggtagaaaattttatggttacatgtaggaataatttgttttataataatcgatatggtatat

SEQ ID NO: 8544 - DNA, 1043 bp, Diabrotica virgifera
  SmartBlast Evalue=2E-59; Info=Trypsin-like serine proteinase n= 1 Tax=Anthonomus grandis RepID=Q64ID1_ANTGR
ggatgaccttttaatagtttttcaataaactttttataccattgtacaaacgaagtttttacttctctatgattaatattcttttattcattttagttcataaacaaacgcaaaacattttagttgtatattatagaattaatataatcgacgaattcaggtatttttgtaaacgctccaggtctcttaggtgctgcacatattgttccccatgatactagtccaatttgaattccagatactacaagtggtcctccagaatcaccctcacaagtatcttttcctccttgctcgtaataaccagcacagaacatcctcctggtaacccatccagggggataatattcagcacatgtctcggtagaaattacaggtaacataacgacttgtagctgatgagaagctggcatatgctctcccaaacgaccccatccggtggcatatgcttctaaaccgtcttttatttgcgttccagcagttgctagtgcgattggactgactccgtttccaaaggttaaaggtgttgcaagacgaaggatgcttatatcgttgtcgtatgtgctgtcgtcaaaaccatcatgtacaaagatttgatctacctcgtagactgtgccttgctcgtctctgaaggaagagtttacacgtacggtcagcactgatttcgtgacatcataagtacaatgtgctgctgtcaaaatatagtatcgattgattattgaaccaccgcatccatgttttccgtaaaagagaattgaaacttggtacggataatcctgaattagagcatcttgtcctccaactattctaagagcactctttgttctgttcaaagctgctgaatatccttcaacaataaacagtgcaaatacaaaacataaagttgataagattctcatgattagatgaaatgttgtatatcacagagcataatcactaatagaacaaagtgttggttattccacaatttattaaaaattaatcataatcagattacagttttatatcatatcaattaaaagtgatatcggtatctttatgactac

SEQ ID NO: 8545 - DNA, 1045 bp, Diabrotica virgifera
  SmartBlast Evalue=9E-79; Info=Ubiquitin-conjugating enzyme n=2 Tax=Endopterygota RepID=Q2Q469_BOMMO
cttaatgccaacttataatgatgatctctagattttatctagtgatgatgtctgtccttttaacatctagatggtcatgaaaaattgaatttagcttatataaataataaaagcaacaagctttattttccagaatgacaagtggcttacatccctttggtattgactctctcaaatatatagtaaaactcatcaaagcagtgtatgcattttctacctcctatgtaacgtgaaattcccgataaacctcacgtcagaaagtgactagatttctttaaaaaagcgatacctgtacacgtttaaatttaacaaaacaccatttgaatccctaaactgtataccacacggcaatttcattcagtgatattcactaattatgtacaatttttttaatcagcgggtcttttctcactgtgttttttcgtatattcttcagcgtttttcgtaaactttttcttatccttaatgtattcttctgctaagtctcctcggagtggatgttcaggttctggttcattaacgagggcgaccaaagcttgaataacttgatctgttttagtagcaggtttccaatgctcagcacttatgattggtaaacatacttgtcctttttcatctatgtttggatggtaaatttttgttttaaaatttattttaggtggcttaaaaggatattctgcaggaaaatttatttctattttaaaagctcctttattgtagggtggattgtcaggaactataagtccttgccatgttaaaatgttcgtttcatccacttgaatgtcacggaatgattttaatccagaattcctaatatcgcctagttctttttgtaatcgtctggtggctgccattttgctaaccttcggcagttccaagtctaaaatatatttacaaacttatgacaaattaaataagaaaacgattaaattacagttaatttaaccattcattaacaacaacacttataatatagagtttctttcatcactataaatttttttgttctagatctcagaaatttgacacttcttgctgacaaaac

SEQ ID NO: 8546 - DNA, 1037 bp, Diabrotica virgifera
  SmartBlast Evalue=3E-84; Info=Budding uninhibited by benzimidazoles 1 n=1 Tax=Tribolium castaneum RepID=D6WN27_TRICA
ctcagactaacagagactgtcaactagaacttctgcagcaaaaagagaaatgggaaaaactaatcgaaacgtacactggagaggatccactagagaattattataaatacatttcctggatagaacagacattcccaaaacatgggcatgaaggcaatttggtgctattgctggaacagtgtctcgccacgtttgaagctgatcggcgatatgcaaatgacagacgtttctgtaaactttggattaaatattttgatttgcaaccaaaaccgttggaattttatcacatgatgaaagccaaaggactttgtacaggatgtgctgatttttataaagcttgggcttattatcatgaagctgctggagattttatatccgcaaacaaagtgtttgaagaaggaaaactaaatttagcgcagccgtttgatgaactcgaaaatgcacatcaaaatctagtattagcagccggtcaacacatgctgtatggtcctaatgctaacgaaaaccatctaatagaaaagaggcaagcacttacttcacttcatacataccggtctgggcgagtgtctagcgttcgagtacctagcagtaacagcgtagtaacagttccatcaaacaggtcatcatcgtctagatcaaatatggtagttcacatccacgaggacggttcgggggatggggcagccgcactacccgaagctgcacccgtaagcataattgcggcggtaaaaagacaagagatcccaaaagaaaatacgcttaaagcgggcccttggacaaacacagttcccgtcaagaaaagagttattggcggttgtgacggaaatctggcagcagggtttacagtacacgaagatgttatggagatttctaaaggtatacgtctccccaaaaattatcccacggagtgtcaagaagattattcagaatgggttattagcatttgttaccctgaaccgccgaatccagcatgttatccaatgtatccaaagcatcgcgtttatggagaaccgaatacagagtatagtattgaggag

SEQ ID NO: 8547 - DNA, 1043 bp, Diabrotica virgifera
  SmartBlast Evalue=1E-72; Info=N-acetylneuraminate lyase (Fragment) n=1 Tax=Harpegnathos saltator RepID=E2BFR7_9HYME
ataatattgaaattatttgaattttatcacagtaaattagtggctgcagtgaacactcgccaaggcttcgaaaatggtttcctttacgtatagaggattatgtgccccagttttcacaatcttcaataaggattcatcggtcaatgtggcaaccataccagaatatgcaagattcttggctaaaaatggaatcgatggagttttggtacatggaacatcaggagaaggtgtttcgatgaccgtcgcagaaagaaaagccgtcgtagaagtatgggcgaaggtagtaaaggaaaccaaacaacatttaatggtgcaagttggaggatgcccattacccgatgctgtagaaatggccaggcacgcagaatccgtcggtgctgattccttactttgccactctgaattattctttaaaccaacaaatccaactgaactagtgaactatttgaaatatgttgcagctgctgcacctaggaccccacttttatattaccacattcctggatggacaggcattaacattaatatggaaaagtttataacagaagctctacagaaaattcccaactttagaggaattaagtatacatctacagatttagaaggaggcattgcagctcgtagggccagcggaagccagagtgcggtattcttaggtgcagatacattattggcaagcgcatacactatgggatatgattcagctatcgccaccagtttaaatatgatgcctcagcatgcaatcaaaatagttaaagcaattagagaaaataacattgacgaagctaaaagattgcaaaaccttttaacagatgccgttaacattattattaaagatggtgcttgggtacctaccatgaaagcagcaatgaaccttttgacacctattaatgttggccaaagtagaccaccacttgtgaatctaacccaggcacaaactgacgatatggaacaagcattgaagaaattaggtcttttgtaagcgtacaactctattttaagggtttttgttattgttactatcaaataaagaaactgacagc

SEQ ID NO: 8548 - DNA, 1043 bp, Diabrotica virgifera
atatctttaatctttatttaaaattaaacaacaaaaccaatcaaaatacaaaggtattgaacacacaaattgggaatggttctttaactactgatatttaacaaaaattgagcaaaatactgctataaacacaaaaatatcacaatatttcagaactacatttttaaatgaatggaaatttttaataaaactagtactactgatgattttgttctacttttacagtagaaagagtagctccttactcgaaaatcattaatagctgaagaaatataacaccttatttttaatttgggagcactgctgtgtgccataggtgaaaataaaatcaaaaaatagttagtacttgtgattttaagcaaaaaaatgttgctttggcgaaatctagcaaagataggtatacagttaacaaatacagttggtaatatttctttttttttatagtgcattttaaaagaaatatttatcttctattgcaaatacaacaaaacaaaatatagcgagaacaaaagattgatgataaaaggtaaagaaaaaccaattactaacagtacttagtgttgtgaaagtgtagaaattgaagtaaaagtaaaaattccggacaccacggtggaatgatatggaaaaatatccacaggggagtcacacgaagcaatagaataagaacatgaaaccggaagacatttaggcaactaacgaggactttgttgccttgtttaatataattataaatacagggtgtccccgaaaatagtgcgttcctaaaggtataggtagaaggcaccatgtagagcaaaaaagtcataacatccctttctaaactcagccgtttggccaaaaaacaaaaataccttttggaatgcaaattgaaatctgacaactatgtatacaaaatctaaagatagacacagtcacaattgccgcatgggcctttagtatttacattaaaacctgtctttttctgaagctattttcttgtggcatttttacaattttaactatttagaatgggaaacaagccacaatattattaaaaatgattt

SEQ ID NO: 8549 - DNA, 1034 bp, Diabrotica virgifera
ataccttatcttaaaataataataatgaaatattagataatagtattggagataataatataaataatactgaattaaatataaatttgaatgaaaatattgataatactaaaacaaaaattaaagacttacttgacttcattgaaggtgaaatggaaataggtaaaagattaagtaaaataggaaaagatgatttaaaaaatagaataatgttattagcaatggaatatggaaatatggaaggacaaataaaaatattaaaagaagaaaataatagacaaagaatagaatatgaaaaattaagaaaaataacacaaacacaagaaacgaaacaaacatatgctgcaataacatcaaaaccaataaataataaaactgaaaatcaaaaactaatagagacacaaaaacaaataaacactctttttataacaagtgaaacagcacaaactggaagaaaagtacaagaagaacttacgaaagttctagatccagaaaaaataaattaaaataaacaaaatgagaacatcaggaagagtattaataattgaaactccaacactagaagacattgaaaaataaaaataatgaaaaaataaaagaaaatttaaatgtgaacttccaaaaaaagaaaaccactagtaataatgtatgatttaccaagcaacgaaaaagaagaaattatattaaataaaatatatactcaaaattttgaaaatataacaaaagaagactttacaaacaattgtaaattaaaatttaagacaggaccaagagagaaatctacggtgcattatgtattagaagtatcacctgatatagaaaacagttaataataaataaaacatatgttggttttacaagtgtaaacacaaaagattacatagtggtagcaaaatgtaataaatgtaatgatctaggacacgtaagcaaacactgtaataaagaaacaacatgtaaccattgtggtgaaaatcacgaaagaaaaaattgtaataaaacaggacagccaaaggtatgcataccttgcaaacaca

SEQ ID NO: 8550 - DNA, 1031 bp, Diabrotica virgifera
acaaaggctatagcgggataagatggtcaaaaatgcccccgcactgatcagccccgcgacttgggctttcgataaaggatataaaattatgctttcatacaaatcttagcctcccagatgccatagaacctcttgaatcgagaaaataaagttttttggtttttagttttttcgatttcatttttttaaagcgcaattttgctttaaaaggttcaagaagatgtatctgttgaatacaaaacagtttgattttttcagatttttaatttgaaattgggctgaaactctaactgactcttttgatcatctccactctatcctccaaatttaacgccctatcaagaaatcactcgatccttcccatcgacaattctcgacccaattgccgacttaagttcactccatcaatcaaagtcttgaccaatagaaaattgtaaattacgctctagattaatccctctggcgtataccaaacagctcgaccaatcaccaaaaaaaaaacaaacagatctcaatatttcgtattacctacttttctcatagaaaccgctgatttggatgtatttacaactaaggcccattttcatatcgtcagcaatactgcacgtgcgaacttattggattaacataaacaactcggaggcacttatcaacattgcagctctagtggacagaattcagtctcaaaaaacattaaactcttttgataattagccgaaggcaaacaaatgctctacttattaaagaattatgaccaaaatccttttgacggcattagataaaataaacataaaatggtccctcagacgaaaacagatatgatattcacgctaaaatcctgagaacgtaaaatcgacaaaatacacaatatttaacatcgtgagaaacgaaagagaatcagatgatccaattccacacaatcacagtacaatttgcgaaacggattcagcatacagggtggaacaaaaataatactaggggcgtacttacggtcttaacacaaaaaaataaggggtgatatatcaatgacc

SEQ ID NO: 8551 - DNA, 1040 bp, Diabrotica virgifera
  SmartBlast Evalue=2E-71; Info="L-2-hydroxyglutarate dehydrogenase, putative n=1 Tax=Pediculus humanus corporis RepID=E0VP15_PEDHC"
ctgttgacgtgacgcctatgtaggtcgagttaaatttttatttgggcaggtctagaactccaaattccagtttgccacattttttatcaataattgttactaaatgatgtgattaagtttagaaatattcacctagttttctttttagttttgtattatagttatttgtagtgataacaatttttaaagttgtgaatatgtcgataattttaagtgaagttgcgttcctgaaatcatggaaatttcctgctaaacaattattgcacacaagaacttttgcatccagtacacttacacaaagccaagattcgaataattatgacatcgctattgtcggaggaggaattgttggagttgccacagctagggaaattagtaataggaactcaaaattgcgcatggcaatacttgaaaaagaaaaaacacttgcaaatcatcaaaccggccacaatagcggagttgtacatgctggaatatattacaaacctggttctctgaaagcgaagttatgtgtagaaggtttacagttatcctacaaatacttcgactctaaaaatattccctataagaaatgcggaaaactgatagttgcaacagataaatcacaagttgaaaaactacaagaacttcataaacgaggtatagaaaacaaagtaccgggcctacaatatttaaaaggagaaaaggcaattcaagaaaaagagccactttgtaaaggtttagaagcattatggtctccggaaactggaattgtagattggggtttggttactcagtattttgcgaaagattttcttaatcaaaaaggagagatatataatgattttcaggtaaatggattccaagaatcaggagatccaaactatccgattaaagtaactggaaacgatcaaaaaactgtaaacgcaaaatacgtacttacatgtggaggattacaatcagatcggttggcagtcatgtctggctgttcctcaaatccaaaaatagtaccattcagaggagaatatttgctattgaaaccggaaaaagccgcacagatt

SEQ ID NO: 8552 - DNA, 1040 bp, Diabrotica virgifera
  SmartBlast Evalue=3E-45; Info="Glucuronyltransferase-S, putative n=1 Tax=Pediculus humanus corporis RepID=E0VA90_PEDHC"
gtgagttctcctattgttaaacatggagtttttactggtttttacgacggatggataggtggtaggaaatttgctgtggatatggctggttttgcagtttctgtagagtttctgcacaaacgccctaaagctaaaatgcctttcaagccaggatttgaagaagacggatttttaaaaagtctgtctcctttcgagcccgctgacgttgagttacttgcgtctaactgtacaaagatcttggtatggcatacacaggcaaagaagaatgaaccgtcgctgcctctagatatggttaaatataataattcaaacctcgtaatgctcaaaaaaattctagtctaatctggcattgtttatatttttaaaatattgcgcaggttatttacttacgaaaatttcacgctatttaatggcaaattgtttggaaagtccatttgaattgtacatagtgcataaagtaatttatttttttataagaaaaattatttttatgttcattacggtgacaaaagaacgtaatggcgcaagttagttgttttagacgttgtgcacctttacaatacattattgaagcaatattttttattaacgaacgaactcagtcaaaagctttcacgaaatgtgcaaaaattattatttgcacaaacttcactatttatatgtttcaaaattttaaataagccacttaaactaatcgtaaactatgacacatttcaatatatcatattcaaagtagccataattatttcatattgctataaggagtggaaacatggactctcgaaattacaagtatgaggcgtatagaagccttcgaggtgtgggtttttcgaaggatgctgaagatctcttgcaaagaacatgtgaccaacaacgagatgctgagaagaatggggacagagagaactcctaaatattgtaaaaaacagaaaaacggaaaaaattctaggacatatttacagaagagaaagatacaactttttacgactcataatggaaggaaaagtggaaggaagaagaggtccaggaagaagaaaatg

SEQ ID NO: 8553 - DNA, 1041 bp, Diabrotica virgifera
  SmartBlast Evalue=5E-58; Info=Cofilin/actin-depolymerizing factor homolog n=14 Tax=Diptera RepID=CADF_DROME
ttaatttataaatgaagctttattaaatattcaaatacttatataaataatacacctcggtaggtcggtgcgtgagtagacagtcgagatacaaaaagaaaaataataaaaataaaaggcgttactgacgatcagtggatcgtaatttttcttctaccgctgttatactcgcttccgctaaatctgtcgcttggatagatttctgtattaccaaagcttttttaagatattcgaatgagctagcatacaccatcttctttttgacagatgcagtttcaggacaccacgacatcaggaataacttttgtttcttggttgactctgaggttccctggcactggtgcatgtattcaaaatcgaaaagtccataacgacattcattagcacctccctcttgcagtttagttaggaaatcatcatactctgcatttctttctcctatgtgttcaacatcaatctgtttgccatccttgatgtagaaaattgcaaatctgtgttttttgtcccttttgatttcttcatggacctttttgcaggcatctgctacagttactcctgatgccatatttgatttatttcctaatacgaaaactgtacaactacaaaaactgaacaatcagaatcactgaataaaatcgactgtctgtcttcggagatctgttggggacgttgtcctaccggcagctgggggtacgcctgcgcgagtcaattttactacgccaaaataagtcaccgatattttttctagaaactacgttaattcccagaaatattttcaattattaaatcaccaaaaattaaatagatttacagcaaacgtcaccacaactatcaaaatgtttccaatgtcaattcgaactattttttcatgcgtacgaaatgcgccagttttgaattaaacaaactttttgaatattatttataacattaataaatatatattttttagctcaaccgcgactgttaataacaaacacagaagctattgttttatatatgctaaaatgataacaatagctttaagtggtgatatgaacaaaa

SEQ ID NO: 8554 - DNA, 1031 bp, Diabrotica virgifera
gagaaatttgtgcaccccataaaaattttatgggggttttgttcccttaaaccccaccaaacttttgtgtacgttccaattaattcattattgtggtaccattagttaaacacaacgtttttaaaaacttttgtgcctcttagtattttttccataagcgagtttttatcgagatgcggcttcttttttaatatatttacatacaaattttatgggggttttgttcctttaaacctcccaaatgtttgtgtacgttccaattaaactattattgtggaaccattagttatttcgatatgtgaaaaaagatcgattttcattttgtaacttcaaagggctgtaacttatatttgaccccattaacttatatttgtaacttgtatttttgaccccagaatctgtggtgtaatttgtgaccaatcttttcgggacaccctgtattataatatatttttttgttgtgtcgggactgttgaaacgaaaacatgctagagctttaactgtcatcaactcgacatcttttctaatttttgtttttacaaattttatacgctgctttaaaatctacagcaacttagaacgtatcaatatgttactgagaactcttcggttttttctaaattaacaatgcatgaagatctggtcaattttaaaatcgggtatgatcgaaggagtacttccatgtatacactaaaacaaccgtatgctgtagagaagatattgtaaactgtgtgtaactgtagactctgctcctgtcatttttacattccaataaatcttgtcctttatgtaatgagcagataattcgagtcacaccattcttctggcatttgttcttcaatccaggctttgactagtgtgttagtcacattttaagttgtttttgtattatttaattcctttcttaacccatgataatatcaagttttttaataatgtaagtaatagtaagtaatcaacctataaaggatattaacgagaaaacgagtaataagattaatatatcgcaactaaatgcgtcaagcgtttac

SEQ ID NO: 8555 - DNA, 1037 bp, Diabrotica virgifera
  SmartBlast Evalue=1E-121; Info=Ubiquitin fusion degradation protein 1-like protein n=1 Tax=Harpegnathos saltator RepID= E2B893_9HYME
tcattgtgttatgtgtttcttttctgtgcaagaaggggttctaactttctaacaaagatattaaaaacaaattttgtatttaaataaaaatatttactgtaagggacctacaaaatgtttcaatttggattcaacatgtttcctgaggtccccaggccttttaatatgacttataagtgctactcagtggctatgtttcctggcaatgaacgagaagacgttgaaaggggtggaaaaattattatgcccccatcagctttggaacaattgactaggttaaatataaactatcccatgttgtttaaacttgtgaataaaaagacacatcgcacaactcattgtggagttttagaatttgttgctgatgaaggaaaagtttatttgccactttggatgatgaacaacttagtactgactgaaggagatttggttcaaatggaaagtgtttcccttccagttggcacattttcaaaattccaacctcttaatccagacttcttggacattactaatcctaaagcagtcttagaaaatggtttgagatcttttgcctgccttacaacaggagatgtcattgcagtaaagtacaatcaaaaggcttatgagttgtgtgttctagaaaccaaacccggagatgccattagtatcattgaatgtgacatgaatgtggaatttgctgctcctgttggatacaaagaacccgaacaagtcaaaaaggaagaagaagaaatggctatagatcctgcagatttaatgccagaaccttctggatttgtagcattcagaggtgcaggaaatcgacttgatggcaaaaagcgtaaagatacttcaggaactgatagttcagtagccaaaccaacttatgtcagaggaattccagattatgattaccaaataggcaacttaaaatttatcaggagaatgatcaagcagaaatctaacgattatgcagaggacagcgaattcaaagcatttagtggagcaggatttagtttaaaatcgagaacgtaaagccaatggtagggttgctgtgatat

SEQ ID NO: 8556 - DNA, 1038 bp, Diabrotica virgifera
  SmartBlast Evalue=1E-79; Info="Adapter molecule Crk, putative n= 1 Tax=Pediculus humanus corporis RepID=E0VNA4_PEDHC"
attcgtgattaaggaaggtttttctccaataagtttaatatttttattcgaattaaccacacaaggaaattttcaataacaatattgaactgacagtcaatcgtcttttaaccaagctctcaaatagtgttaactacaacacaatgaaaaaatactcggcgcacttaaccaaaaatattaattaaaaacaattacttttaataggaatagtttgatgtgtacattaattagtgagtattttcgagcgggctttgtagtataatgttttctataacttaatttacaaagtggggtccaaatttcaacatgcaacacttgttataaattaaattaattaaataatatttatatagtatggcaagctcatttgatcacgaggataaagattcctggtattttggagccataggccgacatgaagctaccaatttacttatggatgagcgagaagggggtgttttccttgtaagagacagtgcaacttgtgtaggagattatgttttatgtgttaaagaagacagtaaagttagtcattatataattaataaaacgcaggcacaggatcagtccagatacaaaattggggataacttttttaaaaatataccagaactgctttcattctataaagtacattacttagatacaacaccattaatcagaccagctagcaagagggtggaaaaagttattgctaagtttgactttgatagttcggaacgagatgatcttagttttaaaaagggggatatactaaccatagtatttaaagatgaggaacaatggtggacagcgagagacaaaaatggtagaactggttcaattccagtaccatatgttcaaaaaatagaggaaaatcattctccagtagaaatccctaggcctggatctggaggtccagttagtaatacttccctacaagcagaagcagcaaaaagaaaccaaatgcagcgaaaattaccggctaaagctcgagttaagcaagtgcgaattcctaacgcttacgatgaaaccgctttaaagttagaaataggcgac

SEQ ID NO: 8557 - DNA, 1035 bp, Diabrotica virgifera
  SmartBlast Evalue=1E-139; Info=polypeptide GalNAc transferase 6- like n=1 Tax=Nasonia vitripennis RepID=UPI0001BE8069
gacttgcgtgtgcccttttatagatgtggtagcattcgaaacttttgaataccgagctcaagatgaaggtgctagaggagcttttgactgggaattttttataaagactgccattgctccccgaagatttactgcatcctacagaaccattcaggagtccggtcatggcaggtggacttttcgccatcagtgccaagtttttctgggaagtaggaggatacgacgaaggtctggatatttggggaggagaacagtacgaacttagttttaagatttggcaatgtggtggacagatgtacgatgcgccatgttccagagttggtcatatttacaggaaatatgccccctttcccaatccaggaaaaggtgattttgttggaaggaactacaagagagttgcagaagtatggatggacgaatatgcccaatatttgtacaacaggaagccccattggaggacgcttgatgaaggtgaccttacagctcagcgagccattagggaaaagctgcaatgtaagccgtttaaatggttcatggaaacaattgcatttgaccttcctttgaagtatcctcccgttgaaccaccagattttggattcggagagttgcgtaatcttggtgtaccagaactgtgcgtggacgctacaaacaaaaacaaccaaggcgacgtattggcagttgctacatgtgtaaaagattcaggaaaacatggaagtcaacaatttaccctgacttggcacaaagacttgagagtaaacaagaaggctatgtgtttggatgtttcggatcccaatgataaagctgaaattactttgtacggttgccatgggtataagggtaatcaatattggaagttcgatacagataagcaatggtttgtccacggcggcaatccaagatgtctagatatagatcctggccggaagcgactgtatgttacaaaatgtgaccctgaatccaaaacacaaaaatggagatttgaaaacgtcaatttaacagctattgctaactgggaaaacgttggagtctaaagta

SEQ ID NO: 8558 - DNA, 1029 bp, Diabrotica virgifera
taacacctttaagtgtattattgctggatatctccatttactgtaaaaatggactaccgccctttcaattctaacgtacagatttataatcattgttaaattatttggaatctgtatactttttaacgaaaaaaatcagattttacattttttttatacattattcaaataatgattgatattgttcaaatattggtcgcattcaggagaggaaatagtgagggagcagtttctgatagagcggtaacaggtgtgtttctctaacaggcctctgcacaataaattgttttttacttcataatcatggtcaaagaccatggattgtttaccgtctgcgctcttttccaattcacaaaattggaacaattgattgattgacaaaagtagcatacgttggacggaggtagcggaattaaaatgaggtcactgtcatggcgaccgttccgtaacacgttccgcaagtagcgccacattcaaagaacgaattcccaacagttgcggaaccgctctgtcacttttacatcttctgaatgcgacaattgccgcatctgttacagatctctaattttaattgaaatattgttttggcacagttgtggtgttaattatgcgatttggacacccccgccactcacactctgtcatcggatgccgcgcccactgacatcacattgcacatctgtcatctgtcaaatcttgctttaactctacaactttgaagaacactatttaactcttatttttgatatatccttgatttctaataacaataacaatccatacattggttaaaaaatctatgcggtccattaggtgtaagatttaaacaaaaacacagttaactatcagaagattatgttgtcacataaattagatacccctttcttggcacataatacaacgcgctactttaccgaagtggtcaatggtaggacgtgatgcctgacaagatgatgccttcttcttcttcttcttgtagtgcatatccgtttctcggatgttggcgatcatcatgacaatctgtacttt

SEQ ID NO: 8559 - DNA, 1024 bp, Diabrotica virgifera
acaaaattaccaactatttagtaattattaactattagtaatttttttttgccaatttaccaaattggaaaaattacttaataaagtcactggccagttgtgtctgagtttagcaaaccgacttatcaaaactcttattgcaaagtttattcgacaactaaatatatttggtatattcagtaaaaatttaaaaaaatttaaataaataaaacaaaacaaagtactgcaaaaaatgcgtatgcaaagaagtaaacaaattgtggaaaaaagttttttttcccagaaaaaattatagtagtagaaatttttggcatcgcaagagcccaagtttgaattccatatttaccagatttgctgggaatataaactttgaatgggcaacggcccctgaatttaaccaattttgttctgacctggtagagaataatctattcaataaatttttaaaacctgcatttgacaacgctttggtgaacaaatcggctcactaattgcttgaattgacataacttatataaattaagaaaatctacggtttcgttttgatttaaatctgtcttcctccatcctccgataatactatttgtaggtctacctgttgtcaaggaggctctgaagaagcctccggagtctccggagaacaagcctacgttccttccgatgaaggctccaataagagccgaaaatcgcgattcaagggactggactgcgctccttattctaattgaaaagtaggattgttttgccttcgcattgcaactgaattaaaaataaaatttattttatttctatataaatattgtttttacgcttatctcgaacaaagagaaccttattggcagattgttagctttagagcgtaggcgcaaactttcgagccaatgttttttatgcatttattgttttttcgaatcctaagaaaacttataagtatcttataaaaattaaacgcagaatgaaaaattacattattaccgagagccgaaagtgcctgaaaacttctataatgtttattttaataagt

SEQ ID NO: 8560 - DNA, 1032 bp, Diabrotica virgifera
  SmartBlast Evalue=1E-100; Info=Translation initiation factor eIF-2B subunit alpha (Fragment) n=1 Tax=Harpegnathos saltator RepID=E2C011_9HYME
gttattttgaatcctgtcagaaatgaaactgatgataactttgaaataattttgtaattttttgtaatttaataatttaacaatggttaatataacgacaaccaacacgaacatacgagaatatttttgtaaaattattaaagacaatgaggatgtttctgttggggtagcagcaatcagagctttgatggagttgattaaacattccaaatctgagactgttcaagagttagaagctaatctaaaagatggtatccaggagatgaaaaactcaaactacacagtagcaggtattaactctggatgtgaattatttttacgttttataacattagcttctcttgatacaagtggttttgatgagtgcaaacgaattatgttggatagaggtcacctttttattaaaaagctggatgaagccaggggaaaaatcgtcaaattagctgcaaatttcatcgaagatggctctaaagtattaacgcattcaagatcacgagtagttctacaaacgttaagaaaagcacataaacaaaataaaaagtttgaagtattcgtcacaatttcagaacctgataaaagtggtttaagaatgttagaagatttaaaatctgacggcattccctgcacagtaatactagattctgcaatcggctacatcatggaacaagttaattttatcatggttggagcggaaagcgttgtggaaagtggtgggattgtgaataaagttggtagctacacgatggcagtatgtgctaaagaaatgaagatacctttctatgttttaactgaaagttttaaattttcaagattgtttccacttagtcagcaagatttacctgaagagtataagtatacttcggaaattcgagcaaaatcaaatcttaaagaaattcatccactagttgactatactcctccttcgtatattacgttattgtttactgatttaggtattttgactccttctgcagttagtgacgaacttataaaactgtatttgtaaaattacataaatatattttataagct

SEQ ID NO: 8561 - DNA, 1035 bp, Diabrotica virgifera
atcaggataaacattttggcacatttcatatttcgtggagaaatgatgacacattgaaagactgagaagaactttaaattatagtcgtatagatatcgtccctgccatttccaactatcgaatgtgaaaagtggtacttttcaggagagcaaaataactcttttttagactcctaaatcagcgcattgacaaatgggaaaatttttatattttttgtatgtaatgtttaattccttgttagattgataacaaatttgaactgcttatcatttttttctttccaaaaaatcacattcgtcactttgctttttgtattaatcaaatatttgtttcggtccgatgtttcaaagtagcgaatgtataatagcgaataactgtataatcaaataatgaaaatccgttaaaatgaaatcatagactgcctcacaagaatttcttggaagcgatactgaaaaaaaattcgcacaaattgtaaacacgtgcattttgttcttctcagcagtttagcattttcgacagtttacagattataattgaataactattgaataaattacaacacaaactaacgaatgtgacacattcgatatttagcgttgtacaaaaatatacctttagttatatttatacaaaacaaaagtatcgagtataccattttcgtcagtttgcctgaaaccaaatggaaaaatgttcatattcgatagtttaaacagcatagttcccgcgctcctaatcaagctacaataacgagaatttgccacaagatgtaccacgtataatgtgaggacatggtatcgaatctgaaaaacccgatttttcacattcgatagttggaaatggtatggacgatatatagaaaaattctaaatttacttcctacaatttctaactttgcattcgagtctacgcctctaatcctaagtttggaaaagaggatataacccggatatgttttccaagtactaacatcgaagatcgatgtaccaaagtaatatatggtcccatacaaaaaactcagcacagaccaattagtat

SEQ ID NO: 8562 - DNA, 1033 bp, Diabrotica virgifera
  SmartBlast Evalue=2E-65; Info=Short-chain dehydrogenase n=1 Tax= Aedes aegypti RepID=Q17MF6_AEDAE
aaagaggtgtcaatttgtttatttggtttttggttagctttagctgatctggattttttaatgtaaatcattgttttagaggttttgttagttaaaaatacgtcgaactgttttatttgtttatttctaagccaagtggagtgattgttctaaatatagaaactaaaaatgattctattaaccatcctgattgtatcaggcattgcttttatcatctttgctctagctgttcagccgttgcgcaaaaaaagcattaatggaaaacatgtagttgttattggagggtccagtggaattgggaaaagcgtggccaagctagctgcccgtgaaggtgctcacgtaacaattattgcaagaaatgttgatagattggaagaggccaagcaagagatacagcagcatgttgtggatgccaatcaacaaatcatcagtagagtttctgtagatgttgctgattatgcaagtttggacaataatataacccaaatagaagatcaggtaggccccatttatatgatggtgaactgtgctggaatggcaatatgcggagtaatagaagacctaaccctacaagaaatcaaacagttgattgatgtcaattacttgggaagtatttattctgtaaaatccatcttgcccagattaaaagaaagaaaggatggaattgtggttcttacaggttcacaagcttcgttaatgggaatttatgggttttcgatatactcaggctgtaagtttgcagttcggggtcttgccgaagctgtacacatggaagcaaaaccctacaacgtatctgttaccttagctttgcctccagatactgacacccctggatttgccaatgaaaataaaaataaaccggaagaaacgagaattatatctgaagctgggggattggctaatcctgacgatgttgccaaaagactgctcgatgatgcattggttggaaaattctttagttattatggatttgagtcaagtgtcttaactactctttgtgttggtatgacaccaccccttcgatgtatcgaag

SEQ ID NO: 8563 - DNA, 1032 bp, Diabrotica virgifera
  SmartBlast Evalue=5E-28; Info="CG6448, isoform A n=2 Tax= Drosophila melanogaster RepID=Q9V9N7_DROME"
catgagcagtttcgttaaagttaagtatttgaatagaaccataagttcgcgttattttttcacccattatgcgtttgtaaatctagcctaagtttcgtacttgaaatcggtgtatgactttggctttcggataaagtcacaggcgtctgtggtgaatccaacggtcttgtccctacaaaactgctctccaaccaacagagcttctgactacccctagggctcaccgaactagatctttgactagcagtttcttggctatcgtaacttctatctctagcatcttctggcctcagtccgctgacgtagtgcacgatagccgacgtcacttccttgatggaggtctgtatctccggactctcttgtggttgtggtggaggggtgccctgggcagataacagcgagctggcaagtcgttccgcaggcgttctaggtctgctgagacgctcttgtgacctccaacctaagtaaggctgtctgtagctgaagctagatctaactgaagagggcgagatgcttccgttgggctgccttgtgttaaaactagacctcgtcgatgcgcaaggtgacgacgctgttgaatttagcttcgacgttgaccaccgtacaaaaggctgacttagcggggtcggggaaagaatgggtgaaaatgtatttgatcctagactgctcaaagatgtcgttttgcttcctgtgccgttccatcgtgtttcgcgtggggattgttttttaagtaggaaaccttcgcggggtaccggtgattgcttgtaccagtcgggaattgttagtttttgtagggaacgctggacccgaagttggtgttcagacattactctctcccctttttggagttcattttcaggcggataagtttcatcctgcgtcattttatgctcagttccaaaaggcttaaaccagacggagccctaattgaagtaaaagcggctcacccggtaaatcgcgcacaatacccactttgcacatttacctacgaaattacaactaccacttgataaatgtttgacacaagacact

SEQ ID NO: 8564 - DNA, 1031 bp, Diabrotica virgifera
  SmartBlast Evalue=1E-111; Info=Rho GTPase-activating protein 20 n=1 Tax=Camponotus floridanus RepID=E1ZUZ1_9HYME
gcgccgtatattcgttagggaaagatccatttgttggaggtggtgggtattggaaggaacagatccattctccttgaattctcaatacacgtcctgtaaccctggcatagtactcgtaattttctctcccgaagagattggaactggcaaattcttcaatcaggtgtttcatcactctggatgcaaccttatattttgtgacgtcttccattctggcagttttcccatcactcacgcaggaatggaaaaaacttggtgctacactaactcgtaaagcttcgctagtcataccagtagctgccttttcgctattcgaagctattaccctgaatgtaccaaacaacagtaccaatagtctttgtgtatatactggcaatgaaataatgattttatgaatctcttcttgttgtacttgaaaatccataacatctataatttggaaaaacttattttcaatgtctttaccgaacacacctcctggtacttttctaagaaattttttgagaacacttgctattgtgtatacactaaaattgtccatattaaccagtcttccagtctgtagaaaatgtataagttttttcatcgcaccctggttaccaggagccctgaatacatcttttctgtaaggtgcctctttgtttaactttagaatgagtaccaaaagtggtcccggaatatcgtttttacagacttcttctagagaaacaccaaacttcactttttcgagtcttcttgggaaatgtccagtagggtgaccacaagatgtgacaacgttaccgaaagtggcagctcgccgatgcattctagctgcccaattgctcatttcaagaaaaaagggacttttagcagtgctaggatgatcactggagcataacctaaactttctgacatttaaaccgattataaagcaaacaaaaaacacatacacaataaaatcacataacacacactttatatgtactaaaatacaatttaacaacgtccgaattggtcattttataacattttaaaaaccaaccacaccttaa

SEQ ID NO: 8565 - DNA, 1035 bp, Diabrotica virgifera
  SmartBlast Evalue=1E-43; Info="ATP synthase, H+ transporting, mitochondrial F0 complex, subunit s (Factor B) n=1 Tax= Tribolium castaneum RepID=D6WTS2_TRICA"
tatatttgagataaaaactaaagataataatacatttatgtttcagcttgtagacaataataattatactttcatatttgttataataataatgaaaattatgttagttttaaaaaacatttgtgttgtaaaaatgaaaatatgtatatttacaatgcacatttatatctacaaggcctgaaaattactcatccagttgaacatgatatttcacaatgaggcaaactagtttctaatttttgtacagtatcctctaatgatttaacagaagtaaggtcacatatatttaatttggccaatttttttaaaacccctaaactcaaaattcccttatctgttacatttggacaacaagtaacttgtaatttacataaagaatcttttaaataatgcaactgttctaaagctttatcatcaacataagcacacttgtgtaattttaataaatctatgtgttcgcaaccgttgaagtgttcaaatccagaatgcataatgcttgtatttgaagcatctacttctttaatgcgaagaagagtaccttccagaggcaactcattatagtccgataaataatccttaaagctaacaaatttcacagagccaccgtttcttaatatccattccgcacatgtacgatcaggtcctaacttttttttacgttcaatatctaatgagttaaattgtaaattaatccagtaaaacaatgttctgttttgatgtgaagtttttgatggcaaacactttaaaaatctgtaaaaagacagcatgattatgagaatggattaaacaagctggtctcatgtaagtgtttctccttttgtcacacaagcttccaaataatcaattttgcgctcgagtatggttagtttctcgttcaaaccagcaagttttgagcgacaggacaaatcaaacgagtttaaaaagtctgtaattttcttgatgctaatagtaataatttctatgtattccctatttacccaatcttgctgaatttgttttggaactgcctctccccgatttgaagatgccattttt

SEQ ID NO: 8566 - DNA, 1034 bp, Diabrotica virgifera
  SmartBlast Evalue=1E-21; Info=Endonuclease-reverse transcriptase n=1 Tax=Bombyx mori RepID=D7F177_BOMMO
ttaattaacagaaacatactgttattttagctttccctaagatcattaaaattatcagttggcaaaatgcctgtaaatacacatttatacaatacgttaagttttcgattagatatagccgactgaaggaagagctaaaatcggcaacattgcttattccactatcgttgtgacgaatgacgaataggacggagcgacggagttacaatcggtgagaatcagatgcattagcgtgggaagaggggactgtatcgtactcgacggcgctcagtgttgccatttataatatgtacatatatctaatttataactaaacatgctgtataactttgtggcgtcagataattaagcactttagatggaatacccactccacctggtagcacgatgagtccggcacaatagaattagaaatagtgtgcactactattaaccagcattccaagaaccggaattgatgcctgctatattaacagacgaaattacgaatgcattgaacaaaacgaaaagaaataaagctctggaagaagataatatcgttatagaagctgcaaataatggagacgaacttttagagaatataaaggaacgttcaacttatgtctgcactaaaaatacctacaagatggcacagtgcacctgccattttatttcacaaaaagtgagatccaaaagacctcgagaattaccgacccataagcctgttaaaccccctctacaagttattcacaagaataataactgaacaaaaaattagatttttaccaacctaaggaatgggcaggtattaggaaaaacattggcattaacgaccatctccactgcatagaaggtattatagaaaaatctatcgaatgtaaaaaaccattggtcctgattttcgtagactttcgtaaagcattcgacacgatataaattaacagcataatgagagcgttggaggaaagtcgtatagattatcggtactccaaacttatcgcgaacataatacaataatttaactatggccgtacgactacacaaagatacaaaaa

SEQ ID NO: 8567 - DNA, 1033 bp, Diabrotica virgifera
  SmartBlast Evalue=1E-121; Info=Thioredoxin-like protein n=2 Tax= Apidae RepID=Q103C3_BOMIG
gttcgaaggaaagcagtgaatgtgcattttatttagttgaattaatcacaaatattcattactcttgattaaaaatcaaaatatgggttcaattagagtaataactgatgaaacacattttcaaactgaattaacaaatgctgccactagacttgtagtcgtagattttactgcaacctggtgtggaccatgccaaaggatagctccaattttccaacagctagctgcaaaatatcccaaagctgtgtttctaaaagtagatgttgatcagtgccaggaaacagcagctgcccaaggtgtttcagctatgccaacctttattttttatcgtaataggactaaagttgatcgcttacaaggagctgaccctacaggccttgaaaataaaattcaacaatactatggatcagatgattcagaagaaggggaaagtgtggccggacacatggacttgtcaccatttattaccaaagctgaatgtgaatgtttgaatgaaagtgatgaacatccttttacccattgcctaacctctggaggtggctttttgcaatctgattgtgatgaacagctgataatctccattgcattcaatcagtccgtcaaaatacatagtttgaaaattaaagcaccagcagataaaggtcccaaaaccataagaatttttattaatcaaccaagaacgttagattttgatttggcagatagttatactagtgttcaagacttgcagtttactcctgaagatgtcgaaggagggaatccagtaaacttgagatacgtgaagtttcaaaacgtccaaaatattcaattctttataaaagataatcttggaggaggtgaagtaactcaaatcgatcatttagctataatcggatcaccgataagtacaactaatatgggcgatttcaagagggtagcaggaaagaagggagaaagccattagtgcatttatctttacaatctaaataaaatatctactttaggacactggagttttttattttattaaaaaaaatacaaatgtaaataaata

SEQ ID NO: 8568 - DNA, 1033 bp, Diabrotica virgifera
  SmartBlast Evalue=0.000000001; Info=reverse transcriptase n=1 Tax=Aspergillus niger CBS 513.88 RepID=UPI0001F26F0D
gtgcagttgaccgaataacaaacttgaaatcatcgaaaaaccttactaacatagaggcagaaatgttaaaactgccctttgaagcaacaaaacaaaggaaaacaataactgtagtgtggattaaaggacactcaggaataaaaggtaatgatgcagtggatacactagccaaatcagccactgacacaggataccatctaaccaccaatattgttccatatacagatcttacctccaagtttacttcacatttaaaacaattgtggcagcaagaatataattcatcagtcacagggcttaactatgtcggccaccaaaataacataccattgaaaagctggtttcatgaattaaccaaacgaaacttcattgttacaataaccagaataagatctaatcatgctatgactcctttgtacaaatataaaataggactggatgaaaacccatattgtccatgcggagaagttggtgatatgaaccatgtaatcctagaatgttcaagaaataagaagagcatagaatcatttttcgaagaaatggtaaatctcaaattttgtttgccaaccagtctaaattgtataatttttagtaataatattaacttatatcaatgtttgtataatcatttaattcgttgcaaaatgaaattgtaaaaaactaacaccattgtaagcaattctgcgatacaaaatattattgtaagtgtgttcacgaaaaaatacataaaaaaataaaaaaaaaaagttacaataaaaagtaaaataatgataaacaaataaaaaacaaaaaaaaaataggaaaaaaggaattaaagctaaacaaaagactacataaataaagcattaaaaaaaacaaaaaatataattaaaaagaaataaaaaatatacatataaaaaaatgcactaaacagaaaaacacacattttactaacataataacatttatcctagggcgtgagaatttgaacaattctttatttatattggataaaaaaaaatgatccttttatatgtcataaataaaaataagt

SEQ ID NO: 8569 - DNA, 1032 bp, Diabrotica virgifera
  SmartBlast Evalue=9E-57; Info="Ptpla domain protein, putative n= 1 Tax=Pediculus humanus corporis RepID=E0VBY6_PEDHC"
atgatatgctaggtgcacgtgtgaatattaaataattaattggtaatttattggtactgctggtggctggtgctggtagtagtacctgttctgttgtaatgttgttgccagttggttctcggagttaagtttttaagtttgtaaacgcaccgttggaacatcgctccttaaaaatggcaaaagaatctgcaagcaaaaaagggaatggtgctgtcactacatatctcctactttataatggaatacaaactttaggctggtcatatcttctatttcaagtaattatatattatttattcggatcgacgaaatctctctacgatacagtccaatggacagttaatatattccaaaatttggcagtgttggaggtgttgcatgcagcaataggaatagtgaaatcaaatcccatcattacggctgttcaagtatcttccagagtagttgtggtggtcggtgttctgatagctacgcaggcgcctcgggaatctataggtttaactttgtgccttctggcttggtccatcacagaaattattagatactctatgtatgctctctcattagtgaatgcagtgccatattttttgacttggttaaggtactccttgttcgtcgtgttgtaccccataggaatcacaggagaattactatgtttattttgggctcaaaaggaagttggggaaaatagtttgtattcggttaccatgccacataaatataattttatattcaattatcaacacgtactcgtttttataatgttgatgtacattccattctttccacaactttacggacacatgttcgctcaaagaaagaaagtactaggaggaaagaaaaaagagtaaggctgttctaaatgttctcactatcgatgatctatttttgttaacttttatgatttttacttaatttatttaaactgtctctattcttaagaggttgaatacagtaacatttttgtatcctcattgaaccgtgatgttatatgactaggtgaattaattattgaataaacatgaacaaatc

SEQ ID NO: 8570 - DNA, 1029 bp, Diabrotica virgifera
  SmartBlast Evalue=3E-77; Info=Basket n=1 Tax=Tribolium castaneum RepID=D6WV90_TRICA
gccagttgttaaagtacccaaccctcccaccatccaacataagagaatgaatcgaaaacaaaatgttaagaaaatgcaaaatgcatttttgtagtaatagtaaattaaaaaaaaattaaatgttgacgttacgaattgtatcgttacgaatatgtatagttacgaactatcgccgttacgaattattacgttaccatttgtggagttacgaactgtcgctttacaagatgtcatggaatcgttggtttatatcttttttgcacatagtgacgtgcatacgtccctttcgtgtatagtgacgattttgttgaccactgcagttgatcagagcagtttagaaagtaaaaaaatctatgtcggcacttcactagctaagtgaaatatttgctgacataatataaacatgtcacaggtactatcaagcgaaaatttccacaaaaatcaataaataacgaactcatattatgtctaaataactatacaaactaagatataccgttgggttcactattgacagcggggcttagttgagaactagaagatgctcctcttccgtgagaagtttcgtattccatgacctcttggtaaataagttctttccattgttcaactgtgtgctccctctcgtccacgctgtggtcgtacggaccaggagcaggagcattaacttcctgttcgtcataccatacgttaatataagggtgtaaaagtgcatcgtccacagatatcctactcagaggatcaatcaccaacatcttcgaaagcaagtctctggcttggcaagcttttagtttgttgtgttcattactatccgatgggaaaagtcatcagggaagagtttctcgaacgtgaatcctggatatctcggtctgttctcgacatagtttcggacagttggttgcagccgcaccatgaattgttgcgatggtgtgccgagttgctctataattttattccactgatctatgtgatcagtgccaggaaacagtactccccacggatcattccccatgatacaaccaacactcc

SEQ ID NO: 8571 - DNA, 1030 bp, Diabrotica virgifera
gtcaacttgattttgagcttaactcgcttagttttgatgttagaatcttttttaaaacataaaaataaagctttactaaaaaattttaattggttttcccgaaaagtgcttcatttcttggttatttcacgttgaaatatttgatttgtaatttgacgaataaggacgtatttttcatgagctacaactttgattttgctggttctatagactttacgagttcacatttttttttcatttttttatattatgctacatttttgctaagaatatttttttcgaccaaatacttactttttgagttatttgtgaaaatctactgaaaacgtaatttttttgtcgaaaaataaacattttcaatcgtaaataactcaaaaagtattgactaagttaaattctatagaactaaaattgctcagagttagtcaatttatccatctccggacttattttaaacgcgcggtttttcacccccaaacaggggtgactgtcacccccttgtaaaagcaaccaacggcgcacaaaccgtctaaatgttcatgcaattcggagttgatcctgaaaattacactgtatcgccgtatttcccgttcatttactggactacaaggtgtttctagaatctgtatttaatcctacataataataataatcagacgaaattacaaaagaaaatcgtagattaagtaaattatttattttttattaaaattatattgttcattcgattttgccgcttttaggagtgccttgtttttataacatagttataaaattcactgcaagtcctcctgaaattggttttcgtggtgaaaatcgggacatttagtgtcccgatcaggtacaaatcggtacgcgtccccagacccctgaaaatcgggacgtcccgcgcaaatcgggacacctggtaacactattacagagtcactttggccgattatctttaactggaaccttatggcaagtgacatctcgtttgaaaggcattgaaaatatcactcaatattacatactacactcaccggcacaa

SEQ ID NO: 8572 - DNA, 1027 bp, Diabrotica virgifera
gaaaaaagaaattacagtgaagtttgaaatatacatattgaaatgtttagttttacagcaaaaaaaaataggatgacgtcataactcaagtttttcttaacaatctactatttgccagttacattgccatacgtattacttaccaagcttgagcaagatgaagtcgataaccaacaacatttgcttccggaaaaacttctcgtacgctggagtggatacctaattcgtaatcaatcactattttcgttggatttaaattgcatcccaaatcttgacattttttctttaataattcgaataatgatttgtaagtgaattttttgcttattaggtaacaaacaaaatgaaaccggaacataagtgccattaatcaatgtatgtaatgtaaacatttgaaaaaaaaattttgtgtaataatcgaatgttccatccataaataaagtggaattgttacacataaatgaaagattagacattcatgaaaaatcaacaatattaaactgttcatcattaatcaacaaaaactgttcatttttgatagtaaatatttcaatttgttcaaaaaatttcttgaacatccttggctgattttggcaattttggaaccgttttcaatcgcgtgcgattaatgttctttttttatgtattggacatcttttgttgacagagaggtaagtacttcgctttgcttttcgatttccttgtgtaacaacttcgcaggtcgttccgcaatatcttctgttgcttttcttttaagagaattgttaactttctggcgaattaatacttcttcagcaagctcatgattgtgttcaccactaacttttgaaaacacattatttaatgtatatagttttgctttacactttttgaagttatacttctttaggcgcgattgagagtaacaattttcataaatctgcgcgcatgcgcacacagacagtatgacgtttagttgctaatctttcaaattatgtatcagcgcaaataagccattaaaataatatattagtgttttttagtaaat

SEQ ID NO: 8573 - DNA, 1029 bp, Diabrotica virgifera
  SmartBlast Evalue=1E-155; Info=Titin n=1 Tax=Harpegnathos saltator RepID=E2BUG0_9HYME
gagcaaacgatagtagctaagaatccatttgacgaaccgggagcgcctggccaacctgaagtcacagattgggacaaagaccgtgttgatctaagatggactccacctgcgaatgatggtggatctccaatcactggatatattattgaaaaacgggagaaaggatcaccaaaatggaccaaagctggagaaactggtccattcgaaacaaagggtactgccgataatctcgatgaaggagttgagtacgagtttagagtgagagctgttaatgccgcaggtcctggcgagccaagtcaagcatccaagtctgtcattacgaagcccagacgattggctccaaagattgatcgccgaaacctgaacaacctaacagtaaaggaaggtgaaccaatctacattgatgtcaagatcagtggagaaccagcgcccgatgtttcatggtaccaagacgacagaactctaatccaaacctcccataaacgcattgataatatcccatacaactccaagttcttcaacgataaacccgaacgcaaggacactggagtgtataagattgttgctacaaacaagtttggacaagatcaggcagaaatcgaaattacagttgtttcgaagccaggccaacccgaaggtcctctggaagtatcagatattcacaaggacggctgtacattaaaatggaagaaacccaaagatgacggtggagaaccaattgaaaactacgttgttgaaaagttcgatccggaaactggaatatggctgccagttggaaaaactactggcgctgtaccagaaatgaaagtcgatggtcttactcctggacatgaatataaatttagagtcaaagcagttaataaagagggtgaatctgaacctcttgagactcttggaaccattgtagctaaagatccctacactactgctggaagacctggtacaccagaaccagaagattggtctgctaatcatgtagatcttaagtggactgaaccaatatcagatggaggttcccctattaccggc

SEQ ID NO: 8574 - DNA, 1031 bp, Diabrotica virgifera
  SmartBlast Evalue=1E-120; Info="Parafibromin, putative n=1 Tax= Pediculus humanus corporis RepID=E0VPB3_PEDHC"
atttagtaatggagaaaccgctagttgccctgccattgataaaagtgctcctttggaaatacccacgcaagttaaaagatctgctgattatgatggtccggaaagtctggctaaaaagccaaggttcgaagacacacatgtacagaaagtcagagaaaagttggctgctaagctagatgggccgaaggaagcttcagtgacggtggacaatataaaatctctctcggatgctatgtctgttgagaaaattgccgctattaaggcaaaacgtctggcaaagaagagaactactattaaaggaaacgatgatattggccaggaatatgacattagtgctattttggatttagatgtagatattactaaggatattattagtagagagaggcagtggagaaccaggaccactatattgcaatcaactggcaagacttttgctaaaaatataattgccatgttggcaagtattaaggctagagaagaaggtcggcagagaccaccacaacagcctccgcaagttacacctagagctacacctattagagcaacagcacagccctctgtatacaacagatacgatcaggaaagattcaacagacaaaaagaagaaaccgaaggttttgagatcaatactatgggcacataccacggtatgtctttgaaatctgtcactgagggatcagcgaaagcgaatcgtccaatacctgctcagccaacaacacctcttcctataagtgcagccagacccccttcaggtggagcaaaaaaagtttcaagaacccccatcatcatcatacctgctggaaccaattcattgataactatgtataatgtcaaggatatgcttcaagacttaagatttgtaaccacagaacagaagagagccgaaggtggtaaaagggacaacgaggttctaattcagaggcatagaaacggacaaacagtgccttacagagtggtggacaatccagcaaagttaagccctagcgattgggacagagttgtcgcagtgtgggtgatggggcctgcct

SEQ ID NO: 8575 - DNA, 1030 bp, Diabrotica virgifera
  SmartBlast Evalue=1E-66; Info=Calpain-7 n=1 Tax=Camponotus floridanus RepID=E2AKL1_9HYME
cccttcttctccactgtcgtatattcatggttttcaggtgttcatcttccacgtcatccaaccatctagttatgggccttccttttttcaccttcctatcggcttccgctgagaactcattaagatgaccatataatggtgcataaagaaaggaaaccgctgaaacacactgcatttttagtactgccattacctggaaagcagtcactacttttctgtttttttttatttttgtaagcgtaatattctcacttacattatttcgcattatcatcctcttttcgtcaatgtgtttctttttaattccttttaactaaatcgcattgaacaagctttaagatttaacaattttaaaaggtgcagatgacttcacattaatgatgaaaggaccttcttgatttggataaaatgttgttggagttatacgcagtgtaccagctggaatacctggtaaatccataacgacgtatccagacctgtatgatccggaagattttgctctgaatggtgcagtagtggattcatttttaacctgctgtatcattacttcaaatcccaactggtattgtttaggcccttttagttcaattaaaatttggttgttgtctgaaattgaatcaatatctactataaatcgtggattatttggatatgttgcttgatgatttggacagcctcctgcagtgattcctcgccattcaccagttatttgatcttcatatttgtacggatcaactattttcgtcaacgtaaatggtaaagtcgcatacgctcttaaagtataataaatggttgtagacttctcatattgggaaacaacaactgtaaacttcctgctagaaccaggactcaacaatattttgcagagatagtgcggactgttgattttaactccatcaatgtaaggaggaggatcaaagggataataaatttttcttcctccttgataaacgaaaagcgtaatgtactccttgttgtccctaaaatcttcaatatctgtaatgtgtctggaaaggagaagccatacagc

SEQ ID NO: 8576 - DNA, 1027 bp, Diabrotica virgifera
aaagttagcattttcatattaccattacctaatattctatgaattctcatctaggaaaaaaactgtgttatcgttctccattgtattatttaaattttctttataactccattataaagttccctcaaatatacgagtagaaaaaaaaatagaaatcttagataatattgaaaaacttgttttttgttcatattccgactagcttttagtgcaacaaattgcatgttttaattctcacgaagtagcaaattaatatttttgttacaaaaaatggttcgtagaaaaactataatacataactcgtgtggtgagcatattatgcgctcgttcgaattacgccactctctagctcatggttgtaatttttcacgcatgcgtaatacactttcatgcttattatgtaattactacttatatattttgaatactggcactatatttaaatgtaaacggtggcgatgtaatgtccaaattcaaaaaatatattttatagatatcgaaattaaatattttgtgagtttttgactctaatatgcagttgggactgatgatttttacccgtgtgtcatcacttaagacttaaagcatacgaaaaaagttgtgagtcacacacacacacacacacacatactcgtacaaccccagcctcgggggacatgtgtattccaatggaacagtgggacccacatgtccgaagatcaaaccggtcacactccgtaacggagtggtacctatctgacccccaagctatatcacaccctccccccccccttaaagaggctttgtacttaacgttacttggattactgagcaatgggactataatattacttcatgtagttaagccacctgattttaggggtagctagaagaggttttctcccgcttattgacttctttaatttattagttgactttggacttgtgacctaaaaatgtgtgtttcgggaatcttgagtcggtgtttcgctgtccggactgtctgtgctcggtcactcagccgccgaatggaccgtgatagtgtgac

SEQ ID NO: 8577 - DNA, 1030 bp, Diabrotica virgifera
  SmartBlast Evalue=1E-11; Info=Major centromere autoantigen B n= 9 Tax=Eutheria RepID=CENPB_HUMAN
ctatttctctctacactcgcccagacaaatgacggtcgcatcggtccggcaaacaaagcagaataccgcgattgtttctacggccaacgccactagttacatataaccgtggaatggataatttcgaaacttctactctgtatttcaagcataataatggaaataagataatcaaaatttgcgcgtactatatgaagagcttccacaaaaatgcgttggccgttagtacttcttaagtaacgttggtggggacatttataatacctattcccttttcaggtcgcaaattgtgtcagttttagtctaaaatattataaactgagttgtgctacccttgctcaaaattatttcggtgaaaaatgtcaaacaaaagaaagtggttatcattagaagcaaaaatcgcgattatcgaagagtctgaaaaaaccaaaaagagttcccggatactcgcaaagcaattcaacgtgggaaggacgcagatctgtaccattttgaaagacaaagaggccatttataaatcgtggaaggaatacggatgcaatgctaattcgaaaaagaaagtgaaaaaagaagttgctgacattgactcggcggtttatgagtggttttggactgttagaaatcaaaatattccagtgacgggttctatgatgcaagcaaaggcaatggaagtcgctttggggttaaatagagatgatttcaaagcttcgaacggatggttgtatagctttaaacatcgaaataacatccaatattcgaccaaaccgagaccagagggaaaattggctcgagaattcctcgagattggctctacacataacaatgatgaacaggatcaaccagaagagccgatttgggaaccagataaggaaggccatacacaagctttgggtcctgatattacaggacaacatttttatctatggaaagatatgaagacgttactgatagtggatccattctatgcagcaaaacacccaacgaagatacaattggttcatcggacaaagaagaaagacatgattcagac

SEQ ID NO: 8578 - DNA, 1028 bp, Diabrotica virgifera
  SmartBlast Evalue=5E-11; Info=Zinc finger protein 521 n=21 Tax= Amniota RepID=ZN521_HUMAN
tcgtacagttttgatagaggcattattgaagtaatagttaaaatgttttgccaacattgtaatcaatggtttccaaattatatggagctggggcctcacataaaaaccgaacatcacgtctgtatatattgtggtaaagactataaatcaattgagaaactacatgaacatagtaaatacaaacatacatttcaatgcgaattgtgtgataaatgtttttcatccattaaggaactagatattcacgacagatgcgtacattcaattcaatgtccaagttgtgatgaattattcttcagaaaagaagatgatctacttaaccatatgaaaagccgacatcctgaattttgttgcaatacttgtcgtaaatcatttaattcccaagagctcagagattttcacatccgacagaagcatcaaacgttcttccaaattaggaagaaggctgagtagaggtgcatatattcaacatttgtattttcttattgtacgatattttacaaaataaggagttggaggaagatatagcagacacaaatatgtaatttaaaaatgtcataaagatgttaaaaaagtgtaaaaaggtagattttaaattttgacacagttctctgtttaggccattaagttacaagttttttatacagtgatgagcgcactgatagtcggcaagatggcgcaaaaggtggaaagcatagtacattgctaaacgggaagagatgaaactggtggaggtggaaatgatcgttataaacttataaaattaacattgcattacatactttcccacctttagacgtttgtgacagaagtattttattaaattatactgtcacagtgacagttgtcaaactcctctcatacgtctaaaggtgggaaactatgtaatgtaatgttgagctatacgtttataacgataatttccatctccactagtttcatctctttttgtttcgcaatgtattgtgttttccacgttttgtgctgttttagccggttataagcgtgttcatcactatatacatagt

SEQ ID NO: 8579 - DNA, 1030 bp, Diabrotica virgifera
  SmartBlast Evalue=1E-82; Info=Transmembrane protein 179 n=2 Tax= Formicidae RepID=E2ATP2_9HYME
attgatttaatagaatatggctctaacaaatattttacttttaagtcaaattgctggctattttattgcctttattttatcattatgtatcgtagttccaatggcctggcatcaagaagactttaaggggcactgtttactattttctaccggagactggcaagaaacagatggtcaactgttggtacactgggcatctcagagctactgcaattatactatatttgtaggtgtattccttttgctggtatcagtgatacaaatatacagattgtctgtttttctttacaaaggaatcgatagtagcttcttctcagctttcgtagatgtattgatgggaatatggctcggcggtatgacaatcattgcagcccttatgataacgttaggatttatggcctggtgtcagaatatgactgaaagatttccatcttgtgaactagccgcaggccaagacattgaccatgccgacaaaattaacacagccaacttttacatccagatgggaacagctcaattcggcgtgtggggatcctttgctacatgggtcggactatcagtatgcgctctcttgaaactctgcagataccatcaactggaaaacatccgcgtgtccatgtacagagagcggcagcgcctcatcaacgagaacgctgattcacctggtagcagtcttggaagggaatccaccaacacccagacgacggccacggccgagtgattggttcgtagtgtcctgaggtatccttatttagtcatatgcgctattattcatatatctttattgcttcacagaagttttctccagtttttgactgatagctgatataaagggcaatttcctattataagtttgtgtcttagtatagtacaacttcaaaatgattgactgagttcggcaaatgtcgacataaacagtctaaaatatgctcagaatctctacgaaacgaaaagctctggaaaactttctttattaactgtatataaataatagaacagtggtttgttatgttttcccatattcttcttc

SEQ ID NO: 8580 - DNA, 1024 bp, Diabrotica virgifera
  SmartBlast Evalue=9E-39; Info=Myd88 n=1 Tax=Tribolium castaneum RepID=D6WEI3_TRICA
actgatttatcatcgtgtttttgaacgatttttcatgaactttcgataaaagagtttttctttttcagttccgtgtgggcgagttcatcagtggatggagtcggttgaggagctgctggagtttctacaggaatttctacgggtggtgttttattctcaactttaggcacttctgtaggttggtccaaaaattcgaatttgacgtgattcgtggactttgttgattcaatgcttttccttggtgctatggcagcttggggtattggaggaacacgttgcgtagacgatgtaacatcacgttgcgtggacgacgtaacatcacttggtgtggacggaggtattacaactttgagtgatttgtaaagatgatcccaaaagtttccgaacgtagactccattctagtgtagtctagcagatgatatgctcgaaattctataggcaagtcaaagcacttcttgtatatgcaaggaataatttttcgtcttctcgtttcaatagattccattcgggccaaagtataaaaatatttgtgagttggacattccaaaaatgaaggagatactacaacaaccactctattgcacctggtagaaatcaacctaatcacagcatcgtgactgttttctcctccgatgacgtctctataagtaacacacaacttcattttatattgtacttctaatttgttgatgatctcaatagcaaagttgatatcgtcgtcactgaacatcacgaaggcatcgtaagtttgtggtggaagacctagactttttcgttctgcatcgtcgtgtgttataatgtctttgtcgtcaatatcttggagctgggctctgtagccgtcaggatttgcttcaaaccattctgcgtctttttcaattagaggtgtaacatcttctacaacatcaaatctgtctagttgttccaaaaaagacaacaacttggcagtggtgctttcttctctatttttttcagaccatatgtccaaaaccttcaaagctgcatcgttactgtctttaatatgtg

SEQ ID NO: 8581 - DNA, 1019 bp, Diabrotica virgifera
  SmartBlast Evalue=6E-11; Info=Amphioxus leucine-rich repeat containing protein n=1 Tax=Branchiostoma belcheri tsingtauense RepID=Q0GC26_BRABE
ttctcggtaattagtgaacatcttggcaatacaatgttaaagctacttatctttggactattctgccttcatgcggtcctagctgatgaagtcaacaaatgtagagtcgagacccaagaaatattcgataatactgatatatactgcaacaacttaaaattagatgataaggaattgcccctagatggaccagtaccacagaccaagattgtccatgtaaatttcttgcattgtaccggaaaaatcgacgaaaactcatttcctaaactaagaggggtattgacatcaatgaatatcaatggaggagatttggaaaagtttgtcctgccggaaatgccaaaattaacatatctagaaataggtgactcaaaaatcccctctctgaatggagcacttaaaaatgccaaaaatttggaaagtgtttcgtttagaaaagatacttttgagatcaaggaaggagatttggatggtttggaaaaattggagagcttcagaagtaccaaagtgaaagtacaattgacaaaaaggttgttgcaggatctcaggaaattagaaacgttaatggtgacaaagggtcgcttagaaaaggttcctagtgatgctttccagaacaatcaagaaataacgatcttagaattggatgattcttccataacaacaatcgaacctggaacttttgacaatctccaaaaattagatcggctcgacctcagatccacaggtctccaaagtcctttcgacgtaaacttaacaaaagacttaaagaaactcaattcgttgggtattcccgctagaagtgttaaagggctggatttgaaaaaagttgttagacaattgcccgaagttgttcgtcttcagtttcaagaagaatgatgcgtcatgtcccgaagtgaaagctttatttgaagaagttaagaaaagtggaagattcatgggtgtatcttatataagtgctgacagcagcaaaaacttgttaaaataatataaacctgaataataaattactgcgttaaaattgt

SEQ ID NO: 8582 - DNA, 1025 bp, Diabrotica virgifera
  SmartBlast Evalue=1E-69; Info=IWS1-like protein (Fragment) n=1 Tax=Harpegnathos saltator RepID=E2BN92_9HYME
cttcatcgctttttcttcgcttgcttccaaattgttcatggtctctttggaacctttcctctctgctcaaagctttaaagtctgtagataagttgaagataggtcttgcccattcactaatcagtcttccagccctctcacgattttctttagtttctttgggatgtttatataaatacatcacagctttacctataccagattgtttgatagtggactggtcaactttgggaaaatcagctaaaagttttaatatggcttctctaagctgcaaagaaggtaaggatctatctggcatcggtgccaaccaatctgttaaaacgtttaatacattatgttctatgaaggccagttgtagatcgtgtttttttaactgtgacatgactttggcaagcatggctgtttttttcgtggcaggtttgaacttttcgttaagtttcctgtcctcctctgctgcttgtctcatgtcacccaaaagaccagcaatgatatcatcattatcgtttataatatcaatgtctttccttttacgtcgcttggtgccttcttcacgtttcctttgaagcataatatcaaaatctgacatgccatgattatcatcctgtgagtttcctctatcatcaatgccttcatccgaatcagaatcctcctgttgaggtgctggtcctgcttgagcttcttctggttgtgcttccgttgcagcagccgtcggttcatcttcgtcatcactaactactacctttttcgttttattaggtggagcctcttcatcttctgagtcagataaaactgctctcttacggtttggtttactcgcttcatttcctgaccgcgatccagacctggaccttgatcttgattttgccggtgaacctgattttgaacgtgatctagatttagaacgagaccttgacttcgcagaacctgatctagattttcttgaaccagatctagatctcgacctctttgaaccggaccttgatcttctcgatcccgatctcgatcttctagaacctgacctagac

SEQ ID NO: 8583 - DNA, 1020 bp, Diabrotica virgifera
aagtggagtgaaaatacaatttatttaggattataatttaaaaagattgtttgttacgtgaaaggtaaaatccacaggtagctgtaattattagtttttagaaaaataaaggtagaaagatttggaattttaagtctgtttaagcacaagaatatttgtataatttccgaaaagtgattagtttgagtagaagtattgtttgaaagaatgcctgggtttttcgaatgaaaaagaggaatgtggaaagagaaatgtttcttattggcttggcaatttggaagggggaaagagaagtttgaatgttgagacagtttggaaaagaaagattattgtgtggccggcatccgagaagggcagtcgaaagttttcgcggatagtttcagaagcaagtactagtggttgtttgatagtagagagtagctgaaaagtggaacgagagacaaatcaaattgagaagaaaaacctctttgattctgtaaagtccaagagagtaagttacaagaactatagttattaaaattatttgtgacaccaagtaaaaaaagatacttgggtctcaggagattattattgagagaaagagaggagagagttttggagtttattgaacgagtactggtcaaaagaggcctggcttgtgttttggagaaatagttgctggtatgctgctggattgatgctgagaacggagagggctttgattggtagcctaacataatcaacaaggaagagctgtttgggtcaagaggagacatcattgtgtgtgaatcaaaaaggtcagtcaataacttatgtgatagatgatctttataatcagaagttaaaaattttgcgtaaaagcatatgaattaagattccaacatttcaaaaatttaataggaagtataagtagttttgcaaataccttaatttgtttgtttagcttattttattaatggtattaggaacaaagcgataaatatttctttgaaatagattaattatatggtaaaagtttcatttggacaattaaccacagga

SEQ ID NO: 8584 - DNA, 1029 bp, Diabrotica virgifera
aaaaaggaggcggatctctatatgcaaaagtattatgaagatcagcatgagctgcagtcgaaaatagatcagatgcgacaagatcgagaggaggtctgcagtttcatttggaatgatatcgaagccatggttcaagaatatatcgaaagaacagatccaagacggatgcatcttgctgaactgaagattctggattccgaaacagcaatcgaagttgttcaaaataaggaacgaattcaacaagaagaggtattaaaggaccaattaaataaagaactcgaagaggttcaagttgcacaggaacaacaattaacaacactcaacgaagaattagacgttttacagaaacaatttaacaacgttcgtaccaatcttcatcgtgatttacaactcgatgataaaaaattaaaattacttgtggacgaagcttcgagcaccaaagactatttggaaaatctacttcgaaaaggaaatgagatattgttccttgtgaaaacgtgcaagaaattagaaactgaccgtgaaaagctgtcaaaatggttttcaggtacttccaagaatgtgaagaacttggatagtatgccttttggggattatttggaaggtttagacgaaaattcagaaggtagctctgattctgctaataatcaattagaattagatttgaacaaaaaagaatccaaagaatcagaaaaagtatcaccagaatcacttataaccactcttcaacatataacggtccaggataaacccaacgaactggacacacatccacaaacgtcactaccagaaccagaacccttattttccggatttatagatcaatgtctaaaacaattggagccgatggaaaacttctggtctggttataatagagccgaagtagactgtgctgagataatgcaagaaaagaaacagctcgaattagaaaataagcaaattcgtggaatgataagagccattttagaagctcaagtcttatccacttcaattccaaacagtaaagttcccacccgttttccttctaga

SEQ ID NO: 8585 - DNA, 1028 bp, Diabrotica virgifera
  SmartBlast Evalue=5E-20; Info=Zgc:162621 protein n=3 Tax=Danio rerio RepID=A4QP13_DANRE
cttctggtggtccttggtccctggtggcgtcttgggttgggactggatccatggtggagtcttgggggggcacagggctactcagttcaccctggtgcggtcccccgtcgttcatgttggacgaatcctgtggcgtcgtggacgacgcagagctactcagttcaccctggtgtccacgatgcttcgtaaaaaagatttcgttgatttctggtggaggtccatctctaggcgggggaacggagcggatatcgtccacatggatggttcggttgacgtcctggtccctatgtacctcgtacgtatggtcgcctaatgaccgtagaattgtatgaggtcccgtccatgtgggtccgaagttgcctttctgatgattccgcaccatcacttgctccccctggatgaacttcctggctggtggagcgttgggattgtccgggaacagatttctggcgtacaccgtggcatttcggacggctttgtccgccctttcttgtcgtctggccgcggtgttggcttctcgttccgtctgctcgctctcctctgctcgtctgggcaggtaacctagtagcagctcggcaggtgtctcttgggtggcctcgtttctcctagtccttaagctgaatatgatttcaggcacataggagtcccatctcgggtcgtcgtctgctttgcacctggctcgaagtcccttcttgagctcttgagctcgtcgttcaacagggttggccctttggtggtagattgggctgaactcctgttgaatgtgatggcgtcttaggaacctctcccaggcgtctgttctgtactggggtgcgttatccgtgattagggtggtcggtcttccccagcggttgcagacttcttcctggaggaactggatcacctgccggctttttgtggtttgtacgcagcggaattccacccagctgcttaggcagtccgttgccaagaggatgtagcggttgcgggtccctcgtcctggtgggtaaggtcctaggatgtcgaaggagaccctctcccatggattc

SEQ ID NO: 8586 - DNA, 1025 bp, Diabrotica virgifera
  SmartBlast Evalue=1E-34; Info=Activating signal cointegrator 1 complex subunit 1 n=1 Tax=Harpegnathos saltator RepID=E2C605_ 9HYME
cttcctgtatctagaattcataattgtaacatgtaacttcactctatcatattgtctcttggccaatccagacatagcaaataatccgctacgttattggcaatatattgcaagttttggaactggacttgatcatccatctctacgtttccatataacacatttacggaactaggatcatcattcatgatttcaatccctttcatgtgtatgctgtatgtcctattttttgggaatgctttggatatgatttcttcatagcaattcctcaacacttttttggctgttgttatttcttcatcgtctaataaagttagagtgcttatagtgagatgcagtttttccgaacttaaaaaaattgaatctgaaattcccctagcaggatctttgagtatgttttctttgaattcaagtatttttgcttttacggaatcagacaccataggaatcgatacaaaatggcttataggcagcttctcttttctctgatttacaatcaaggagatctgagttctagctgaggctactttccgctcttgctctcccataattttgacatttcctttttcgttgggtctcggtaccttgatctgtgtgtttgtgcttctctccaggcttttcagtctagatgcttttgctccaataatgtatggtaacaaactagaaggaacatagaaagaagttacgtattttcctgattggttcaaggttatttcgtaatcgttttccatatcttggcaatctagtaaaccagtgtcgttgtcttcgtatggacggaggggggctggcgcaaaaccctcgttctgtttgcatgctagggacgacatccagtatgtggaattgccgaagttgataggggttacgttaagttgcaggggccccttttcagtgaaaaagtccgggaaatctcgtcttgtcgtttcttggtacatcctgtataattgaagtagtattcaaaaatgggtacaaaattgcaaagacataagacaatattttttattttgtatttattgcactgacgtttt

SEQ ID NO: 8587 - DNA, 1026 bp, Diabrotica virgifera
  SmartBlast Evalue=1E-47; Info=Enolase-phosphatase E1 n=1 Tax= Anopheles gambiae RepID=ENOPH_ANOGA
gctaaaccggaacaactacgatcagtgccggctagtttattcctcatttttaacaaaaaataccgcataaaatcgcaattactcaaagtaagatagtgctggtcattaaaatttagtgagcaaagcaaaatgagtgctgaaaattccagccctgctttgagtgtggaaaaatccattgttatactgctggatgtcgccggtacaacaacttctaacacgtttttaaaagataccctttactcttatgtaaccaaacaagctgaaaccttcctgaaggagtcatgggaagaacaagaagtaaaagatgcagtcaaacttatcaaagatgatcttgatcaagaagcagccattccactcattaaagagctgactgagaaaaacagtgataatgaaggcttgaaaaaagtacagggactgatttataaaaaaggctacaagaatggtgaattgaaagcacatgtatttcctgatgttgtccctgctttggagtcctgggccaaatctcgtaaaatcgctatatattcaactggcagcttagaatctcaacaactcctattcactcataccactgaaggagatgtatctgcacacatttccaaatattttgatcaaagtactggatccaagacagagtctgctagttatgaaactatctccaaggaattagaagttaaacccgaagaaattctatttatcacagatagtgttgatgaggcgaaagctgctaaaactgctgggttatcttctgtcctaattactagagatggtaatgatgctttacccgaagaagcttccaaagatttccctgttatatccagtttccaggatgttgtatttgacaaatcagtaaaacgtaaaaatgaagaggagagtgcaccaacagaggttcgttcaaacaaatctagaaaacacaagtagatattatttactttctagtagatatattttaaggtttcatgggttgaacatgttactgcatttattccagattttgtgttgttttaattatataacatactactaatt

SEQ ID NO: 8588 - DNA, 1026 bp, Diabrotica virgifera
  SmartBlast Evalue=1E-121; Info=Domino n=1 Tax=Tribolium castaneum RepID=D6X265_TRICA
cgcaacgatggcagctgttgttaaattttcaaactcaacaacgtctgctgttgactggtacacctttgcagaacaacctcatggaattgtggtcccttatgcattttttaatgccgaacgtatttcagtcgcatagagagttcaaagaatggttttcgaatccggtgacaggaatgattgaaggaaattctgaatacaacgaaagtattatcaagagactgcacaaggtattaagaccatttcttctaaggcggttgaaaagcgaagtggaaaaacaaatgccaaaaaagtacgaacacgtggtcatgtgtaggctatccaaacgacagaggtatttgtatgatgactacatgtcccgagcaaaaacgagggaaactttaactactggaaatctgttgagtgttataaatgtgctgatgcagctgaggaaagtgtgtaatcatccgaatctatttgaaattagaccaacgacatcgccttttcagtgtgacaacatccggcttcatattccatccattgtatattcagctttagattacgatcctgataagcacgtgaaccttcaagctttaaatcttctactaatcatgcaagaaatccactttggttcgtaccagtgttaccggatgagacaatcaagaaattccaagaaaattttcgaaatggaaacgaattctagcaaaaatccaccaccttgtccgccatgtaagttagccatgcgagttctaacagacaaaccttcagccactgacgaaaagaatgagaagaaagacatgcaagctttaagtcagccgcctccattgcaagttaaaggaatgagccagcctaacatgaagatgaaggtttctggagtgcaatttgttccacagagcatacttaaatcaattccagtagtgaacatatcacaaggggctacaggtcaaatcggagcacctgttagtgtgacatctgtattaaaaccacaagacaaaatatctgctagttttgcacagctagttcaaacgtctactggcaaacacttgttac

SEQ ID NO: 8589 - DNA, 1028 bp, Diabrotica virgifera
  SmartBlast Evalue=1E-54; Info=Alpha-tocopherol transfer protein- like n=1 Tax=Camponotus floridanus RepID=E2B175_9HYME
gagaataaatattatggttttcttaacgatgcgctgagtatttttagtgtacatcctagtttcgttctagttttgtgttggttttcaatcgtctgttccaaacttaaaacatgtcccacccttcattggagtcaccgcaaaaaaaggaaacaacatttaagggtacttttgatttagaagaaccatcacaggagttgttgcaatgggccaaagaaaacataaatgaggatccagatacaagggatctgttgatctctgaactgaaggatatgatatacgaaagaggggaatgcactcctacaaggaccgatgacgagttcctgctgaggtttctaagagcccgtcattttattcttaagaaagcacaccgattgtatgtaaactaccacaacttcatccaagaagctcctgaatatttcaaaaatgtcaacttgcaaaagttaacagagatcaagaagacaaaaatgtttaattgtcctttaagtagggatcaaagtggaaggagaatgttgatatataatattggtgaatgggttccatctgacttctcccccacggagcttattcaatttgtgatatttttaattcaaataagtatgttagagcagaagacacagataaacggagtggtggctttgtttgatcttagtggattgtcgctggaaatggtatggtacatgagccccaccttggccaagcatatggtcaatattgctacgacctcaatgccctgtcgtctagaaggcgtgcattttctctacagctcatggatgttcgatacagctttcagcatggttaagggtctagtatcaccgacagtaacagacagaattcattttcacaacgacctggaaactctgtattcccatatagatcccaaataccttcctaactcgttaggtggggctcaagaagattattctttagaatcctggtacaatgatatattggagacccatggtgaaacggtgaagactgaattagaaagtttaggataccctgttaaggagttccttgattctattggt

SEQ ID NO: 8590 - DNA, 1028 bp, Diabrotica virgifera
  SmartBlast Evalue=2E-72; Info=Short-chain dehydrogenase n=1 Tax= Aedes aegypti RepID=Q16TB7_AEDAE
caacacagaccaaggcaaccatagttttaaaggcaagcaccatctaaaataaccaggcacaattactatatgttcatctttcaataaagcgtcgatagttctgtcagctacatcgtttgctttcagtcttggaaagaatttagaattaacttcctcgaacattcccgtttgttgaatgaaataaggacaaactactgttgtttttacacctttaataccctggttttccaattctatttttaaggactcatcgaaaccaatagcagcgtactttgacgagcaatagtctactaattttggtactccaatgtggccagcaagggaggctattgttattatgtgaccgttgtccttttctatcatcttgggtaagaacgctttaacagtccaaaaatgagctaccacgtttacgtcaaacgtcctttttattaaatggtctggggtattgagcaacgtgtgtccagatactacaccagcattgttaattaaaacagaaacatccccaacttcttcttgggttttcttagctactctatatacatcttccttatcagctaaatcacatttgtatccataggcttttccacctactccttttactaatcctacggtttcctccaaagctttttcattcacatcccataataccacagttgatcccagtctagccaatctgagagccagtaatcttcctagtcctcctcctccacccgtaattaaagaaattttgccatttatatttttcctatgttgataagctgacggtaaacaggctttgtaaatagcggtgacgattagcgcaagagaatacagcaaaaaacctatcacttctatcactgttatcacaatttggtttccactaggtgagtgtttttcggttgccatcttactggttgaagttcagcatcaaactagatacatattctatccgatcaaggaactattatatcgttgtcagttttgtaaaaaaggtcatggatgttaacgttgcttatctgttccagttacacgttttaacactaacaaat

SEQ ID NO: 8591 - DNA, 1026 bp, Diabrotica virgifera
atacgctcatttttttctctatcaacaattgtttcttaatgtctctgttgtaggtgtttcctgattattggatggtatcttgccatttttcataattgccttccaattattcaaattgtcttactttttggaatcattgatgaaattttttacgcacctttatctgaaaatacgaaccagtacgccagtgcggctaatattaatatgtggttcatattttcagataaatgtgcgtaaacaatttcatccataggtcgctggttcatattcggatcgaaggaccactatgtttgtttatacgaagtttgaagtaaggttgattgggggttgtaataaatcgcttcgcacttgttaatatttttgaatttaaacgtttattgagtatatataaagaaattagatatgtaacagtattaaaaataagaaggttatatgcgtgttgcttctctgaatgttttgactcgaatgggttctggaatctgcctttggtgaacttcgaccttcagtcccgtctgcttgagagcgcggggtagtaaaaaattaaccacatgttaatattagccgcattgggtactggttcgtattttcagataaatgtgcgtagacagaaatatgtcatcaaatgcattttatgggattgtttcttttttttaaatattaggttcccctaactttggcaattacattggcgagatgttcacggtcttaagctaatctgtacagttgtttggaagtacttattcattgtccaatcacgaatattcttgagtcatgacatctggttccttccaattcttctgcgggcctcgattttacctttcttgataagctgaaggattctgtatatgttgatggtcatataattcaagagtacccagttgtaaatatcttggttgccatattactgaacaactagatccagataaagagataaaatgtagaatcgagatagcccgcacgacattttaaaaaatgaggtcattcttctgtgatgataactttcaacttcgaaagcgcatgattaaa

SEQ ID NO: 8592 - DNA, 1028 bp, Diabrotica virgifera
  SmartBlast Evalue=1E-53; Info=Receptor expression enhancing protein isoform 1 n=2 Tax=Bombyx mori RepID=Q2F5K7_BOMMO
cgcactcgacttcgaacttttagccgggtataccagtttttttatagaccttaacttattattaaaactcgttctatttcaaaacttaacacgttgcgttatcgtcagtgattagaatttcattccaatatggctcaaaagttcaacgaaattaaacagcagttagatgttgctttgcgcgataattctaagccttggaccccccttctagcagcagcagaacaaaaaacaggcctagatagggtttatctagctttaggcgctgctgcgtttttgggcatttggctggtgtttggatattttgctcaactaatctgcaactcgttaggtttcctgtatccggcctacgtttcgataaaagcgatcgaatcgaaagaaaaggatgatgatacgaaatggttgacttattgggttgttttctccttgttttccgtcacagaatacttcgtagatgttatcgttaggtggttccccctctattggcttataaagtgcatttttatggtatggcttatgcttcctggagatatgaatggttcagtaatcctctaccgtagagtaatcaagccttacttcttaaaacaccagggtgaaatcgacggagttgttaacaaagtgaagaatacagttaaagacactgttaacaaagtgtcggaaaaagcagagtgaaaatagccaacatcgaaaggtctgaacttttttccattgatggaatgttttatttatataaactggatattatccatattctaagatatttatataagccaagtactttattggtattgttgtgattatatataatctcatatgaatggtattaatttttaaatatatcccaattattgaaggcttaatttttttaaagagtttttgtaaaattgttcaatatttgcttaagcacttgtttaaactacttgaaattttaaagggtactttttaaagatataaactattttgagactttttgggcaccaaataaatacaattgttcaataaatatgtttcggttattttcgaccttaacc

SEQ ID NO: 8593 - DNA, 1025 bp, Diabrotica virgifera
ggcctgtaaatttcactcttcacgtttttcttttgtgctcttgtatttgattcttcccagattattattttaagctgtttcgtaaattttctccataatcctgatattttgtgttcattgaaaagttcagaatggacgcacaacgagtaaatacaattgaaactattgaataatattggcattacaagcatactctaaattctctccctggcatgtaccttgttttatattacaaaaaaggttgccattttcctaaagagaagaaattaaaactatattctgttaagagctttaaaatattgaagtggtggctggggtgctacgtacaaaaattgatatctaatataccatttaatattaattccaaagtatataaaagttctttcaatcccttaaaaaaacgcgaatgtagtttcatgtcaatatcacagacaactcttagctgcatataaatcagcataactttaattaacatacaattcttaaattgaactatattatggtatagtactatcgttttttatgatcgaattaccaagcaaatatcttgacaacattgactttaggctgacattagaatattccagcgcgtaggatggatcttgtaaggtttaaagtgttattatctaaagagattacaaatgccgtccaattcagtgtacctccttggttgatcagaatgtaacaactctctcttgacaaaacgctagttttgccgcgttttatccctataggtacctcataaaaaggactgtaacattacaacgaggaaaatttaagaaccgtacttgaacgaaaaaccaataattagtaaacatttttccaggcgatggcatcttaatcaacacatgaacctactaccaatatacttataaaacagactctttcagttgtatctcttccttttcatcaggtgatgaagtagttgtttcaactatcgtgggaataacgttcttcgcacttccccctcccatcgttattggttcatcgtcctcctcatcgtcttcatcaataggcgtgagagc

SEQ ID NO: 8594 - DNA, 1027 bp, Diabrotica virgifera
  SmartBlast Evalue=5E-19; Info="Eukaryotic translation initiation factor 3 subunit, putative n=1 Tax=Pediculus humanus corporis RepID=E0VQW2_PEDHC"
ctgaaatggatgttcgaaggtcgacctcaaatttgtatagtgataatttgaagaatttttgtgtttttataatttcttatcaaaaatttaaaaaacccagacatcgcgtttgatagcagtttattttttcttgatttactaaccaattttaacgattttggttggtgaatcatcgttagttataatcgtccataagccacacgtgaagtggtcattttgaggttcggtgctagtacaatctgcaatatggaatcgtgggatgatgacaattttgagcccactgctcctacagttgttccagtagctgctaacaagtgggaaggagaagatgaggaggaagacattaaggaaagttgggaagacgaagatgaagaaaaaaaagaagatggaaaggctgatccagatcaaaagaaacctaaaaagaagagtctagctgaaaaaatagctgagaaagagaggttaaaaagagaagaaatggaacgaagacttagggaagaggctgaagaggatataccaccagaagaaaaacttagacgtcagcaggaatctgacctgaaattagctcttgaaacaacttttggtggtaacaaaactactgaagttcttactgatcttacattacctaattcaacagaggaatttgatagctttactgataccctttccaaaaaactcattactctatccaaaagtactgaatatccaaattttgtagaaaatttgactagaagtttatgtgccacaatgtcatctttggatattaaaaaagttaaaaactcattagataatctatttttggaaaaacaaaaaatagaaaaaggtgacaaggcgaaaaagaataaaggaaaaggcaaagcgaagctccacattgaaggtgataatcaatttaaccaattatcagcttacgttaacgactacgatgaatacgacgattttatgtagcaacaaaaacttcggatatttaactattgtattttaatattttttatctaagttattcaaattgttacataaacttctaattgag

SEQ ID NO: 8595 - DNA, 1025 bp, Diabrotica virgifera
  SmartBlast Evalue=2E-95; Info=Zinc finger MYM-type protein 1 (Fragment) n=1 Tax=Camponotus floridanus RepID=E2AEF4_9HYME
catcacatactctgtgagtgagttgtacaggattacaacgctgtccacggtcatattttcagcctggatctttcactgactgaattaaatttttgaagtacatctccccaaagggctgccatgaaacatgtttctagagacattagttttcgcaacaaccctttggctttggattgtgtctgtttgttttcatgattgcttgaagtcatgtctatcagcgtcttgaccatgggtttgtagtctttattaaggcttttgcaagcttcttcccttgcagaccatcttgtaacactgagagacttcaacgacgtgttcttgtcctttcctgtggccgtgaaatttgacagaagaagattccacctgtgcgtagaagacgagaaaaaattgtacaatccttgcaagagatcaaagaaatgttttgcaagagaacagcattctgctgcgcttgatcccactaaatttagtgaatgcgctgaacaaggcacataaaatatcaagggattcttttctttaagtcttgcctgcaaccccgagtacattcctgacatatttgacgcgttgtcataggactgtcccctacagttttgtatgtccaatcctttcgactgtaggaaagaaagcactgagttcactagttcttcacctgtatgaccttgatttttcataaattcaacaaaatgttcttcagggattcccaattcattcacataccttaatatgaaagacaattgatcaatgtgtgttacatcaggggtggaatctactattatagaatagtacttgcttttcttagcatcattcaaaattgtatcaataacggtttttgccattatttcgatgagttcttcacaaatggttgatgataggtatgactgtttgcctttacccgctttcccatatttttcaatgtgtgctttcaaaaatggatcaaattcggcaatcagctccaagcacatcatatagttgccatttgaaaaagaaccaaatttttcgtcagtccccctaaaggcaagaccacgcgaggc

SEQ ID NO: 8596 - DNA, 1025 bp, Diabrotica virgifera
  SmartBlast Evalue=3E-45; Info=Small nuclear ribonucleoprotein SM D3 n=3 Tax=Culicidae RepID=B0WEA6_CULQU
tttgaacgtttgctcaaaataaaatacacaaaatatatccgttttcatcgacaattcctgattagattttcttgtaatattattaaaatattaattattagatatcaaaatgtctattggtgtacctattaaagttctccatgaagcagaaggtcatgtaataacctgcgaaacaattaccggcgaagtatacagagggaaactgatagaagccgaagataatatgaattgccaaatgactcaaattactgtaacttacagagatggaagagtcgctcaattggaaaatgtttatattagaggatcgaaaattagattcctggtattgccagatatgttgaaaaatgctcctatgttcaaaaaacaaactaaagcgggaacggcaggccgaggaaaatctgctatactgcgagcccaagctcgggggagaggtagggggcaacaacaaccgatgcgaggtagaggtaattggcaacagaaccaacaacaagcacctgcaggaaggggaagataagagctgtgttataaaaagactgttatggacagttattgtatatagttttgtgggtgttctttaaatttgaatattagtttggttttgatacaggttgtatagtttcatgatttattatttattgattatacaagcagtttgtttgtagcctgccttgttggtgactatttgacagtttggtaattgttgaataagagggtaggccttagaaatgctaaattttttatggacttggtctaaaaagtgaaaagtcacaaattttccgcttttctttggggggaaatagcaaaagtgtacaaaaataaagatataagtacttaaaaaatcaaaaagttatgtgaaaaggatacaaaagtatcttaataaaaacctaataaatatcactgatacaattaaattatgcaagaatacctatcagttaaaataattaagctttttaactcgttcggtccatattgctgtcttggtcaatatgactgagaaagtagctttcccgcaggccagctcgacc

SEQ ID NO: 8597 - DNA, 1023 bp, Diabrotica virgifera
  SmartBlast Evalue=7E-54; Info=Ankyrin repeat-rich membrane spanning protein n=1 Tax=Camponotus floridanus RepID=E2AU14_ 9HYME
gtcttcttgtcagtgatctcaaaatattcctgccattcactatcaacttggatccatatttaaagaaggttatcaaagaagaaactcaaagtttagaagacgacgggctcgtcatgggttccatcaagaactccatgtcaggaaaccacagcatgagcagttggaacaactcagaatgggtatctccacgaacgaatctctcgcgaagaatgagaacaacgccgaaacctcaaatgacgccaatgactcatcatggtactcctcaaacttcaatgatgggccagccgatgcaacagatgactccttctatgtccagctggtcacaaccttggaacgattctatggtttatagaccgcctatgccgttggcacctttaactgtcgctgagcccgaaattttggacataaaacttcaacgcttaacgtagatggcgttacgaagctgttatccaacatgagtgatctgaacaccagtgctgtaggagattataccaagactattaaggataacaacataaacggaagggtgctgttacattgtgatttagaggaacttaaaaagttactcaagatgaattttggcgattgggaaatgttcaaagtcatgcttgttatcttaagagaacaagaaattaccagtgtattacatcaagaggaaataaaaccatttagaataattccaaaagttgaaagaaaaaatagcaataaatctataaacacaagtgagaaagaaaaggtaccagaagatggacaacaaagaccacaaagaaaacaaagtattatagaaaaacaggtgactttggaagatcagatgatctgcggcgccctccaaaccttaaacgaagaagcctgcgaagacgtgatggaggaaacagaagacaccaaaataaccatcgagcccgacgtgccacaaacgtccgtgattccgcccagtccagaccagaatcaaggtgaatttcgaaacgcaatgacaccaccacctagttcacttatcataccattggtcaaagaaccctcaaggca

SEQ ID NO: 8598 - DNA, 1023 bp, Diabrotica virgifera
  SmartBlast Evalue=1E-141; Info=cAMP-dependent protein kinase type I regulatory subunit n=3 Tax=Aculeata RepID=E2AEL2_9HYME
caggcaagttgatccttatgtgaaaaaagaaaacttttatattttaagacgtctaaatttgacgtaaatacgcaagtgattttaaagtgcagttattaaatcagtaccttattgtaaaaataaaatatgaccacaaatttcgatgaagaacaagcactgcgtgaatgtgaggcctatgttcaggcccacaacatccagcaggttctcaaggattgcatcgttcagttatgtatcaaccgtccgtcgaatcccattgcgtttctccgcgaacattttcaaaaattggaacgggaacaagctctggacgctaaacaacaagccatgtctcccgaggacactgaagacttgtctcctctaccagcccatgcccagcagcctgcccgacgtcgtggaggaatatcagcggagcccgtgagcgaggaagacgccaccagctatgtcaaaaaggtcgttccaaaagactacaaaacaatggctgctctctccaaagccattgccaaaaatgtcctgttctcccatttggatgaaaatgaaagatctgacatttttgatgctatgtttccagtaaactgtcttccaggtgaatccataattcaacaaggagatgaaggagacaacttttacgtcatagaccaaggggaagtagaagtatacgtaaataatgaattagttaccaccataagcgaaggaggcagcttcggagagctcgcgcttatatacggcacccctagggcagctaccgtcaaagccaaaacggacgtcaaactgtggggaatcgacagagactcctacagaaggatcctcatgggctcgacgatacgcaagaggaaaatgtacgaagagttcctttccagggtttctatattagaaaacctggataaatgggaacgcctcacagtcgctgacgcgctcgaacccgtcagttttgaggacaacgagaccattgtccgccaaggagagcccggtgatgatttctacattatcgtagaaggcactgctgtagtgaaacagaacagaatcgag

SEQ ID NO: 8599 - DNA, 1015 bp, Diabrotica virgifera
  SmartBlast Evalue=1E-76; Info=DnaJ-like protein subfamily C member 3 n=1 Tax=Harpegnathos saltator RepID=E2BUZ4_9HYME
atgtatatgtagctataatataaagtttgcatgtgtattatgacggtattatataggtaattatttcgctatactctacaacatattatcaaaccaaaaatgttgagcagttttgataatttaaacagaaacttttggttaaaaactacaccatatttagtcattttaacactcgagttgttattagatgtttcagattgtatgacacaagctgaaataaataggcatttagagttagggaaacaatatttagctagcggtcagttaggagatgccttgagccaatatcatctggcagttgagggagatcccaacaattatctaacttacttcaaaagaggtactgtgtacctagctttaggcaaagcaaagaatgccctcagtgatttagatagagtgttagaattaaaaccggatttcactgcagctagaattagcagaggaaatgttcacctcaagcaagccaactatgatttagcacaattggattattataatgtgttaaaaagtgatccatacaacgctgaagcaaatgaacttatcctgcgaatagacccgaccaaagagaagaaacgtagcgcagagtactactacggccgcgatgactacgtatcagccattcattacctcaccgaagtcatggaagttagtccgtgggcctcggacctctacgaattccgttcagaactacacatgctaaacggggatgaagttgccgccatatcggacatcagatcagctacgaaactgcagagcgacaacacagacggattcttcaaactttctaaacttttatacaaagctggacaggctaccgaagcgttgaaagctatcagagaatgcttgaagctggatccagagcacaaagactgttttccattttataagaaagttaaaaaagtagagaagtttttaaacagacgccgaatcttcattagaaaataaagaatacgcacaatgtatagaatcagccaacaaagccttgaagaacgagaaagacgtggcgagcatcatt

SEQ ID NO: 8600 - DNA, 1023 bp, Diabrotica virgifera
  SmartBlast Evalue=1E-153; Info=Titin n=1 Tax=Harpegnathos saltator RepID=E2BUG0_9HYME
agactgggagaaggcactggaagttcctggtgaccaacttaaggctactgtgccagatcttattgaaggtcaaccttaccaattccgtgtgagggctgtgaatgccgctggtcctggtgatgctagtaatgaaacaccaactattattgctaaaccacgcaatttggcaccaaagattgacagaactaacctcattgatgttaaaatccgtgctggacaaagctttggctttgatgttaaggtgtctggtgagccaatgcctaccactaaatggctgattaaaaataaagaactcaagagtggtgatggaatgaaagtacaacatggagagtacaataccaaaattaatgttaaaaatgcaacacgtgccgaatccggaacttatactattacagcagaaaacgctaatggaaaagatattgctgaagttgaagtaatcgtattagatgtcccaagtccaccaggtgggcctcttaaagtatctgatgtccacgctaatggagctaaacttagctggaggccaccagctgacgatggtggacaacccgtcgaaagatatatcgtcgagaagatggacgaagctacaggtcgctgggtacaagccggtgaaactgacggccctgaaacatctttagccgtagatggtttagttcctggacacaaatataagttcagggtaagagcagtcaacagacaaggtaaatcagaacctcttcaaactacccaagctgttgaagctaaaaatccatttgaccaacctggaaaaacatctgctccagagattatcgattacgatacagatttcgttgagcttaaatgggataaaccagaaaatgatggtggttcaccaattacaggatatgttattgaaaaacgtgacaaatataatcccaactgggagaaatgtgctgaagttgaaggggatgttcctaaaggaaaagttaaagacctcattgaaggcacgccttatgagttcagaatcagggcgatcaacaaagcaggtccaggagaaccaagtgacgc

SEQ ID NO: 8601 - DNA, 1024 bp, Diabrotica virgifera
  SmartBlast Evalue=4E-70; Info=Charged multivesicular body protein 5 n=10 Tax=Drosophila RepID=CHMP5_DROME
agaatttggatgactaattaagcaaaaataattctttaaaaatttgatattaaatttataataatacaaaatgaatcgtttattcggaaaaggaaaaccaaaggaaccaggtccaagtataactgacgttatatcaggggtggatcaaagagctgaaggtgtagagaaaaaaattaatgccttagaaaatgacttgcgtaaatttagagaccaaatgtctaaaatgcgagaggggcctgccaaaaatgctgttaaacagaaggccctcaggattctcaagcagaaaaagatgtatgaaggtcagctagagaatttaaggggccagtccttcaacatggagcaagctaactttgcacatcaagcattgaaagatactcaagtcacagtagtagctatgagagatggtatgaaagaaatgaaaaaggagtttaagaagattaacattgatgatatagatgatgtgcaagatgaactagctgatatgttagaacaagccgatgaagtacaggaagcattaggcagaacctataatactgtcgatgtagatgaagatgaactggctgcagagctggatgccttaggagatgaaatggcattggatgatgatcagagctacctggataatgttctcaacgcccctgaagcaccttcaacgaaaccagaagcagccgctattggaaataaaggtggcaaggatacagtaccagttgacgagtttgggttgccacagctgaagtagtaaaagtgcacacagagatttatgtactaaaaacatgtaagggacagttttttaacacatgtgtacaatatgtaaagctttagttttattttttaaacttaaaatgtgtatgtgtatcaatggataaatttttctgtagtgattagtaagtaaccagtttgctacacataggtactcataggcagatttgtaattcaaaatggcaaagcagtgttacatttacaaaatatttttataaatttattgttaagtcattacactttataatatagcttttgtttattt

SEQ ID NO: 8602 - DNA, 1024 bp, Diabrotica virgifera
  SmartBlast Evalue=5E-39; Info=Calcium-binding protein E63-1 n= 11 Tax=Drosophila RepID=E631_DROME
ggatcattcgttgaaaacgcatcatttaatcgtgtgaaattacagataaatacaaaaaatccagtgccaaatatttaagcggtgtccctcacttatttactaagtttccatcatatttctaagcgataaaatttagggaagaatttatgaaatgtcatcttaaaacgtgagagcaaattggcacaaacttgagcgttggatcagtagtggataaacatcattcgaatgatgaatttgttttattctcacctgtaaaaaaaaaacaaagtgtaaatagtataagattaagtgtatattgatattagcaataaatggcggcgtaccaattttctaaaagaaggagttcttcaatcaaaaaggaattcaacgagagtgagctagaaggtctgaaaattgcttttgagctgctggatcgtaaccaagatggacaggtcacaccgggagagttcaagatcatgctgaataatttaggaattgacattaagtatgaaaaagctgaagagataattaggattgccagtcattcaggctcagacttaatagaccaaaacgacttcctttctttcgttaaacagattcaaaaagcatgtccaggagacgtagacgaggatatagctagtgacctaaaggcagcctttcaagtttttgatttggacggagatggttatattacaaaagaggaattaaaaactgccatggaaatgattggggaagctgttacagatcaacaattagaacaggttattcgactggctgatactgataaggatggaaggataaactatgaagaatttgttaagttattaacatcgtaaagagagtaagaagaacaaagcttaaaatggttccaatgttctatggtaaatatttggttttaagtaaaagccaggctgtgatccatgtttacaattaaatatcattaagcaaacatattttgactgaattgagaaatatttaatggatatttttgtttcctaagtagatacctaggtaattattgtaaagttgtgtaataaagatatgg

SEQ ID NO: 8603 - DNA, 1024 bp, Diabrotica virgifera
  SmartBlast Evalue=1E-106; Info=Serologically defined colon cancer antigen 1-like protein n=1 Tax=Harpegnathos saltator RepID=E2BDI6_9HYME
aacgcttggagtctctgacacaactgggaacagataggattgtagacttgcaatttggaactggagaagctgcctaccacgtcattttggaattatacgataggggtaatattttactgacagattatgaacacacaattttgtatgtccttagacctcatgttgaaggggataaattaaaatttgctgtaaaagaaaaatatccacaaggcagggctagagaaggtggcgtaatttctaaagagcaacttttagaagttttaaccaaggcgaaagctggagaccaactaaagaaagttcttgtttccaatttggaatatggtcctgctttgttggaacatgtcctagttcagcacaattttccaaattctaccaaaattggaaagaatttcgatcctgttgataatcttgataaagtttttcaagcgattttagacgccgaaaatatttttcaaaattccaaagctggtcagacaaagggttatattcttcagaaaaaaattgagcgagctaaatcagacacaactccaaatggcgaattttatgaaaaccaagaatttcatccgatgctctttgaacagcacaaagaaatgccttttaaagaattcccaacttttaacgaagcgatagatgaattcttctcttcgctggaaagtcaaaaaatagagcttaaagctgttcagcaggaaagggaggcaatgaaaaaattggaaaatgtaaggaaagatcacgatcaaaggttggtggctttggaacaaactcaagctgtcgataaacaaaaagctgaattgattacgagaaatcaagaattggtagataaatccattgtagctatacagactctcttagcaaatcagttatcatgggaagatatcactgatatggtaaaagaagctgcatccaaaggagatcccgtagcaaagcacatcaaacaactgaaacttgaaataaaccacatcactttacaattgtgtgatccttatgctgatccattcgatgacaatgattctgatgttgagaatga

SEQ ID NO: 8604 - DNA, 1021 bp, Diabrotica virgifera
  SmartBlast Evalue=1E-69; Info=mRNA cap guanine-N7 methyltransferase n=1 Tax=Harpegnathos saltator RepID=E2BJP0_ 9HYME
tcgatagaaacttcataaaccttgtttccgaagcttttattgttaaattttttggctctggttacaatctcatacgcgtcgggtatggtaccgataaagtatccacctggttgcagacattcagcggcattgcgaaacatacactcggcctgggaaagactttcaaaactgtaatggaaggcaaattggcaacttactaagtctaatttcattgaaggatcggagtatttttcacgcagtcttagtcttgaacaatctcccggtatatactcgatggagtataaattcgaacccctttctctagcagatctatttttcatgtctgtgtatctggccttacattggtcaagagaaacttcagcaatatcactgcatattagatgggaaattcctccttttttccactttaacaggtctcctcctttaccgcagcacatgtcatgcactcttacaggagcattatgtcttttaccatccttaatttttgttaaatattcattaatcaacatactttttatccaattatgaaaatttcttaaatgtacaatgcgagacttagtcctttcttctaatcccttctcctctaactgattatagtgtgttgctacaacatttgcatatcctctttgtgattttgtaataccatcttcaggatcatcacgtttaaacttttggggtttgtcctcatttgcaacatttgagtagactctttgtgattttgtgacatcttcagaattttcatgtttgcgttttacacttttactctctctttctgctcttgttacattttccaaatcctcactttgtcgtttcctactttggtttgaattattaattacctgggaaggataattattggtgctgtcatcatctgagactttggcataaaaataagggtctttgcttgttgcttcctcctcttgttcttcctcattttcatataacttctggtcttcataatttctggaatcagcatcagctgctaccattaccaaggcctgttctaattcgtttatttcac

SEQ ID NO: 8605 - DNA, 1023 bp, Diabrotica virgifera
  SmartBlast Evalue=3E-97; Info=Arginase n=1 Tax=Culex quinquefasciatus RepID=B0X9E6_CULQU
gataaccttttgaactactgtcggttaatagtgaatcttctttaacgataacatagttgagttagacatgttgaagaaacttatcacggaatgtgttttcgcaaaacgccaatattctgcggaagcgaaaaaaattggtattttgggtatccctttcagtaaagggcagcctaaaaaaggagttacaaatggaccggatgcgataagaaaaggagggctagttgaacaattatcccaattttataacaaatcattaattaaagactatggagatcttgactacccccttctcaaagaaattggtacagtagaaaacatgaagtcctatgaagaagtgatgtcgtgcaataaagaattatcaaagaaagtacaagagattgtagctgacaatcgtgtgtgtttgaatctagggggagaccatgcaatagctatcggatctatcgatggacatctgaaagcaaaaaaagatatctgtgttatatacgtcgacgcacattgtgacatcaacacaaacaaaacatcgggaagcggtaatatccatggtatgccagtttctattgtaacaaaagaaatgtgcgaatattggcaggatttaccaggcatggaatggcaggaaccaacattatctgtaagaaatatagcatatatcgggctacgatcggtagacccgtacgaaagagtgttcgtcgataaatttggcatcgctgcttttagtatggctgagattgaagaatgtggtatacatactgtcataaatatggccttgaaagctatagatcctgaacagaacagatccatacatgttagttttgatattgatgctctcgatccaaatgatgctccttgcacatctataacaattcctggagggttgacagtaagagaaggaatacacatattagaaagaattcatgatacaggccgattgaatgttatggatattgtagaactcaacccagatataggaactgaacgagacgctcaaaaaacggttggagtcgctattcaacttcttgcggcagc

SEQ ID NO: 8606 - DNA, 1022 bp, Diabrotica virgifera
  SmartBlast Evalue=1E-128; Info="GDP-L-fucose synthetase, putative n=1 Tax=Pediculus humanus corporis RepID=E0W157_PEDHC"
tctgtaccaatccacactgttttttacagcaacagaaaatggagtaaattcaaaatcaggtaaatacttccttagttttttgttgctggctgtcttcttgtattggccatcagctttggtggtatcaaacgaaatttctcctttgaaatcaaaagctttggctatttcttctgccaattctttaatcgatacctcagacttttcgtcgacagacaatataataggttcaacttcttgatactctcttaaaacccataaaaatagtttagctaaatctaaagaataaataaattgtcttaaaggcgttccggttcccattacagtaaaagtattgccaccttgttgaatgatgtcattcaattttcttattaatccaggtataacatggctagattctaaattataattatcatgaggtccaaacacattgcaaggaatgacagacgtgaacatacagccatgttgttggtggtaagctttattttgaatatcgattaagcgtttggcataactgtatccgaaattggaggggtgtggtggtccattgtgcaccatagtttcatcaataggatactctgttttatccggaaatatacaggtagaaaggcatgacaccaccttttgaacgccactttcaaaactaatttgcagtacgttgtcattcatttttaaattctttcttaaaaaatccaaattatgtgacatattatgaaagagtcctccaaccatagcagctaagtgaatgacatgtgttggctggtgtttttcaaatatttttttagtctcattataatcacataaatctccatctttactgcttaaaaatacccaggtttcatctgtccgtttttctaattgaattatttcttttatagcactgccaactaatcccgtccctcctgttactaaaatcactttattttttgccatatttaccctgttacaatttttatatttgataaactaattacaaattcttgaaaaccactaaaaacttccaacaacacaatttaaaaatcagc

SEQ ID NO: 8607 - DNA, 1020 bp, Diabrotica virgifera
  SmartBlast Evalue=1E-78; Info=Abl interactor 2 n=3 Tax=Aculeata RepID=E2BXM0_9HYME
gtagctgaatattgtgaggcgaactattttacaaaatagataacaagcgattagccctagaagaagaccaagaattacactacacagtctttagcgagtgtagcttatcaaataaatactctggcttataacttcttgcaattacttgatttacagactactcagctggctgagatggagagtcagatgaaccatatttcgcagactgttatgatacataaggagaaagtagctagaagggaaattggggttttgactgctaataagagtaccaatagacaatataaaataattgcccctgcaaatcctgaaaaacccattaagtatttaaggaaacccatagattatactatttttgatgatattggccatgggataagaactggagggacacccagacagaagcaaagaggttccagccaaggaagtattcattcattaaattcaatgccaggaaaccctatggttggtcctgctcccacaactaagccacctaccccaccacaagtatcaagaacatctagtaaagtgtcagtagtgtctggaggaacattaagtaaaggaagtcgggaatatagaacaccaccagctgtagcaccaccacaggtacctagccattatgctcccaattatcccattggccatccacgccgtgccagtgaaagaggttcaggttatggcacattgcctatgactggagctcatcagccacaagtaggcatggtacatcctatgacacaacagcaacagatagtacaacctcaaactccgcccccacctcctccccctgtttctggaggatatatgcaagagcagcatttgagtatgccacctcctccgtccccgctaatcaacacccaagaaatggtgctgtcttcgaaccaacagcacccaatgatgatgggcggacaccatgttcccgttccacaaggtagtctgggtatgcacacgttgtcccacgcacaagggcatcgtatctcccaacagttagcacagaacttcgggcgacagaacagcggc

SEQ ID NO: 8608 - DNA, 1017 bp, Diabrotica virgifera
  SmartBlast Evalue=2E-72; Info=Transmembrane channel-like protein 7 n=2 Tax=Formicidae RepID=E1ZVE5_9HYME
cgttatatatcagctgctgttttatcttcgcagctttttcgttatcgatacagaaatcccatccaccgaagatggtgttgcagtaatggtagaactgtccttctccttctatgagtcgttctctgaaaccattggctgctgagttgaggatagagagagctgatacaacgaaacagaggatcaccagtaagaaataagcgactggtatgttatacttcatagtgacacctcccgtcatatattgaagtacttcgttgctgtagaatccgtaaaacaacaatgtacgttctaggaacccagtcccttgtacaaaatcgaaaaccacatggttttccgaaagcgtcatattgaaatagatttgagcacaacattgatctgttgtattttcagtcgaattcgacgatgggcatattgtattcttcttaaagtccagcaaaatcgtcggtaagttgatgaataaaaatacgagtaagaagaggaatacgttcaagacgaacaaccatctgacgaagagaaagaaggctacaattcccgtgccaaagttgccttcgatgtacttcatggatcctctccataatcctagattcagcacgaattcttcgaagcgggttttgaagtggccccacatttttcgtcgtttccatttgaattgttcgaatccttgtagccgcaaattgggttcattcaaaattttgaacttcatttctttcttctccgacatgggaataggcaaagattttatccgcataatttcctcccaagcagtctgttcattcgatctcatttctgataaatctggcagcatagatacctgtacttcccctgcaagtgaagtcctgcgatgaactgtcgattccctgcgggatctgcatctgagcgtcttgttgttcgtgcggtagtcatttgttttgatgcggatcgtagctgcagctcctctgtttagtttactgggtagaagtgtgtgtaagtgtttgggatccctctgcaaaacttcaatttccgtatcagcagggtaac

SEQ ID NO: 8609 - DNA, 1013 bp, Diabrotica virgifera
tagtaacctattaaaatgccacaagaaaatagcttcaaaatacttaacacactggattattttttgcatatttcattgggactgcatggtttattctacatttaactaatggattatttctctaacgaatgcttaaaaaatgttgattatatatagatatagcatagaatgcacaaatgccgattgtaatgaatgtcaaaaatttctggttttgatatacacaatgtgagctaaataaaaaatgtaaaaatatgcagagtgtccataaggacacactgtatatttgtccacttattcagctaccactgtatgtcaaaatcttgtttatgattccttttacattattagaagaatttcaaaaataagcaaataaatagattaatttcataaaggtttaataaacatattttattggatctcaccattggttaaaggtgaaaaaattaaaccactagccccataaaaaggatattttgtaaaatgtcatgttatagctctatcttacatattacaattaaaaaaaatttaaaaaacaatgaaaaaatttgttgatgagattttgtgtagtattgtttccatctttactctgaattggtcattgggactgccaccatgtcttagggtctggtttgacctctagataaccaataaactggattgttgggattcagttgattagatctgttgtcgttatcgctcttggtgaacacataagccaatgatagtatagttgaaaggacatccatccatcctacaggacggtcttcatggcctctgcttgtccaaaaggcagcattgttaggattcaattgattggcacgattattatccatcttgtttaatgaatattctcggaatgaaagtcacttttgaggtcaccactatatatttataaaattatgggattccacaggcactaatcaggtgatccatagattttggggatgacctacataatacaaccttgataatagttatatatatatattaactaaagatatcacagagatttc

SEQ ID NO: 8610 - DNA, 1020 bp, Diabrotica virgifera
ccggatcgtatatagaggttgtagtggctgtcgtatggaacatctttgatctgataggtataatcgtaatagtaagttttattcagcacagtatacacttcatgaatatatttgtcatcttcagcttctttcttgatattggtgctgttcaaaacaatttcgaattgtgttatggtgccattttgatggtaaggatgcaaccaacttatatttaaatcacaatattcgtaatcgctgcgacagttgaccattttgtaggtgatgtttgttggttggcctggaactttgtcgctagcgaatcccttcaccacagcttcttttccaaaagtaggcgtatccagattctttagggcaactctgaagttgtaggactggaaaggtatcagataattcacttccacgcaatacttcttcggccatagactgcatcttttcacgatagagaacgacgctttgcatttgctgaacgagaggctgttgcacctactcacgtgaacgtctttgatgataccgttcgagtttgtgggtaggtcgtatcttaaggatgctgtattttggtctattgagtagatttcaaggttttctggagaaggagcaattccagcgagtgtagtgaaagacagagtgtagtttgtagtcttcaccttcctgtaaatgcttctaccgtttctagctgtcaaaattgtcaaagaatagtgtgagtacggcttcagtccagttatctcgtaactagtgtttgtttgtagagatatttctttggtgaaatttagtgtagaattagaaacaatgacagtatacactaatctgccatatttcttatggcagttaactggttcccatgttacgtttatagaagtgtatgacggtttcagttttatatttgtcggaagttcttctaaactaggttcatctgtctctaatgtattaataactaatttcttatcagtctcatgtaaaacagtcgatatcgtaatattataataagtataaggcacgaggtcactaatagtgacgtcgttc

SEQ ID NO: 8611 - DNA, 1020 bp, Diabrotica virgifera
tatgtcatgttttcgttgaatttcttctagttcctgacatatctctttcgcttgactgattttgcgatgcaatgtaggaattgatattatttttcaattcctatagttttagcgatcacacttgtacttgtgacagtgcaaagttgtgatttttccaactttcaaattgctctaatgtcacacttatcatgtctttaacgaagtggtggtggttattgcaacttgccaatgctgtccatgcaatttgtattcttcatttgatttcatcggattgtgttggctccttacagggctattttttgaccaacaatgtgattgtattagaaaatgtatggtaaatagtgaagctgtcaaaaacagacaagatatttagggacagtggcaaaattttaagacattttaaaaagagtaaattatttttcttataattaattaaatgatttaaaacgataagagatattaagatgataacatatttttcaacgtttaatagtttaagtgatctcaatatttttgaaatttatctctcttatctactgttctcattccttgtgatttattgcgaaaattacaatccgaaaattcaagttaaagcctgcatttgctgataaatagaatattttatctaattaaactagaagtcttattaaaaaaccggttatagcctgattgacccatatattcttaaaaattacttagattatagtgaatagctgtgtgatttagattagtataaaaaatatagttcaccgactgtagcctggcaggtgagagaaacggcaagtttataagtatatactgtatgcgcagcttgaggtactgacactctaggcaatgctacagtcgatgaactgtatattcagaatggactaaaagttggtacttttgaattagtatttgaattgtttatttgtcaggacaaaatattgagtataaagattgtaaatttgttgtgaaacatttactaacaagatatatcaacgaagatattgctacagcaatcaaattaaatagatgaag

SEQ ID NO: 8612 - DNA, 1021 bp, Diabrotica virgifera
  SmartBlast Evalue=1E-140; Info=COP9 signalosome complex subunit 5 n=3 Tax=Aculeata RepID=E2BYU5_9HYME
aattgctgcttctgactgttccaattttttccgacaagtcaaatatttgcccagtagtataatccgcattagttagtaaactagaagaactaagagtattaacccagtatttgttccaaagagaatccaataacctcctatctaaagctgacttaaagtacgatacctctaatgagtagtattgcttgcagtgcacaccaaaatcttctattttatttagaggaatagtctggtattcagaaggttcctcatttgcaggtttgtagccctttggataagttctaaaagctcctagacatacttttccagctgagatggtgcgaacaggatcgataactattgcaacaaaaggttcctggaagttttggttcaacatttgagtgcttacatctattccagataaccagcaaccatagccaggatggctgtggtaccagcctattgcattttcttgtctacctaccaactttgctgcttcgatgtaggaactcatatactcataagcttgggcttgagcattaacacgagtttctgtaccttctactggcaaggcaaaagagtccatgacaaacattgtatttccatctactttacctaatattaatcccattacctcgagggttcctccagaccttgcatgcatgaccatttttaaaagagctaatgcggaaattttgatatctttgaaaaaatgtggatctttttcccatggtttagcgactaggatatcttgttgctgttttttatcgtaacgatatatttcatctactgaacttacaacttccacagcattagacatttcccacatcttttgggccacagaggagggtgcttcgccctcgaattgttggcttgatgttgaagaacatcctactttagacatctttaattatgaggtcttaaataactaagaagagaaaggtaaattcaccggtttgtaatatccaataagttattttaaagaaataaaattgataataataattattattgcagtgatctgccgattattttgtcaaca

SEQ ID NO: 8613 - DNA, 1020 bp, Diabrotica virgifera
  SmartBlast Evalue=2E-34; Info=Transcription factor AP-4 n=1 Tax= Bombyx mori RepID=B2CPJ9_BOMMO
ccagcccatttttatatatttttaaataaaaaatggcgctcaacgttgtcgttaacattttttttgctatatttggattaacataatcgagatggcgggccctacgtaacctaagagcccggagccgtcactttttagtcctgtctcctcgcctgtccgctagatggcagactggcgaagtgaatgattttcgatcacgacgcttgtttcacgacaatcactcccggcctggattgttggtattgctgaactgtcgtggcattgaactcgaggtaggccgcatgaacgtccggcttgatatccgcagatctggtggtaagtgcaagcgggacatcttgttcgtcgtcgaacatatgactgccttcgaggtgtctgatggcctcgacgattgtctcgaggttctgcctggaagtgtttgaaatgttgtacactcggctgttgtcttcatgcgttgaagtgttcggcgagggcagtctttcgacttcgaccttaggttcagctttaatcgccgcttccaacaccgacggtaacctctgttgttctggcatcacgggaataggactggaacttctggaattggcgggcgacgcactacataccaccgtctgggtgtgaccgatgggtaaactctccgcggctatcagttgcataccaacagcatcggtgtcctccaattccaagaattgcggttgcggttgacgctgcgattgaaagagctgttcttccagctgccgcacttggtcttctaatagcaaccgcaggctgcgttcctgctctaattgttgctttagctccgtggtgttatcaggttgttggtttactacgatgagttccggtgacattgaacctatgccctcgtctgatgattctgccgtaatggtgggaattatcaattcagtctttctcttcttgggtggcagttcgccgccttcgtgttggttcactagccgtttcagctgacagttttgtgacaaaagtctggtcttctcctgttccaatgagtagatatattcagccgtt

SEQ ID NO: 8614 - DNA, 1019 bp, Diabrotica virgifera
  SmartBlast Evalue=1E-31; Info="Transcription factor IIIA, putative n=3 Tax=Aedes aegypti RepID=Q16HM7_AEDAE"
aaaatcttcaataataagtacagtttgaaaaaacacaaaactaaagttcatgacaagaattattcctttatttgctctgagtgttctaaaggattcctcaagaggtgccatctaacacagcatatgtttgtccacactggagaacctccattcaagtgtcatacgtgtaatctcggatttttgttatcaagagatttggctaaacacaatcgaaatcacaaaacctacacatgtgaatgtggagaaatttttgatcgatggtccaagcttcgtgctcataaaaaggatatttgcagacttatagaaaagaaatgtagaaattgcagtactctatttactgataaaaagaacttgcacgcccactataaaatttgcagcagcaaattccgaaaaacatttcaatgtccttacttgaactgtaccaaagtgtatcagtataatagaaatctgaaggatcacataaaaagtaatcacggatctgaacgacctaagagctatgtgtgcaatattgataattgtgagagagcattttcgcatcagtgtcttttaaacaggcatatcaaaaaacatggagctaagaagacagcatcaaaacgtaaagaagaaaaagccaccaggaaggacaagggaacgcgcaaaacatacctgcctgctactttagcgggtgtaaagttgtctagacgagaacacttacaagtgttgaaaggtaataaaaagatactaagcgacatctctaaagtaggatccgagaaggaaaatttggaagcttatactgtcccgacagatacaaaagtggaagaacaccacaatgaagtttgtactgtgtctcgaatgattgatgatcacgattatgggattcccttggtgcctaatgaacgtttagaagtatcggaaaacaagctaaatgttatctgtagggataagcttaaagcaggaaatttaataacttataatggtgatgaaaccgatacatatatggaagaagatatttgtagcgtcaaaatcaatacacctttaat

SEQ ID NO: 8615 - DNA, 1020 bp, Diabrotica virgifera
gtcttacacgccccactgccgaggctcattaatttctcttttgttgtctttcgtcttatagattcattttcatttaatatatacgattataaactatgtgcaacaaatcttagtttataagattcattcacttttaattgaaatatatttaaaatactcttgtcagtgacagttattgtagctttttttataaaatatataggacacttattcgcaagatatattcattaacagttaagacaattgtttgtataaaataattttagctaggttttttattgtaagcaaatgtatgtctaaaaaaattgacgggcaggaaagattttatgaagacaccgagttcatcactctttcagcctctcaaggtttattcatgttagtgcagtctcaatgtatccactatatgtccagttagtagtacattatattcattccacattttagcagtcgcgagtgacaatactatcactcgattattacatttcccagataataatggcgtctattgttaagtttcaactatatcttttatacttgccgccctaattttttaagggcgcaaatatcagagtagaatcatttttatctgggaagtgaatcattaattctcgtcctttggatttctcaatattgctacacacatacagagtgtcccaacatttttttcatgacagtcttagcgtattaattggtacactttgtatatccgacaatttgcgcatcaattaattaaagatctcattcccatttccacaattttgacagatcctaaaggagagataagacttgtctataccgtatcacaaaattctcattgcttgtctgtcatactactgtagaattttgtatttttttatcaaataatttttgaagaattgacatttgacatgacaatttgttgaattaagattgacataacgatacgaatgaatgaaatatcgttaatttttaatttggaagttattgtactatcaattactttaatttactacaactgtgttgtatgctatattaatttaa

SEQ ID NO: 8616 - DNA, 1015 bp, Diabrotica virgifera
aaaagcaataggaataaaggtgtagacaacttaatttgctacaaataatttcacacattttctccagggttgctagtttacgacataccgcgcaaataccccctgcaatccttttctacgttggcgaccagggtggtgacctcacacacttgaacttaagcttatactaacctcccgtacatataattaatattttcagaatcatttcataacttttatagtcttaagattccactgcagaatcgctacgttcataagttacttaactaaggtcacatttttgtaataatttaagaaaataatacattgataacatattgaaagtcaaaagtggccgtaaaagtttttaattaaattaatattaattcatttttgaaaacaaaattcgttcatgatgtagatggttttttttatttatatcatattttttgtcgaataccgagatataaagttgcctgtgaaaaaatagctgaatttgaaactgaaaacttgggtttaaaattggtgatagacttaattgtaatataaccaaactctgataatagtgaaattggagtgtcgcagaaactttgctggagcgacgaacttttgtactgaacatcattttaatagtgacactgaagagttttagtccattctgttattaaatatagatgtaaagattcaatattaagagttttatacctactattgcgaaagaaaaaaaatttaacccgcagtagattgcgtcccttttaatttagccatgtaaatttattaaataaaaattcctaaagttgagaattatttacacaaatcttacctgcttacctaagtattctttcagactgggccaccgtgcagtaaagtattgttttaaatctaataaattaaagacgatccactttgtagtgtctggctgattttattggctcgtgctttgctgcaattaaaaatggtggcggacaccggtgtcttggtcggaaagggtacttagtgtttcactcaggatcttcttactacagctcttgggctt

SEQ ID NO: 8617 - DNA, 1019 bp, Diabrotica virgifera
cccatctaccatgttccaacgggttgttgtaggtgagtcctgcctgcggcatttggtgctgtgtgaccggcgcctggccaggagatttgactcaacggctactccgaggactatcgctggcttctggaacgcctctgacttcggcgaagtctggcccgtcgacggcctggcacacctaagacgtctggttccgcaggagttcttgatggcggaatgttaggcactctaacatggcctctccccgctgtcttcttgaatccaactccagttagattcaactgtcagcgtcttcagtgtggctggctactgctacgatttcagggtgggatggagggttcctccacgagtcgggcgccatgttacggatagggggaataagttaggcaaaagtctgggtctctaacttattccatacaaggagctactcaattcacccccggcctatccgtatcctcgtccattttcaaagtatggacggactcgcaggtcatctgctacgcctcagccctccagggctaaggcaatgggaaggaaaatgcaccaggccttgataaaggcctgtgcaaaggggacactgagttctaacaagaactcagtgtcgtttcttacattaataattgtacctaaaaataaaacgctgcttctagagactttggctggttctgaaaagaaccaagccaaagcattttcttacattatcaaatgaaccctgaaagagaacgcaggaactattctaaacgtagaaataaaacaactgctttgcggtagaaagcgaccccaggccacagagtcagggaaggtaggtgcagcgccccaggctgacgggcaagcccgtgcaggccggaggacgactgcggactgaagtgtcgaggattggaaccgccagcttttatagaagcgttgctgtgacgcgtgcggcaagctgggaattccaatgtctcgacgggtggagcctctgactcgcgtcagaggagagaaggcggggcgatgcacatcgcaagcgtgagctgcgatgacat

SEQ ID NO: 8618 - DNA, 1020 bp, Diabrotica virgifera
  SmartBlast Evalue=8E-59; Info=Solute carrier family 25 member 38 n=1 Tax=Camponotus floridanus RepID=E2A2V1_9HYME
catcgtgtgagttcctttgttgtgttgcgcataaccacaaaaaatcatctgatatttgattacgtgcgtaaaataatttattacaaaaccaaaggttgaagttgatgagctataaatagaaaaagtgtatatttaatgtttaatgtcaatgtcaagaatacttaattattataattattaaccaaaaccaagatactgtactatgatgtgctgtactcagctgtagaatattccagtattacttcgtttttgtttctatggcggtgtcatatcaatcgagttttcgagacagcagtattggccaaaacaattaccataataacctacaggttagagttttagagaaccctgtgataaaagccttcctgtccggatcatgttcgggtgttatcagcacagttttattgcaacctttagatgtggtaaagacccgcctacaaaatcctccagctgcacttagaaatcagccaaatggactacacatcatccctatagtttctaatgtaataaaacacgagcagatagcaggactatggaagggcactacaccgtcattaatgagagcagtgcccggaataggattgtatttctgctgcttagaatacgttaagacacatttcttcaagaagaaggcacccacagcctcagaatcgatactgataggtatttgtgcaagaggtatggctggagccactcttatgcctatgacagttgtcaaaacgagaatcgagagcggagtgtaccagtacagcggcgttatggtggcactccaagacatatttcaccacgaaggtattaaaggtttaacgaggggactggtaccgaccattttccgggacgccccctacgccggaatctatttcatgttctacaaccaatcaaaatcactcataccaaaagatatttattccacatacacatcacccgtcaatttcgcttgcgctgtgatatccagcacattggcatcactggttacccagccacctgacgtttttaagacacagctgcagctgcatccag

SEQ ID NO: 8619 - DNA, 1020 bp, Diabrotica virgifera
  SmartBlast Evalue=5E-34; Info=Zgc:195220 n=2 Tax=Danio rerio RepID=B3DKD8_DANRE
gatttgatcttcacaattaatacctgtaatatataatttggctccacatgggactattttatagtcttcctcggtacgtaacatttttgatgcgtgataaatggtttctagagctcgttccccgaacaatccacagtcgaatacctccgtaaccagaaaattgcatttatctagaacttcttcaatatccagtgaataacactgcagaactttcacattggaaacttcatttttcttcataatatctacacataaattatagagctgcttattttcttcaatggctatgacagaagtaccgggcatctcagcagctatcaaacttaaaagtccacatcccgcacctatatctataacatttttgtatccattttcaatgacttctctgatggcttcgtcgtacgccagatttctacctttgtcattaagcatcctaaagtgccatcttggtatctgatgccatttgacgcgcatcaggttgatttctgcgggaaggtaatttttgttgacgtttactgctctttctagatatcttcgagcgatatctacttccgatattttgaacatgtatgcgcccaaattatttagtatgacataattgtcaggaaataggtttaaagcttgaatataacatttcaagagctcttctatgttggatgtttcttccaaaaccgctcccattttgcaaacgagttttgtaaagacagtttgcactgcagaagtagattcagcgggatcatttaaactttcaaaatacaaaacaaagttttcataggcttcggcgaaatcgttttttacacaagcctgcttagctttttttaggtaatatatactattgtttttcttttgataatctcccaaacgaggcactcgtccagccattataatctaattatttgcttgtatttgttcttcttactgttttaatgtaacagtatatttgttttaagtagcacttatattagtaaaaattaataatttaataccaccgtccatttaaacgtcactattaccttcatg

SEQ ID NO: 8620 - DNA, 1012 bp, Diabrotica virgifera
  SmartBlast Evalue=3E-56; Info=Pseudouridylate synthase 7-like protein n=1 Tax=Camponotus floridanus RepID=E2AR47_9HYME
acttggaaagtaggaacatctttatcatttccaaacctttgcagtccatagtagttgatgaatccattctctttcaaatgctccatagctgcactgattacttcatctgatgctgtcacattcctcaaagcaattctaaacttgtttcccttcaactggcctagtgagagtggagtatttttgaattcgaagtttcctattcgaatgttgtagagatttttggttttgtgtatgagtttccagggttctactttcctaacacaaaaccattgggttgtaacagctcttttgtccttagttcctgcttgcgtaaactttgaagcattcatatgcaatgctgaactgattttgagtgtagcttccaaagtgtccattttttctttatacaaaataaaatatacatattctcctttatctggtggccattggtaccgaacatcgcttctatctcctttctcaaacttcttaaactgaatcttcttttttccatcaacatctatagtagatgaaacaatcttctgtccaaagtggcttttgacgcaattatgaatttctagtctagcatctttatccagttcatcaatatctatttcgataggtgctgaactggatttgataacttccttgataccttcccatatttcctgaggaatatatttgttagggctctctatgacttcatggtaattgtgctttatcatcttcattgagaagtcttttgggacatttgtgtcagttagtttcgctacttttccctcgaggtttatttcgcttacgtgaaagtctgaatatctggctttaattatgccagaaaaaccttctaaatcacctaaatattcagtaattcccacatctttttcagaaagctggtcatagttgagatattcagaacgaggtttccgattattctgattatgctgaaaattccttggtctaaaatttcctctccgccttttattcattttaataccgtatagtgttataatcttttaacatctatttctattttaca

SEQ ID NO: 8621 - DNA, 1018 bp, Diabrotica virgifera
  SmartBlast Evalue=1E-110; Info=Glycine N-methyltransferase n=1 Tax=Glossina morsitans morsitans RepID=D3TML1_GLOMM
agttgacgagatttcaacgttgctgctgcacatcagtcacagaaatggcacaagctaatgttatcaccacgagatctcttggtacggcatctgaaggtattagagatcagtacgccgatggaaaggcagcaaaagtttgggaagtcttcattggagacaaaaactccagaactcaaaactacaagaactttttggtgggattattgaagaggaagggatgcaaaagattttggatgtagcttgcggaacgggtattgactctataatgttactggaagaaggatttgaagtggtgtctgtggatgcttcggataaaatgttaaaatatgcccttaaatcacgatggaatagacgaaaagaaccagcattcgacaaatgggttatcgaagaagcgaactgggtatcattatacgacgacatcgaagacctagtagggaatggttttgatgctgtcatttgcttaggaaactcatttgcccatttacttgacaactacggagaccaaagagaacagatgcgagcattaatgaactttgaaaagtgtgtaaagccaggcggtttactcttgatcgaccacagaaattatgatgatattatagataccggaaggacagcaccaaaatgtatttactataacagttatcacaccacagatattaaaacatcagtattgtatattgctgggaaggcagctttagtaaccctagattatttaattgacatatcagcagagaatggcaagcgagatactgtgatagaagactcagtaagcgaattccgtctttcctattatccacacagattgaaagttttcaacgagatgttaagaaaatcctttggcgaaaattctgaatacaaaatctttggagattttaaacgtttggaagagatcgacgtaccaaacttttatatccacgtcattgaaaaaagttctactattttttaagtcttttagtatttaaatattatttttatttaattattcttatataagttattttttatagttaatatacag

SEQ ID NO: 8622 - DNA, 1017 bp, Diabrotica virgifera
  SmartBlast Evalue=1E-108; Info=5'-AMP-activated protein kinase subunit beta-2 n=2 Tax=Aculeata RepID=E2BMN1_9HYME
ttgaaagccttgtatctacaaaaaaaatccctaaaacaattagatattagataccaagatttcaaagaagtcgcagttaaaataccatctacattatgtacaaaatagattaaatcccattaaataggtttgtataacaaagtggtaacatatttttttctatatctatgcgtagcacttagtaccatcactccgtcctttatagatagtgcatataaatgatttaacatgacgtggttgggttccgggagaagagtaggttcacatgataatggtgtgtccttatttagaataacctgaagaagatgtggtggtaatataggtggaccacttgttttttcccaaggtttgtttggtggtatatcctgtccaaattctttctgtgaatcatcttttgcattttcactatctttagctaatgcttgaaacacctcaaaatctgatttctttacaacaataagattgttcttagccccgctatcatcttctataattttattaccgggatcattcttccattctccgtcaacataaaatttgtactggtgttcgccttctgggaggtcgactatggcaacaaagtctccataactttttaccatgggaatagtctcccagttggaaaaggtaccgcagatacatacgtccttacctcctccttcccatcggaaaacagtgggtgtcttagatgcatttcgcactggttgggttccttcagatactgtattagctctgggtcgaggttgatcataactcgaagcgggctttgtaaaatagggctcctcttcgtcctgcgaactttgaatttgcaatttattttcaggcttcttgtcgaatgtaaatgcttgtccttctttggttggtgacgcagggactacttcacctgatttttgccgttctcgcgtaggtccactacttcctgcattacccattttgaaaaattaaaacactcataaaattaggaaatattaaaaatccaataacttgagcaattttgacaattggaacgtgacaaac

SEQ ID NO: 8623 - DNA, 1008 bp, Diabrotica virgifera
aaaagatattgacgtcataatgacaaaacttgctgtgatgccaagttatttgcatttgatgtactgaaaaatgaattggatcaaatccatgtacagaaactgatagttaattcacaaatcgtctattaagcgatatcggttacaattgaacggattagaagtaaaagggtttaagtgcacttttctaaaaatatgatcgaagtacagattcgcatacttaaatggtattttaacttggtggtaaaaggattcaagcatatttcgccctacagtcgccattacatttaatttaatgaaaacaataattgcatttcgcattggtaattaaaatgatttaagtgcgcttgaaccgttttaccacaaaactattttcagtattctgtaaaaacaagtagcagtaaacgggtttaagtgcgcttgaatcattgtaccacaaaactatttttagtattctgtaaaaacctcatgttaatacaggattaatttcaaataaataaatattagatttgtaccgaattttgaagactaattatgcaaaattaatatgcaacgtgccagttgtagttacactgtggataacagctgcgataaaaatgattagtaatagttaaaatctgcacttgaaccgttttaccagtaacatttatcaacgccatgtaccgattcaagtgcattttaagtaagagtaataatatatccttatatttttattattttatagaacatagacttgtttaatgactcctagaatttaacaactttgaagctgattatctcagaatcagaactatcaaaactgcacttaaacccttttacgtctgaccccctcaattgtggaaaaagtgattgttgcgttgaaataaattaaatagaattaaaactatttaaactatttgaaccgacaatcacattgactaacagttaacttttcttcatttgtagcagtccaacaattaaatcgaggacttttgagtatgcaatgctgcatacactccaacctcaggaaac

SEQ ID NO: 8624 - DNA, 1017 bp, Diabrotica virgifera
gtttatgcgagtgtatctatctaagtagagaaaaatttattgttttacttataagtttagattaagcattcatactgcgaacaatatgattaacaaaagtgtttttacgatattcttgctgggggttatttctttggcccagggattcaatacagaatattttgacacagaatttcttacgtccaatgggaagttgaaattggctaagctagtaaaatatgaacctgaaaagtttgataattatggagtttctggaattacagcaaatatgaatgaatatgcagaaaaaattttcttcaatatcggaaggtatgctttaacccatggtcttgaccctgtcaatattgcaaatgtaactgaagattttatgctggcatcaattaagtttaaaaatggtaaacttcacggaatatccacactaaaaagatatcaggacgtgctagctaattacgtacattccagtaggactttaattgtcactttacctatagaatttgttgatcttaagtttacctatgattacgatgtgaggatatttggacttggtccaagcggtagcatggatggcgaaatcaaggaatttaagttttaccttcaattttctttagacctcgagcatttcgttttatcaattaaacaattgaagaccactgatagtggacatatctccgttcaattccatggaaatattacagatattatagtcaacatattatctgaattcataactacattcctgcatccattactacaaggcataatcgaggcaataataaaattaatagcaggtggcgtagtaagtgaaattaataaacttctacaacaattagtcaatccaaatgcaaccgagtttattattgaggaactactggtccagcttaacaaaactcttgtaaattaattacctatatatttctatatatttactgtttaaataaattaaaaagattgtgtaaaattaaataaaaattatatttttcatgttaagctgaataaaataagcattatttaaaaaaa

SEQ ID NO: 8625 - DNA, 1014 bp, Diabrotica virgifera
  SmartBlast Evalue=1E-84; Info=Cytochrome P450-like protein n=1 Tax=Tribolium castaneum RepID=D6X2T3_TRICA
ctcctgaatgtccgggttgtttgctaaaagcatcaaagtatgacataaagaaagggcggtggtatcgtgaccgcctaaaataaacgtatcaacttcttctctaataccaacatcatcaatatcagcaccattatacttcgctttaatcatcaaatccaacaaggctagtcttttcctctcagagtaactcatagttccatcttttttaaacagcttatacctctctgcgatgattccattggaaaaatcatgcataactttcacgatttccttatttcttcttcctacttttgtcaagttgaagaacgtatccggaaatagccatggtcggaccattctgtatacgaaattgtctccatactcatatactgcttgtttgtactcgtcacagtgaggctcttcacgaaggtcttttccaagggaagtttcaccaatagaatacaaagtaaattccgtgactggtttgataaggtcaattggttgatcacactttgatttaaagagttctactaagtggttagtttctttgttaaaaacgtcaacaaactcctgcaaaatgttaaaatggaacgcaggtgtcaagattttccttctcttatgccaatttgcccctttgctggttaatagcccatttccaagccaactgtgaaggaaatcgtagaaagcacctttttctatatgttttgaattgtttaatatgagctcaatgtcttctggagctattagattaacaattgcaaaaggtaaactatgttgttgatatattggatggtatgccttagcattggccctatctcttttaaaaacatcctctgcagactcaaaatgaacctgcgtccccaaaataggataggctttgggtccaggaattgctaagatgtgtttccaaaacgtttcatcttttctattgatgcggtaaaaaatataaaccaaagctacaactgcagcaatcagtaacacgatcattttttttcaccttgcttgatttgcgaaagagaatacacacactgtctc

SEQ ID NO: 8626 - DNA, 1015 bp, Diabrotica virgifera
gtttaatttaaatttggatcggcctatccaggattaatctttattttggttatggaagaaagactttcttttgctatttgctacaaaacaccagatggatttctaacagaaaaatttgaacatttagagtacgacactgtagaaaatctaaaaaatactatccacaatgcctttgaaattccgtcgcatagacaagtaatagagggatgggtaatcgaacctgaaagtgatgatactatacttcaggtatgcgcacatcgaagtcgaataaactatttagttgtaacatgtaaacaagaggaacaaaatccaactgagatgtcttccattgttgaggaaaatatggaaagtttggaagaatctatggaaattaaagcagtaaaaagttgtgtaaggaaaataagcaaacacatagcagaatcacgcacaaagtttaatatagaaaaactatcagatatcaaagatactgtactttttgcctctccacttgatagaaaatttttacttttatatatgcataattctgaggaggagttttcgaatacattttttaaatatctgcgagacgaagacatttcgaaaattttaaacgactacttttatattattggatgggatgtagaaaacagagcttatcacccggcgctttgtaaagcagtagaagatgctaacttcggccatctatcagctttaattcagtcagaagcatgcgcagcagttattattcagaatatcaacggttgtccaaatattctttcttttttgatgggaaatgacgtagattcgagcagggattcatttttattgtgtctacaaaactgtcgagactttttgattgtggatcgcatgtctgtaaatggattagatggttcttcgcagagtaacgaactaacctcggaagcttttcaaaaaattatggcagacaggcttggcgatcgagattacgatagttttgcttttgaccagcatgagctgttggagaggaaaatcggttttgctttgtttggccaaccag

SEQ ID NO: 8627 - DNA, 1017 bp, Diabrotica virgifera
  SmartBlast Evalue=4E-56; Info=Ribosomal protein L23Ae n=1 Tax= Georissus sp. APV-2005 RepID=Q4GXE9_9COLE
ttttaactcaaactaaaaaactttattctcaacttatttattagatgtcaaaaaaataaaacaaggtaagatattaatttatatgatgccaatcttgttggcaacatctagagcatcataatctctagctaaccttacatatgccttctttttgccatcgggcctaattaaggtgttgaccttggctacattgatatcatacaatttcttaactgcagctttaatgtggtgcttgtttgccctagtgtgtactaaaaataccaacgtgttgttatcttcaatcttcttcatggctgcttcggtggtcaatgggaatttgatgatattgtaagcatccatgcgggatctgtggggaacactcctcttggggtatttgggactcctgggtggtctgagggtcttaggacgacggaagtggactgagttacggattttccttgagtgtgttccattggggcctttaattactttcttttggattttaagtgctctcgctacttgcactgcactggcagctggctttttgccaacacctttctgttgttgtttaacaggaacattcttcttgggcttagcaataagagttgcgggagccttggcctttccagcagcagctggtttctttcctgcagccttggctgcgggtttggcagcacctttgcctgcagcctttccagctttagcagcagcggcttttggtttgggggcagcagcttgcgctttcgcggagcttttggctgaggcagctttaggtgcgggtgcaggggtttttgaggaagatgctttcttgtcagctggtttgcttgcagctttggctgctgcttttggagctggggcgggtgtttttgaacttgaggaagaagctccagcggctccggctgctggtgcggccgcaggcttcttcttttcttccttcttgggggcggatttatccgctgcttttggcttcgtaggtgccattttacaaagataatcactaaaaggaagttaacctaagcgtgttgacacttttgacgg

SEQ ID NO: 8628 - DNA, 1017 bp, Diabrotica virgifera
  SmartBlast Evalue=1E-152; Info=Actin-like protein 87C n=3 Tax= Aculeata RepID=E2A6V0_9HYME
tgggatgtgtagacgataaaaaaatataaattatagcttaaaatagtaaacaaatagaacaaactgcacttacttttgtactactagatatatttaaataatggaagcgtacgacgtaattgttaaccaacctgttgtgatagataatggaacgggtgttattaaagctgggttcgctggtggccaaattccaaaatgtagatttcccaactatgtgggtagacctaaacacaccagagtcatggctggtgctctggaaggagacttgttcatcggtcctaaagctgaagaacacagaggcttactttccatcaagtacccaatggaacatgggatcgtaacagattggaatgacatggaaaagatttggagttatatttatagcaaagatcaactttcgacgttctcagaagaacatcctgtattacttaccgaagctcctcttaatcctaggccaaatagagaaaaagctgctgaaattatgtttgaaacatttaatgttccagctttatttatttccatgcaagctgtacttagtttatattctactggtaggactactggtgtagttctagactcaggagacggtgtcactcattcagtgcctatatacgaagggtttgctctaccccacagtattatgagatctgatattgcaggaagggatatttctagatatttaagattgcttctaagaaaagaaggaatcattttccgtactactgctgagtttgaatcagttagaaccttaaaagaaaaagcttgttatttatcgaacaatccaataaaagaagaatcagttgagacagagcagattaattatacccttccagatggtacaggaatcaaagtaggacctgcaaggtttagagcgcctgagattcttttcaaacctgacatgataggtgaagagtgtgaaggcatccatgaagtgttgttgttctccatacagaagtctgatttagaccttaggaaagtattgtttaagaacattgtattgtcaggtggctctacttt

SEQ ID NO: 8629 - DNA, 1017 bp, Diabrotica virgifera
gtgatagagttcgtcgaatacttttattattcgtcattattataaggagtattatcgtggaaatagcgtaggataatgaattccaataaccacaacccacatcgcagaaactcttctaatttcaacagacacaacaacaatcatccaaatcgctctaaccatccaatcaaccatcctcataaccaccagaaatggccaggcagatatcccaaggaatataatagagagtatgaaaccaattttaatagacgtgaatgtcttgttgctcctaacggcagtcctaaagagccaaatcacttgcatagttacccaaagaacccccagctgagtccaggggccaggaacaaccttccacattacaacaatgaagcctcaggacatcaacaccaaaccctgcgtgtcgtctcaatgcctatcggtcacggcggcaataccgcagcccagaatttccaccccaatcctgtcgttcctgtagtaaacaccggagatcgtcgtcacattcccagcttggtcgatagacgtcacatctctccacctctgcatatcaacatctgcgaaaacggcaacggaatgatgaatatgaacacacctccagctgaaggtctgcagatgcacccaagagccatgatggacttctctcacggaagaaggagacacgggatagatatgcggatgagcccggtccacttccagcagcattctccgccgtattatcggcagtccagtgacgagtacatcaaaagtgaaagtccttcttgcaaacgcagacgtttgtcccgctctggccatcatatcgacttgaatgttcagcccccttcaccaccacgcaggtctcccaggcagcatcctccatccacttcgcatcctccaatgcaggtcccagtgacaattccaatgaaccacgaagcagtttggagctacaccacaaccccacacgtgtctctatgcacagttccaccgagcgcaccgccccacatgcacaactgtcatttacataacgtatacgccgctgtaccg

SEQ ID NO: 8630 - DNA, 1017 bp, Diabrotica virgifera
aaaaatagttctcggtcaaatacactgcgcgtcaaagaaaacgagccacccacgaaatttaggaaattctatattttttatatatttctctattttcttttaatttgttttgtgttaattaaattaaatgaattattacgtataacgacaagctagactgagcctgtaaagagaataaacaaattcgcaaggcttattaaaccataaagttctcagaactcgttatttacgaatcaacgaagcttcgcagaattgatggttttaagaactgtgtgaactgttgtagtcttctaaagagtttctgagatatcttcgtggtacactggcctcctgacagtgaagtctattttttataacgatgaaaaagtatagaaagtgtgttcagatggttacattcccggaaaatggagcaagccaaaggtatgtggcaagacaattgaatgtgaatcattcgactatgcagagaacttaccaacgatatcttgagacccgatttcatcaacagcggctcgatatgggtgccaaaagggagacaatagtcggagaattgaatactattttgttgttattttattgtattggattacaaaaatatatttttatttaaattaaacctgtgttttactgaatctattgtccggcagagctaacccgtgacaagtttggatccttttgaaccaataattattattacccacggagagctcgacccaatatttaactcactgtatttatttagactgtataaacatctataaccacttgtcatttaacccattcgctgacgatcacactccagcgcgtgatatggttacttcagtcaggtgccattcacgcgccaatcagtcaggcgccttttaacagaacggccctaggcgagttccattttcttgacaggcagcgaatgagttaagtaaattacatatttaaaatatacagtaagatctttttcacaaaaagatcataagtattcacgccaaaatttttcagtaacttaagaataaaaaaataagtaaa

SEQ ID NO: 8631 - DNA, 1016 bp, Diabrotica virgifera
ttagctcttttaaattcgaaaataataaatatataattattaattaataatccctgatacacaaggtacaaaaaataaatttttcttttataaaaataaaatattctctcacaatactaattaactatcattaaataaaatttttctttacttttactaaaaaatattttattattttaaaataaataaaaatataaataaaataaattttttatttcaaattaaattgaatttcacaattaactttttaatgtaactaaaatacttctatcaagctctaatttgataatctagattcactttccagtaaatctactttgttacgacttatttcatattaaatgaaagcgacgggcaatatgtacataccttagagccaaaatcatattaactaattaattaatattacatttaaatccaatttcatttaaatactaatatttaaaattcaaaaataaatttattgtaacccatttctacttctatataaactgcaccttgatctgattaatttttttataaaaattttaaatattttaattctaaaaaaatatttaattacgacgatatacaaattaataataaaagttaataaaatcgtggattatcatttaaagaacaggttcctctaaaaagactaaaataccgccaaaatttttaattttaaagaccataactaataataattaaataaaaattttacatttaaaataatagagtatctaatcctagtttaaaatttaaatttcttaacttcaatttaaaaatataattttataaaaatttaaaatttcacctaataaattttattatataattataaataaatatttaattaatataaataaaattaaattatattatttgtataaccgcaactgctggcacaaattaagtcaatattatttaaaatttctaattccaaatttctttaataattaaatttatctactgcaatctattctcaaataaaatttacatataataaataataaaatttaatttttaagctaaaa

SEQ ID NO: 8632 - DNA, 1016 bp, Diabrotica virgifera
  SmartBlast Evalue=3E-49; Info=Serine protease P128 n=1 Tax= Tribolium castaneum RepID=D6WZJ7_TRICA
atttctcatcctgattataaaatataagtaccatcgataagataaactaataaaaagacaataaatgaaagtacttcgttgcataagtttagggcattaaatccattcatcgggaaaacaaaaacaagaaaacaagatgttaaagttttccgtaattttaggtcttttgacagtatcattggcgcttcctagtactcacaatgaagtttataaactgggaaatactaatcaggcgcttaagatcattaatggaaacccagctaaaccacatcaatttccctatcaggtaggaatgtacgtgtatacttcttccagatccgatttctgtggaggttcgcttatatctcctaactatgttcttactgcagctcattgcgttgacaaagctgtgagggtaaatatggtatttggtgctcacaacataacagatcccgaagaaaaatcccaagttaggttatcttcgacaagttttattgttcacgaaggatgggatggagataacattaacaaaaacgatatagcacttatcaaattaccatcacctgttcaaacttcgaaagtaatcaaaactgtatctatcgctgcaggcactaataaatatgtgaactctgttggtaatgtagccggttggggattgaccaaaaatgatcaaacagtagtgacacccgttttaagatatataagtccttctattttaagtaatgacgactgtaaaaaagtggatcaagattatgaagctgttattttagacactcttttatgcagcaatccgggatctcataagcagggaacgtgtcaaggtgactctggtggccctctagttgtgaatggtgtacagatcggtattgtgtcctttggttctaccgattgtgaagaaggaaaaccatctatattcacaagagtaacagaatatcatgactggattgcaaaacattctgacgttaaattttaaatcttgatcaagtaattctttgttaattattttaaaaataacaataaagcacactcaaagtatt

SEQ ID NO: 8633 - DNA, 1016 bp, Diabrotica virgifera
  SmartBlast Evalue=1E-63; Info="FERM, RhoGEF and pleckstrin domain-containing protein 2 n=1 Tax=Camponotus floridanus RepID= E2A9L5_9HYME"
gttgatactgttcatcagctgttctttagctaaaaccttggaaggactgtcgtcgctattgagagtattggtggtactgtagttgccgtttgaagctgccagcgagagttcagaaacgttgccgttagctgacctgagcggagtggaagtgtagaagttgttgttgtcgcgtattttagcatcttcgactttggttctttctaggagctccttcttgctatcatctgtatctgccctgtgaacagctgcgcggacggcgagcggagagctggtaatagtggctttcgtatggattgggctcatgatcgcagactcctcgggagagctcatcgtctgattggggggcagagtggaaggcctggtgtcggggaccgagctccaggatgtagctgtgccgaggtggcgagaggctgatttcgtcgtcggagaacccggtcgtgggcccacatgcgcccccatcgaacccagcgacgccgagagtttggacacttccacgctcaggttggtgtcagcgagaggtaacagaggatgcgcggaaatgctgttcccgacagttgtcgaatgtgaatgcatgttggaggcgctcgagtgcgcgctagaatggcgaaatgattgtgacctttggaatgtttgacgtttgacgtagttgtctcgcacgaattcgattatttgtttctgggttttaccgctatacctaaaagaactacctctcgatagtactcttgttttgtgccgtgagacgtgtttgactgaggaacatcggaaaaacccgtgattttccacgcactttttccaaaaatttttacattcgtttctaccttcgaagaaaaattcgacggtgtctttataatagccgtatccctcagggtgaagtttgacgagaaatcgtttccgtttgaaggatattttcctaattttcgcccatgaaaacgtgttgattttggtataattttgaaaaactatgatgcccatatgagctacggccagattcaacggcacgttttcgtggtctttgg

SEQ ID NO: 8634 - DNA, 1012 bp, Diabrotica virgifera
ccccttgctacgctgttacacagctatatatattaaacaccttccccctaagatcgatatctataaggggtctttatattacgaccaactctcgtcttataactgttagaagtctcaatatttgggttgactttatgactcaatgtaggtactgattttacatttgggcttgggcaactaatggttttattaacactatcatttacgttaatgtgagtggtatctttatgaacactttgtgactgaatatcagggtacaactcgggttctaaaatgagttctttttcaagtgttgtggtgtatgaatgtttcatttggtgtgaattccgtctaataattttattgttatcttcttttttcacccaatatgatctaggttcattggccttttctaacacaattgctttacgccaataattatcttttgaacttcttattactaccctatctccctttctaaactctactggttttcttcgtgctgtcttatcataacgtacttgtaatttctctttttctttgcataaattcttatatacttgtttctggattgtaggttctaatttattagctgtagttggtaattgtcctctcaggatcctgctctgtaaaatttgagctggagatgcatcaagatttattatgcaggtattattatattccatcaccaaatctctaaaatcaacattttcctcattactctttcttaaaatttgtttgcttatattgactgctttttctgcaagtccattactctggtggtaatgtggagtgcatgtcataattgtaatgtctttttctctataataatttttacattttaccgaagtaaatggtagattatctgcaattaaaatttctggatatccaaatctactaaaagtatcttgaaatgagttgattactgaactggaggtttatcttttaatattgaaatgtccaaccaatgcgaaaaatagtctacaattactaaatatgcttttgaaccatactctaaaatgtctgtaccaac

SEQ ID NO: 8635 - DNA, 1016 bp, Diabrotica virgifera
  SmartBlast Evalue=2E-57; Info=Angiopoietin-like 1 n=1 Tax= Tribolium castaneum RepID=D6WEJ6_TRICA
tgaattccttagcaattattgtattattgttgtgtagcaatttgaaaattgctctgagccaaacggtgtcacctgtaaatcctcttgatttggaaaatgagaagagtgatggccgagaaacgaaacaagaagatatacagattcttttgaagaatgcacttgcggtcgatagagagaacagaatccagaaatatcaaaacattgttactaacttattgtttgaccaatgtaaatatttagttggcacaagtaaaacaccattatgtcgccataatccacttgaacaaaagtcagatggttccaccacttatccaagaaactgtagagagattttaaaaagtggcaataataaatcaggtgtgtacaagatcaaaccacggagaagcagtaaaccttttaatgtgttatgcgacatggataccaacggaggcggctggactcatattcaaaagagatttgacggatcacaggacttctatctaccttggagagactacaaatttggttttggtgacttaagcggagaattttggattggtctagaaaatatttatctcatgacagcattcgaaagaaacgaactgttggtagaaataactgacacaaataaaaacaaaagttatgctcaatataaggcgttttcaataggatccgaagaagatggttatattttaaacactcttaatggattttccggaaacatagatgattcattatcaggacatttgaatttaaaattttcaactctggatttagatcaagataattccagaaagtatgattgtgccaaggataatcaggggggttggtggtacaacaactgctatttcagcaacctaaatggaaaatttgtaaaagtggtaattcgaacagaaaatatggaagcacttcgttggatggataaaaatgagtggccaaatctagcaggatccagaatgttaatacgatagattcgagaataaatatgttgtattaaaaataatatgtaaaatttaataaaaaattttggtcttggt

SEQ ID NO: 8636 - DNA, 1014 bp, Diabrotica virgifera
taatagagatgcatattaaatgtgacacgatgtccatggtcgtcgtccacatgtttaaaataatgttaaaaaacccattgtttctctaaactataagcgctaaaagaaattcagcaattactttgcaaaatacatatagtgtcacaacatttgcttatacatttgacgttctgtccgtcaacgtgttaagggataaaaattatttgattggtatcattacgtttgttacttttgtatttgagtaacgaagtaatcagagtaatcaaagtagatacaatagtctttactcgctctgatacgattggtacgaagtaacgaagtaatcagaataatcaaagtagatacaatagtcgttactcgctctaatacgattggtacgaagtaatcagagtaatcaaagtagatacaatagccgttacttgctctgatacgaatggtacgaagtaatcagagtaatcaaagtaacgatttgcatctctgtatagtaatcattactttcggtattcgtaagtaacgagtactttgtaacgaatagttactttttcaacatcactagtccgcgggcaactgatacgtatcggcgtataaagactacaatacaccctccaaacatctataaccttgtccaaatccacctatgcattgcctttatcatctttgatagaacaagatttctactagaatttacgtgtgaataatctgactttatcgaagagtcctttggtgttatttgtgtctgcgtgttgttgaatcgatttgcagattttctctctgtgctttttcttgtctcgtctacaagcatcctgagctctagaaagctgtcggtactactcttgtatccatctattgcacacctttcaactgtcagatgtcttctccaagaatagcatcagtaggcggtgctaataatgctattgagatcaccaagaccattttcccacagtatacttattttgcggaaacttacagtataatctgtaaaccactctacttttaggactgaaaatgttgaat

SEQ ID NO: 8637 - DNA, 1013 bp, Diabrotica virgifera
caatttatggccacaaagctaacaacgtttaggcaaactctcttcccattgtgtcaatggcgtttaaaaggtatatcttcacttaaaataactgtatcgtctgcatattatatttatcagaattccattaactttcacacccaattccaaattatgcagcgcttccttaaatattccatatgaatataaattgaataacagtggggatagtatacaaccctgtctgatacctctttgtataataatttggccacccactgtaaatccacaatttgatttgctgaatatgtcaacgattgggtggcattaccgactgtggtatcgtcgtgagagtgctgttttgaagatttcgaagataaagtaattaaacgaaattacgatattttctttcaagttcttgttacttttgagaaaactcattaaaaaacagttgtgactacgtggacgcatttacttacagtaaaatccatttatctgcaaccgcggagaccttgagggtttcagttaaatttcagtaagtgtgtatcgcattttcagtaccctttttaattatttaaattcctgaagaatataaaacttcaacataactgaagcaatctataggataagcagattaagattaaaatggacaagcaagtttaaataacgaggtgagtaatctactagctagagtgcaataattaggtacaaaagacggaatcttctcattatctatatcttgtgtaggaataatcctacacaagattcaacatacactaacaaaaacatttaatatattatgcatagcgaggcccttattgttggtcaaataaagtttgaatcgatcagtaactgtctttgcatttatctgctagatgctttaagcttattttgtattcatcatcttccggcctgatgttaagtccgctgctagacatcggtctctattaactattccactaggctttgtctcgagctgttctaattaagtatcctaatctttttatgtcgtcgcgtcgctttaatatgatggc

SEQ ID NO: 8638 - DNA, 1011 bp, Diabrotica virgifera
gctatagaataatttattaagatgacatatagtctacactgtttggcaacagattaaatggtactgaattgatttatatattatgtacaaatcaaagttactaaactatgaacaatattaattaagcccttcacctttggatgtgacaattggatgaaaataatacgaaattacatgaaataatgtagaactaaggccacttttaacatatttactatacaataacaggggtatatgtgattttatttacaaaataattaacaaacaagatacattcctacaaaattagtgtatttttcaatagtgaagacctaacacacaaaataggccagaagctttttcgagtaccctaatttcttgtaacaaggctacattttctttaacaattattgtactactacttgaacaacaagtcactaggtttatataaatccaaaaagataataaaaatactattgtcatatataatgtaaatggtgtatataggaaggatgactttctaaatctcatggacaaaattcgattcaattcagtgttttcatgttgctcttacagtactcaacaataagaaaatacatttaacacttattaattttattgtagacatgaatattacatttataactcacattaaaagtttatagtaatcataaggaccaaaagctagcaatgtcggaaaaacaagaattttaagaaagctggttctttaatatatttatcacagataagatgggtgttggtactctaaattccagttcactatttttcaagaatgccgttcaagtcaggtataattttcccaatagctttgggaggtatttcggaaagaaacatctaatagttaatagaatgaatatcatcatcattggctctacaactcatggtgagtcttggcccgttccagaatcagcttccattccttcctatcctcgtcttggccttccaatttcgcactcccaacactcgcaagtcgtcttccacatggtcctggtccaatagaatgaagatagg

SEQ ID NO: 8639 - DNA, 1014 bp, Diabrotica virgifera
  SmartBlast Evalue=2E-24; Info=Nuclear lamin L1 alpha n=1 Tax= Culex quinquefasciatus RepID=B0WXJ5_CULQU
cgtgttgtgaagcttgtatttctacgccttaaacagtgaaaatggcagaggggcaggtttcaaacgcaaaccatgaagaactgataagaaaggtggatgatttggaaaaacgtctgcagaccaaagatgcagaaattcaagtctacaaaatgctcatgtctcaaatggaggaagaggcagcgacagcaaaaaaatacaaggcccttcacgaaaagcaaacccaagacgtggacggcttaaggacagaatctgagaaaacgttaacgaaggcgaagagtatgatctttgagaagacaaaaatcattaaaaaccaagaattacagatagaagcgttcacccaacagatcgaatctcttagagaagtggtacgcatcacaaaagatcttctggaaataagaaatatggaagtaaagcaactggaaatcaagatcgaatccatagaaggtaagcaaaaagctgagaaggaacggtacgacctaatgcataaaaaactggaaatgatgatcagacacaacgcagagttgaaaagagaatatgagactcagttgtgccttttcactgccttaagagaaagatatagcgagagagagttagctaaagatgtaattgagaacttaaagacaccaacactaaaaattgctagtcaaaatgaaaacaacacgacacaaaaggaaatctcagtagtacctaaccaagaaaaatcaattgaaagtactgtagaagacaaacaaaagtcggctgctgagcagaatacaactgcgactgtagaatctgccccaccaaaaaatcagcctgagtttgacaaggcagtacccgttgaccaaaataaaaatgcaactcccactgagcaaattgcacctaaaacagaagattctattccagtcccaaatgaagttgttcctgaacccagcaagctagaaaacaatgttgttgagccaaataagcagacagaaaccaacaataatacaaattcgtccgaacagaaggctcaagaaccagttatactgcacctga

SEQ ID NO: 8640 - DNA, 1012 bp, Diabrotica virgifera
  SmartBlast Evalue=2E-26; Info=Serine/threonine-protein kinase WNK3 n=1 Tax=Harpegnathos saltator RepID=E2BZX7_9HYME
ttaaggacgttataagaaagttgcatcaggcctaaggaaagaagacaggacctaaagtacaaagatctccttaaccacgccttcttcgaagaggacgtggggttgaaagtcgaggtggtttcacaagagggcaagaagatagtgtttaggctgagggtcatcgatcccaagaagaggacgcataaacataaagaaaacgaagccatacagtttgaattcgatatggagatggacagatatatgacgattgcggaggagatggcaaagtctggaataatatttgaagatgatgcaaaaactgttgcacaattattgaagactcaaataactcaaattacgaaggaaagagagaagaaaaccaaagaggaagaagctctggctcaacagttgcagtatcaacagtatatacaacaacaggtggaacagcaaatgtctcagcaacaacaacaacagcaacaggtgcaagccgcagtgcctcaacagccaccacagcctcagcagcaaccacaacagcagtctcaacctcaaacaatgacgggttatccacagccgcagcagcctccgcagtacacccaacagcaatcttatcagccacagagctactcgcaaggacaacctgttatacaaactaatgaacagcaacagatgcagtatcagcaagaacaacaacaacaacaataccaacaacaacaaagtatagagcagcaagctcaacaacagcaacaacaacaggaacaggttcaggctatgcaaaaccagtatatccaacagcaacaacaacagcaggtacaacagcaggtacaacagcaggtacaacagcaagtacaacagcagcaacaacaacagcctcaaccaacgcaacaaagtgatggaacagttatttatcaacaacagcatccgattatgcaacaaccggagcaacagcaagttttttcaacaaccacagcagataccacaggatcagcttcagaatccccaagtaatacagagacaaccttctgtagagccagtg

SEQ ID NO: 8641 - DNA, 1012 bp, Diabrotica virgifera
  SmartBlast Evalue=1E-177; Info=DEAD box RNA helicase n=1 Tax= Choristoneura fumiferana RepID=Q5DNU4_CHOFU
gatctccagcatatctagcttgttcaggagttatgaaagtaaaagcaaatcccttgtttccagctctgccagttcttccacatcgatgaacataatcttcataatggtttggacagtcatagttaacaactaaaattaactgtttcacatctaaacctctagcagctacagacgtagcaacaagtaattttaccttgccatttttgaagtcaacgattgttgaatccctgtcaaattgatctatgccaccatgcagactcatgcagttgtatgcggctctcattagttcctttaataaaatatcagcgttttcttgtttgtccacaaaaacaattatactaccaagttcttggtaaatcccgagtaattcgaggagtttcaaaaacttttgatcatcctccaaaattacaacatgttgttctacatctttacaaacaacagatcttcctccaacttgtacttctatcggcttctgcaatattcttcttgctaatgcttccatttgtcggggaaaggtagcactgaacattacagtctgacggtcaggcctaacattatctataattctcattacttgtggttcaaaacccatgtcgaacattctatcagcctcgtccaatactatataagtaacccttctcaagttggtaactttaccgctgttggcggccaacatatcaatcattctaccaggagtacaaacaatgatttcagcacctcgctttaattctgctatttgttcagatattccagtaccaccatagacacaaactgcatgtaagtttaaactctttgtgaacttctttatatcctttccaatttgcatacagagctctctagttggagtcatgatgatagcaataggtccatctgtatcttccaattggggttggtcaaggatatgtctaaacattggtagaaggaaggctaatgtcttaccgctaccagttttagcaatacctattaagtcccttccagacataatagcaggaatagcttgggcttgaattgg

SEQ ID NO: 8642 - DNA, 1010 bp, Diabrotica virgifera
actttgatatatgtattttgttgctctaagtcggttccttccgtaagttaaggaaaaacttagaattattttgccatttcatagtgcatttttctatacttactgtttgaaaatcgtctcttacggtatttctctagcagatcacgcgttcgagacattttcccattttactttatcatttaaattgtgatatatgtatttgttgttctaagtcggtttccttccgtaagttaaggagaaacttagaactattgtgccatttcatagttgcatattattttctgattcttgtttgtctctaagcctttcttatcgaaagtacttagagatatttaccgtgtaaatatccgaatatttttgtaccactgccctagtgatattcctactacggtaggtcacacacctgagcaatatctcactcaaggcagcggtattttccttaaggaatcaagtgcttgccttaaatagctttctagtgccagcatacgttctgtacgcactcgaaaaattaataacactatggtagatactcgtagtacatcccgttctaattctcaggaacggaaaaccgtccaggagtccggtacagccaattccacgccgtccagcgaccctagggaacatggcacccaacatacaaaccaatccacgacccactcttcgactgagcagccgaagcccaagagaccgaacacgccacccacggaggaaacaacaagtccagagcagttcatgcaacgcttcctccaggcgatgacgtcgctctccatcataagatcaaccgaacccaccaaacccaagatttggacctccaaaccccccagattcgaaggacgagagaccgaaatcccacttctattcctggacaagatagaggacttcctgaggacacatgaagtcgacgaggaggactggatggactacctgatggccaactcgttacacggagatgctaagaaatgggcgagtcaaatcacaaccgagataggttatcagacttttaagactcg

SEQ ID NO: 8643 - DNA, 1015 bp, Diabrotica virgifera
  SmartBlast Evalue=6E-74; Info="FERM, RhoGEF and pleckstrin domain-containing protein 1 n=1 Tax=Camponotus floridanus RepID= E2A9L6_9HYME"
ttttataccagtatacaaatcgaagtttttacttatatgtaagttttaaactatttttccttctaaattgtttacgtcccattgcccccatttataaaaaaaaaatactacaaaatggtatgatatctacatcttataaatttctacatgttcaccaggtttggcgtatgatataaactgattttgctgtttttcaggaagtttttttttgtaaataatatcaaaacaaatattaagtaatatccttgagctctacttctctgaagaagtttcaatttggttttcgtttactactgctgccttcctcttcctgatttgagtggcgctaccaatcacctccatccatctattatacgtgtactctgattccgccctgaagaaatacacgtgattcttatattgcagcttaaacacatagtccttcgaaatcatatcttctcgcaaaggggggctgatggtgtaccccagcaggggcagcgatgctaggggaaaatcgtcgatgcaacctttgtagaagaacagacagaaggacgtgaataccacccagagtttctgccaaccattgctgcttttaaatttccttaaaagataaccggagagttgattctccacagccaataactcgtctttcatgctaatactggtgctcctatgccagcacacgtgtaccgtggtgttgcttctctgcgcctgtggtttagtctgagtaccaacgtcattgttgccaacctgatctatatgctcgtccgaagaactacaacttttaagactcaaatacgtgattttcgtatcggatttatctctggccatctgtatggcacgttggaggtccgtcttccatttctccttctcttccaacgaattagcggctacagttagtgctctattgccgccgtaaatgatcaaaccgttgaacatcaaatcgccgtcaggttcttctatcagtactcccctgaggggcatgtgaccgtggactttgaactgcagagtagcttgcgatcgtgatgtgtataat

SEQ ID NO: 8644 - DNA, 1006 bp, Diabrotica virgifera
tccatgtgccttcttcctcttgcaccggccgtatacttttcttagtatcttcctctcaaatgtcttaagttggctttcatctttttttttgtgattgctcaaatttcacaaccataggttactactgttctaattaatgttctgtagacactcattttgtttcttttgcctcataatttcactggaaatacgtacattaattttgctactcacggaattcatcttagtaacctgatttttatgggtattgataaatcatgacatttgaataacttagccattttttgaaatgcagatcttgctttctctatcctacacttgatttctatggaatggtcccaattttaaatcccccctcatttgtcagccctcaatacacccccatttcgaaagcttgaaatttatttaataaacatctaatgaccgtccagctttcaacttcatacaataatgccgagaacatattatgacatttttgacaagtcttattttcaggttaatattaatactctgtccacatattttctaataggaagaacactgctctggtctttcaatgcgaatttttgtgttttgaatcttatgatttataagggaaaatatgtagtgtacaaacagcagatacagattttgttagctaataatttttctagtgcgttatgcgtatacataatatgttagcgtctacatattatttgattcaatttttgaagctccctagctagtgttaagttactaaacactaatgcaagttgataacgtggtgccttattggttgatagcgaggctagctgggaatattttaatcgattaaattttccttaatatccacttgtataatgttcggatattgttataatcttattttgaaataattgtattggtgaacgattatatgcaaatatttaaagtatatttattttctgtatatacttaactaattatttattaggaataaaacctgtatatctttagaaataaatgtgttttattattgttatatgta

SEQ ID NO: 8645 - DNA, 1001 bp, Diabrotica virgifera
  SmartBlast Evalue=0.000000004; Info=Transposase n=1 Tax=Salmo salar RepID=A8C5I4_SALSA
cccataatatttttttaaaatttctcgagtaacaccaaacacgaccccatactcccaccctttgggagtgggccaagaaacaactttgaaatcttaaatggagaaccacatttttccaatggagaaccaagttttatctgaattttttctattcgcgatagaaaaaattgcgctgtaatcacagaaacacctatacaaatccaaagtctgggaactaatttttatagtatggaatagttttttaagaatgttttgtagaatcagaatctacattaacatttgggtgttcctattggagatttcgaagttaccccaaccccacttccaggggatggagtgtggagtcgtgtttggtgtcattcgatagatttttgaaaggtgttgaacacgtgtttttcagtttttggatccgatgttgagttgtatgtactatttttttataaatattgaaagggtttaatttgatatgctttttgttgaaacaaataaaattttaaaaactttagtagcgaatattccctcctctggcagcgataataacttgtaaacaacgatgcatgctttggatcacattttggatcaaattctgcggaagattgttccatttctgcaccaatatgtcgccaagctctcttgactttcttttgccccccacatgactccgtaaacgtttttttcagctcatcccaaacatgttccatgggattaatatctggactgcgagcaggccaaacaaattgtatgatttgaacttcaagatctgaccctccctaaatagaagtcgctcgacaacacatacttgagcatatctctcgcctggacttgccacactcttacaagtttgtctgagcccataagacagaatctccgtattgtccaagctgtgttttcgtgcaaaattaatataatacggcaaacgtattatataggtatacttatcagaatgaattataccactgcactataacagccttttacagtctgcttattatatcatcgtg

SEQ ID NO: 8646 - DNA, 1012 bp, Diabrotica virgifera
  SmartBlast Evalue=1E-115; Info="Elongase, putative n=1 Tax= Aedes aegypti RepID=Q16K45_AEDAE"
aaatcgcttgctaacggtgctgcgctgatgagattccagctaatagcgcacgtataggtaggtgataataagtgttgtgaaaaattcaagtaaatttctaatccgctaataaagtgtgccggtaccggtcattaccagatagtgagagtgtcaatcatcaacaaacaccatgaaggaatacacacaagttacaatgccaaactattcgtatatgttcaatttcgagtctgatttcattcatcaaaagagccgcacgtggatgcaagacaactggacctcaggcttctgggctgtgggcgtttacatggtgctcatcttcggaggacaatatttgatgcagaatcggcctagattcgaactgagaggtcttttgattatatggaatactctcttagccacttttagtataatgggtgcctttaggactctaccagagtttatctacacattgactcatcatggtttgtaccattctgtatgcattccttccttcattgaaaacgatagggtgtcaggcttctggacttttatgtttgtacttagtaaactgccagaactgggtgatactatatttatagttcttcgtaaacagccccttatcttccttcattggtatcaccacatcactgtgcttttatactcttggtttagctacaccgagtatacagccagtgctagatggtttatcgttatgaattattgtgtccattctgtgatgtactcgtactatgccctaaaagctatgagatacaaccctccgaagcaaattgccatgcttattacttcactccagttacttcagatgttgataggttgtgctgttaacttatgggctagacagttactccaaaaccaagcggaatgccatattacaccgttcaatatcaagttgtcaattaccatgtacttcagttactttgtgttgttcggaagattcttctacaaggcgtacatgtcaggagagaagaaatggggcaaagctaagaacgctccagttactgcagagtatcca

SEQ ID NO: 8647 - DNA, 1011 bp, Diabrotica virgifera
  SmartBlast Evalue=3E-48; Info=Conserved oligomeric Golgi complex subunit 5 n=1 Tax=Harpegnathos saltator RepID=E2BTS7_ 9HYME
agtatgcttcggtcgaaggcaaataaatcgtattttaatttgtttgtcatttcataatagcattttaataactttggaaaatcttcttctagagtttgtttcagagccaaagtagatttctggatttcttcctgaaagacttttccaaatcctatccaaaacttctcggcaatatttaagtcactgtgaaccaaatataagttgcttaaagtgttgtgcaaaaattttacctgcttacatattgaaaagatatcttcagcaaatactttttctatttcagaccaaacttttgttctaaaaccttgagaagatgtgatgttaatgtgtcctgggccccctttagtcttgctagaggcaaatgaactgacagagagggctaatttcaaactttctcgacattcatgtaaattgttgtccacaaaactatttgctactgattctattgtgccaatatttatgaagatctgtaaagctgtagttgtttgtgtaatattttcgtttttggctccttgattcaaagaacctgtggccaattgtacaactttttgctggtgtactctaatattcctcagttcattcttaacactatctatatcctttaactctggatcagaggcgagttgttctaattcctgcaaaagaatagctttctgaactggatcattggtatttgttaaccttttactcaattgttgcaatctgttgacttgtcgtaagatatggctagctaaatgaaggcgacctaacacttttgtgtgtttttctaattcattatagggtattgttatctgagttttaagtcgttcagcatcaataaataatgtttttacatgactgttcatggaatttaggacagtttccaattttgtagcattatttgcttgttgcaacaaatcttcatgtttttccagtatttgtctgtgaagttcttgatttattaattctataccctctgccaatttttttacttgttctttaataccaatggactcatttaatatattatcggaa

SEQ ID NO: 8648 - DNA, 1006 bp, Diabrotica virgifera
gatattaaaaacactattgattgaatacataaaatttgtggtttgtttttatagttgtttgaaaaaagtcactaatttggttcctgatcagtataatagaggttttaaaagtactcgagcagtattttggcttttagtgccaccataacttcgaaatttacataatcgtagttggacacatatatttttaaacgtcactgttagaaactttatcacacttattggatcgactgcgccaattcttggatatcttcgccatcgtgatgtcaatttgagtttaaaatttgcactgctacgaatgttgacatatttatcctattctctgcgccagttattagattttttcgtcgctagattggaattttgcttgtaaccagtttaaatattacaaagaaacagcataggaaacaaactgcatacatacataatcgacgttcctcttatacaggaaggtgtcgaggttacttaggaaacaaactaaattaatctaaaagaggttaaaaagcaggtactgagtttcaggtactatcaattaataataatctttaagtagggtaatgtttaaagacaccagtggaagagccaagggaaggtttaggtacaaagttggatagagtaaggttgaatgttaaaagctgttctaacataaaagtcgttttataacttagaaacattcatctagacccaagaaaacgaatctatttggcctgtgaagtttttcatcccttaacctcttttctatcaaccaaataccctcaaaatcatttattatctatcttttaacatctttccatccactgctatacctaagctttattgtgggaagctactgatgttgggatgtttagacagagcaaatattaattcctgtaaggagcaaaaaaggttaaattgaagttacactgtaagaatgcacgtctatgaaataaatatatcaagaacttgtgattgttaatttttttacatagaagtaaagtatgtgtatttccatatttacctcatcacg

SEQ ID NO: 8649 - DNA, 1012 bp, Diabrotica virgifera
  SmartBlast Evalue=1E-42; Info=ER lumen protein retaining receptor n=3 Tax=Aculeata RepID=E2AC11_9HYME
gcggatcagtcgaatagtcgaatgttgaattgaatcttgaatttgaatttgaatcagttagaacgtggattgttctgtggatgtgtatgcttgctgcttgctctctagttatttattttggtccattcagatctgtttttgttttccaaatttgaagacatgaatgtctttagaatagctggtgatgcatcgcacacccttgcaatgttatatttattatggagtatcctaaaggagaagtcatatgctggtgtatctgctaagacgcagcttctctacactgcagtatttattaccagatatcttgacttattttcgtatttcatatcatattacaacactataatgaaagtgttcttcatacttgtctcagcaatcacgtttttacttgcgttcaaaatggagagcacatacgaaaagaaatatgacagcttttggtctgaagtccttattgccggggcactgatttttgcagtgttcttttctcacagtttagatgctattgaaatactctggacattcagtgagtacttggaggcagtagttatcatccctcagatttacatgatcttccacagtaaaaaaatcaccagacacatgaaggtgtatctattcttgttggttctgtacaaaacaatgtatatttgcaactggatctacagatacaatatggagaaccgtgtggacttaacatctgacatatctggatttgttgatgttatgatattcttccttggtgtggtaattttgcgctgcagtaaaataacaattcacgaatatgagcagaaggatgtgacaaaatggaaaaatatattccttatcagtagcggttttgcatcgcctagagcaacccaaaaagatgctcctttggtcacagaacacgtttaccaaccagtagttgtataacaggttgtaaattactaaagtgtaatataagtaaatttttatcctatatttttcgaaaacttttttgtttaacctgttttatgtaacataaataaattataagatt

SEQ ID NO: 8650 - DNA, 1002 bp, Diabrotica virgifera
  SmartBlast Evalue=5E-74; Info=Peroxiredoxin-2 n=1 Tax=Culex quinquefasciatus RepID=B0WSI8_CULQU
tttgaattgtcattttggattttgattttgaaacggtgtttgaaaattatcattaaatatttaaaatctctatcagtctgatataacagcagcaaattatcacatcattttataatttcatcaatatcatggctggattaattaaaaatctggttaccagggttccacaaattctcaaaacagttccactgaaacaaataactcacagaaattttggtgtcacgtcatcgttatttattccaaaagtacaagaaccagctccaaatttttgtggaacagcagttgtgaatggttgcttcaaagacattaaattagctgactttaaggaaagatttgttgttctatttttctatcctttagatttcacatttgtttgccccacagaactagttgctttagaagacaaacttgaagatttcaaagcattaggcgcagaagtaataggatgttcaattgattctcattattcacatttggcatggatcaacgccaagagaagtgagggtggtttaggcagcattagatatcctttattatcagatattaacaaggatattgctagagattatggtgttttattagaaaaagaaggtattgctcttagaggaatgttcattatagatactaaaggtattctgaggcacataactgtaaacgatttgcccattggcaggaacgttaatgaagcattgaggattattgaagccattaaatttactgatgaacacggagaagtgtgcccagccaattggcaaaaaggaggaaaaactataaaaccagaccccaaaggttcccaggagtatttcagttcatcaaattagatgtgtcaaatgttttatttaagaaagataataaaaaatgtccaacgttacatatttattactcagtttatttagatcaattttatggagattatcattttgtggctattacaaatagccttatgatactttaaatgtaactacagggtgaaataatctgaagaaaaaaaagaaataaaga

SEQ ID NO: 8651 - DNA, 998 bp, Diabrotica virgifera
tacaacaccaatgtattacgtattataagcagacataaattaaattaagttatatttaaactctctacagagtgctaaacaatagaaaaatgtggttatataattacttacgaaataagttctactgaaagtttctgcaatgaatcaataagaatcaactaagcatcaagaaacacaaattacataacattatacatctatgtatttttgtaaattttattcctacacagtcagattcaatacaccacataagtaatgttttaagaacaacgaagcttaaaaaacgctttcatcagacattgccttatgatacatcaattatatcggatttattatctaaaaattcacatgttctgggtcttaatacctcactaattatggtatggtcacaagtcacagtcacatgagcaagtggcacttgcccatttgattgttgaaacacacaagttggcaacacagcctgaaggagtctgcgcgatatgtagctagtcagtaatgcgttagcaacgataacacatgtgcgctttatgaggaaattcacaaaatgggatatgattatctgcgcgatgacaattttggtacaaattacggcttttatcaattatttattgtgaaattaaggttctcatcaaacaaaaatttttgtttttaaagtgtaacatattatctgctatataactgataaaaatctcttatgtcccacaagtaaacaggtttggaagtgtaagggtttgctcactacggagagcaatggattgcatcctcgctctgacccctgctccccggtattcatattcgcaaattctcgcattcaaaacaatgtatttattccacatagcgatcgaactatattatcgttcgctatgtaaaataaatacatcaccttaaatgcgagaattcacgaatataaataccagggagcaaggatccgagcgagggatacaatccattgctctctgtagtgagcacaacttaataatgacaccattgattacatg

SEQ ID NO: 8652 - DNA, 1010 bp, Diabrotica virgifera
  misc_feature (1003)..(1003): n is a, c, g, or t
  SmartBlast Evalue=3E-18; Info=Histone-lysine N- methyltransferase SETMAR (Fragment) n=1 Tax=Camponotus floridanus RepID=E2A4J6_9HYME
ttatttagcaaatacatattcaaaaataaaaactaattttaaaaataaaaacttcagtcataactttgcaagtttaacattttacattcttacaactttttaggttttacaatttggctctagcatgattaaaagtttcaaaaaaaaagttcgcaagttgggacgacataatatattaaatttttttaacaaagtatatgttattaaatcttatgtgtacaaagttaaaattagagtacctatatattatacaaggactagtcagtaagtcggtggctttttgaatttctcgcctgttaattgaaatggcaacactgtttctgtcaacaggcgactctcacttgacaatggtgtaaatttgaacgagctgcgtcatttagtctgtgtttgtcaggcgttgatagcagactactgcgcgttttggaaataaaaaaaagtgaatttcgtgtgctcattaagcatttttttgccgtaaaaaaccatcactcaaaacaaggctgagcttgagatatattatgggaattctgcacctcccatttccatggttaaagaagtggtttactgaattttgatgtggccgtacaagcacggaagatgccggacgttttgattgaggtttctacatcagaaacaattgaaaaaattcacgatatggttttagccaatcgtagattgaaagtgagagatattatggaagctataggcatctcacatgactcagtggtttcaattctgaatatcacttgggtatgagaaagctttctgcaagatgggtgccgcgtttgctcacaatcgaccacaaacgcaaccgtgtgacaatttcgcaaggatggttggcgttattcagacgcaaaatggatgagttgaaaaaaaaaacgaccgcatttggacatgaaaaaagtgcttttcccttaagacaatgcaagggtacacacgtgcagtttctatggcaaaaatctataaattaggctacgaattgctccctcatccacaccattctccngatttag

SEQ ID NO: 8653 - DNA, 1011 bp, Diabrotica virgifera
  SmartBlast Evalue=1E-124; Info=Vacuolar protein sorting- associated protein 45 n=1 Tax=Camponotus floridanus RepID= E2AFV3_9HYME
agatgatcctatcacacctttactaaaccagtggacttatcaagcaatggtgcacgaattattaacaatatacaacaacagagttaatttgtccaatgtgccaggtgttgcaaaagaactgtcagaagtggttttatcagttgaacaagacactttttacgccaaaaatgtatttatgaactatggtgaaatcggtacaaatataaaacagttgatggatcaattccaggcaaaagctaaaagtcaccagaaaatagaaagtatagccgacatgaaaaactttgtagaatcatatccacagtttaagaaactgtctggtaatgtcactaaacatgtaacagttgttggagaactgagctcaatggtgaacaagtatcatttgttggatgtttctgaaatcgaacaagaaatatcttcgcaaaataacgattactatgctcatttacagagtattaaaaaattattgactaacgataaaattagaaatactgacgctgtcaaattagtgatgatgtatgccttaagataccaaaatcacaacaataatgacattacaggattagtagatttactcaaaaagagaaatgtgcctgacaagttgctgaggaatattgttaatattatagaatatgcaggatcacatgctagacaaagcgatttattcaatgtagaaaatgctgttaaaatcactaaaaggtttatcaaaggcttaagtggagtggacaacgtttacacccaacacaaaccactcctacatgaaacattggaagatctagttaagggcaggcttaaggaacagttgtatccttatcttggcagtcatggaagcaatggtagaccacaagacatcattgtttttattgtaggtggtgctacttacgaggagtcattaacagtgcattccataaacagaaactatccaaattttaatgtgctactgggaggtactactatccacaactctacgagctttttggaggaagtcgaacaagctactaaaaactgtcctag

SEQ ID NO: 8654 - DNA, 1005 bp, Diabrotica virgifera
ttctcatatacatctataatacatacattaaattaatactctcgtgcaggtgcattaaattaaattaatttaaattattaaataattcttgcggaacatgccttttacacaatacaaaaagaatacaaggaaaataatacataggcggtccaccctagactaaaaatcattatcgcagatacttgtggtgcactacttgtgagatcaccaagctacactcactactaatactctaagtttggaagaatcgcataaattagaaaagtatacgaagaagtaatgtttttaaatattgttggttaaagttacgtagtagtattttctttaattagtattcttagttagttacaaatagtagtcaacgggtagaataactttcagtcgcataaatcaatatggtacaaaaactggaatggaaatggaaaaatgagcagatttcacggtcgtagattctttctagtttatgcgatttagaataatataatacattatacacataaaacgactttatacacacgttaaacaaattcgatgaatcgttacaggaacaatctttttgaaacctgtaagtgatttggtgaagtttcaatcctatataaattagcaaatgttcgggcaacgcaggcaaaattagataagaaatttgttagtatgtataataaaagagaaaacagtgagaatcaagaattgtgtattgtaaaataaagaaaaaagagttactttatagattcaaactgtacaaaactttaatactaattacaatattttacacttatacacattaataaataaagcaattagaaaatatttttacttgtattaatagttaagagacattggagcaaatattctaataatgtcactagcaagtactctctgccatataaactatacacggttatattaataaaaataaacagctcaagtaacgatgccaagtatcccttagttacccgaatcagaacacagtcaaaccaacctcaccaaaccagtttccctatcaat

SEQ ID NO: 8655 - DNA, 1010 bp, Diabrotica virgifera
  SmartBlast Evalue=1E-62; Info="OTU domain, ubiquitin aldehyde binding protein, putative n=1 Tax=Ixodes scapularis RepID= B7QJ34_IXOSC"
gtttggttgaccgagtgattttccagggtggagtttttttgtgatgctaatttatttatggccatttcgcgttctctgataaatgaactataaagtattaaagcacataaattaataatctttgaataacttacattgatattgcgatcaacaaggtttttctaaacaaatatttagttaaaagtgcacaagtttttatgcaagttgtcttgtaattgttttcaactgcttagagcttctatctccaccatgggcgatcaggttgaaaattcgaacaataaagtgaccgaaaatgatccacagcccaacagggacgaaatgataatggctcagcagaggcaaattgaacaagagatttcagaatcgatacctcttctaggaggcttggaacctgttacttcactaaataatgaatattcttcagatgatatctacctcgaaaaagttagcaacctggctagtaaatatcaattcatccgccgaaccaggccagatggtaactgcttttttcgagcatttctttacgctaacatagaaagattattaaagaaaaaagaggaatttgaactgttttttaagttagcagaggctagtaaagacgctttagtgtctctagggttccaacagttcacagtagaagacttttatgatacctatattgatgtcctcagaagactaaaagatatagataatattgatgaagcgcttaaagaattatatagtgtatttaatgatcaaggtttctcagattatttggtggtctacctcagattgttaaccagtggccagttacaaaaggaacacgaattttacagttgtttcatagaaggtgatagaacggtagctgatttttgtcaccaggaagtagagcctatgtataaagaaagtgaccacattcacataattgcagcttgtgctgcgctaaatactggtgttagagtggtatatatggacagaggtactggaaaaatttgtactgaacatgatctgcctgaaggatgtacacccac

SEQ ID NO: 8656 - DNA, 1009 bp, Diabrotica virgifera
cccatttcctgtaattattcttctgtaattgttctcagtacacattctcaataacattatgaaaaacattacgttacagacgttaacgtgaaaaaaaatgtttgggataaaaatatagtaccactgaatatttctgaacaaactgagtgcataatttgttacatttaatacaaagattgccagattaaattaattgtaaaataattgcatgcaatgcagtaatataacaactccagctatttagtatacttacataaaataatctaataatttcttaaagaaaagtaccatatacatagtttttttatcgttcaacaacaaagtgaattaaattaaactataattctagtgaagtcaatacaacttgtagtctttgttttttaaatgaacaattagcattataatatttgtgatttattcctgatctttcttaattttcaataacatatttggcagttttataatcatataagaatgaaaagaagatgtacctaggtatatgtttagtaatctctgaaatatttttattgatttagatagagaattaggtactcaaattattagactatttcaaggatattacaaaaaggaaaggaaaaatacacaatctagttctagctagatatgtcagcaaaagaagtactttgatctaatttgacaagaaaactattgcatttttttttcaattgacaaacactatatagtctgttcgccaaactcagacgcaacttcccagatatttcagtcggtaattttgccaattttagtaaaattggccaaaaataattactaaatagttaacaatcactaaataattagtaattttgccaattttcgcaaaattggcaaaaaacaaaaaaattatcgactaaaacatctggccagctgcgtctgagtccagcgaaccgactataccgtgcaatacaaatgaggatattgaaatgtatattatcagtgctgttgaacttttataaaatagagaatttgatattaaaagattaaagatttt

SEQ ID NO: 8657 - DNA, 1002 bp, Diabrotica virgifera
  SmartBlast Evalue=3E-48; Info=Ras-related C3 botulinum toxin substrate 3 n=43 Tax=Euteleostomi RepID=RAC3_HUMAN
aatgtgataattgtaaaataaaaatgaacaaaatagcatgtgttacatttggtgatgaatcagttggtttaagaagccttcttataacatatacgacgaatgcgtttcctgcagaatatgtacctactgtttgggacaatggtgaatacgagaccactctggatggcaaagatgtgagtttgtctctaatttctatggcaggtcaacaggaatacagtagattacgaccacttgcctacgagatggcggacatattcctgttaggattttctattggatctccaagcagtttaaccagtcttcagaacgtttgggtaccagaaataagaaaactttgcccaaatacacctatagtgatagtaggactaaaaaaagatctaagagataatcctgacactgtgaagttattgaaacaaaaaaatcttaaacctataccgttctcatatggtgtaaaaatggctcaacaattaggagcagcgaaatatattgagtgttctgctttgaaacaggaaggggttaaagaagtatttgaggaggtaattagagcctttagagcccatcaaagtagaaaaaacaaatgtattatatcgtaatatgtcgaatatgattattatcatattcgacatatcttatttttaaagacataatattatgccgcatttatactcagcctttgccactgctaatgccgctgtcggcaatattggccgaaatacgatatcgacgcgagtgaagtgtttacaccagtcctcaccaatgtcggcaatatcttcatgacttcattactcactcgcattcgcgctgcctctcctttgacttccgtcacaaaaacagactttttggggagcaccgtgcaatggccagtagcatgagcagcggcagcccgagtaagctatttacacattcacgctgttcactgcccaattccctgtccaacaggactgagtgtaaatccggtataagctatcgacaaactatatatagctagttaatttaaacaat

SEQ ID NO: 8658 - DNA, 1013 bp, Diabrotica virgifera
  SmartBlast Evalue=3E-67; Info=Helicase MOV-10 n=1 Tax=Salmo salar RepID=C0HAB8_SALSA
ttcatatcgaatttggttttaacagaaggtccatacgggttgaaaagcaagctctatttttagctcatacacatggaattattccatatttatttccaaaggaacttcgaattgaaatgttacctgaaaaggatttggtcttctccgataggaccttgaatgaagaacagaaagttgcagtaaaaaatattgtaaagtgtaggaataccccctttataatttttggtcccccaggaaccggaaaaacaataacggtggtggaatctgtatatcagatttggaaaaaatatcccaagtccagaatattaatttgtgctccttccaacgccgcaactaacgaagtcgctgtacgattaagaaaaattattcctaaatccgaaatatttagacttattgggattacctatgccaacagcaaaactgaactccaagaaataaaagatattgtaaacctaggcaaggataatgcattttacgaaccagctatggaagaattgcttaagtatagaattttgctaacaactgtagtgacaagtgccagacttgtcaatggtggagttccttccaatcatttttcgcacatattcatcgacgaaagtggctatgctacagaaacacaaacgcttattccaattgcagggatttcatcaaccagtgaaaacaaaggcatggttagtgctcaattagtacttgctggagatccaaaacaactaggtccgttggttcattctggatttgctgaatattgcggatacggtaaatcaatgctagaaagacttatttataatgaggtatattctaaaaacgaatccaattcgtttgataatcgttgtgtaacaaaattaatcagaaattatagatctcatgaatcgattattaaaccatcaagcaaattattttataacaatgaactaatagcagctggtaatccatttactgatttgttcatcggttcagatattcttataaacaagaagtttccggttattttccacaatgtagaaggtgaagac

SEQ ID NO: 8659 - DNA, 1009 bp, Diabrotica virgifera
  SmartBlast Evalue=2E-77; Info=Proteasome activator complex subunit 3 n=1 Tax=Camponotus floridanus RepID=E1ZYI1_9HYME
gagacttccgcctatttttattgtcaaaaaagtttggtgaacaactaccctaagacaaaaataatatacatgaaaaatgtcaactcaaatcttaagaaaatatgtttacttttagaaaaacttccatacgcgccagatatactccaactagttaatgtttacaaataaatttaatatgacagaatgaatttttattgattctagtacaaagattcggtagcatttgagggtctaggcttcttaattttgtcgagatttttaagaacgatgtcatgaagggcacagtatctgttcctgatttcggacatcactaaccataagctaaggtactctttttcgtccaattcctgtactgattttctgtagtcttctatgtgggggtacttggctactttcgatattaatttacctctggaaacataataccgggaaatttgatcaaagaatgcagcagcttctgattccacagactgcacttcggccaatgtgtcttcttgaatggatacaccaaagttgttaccgtcttcaatttttggaatcataaaggaaatccacatctttatcaaatttgagtcttctacaagcttcctaatatgaggtttgacttgttctatcaactctactatatttttgttagtggaaactgctccagtaggtagaatcataactttagtgccatcctggatgaggctggggtccagtttggccttttttgccactggcagctcactgtgactgttcaagatgattggctctgggattggtatgtttaagtcttgatgaacatcgttgaagcttctgtttttaaagtgagacgtttcgaggatactgttcaattttacgatagtttctggaaatcctttgagtactaatgattcagcctgtttctttacttcttctttgtattcttgtacttttacagattcagccataataaactgttactgcacactcaacacttgtaaatcttttaataatgacaaattactgcaaattaccttcaaattac

SEQ ID NO: 8660 - DNA, 1007 bp, Diabrotica virgifera
caccagtagttcgcatcttacggtttggaaaactaacctcccctgtctggtattatggtcatgcacatcttctatacgtcttagagtaatatttgtaagtgtttgagaaagcttaatttgatgaatgaatatacaaacttgtaaaatgtatagcgactcaatgtttagaattcctctctgatagtacaggtcgtcagttggatgaagtcttgacagttgaaatatatatttcacagccttgttctgtaacaccatgagaggatgtagctgtttttgatttgtattaccccaaacaatagttagatatgacaaatgtgaatttattaaagagtgatagatcattttacgctgtgggatacttataaatttagcaattcttccaagcatacccactgctggagctattttttgacatgtgttcaatatatgctgttcccatgttagtcgattatctatgtgtaagccaaggtatttggtaacattttttttaacgaatttgaattttccaaaatttaactgtaactctctgtgttcttcaatatttgaattattgtgtaactacatttattcatattgagtgagagcttgtggtatctgagccagtcatctatatctgtcagatctttttctacaacatattctagctttttgggatctttgtcagcatacaagagtcccgtatcatcagcatataaaaatagcgttgattttaaaggcagattggagattatgaattaggaattatgaaaatacattatgaaattagggccataatatttttacatggctcacgaaaaattttctgatttcatgaaacaacagtgaactagtgatgttgaaaaagtaactattcgttacaaagtactcgttacttacgaatactgaaagtaacgattactatacgaaaaggcaaatcgttactttggttactctgattacttcgtaccaatagtatcagagcgagtgacgactactgtgtctactttgattactctgattacttcgta

SEQ ID NO: 8661 - DNA, 1006 bp, Diabrotica virgifera
ctaagttgcgaagatgcgaaaaacatctaggttaacttaattttcgtattaaatcttcctattttagttcttttctgcaaaatgttttaatatcagctgaatggcaaactacaagatcgatataaatatgatcacttttttctgcgcaccagtgtcatatgttgatgcgacctttaactcagtttttacacgtaattacaatgcatactaaataaatatatgcgtttaaatatgcttaaaatctacctaaatgtattttatttcagctttttccctgaagtggtagaattaccatttacctatttatgtaaacttcataatgttactctcagctaagtgacatagagctttattacgagtagattatgcaatacacgtacaatagaattcaaagcagtagtggcaaaaaaaggttcagatcaaaacaaaatattttaacatctactggtatgtggaacagactacagtaaaacaaggggtcgctgtgttggtttccaaaggtccataggctagcacatgtgactattacagactgctttgataccatcctggaattattgtgattgttggcactcaacacttagattaaatcagacaagatgacaccgcatcagaatgcggtgtgctcgattattgagctagagcaaacatctaaaaattatcgacctatcggcacaagagttgaaggtttcaataagttttgttcacattatcataattattgtaacaatagaccctacgactaaaccacattgaccctttgccacatgccctaagtgtgaagaaattctagcaaatgcttcatgctgtcatggtatttctttatagaagaaatatagtggaaatatttaaagtattatataacatttgttttatctctagtatattataaaagtaatgtaatatttacagtaacatccatcgattaagtattatgagaagaaaagatcttttaccacaataaaaatttattttctaataaaatgtataacagataggaatcata

SEQ ID NO: 8662 - DNA, 1007 bp, Diabrotica virgifera
tcaacagcagataaatgttccacaacagcaactatctgcgcagtcacagatacaacagcctcagatatctcagcaacaactaccgcctcagcatcaccaacagttttctcaacatttgccacaaacgcagcaacaaattcctcatccggcaagtcagcctcagtctgttctagctcaacaggttccttctatatcgcagcaacaaaactatgtaccttcgtcggtaccgcaacagtacgtgcctactgctacacaccccatgaatatttcccacattagttcttccatgtctcaacaaacgtcatctgtcatgagtggttcggtaccaagtcagcctgtatcgatgtcgatgcctcaaccaatgtcaagtagtgtgccacatcaacacgatattccaatatctataccacagcctcatgtactacccactagcgcaactactaccatatcccacgccatcagccagtcaaccattcaccagcaacaaccaccccctcaaagttacactcatcaaccatcatcaattcctcctcccatatctaagcatctcgccacgtctcagccgatggtgataaacatgaatcaaccacccatcgacatgcagacggtgtatcagcaaccggtgtatgccggccatggcggacacacaatttctagttctgtatctgtgcagaatttctcgtcggcggcgggaggaccacctgtcggcggtttccagcattccatgtccatcgacgacactctgcaaaactatgctgctgctgtcaagaaagtgccagagaatctcaaccaaatattggaaagctccagtaaagttagtcaaactccagcttcgcaaggtgatgccaaatacgacgcgcatctgcaaaatttgcaacaaaagttgtgtgctattccttcgtctagaacttcacaaaataatactgcgccatctagcccccaactgatactcgcttcgccagagttcccgcaagaaaatgtgcctactaatgcaaacgttaatataa

SEQ ID NO: 8663 - DNA, 994 bp, Diabrotica virgifera
acccggtatacaactaaaactcacctgtccagcaacaatactattacagtggtacttgccaaaaaatcaggccacaacatgttcaaaaaatcacttaaatcggtcaacaggttccggaaatatgagacatcaaaaacgagcaagttcctaagtgggccgacctctatgcacgtaagtttatactgtttattttgtggcaatgaagccaatgaagaaactgagaaaaataaaacacagcatcttcgaaaaaaaaattgtaacgtgactaaactaaaattcaaagaatccctgttgaaattagctaaagatcgttctgatgatgtttcaaaggctgttcagaacgtattaattttgagtatgatttagtcgctgctgatgcaaaacaccattacagttgttacaaatctttcttaaaacctaatactggtggtaaaattggccgtccacaagatgaaactgtaaactctgcgatggagaaaatgtttcaattcataaaaacgagtgatgattgccagttttcgttgcatgaattaagaaatgtttgtcaagatgtagctttagatgacagatatttaatgaagagacaaatgactgcgccacatttgaagaatctttgaatatccagcaagaggaagaaatctgttgaagtagactttcaataatatgaatatgattaaaatatctaaagaaatcaaaacaataattaacctaataatcattagcaatatcaataataaggtaatatctagaacttaacgggtattgttcccttaaattatcctaaaattgtcataacagtggaataggcctacaggggaaatcacggtaaaaaaaacacgccgagcacactacctcacaggtggtgtggaaatgtgtgcaatcatatataatgtgactcttaaaatcacgatatctcagaaatggcaactcataggaaaaaaatcgtagactatttttgtagagaattttaagatctacaactttggtttgaggt

SEQ ID NO: 8664 - DNA, 1008 bp, Diabrotica virgifera
  SmartBlast Evalue=1E-46; Info=Putative alcohol dehydrogenase n= 1 Tax=Gryllotalpa orientalis RepID=Q6RUR3_GRYOR
ggcctattgtccgataatttacccagactatcagttgacatacgtttcttctttttagagtcaacagaactgatggtggtggcccctgaatcgaagtaaatttaaagctttttttccttaataaattttaattaactgtactaagaagtttttaatacgttgttcttaaacacatttctctcttcaatgataaactgataggctggtgctcctgcttctattacccaaagagttccattgggcgcatatttcaaaactccaatcatttctttgcccacgtggtcagctttttgcattggtaataggcctgcttctacagctagcttataaggtttataatattccggtgtgactaacgtttccggttttatacaattcgcaaccaatggggtttcggtaatacctggacaaatagctatgacacgcactttggttctttcatagtggaaaggatcactccaacacattgtcattcctgtaacagcaaattttgttgctccgtatactggtgctatgggcatcccatttactccattaattgaagatgtgttaagaatgacagcttcgcttccttgtttgtattgttttaaatatttttccatacccaatataatgccattaagtgttcctttgacattaatatctacagctaatgacatattcacatccagcattacgccagcattattgataagtatatctatatatctaaatgcgctgactgtggctagaaaagcattttcgaagctttctttgtcagtaacatcagttttaacgaatatgaccctatttttgccgtacttttcttgtagttctgcagtaactttggtaccattcgcttcatttacatctgctatggttactcccttaactccattctccaacaaagcttttacatgttctaatcccaaacctgaggcacccccagtaattaatgccactttattttttatttcaaacaccatttttaaacctaaatcatagagatattagatattaccaatgttg

SEQ ID NO: 8665 - DNA, 999 bp, Diabrotica virgifera
  SmartBlast Evalue=1E-33; Info=E3 SUMO-protein ligase RanBP2 n=1 Tax=Camponotus floridanus RepID=E2ARH2_9HYME
cgatgaagttcctgtaaaaactggcgaagaaggcgaaactgagctcttctgcgcacgcgcggagttattccgacattcagtcatcggtgacgtaaaggagtggaagcaaagaggcatcggtaacatcaaaatcgtcaaaaatcccataacaaataaatacagagtcgtcatgagaagagaccaagtccttaaaatatgcgccaatcactacatcaccgccgatatggtcctcaaggagatccccaccaataacagatccctcatgtgggcagcccaagatttctctgaaggagagatcgcgaaagaaaccttcttggttaagtttaaacttgctgaggacgccaagaagttttctgaagtcttcgaagctgctaaaaagtcttcgaagtctacaaaagtagaaactatcgatcttaccaagaaagaaactccaaagagtgcatcaagtactacgtctttgggaggttttgtttttactggcactccaacgttcttgcccaaggatgttgttacagcaacaccagttgcagaagttaaagaagcgagcaaaccagtgacacctttctccacgttcgtcttcggaaaaactgaagccaaggcagaacccattaagtttactcccttggtaattacccaagaaaggaaaaggacgacagatcgtccccagtggaagaatttgtacctactgctgaattcaaacctctaatacctctaccagaactcgtagagatcaaaaccggtgaagaaaactgcgagattttattcgaagagagagccaaattgttcaggttggacacaagtggagaaaccaaagagtggaaggaaagaggcgttggtgtaatgaaaatattgaaagacgaatcagtcagctcttgatgagaagggatcaagtccacaaagtttgctgcaatcacagaatcctcaaagatatgatcttcaaaatgaactcgaagaatcccaaagcgatcatttggagtgcccaagatttttctgagggtg

SEQ ID NO: 8666 - DNA, 1001 bp, Diabrotica virgifera
  misc_feature (966)..(966): n is a, c, g, or t
  SmartBlast Evalue=1E-27; Info="CG2269, isoform A n=2 Tax= Drosophila melanogaster RepID=Q0E9D9_DROME"
ccctgtttctggacagcttctctcgcattcagctattaacactggatcttcttcgtgaaaggtgtaggtcagatcattgagataacgtagagaatattgtgtagcattttggcattgataatcgccgatacctttacacagttcgaaggcttttgctacgaacaatgcctggcatgtgcgaatagggggtgagcggttgtagttgctgcatagtaaacacatctggtacaaatgacaagctggcttgaagagttctccatacattccaacagcatactcgttgcagcttctgacaattgaagggcacaattctgttccgtagtggctttcgataatgtctactggggttttataattttgttcatggcagtcctcatcaccttcagcgcatttaatatcgttatctcctttggtcagtttctcaatatctttgtcagagacttgcttcctcggtacagatctcttttcttctaaaaacatgtcatcatcctcagtcatagggcgtctattcctcagtctttctctctctttagctacggctactctgtattctcctaacgcagttctcattttttccaaactatatgcagcggcaagtttagatatcactttgtccttaatttcctggacctctttaggatcggactctccttcacgagatcctgtatacttcaaagcatcatccacaatcttatcttccatgatttgtagtttactatccatgtcatttattttctgttcttctgatagtgatttttcttcagttgaagtcgctttttttctatgttcctcgtggttacgaaaggatgaaagaggcagttcggcatttctctttttattggacatttttatggacttgtgataccgttcaatcaaccactctttatccaaatcatctggctcagaagatttcttgcgcctatcaagaccaaaatactcggaccaatctacggacttcttttttanctgtaaaggttttctgttggcagagaaactggagt

SEQ ID NO: 8667 - DNA, 1000 bp, Diabrotica virgifera
tatacttattttacattttacattagcaatattaatttttatttcattattagtctatatatcagaaaatatacttattagagcatggaaaatttaataggctaatctaaatcgggagttcagctgttatttaggtcactagacaattttttgggcctacttttgttactactgtaacgattagagcagatttttaaattagttcctgcatcaagtttaacaagcaatttttaaatctttaactgtgatgtgacagatatatatgataccaaactattttatatctttaaatattatctataatttacagccaacgtgtgtattttcttgagcttataactcaaaataaaaatctggtctgggttaatagtttaagcctgctttttttggcagaagattctctaaagattcactttattatcagcaaaaattaactgttatttggataagtagttatatctttgttttatatatttcagttcaattgttcataaagaaagatgacgaattcttggacttggtttaaatattatgattattaatgtttgtaagaagaccacattgcaagaagaagaagaaaatacgttacgaaatcgaatttgtctgaaactttcatcaaaaagcttttcttaaataaaacgatagctagaataatataatgtttaaaatttttttagacgatatcaatatttcttaatatagtaactaaaaaattactatactacgttcactcgcaacataagctcagacgccagtttcagacacgtgatctgtgggtgtgtggtgtcgtcgcagcttgtcattggttagaaatgaatttataaccaatgacaagctgcgacgtcatgacacacccaccggtcaggcgcctgagcttggcttgggaacaaacgtggtatagatttaaaaacatagtaactgtaggtctttcttttaaaactaatgtgttgttaaaatcagtttgtatatacttattaacttatggcaatctacatatatg

SEQ ID NO: 8668 - DNA, 1005 bp, Diabrotica virgifera
ggccgacggaagggcggataatagggagcgttaaatgaaacacaagtttaggccttaatgatttccagtctccgataggagtggcacaagaataagagaatcagtttaattttgcctgacgttggacattgtagatataatgatttaggatgaacgaaaaaactagcgattttcatctgccttgccgatgtatctcgttttgttgctgccaatactcgccatcttgtagcatcataatatcgacagctctggcttcttgttgctcggcgtattttatctcatcttaaaaaattgttacttattctttaatattttcaaaggtatataaatttgaaaaaaaaaattgcttaaatggtgcggcggataaaacggaacggcggataaccgaagggcggataaccgagactctactgtattatgttttccatctccctgagctatcccgccggttatcagcgttctcatcactgtatatctggttgaaaacaaaatgtaataaataataactagaattatagttcccaatacgatattttgctaaatatctgagtataataacacttttagtcacaatataaatcgctctataataaaaattataaatgaaaattttattctacaaaataaataataataaatcttcatttcctctaaatttgacaaaaatcagtttaaaatgaattcaccgtccacaaatcaataattcctaaacggcatatcaaaattaataatcaataatattataataaagtcaacatacatattattgtactgcaagacgttcaataacttgtataatccgaccaatttaaagcgagagttgagaattgaatatggattctttatatcaaaagagtgtgatatttcaagtacactttgatacataaaattttggtgtcatggcataacactcatatgtataattatggataattatttaagtagcccgatatcggggaataacacagagattcaacatatattatgcatttccctatgcttcta

SEQ ID NO: 8669 - DNA, 989 bp, Diabrotica virgifera
ctatagcaattttgtggagggtttttcaacgaacagttttcactgtaaagttgtttagttctatttatgtatagtaggttttgcagcgctccggacttgaccagattctcgagtgctcatagggatgcaataaaaacaaaagttaggattacttttctatctatatatattttttattcatacaatttattatgattttaacattcctatgctattattattctgtttttgacctttctccccactataaaacttataaccctaagcatatatagaaaaggcccaagaagttgtttgaggacaaattcgccggttcagaagaagaatgacgcaaccgcaaaatgcaaaattcttaagaagagcaaaaaacgatttttgatatcaaaatcataaagtatgatcaaaattagccattcaccacaccgtggtcaggatctcgagatataagcgttttttggggtgtgccgcttgttatgaagtaacataacttttttcctattatatattttgacttaaaatttttccaaaaaacttcttcatgaattatattttattgttgtgttggttaaaattataaactaaaaagtttgtcactcaacttttttaagtaaacatgaaactaacgaatatgatgacaaaatgttaataaattaacaactccttttttaatcttttaaacattttggacaaattttattgttatctacgtacttcaaagatgacacagtaaaatttttaaaaggaaatatttacagcgaccaaagatacagcgaggtaaatttgaaaaatcatcaaaattgatttttggcattttttgtataaaatttgatttttgaacatgttccaccaactctagataaaaataaacttcatattcggattcagcgacctctaaaacataaaaatagaccaaaattgatcattcaccttaaatttgattttcgtggtcggcataacggaatgccgctcgtagatagaaaagcattatt

SEQ ID NO: 8670 - DNA, 1005 bp, Diabrotica virgifera
aagactatttactagaagaaagtgatgaagaaattaaagatccaaaagaagataatctagaaataaatttacaaaaagaagataagctggacaatatttcaaaagagcgaaagccagaagtagcaaaaaagctaaaagaagacaagccgggggtaataaaaaaaccagaaataaagaaaacagtaacacctacaactagtagtgtacaaaaaaaccaactacaagtaatagtaaaacaacaaacactacaccaacaacaaaaccaactactacttctactacttcaaagtcagcccaaacagagtctactgtttctaaacctaataaaacagaagttaaaaaaacagaagaaaaacctaaagatcctgtagtgtcgccaaagaaaattatagaagatgatcctgatgaatttaaagaactagaaaggcttcttttcgatgatactgttatagatgaaatattagatcataaagtagaagatatattttcagacgaagaatctgccagtgataatgaaggtaggttcaaagcgaaggagaagcaaggggagaagaaagtgccagtgctttcatttagcaaattagtaaatggcactaaaccagaaataaaggccgaaccattaccggattcttcaaaatcttcaagtagtagataccaaagcaggtatgccgataggagacccaggacacaaccaactccaaagccaccatctagaattgaagtacagaaagaaaaggaaaagaaagagaagataactgctcctcctgctgaacaaaaacccgctagacaaaaaataacattattgacagaaaagaaaacacctcgtccgataaaacaggatcgcaaaatcgagattaagataaagaatccgtcaaaatatgaaaagggctccaaaccaaaatctaaagcagaatctagtgtaccaattcagaaaattattgttcctattcgagatgactctgatgacagctcagacgatgaagaagttattatagaatcagacga

SEQ ID NO: 8671 - DNA, 1003 bp, Diabrotica virgifera
gttcagttcttcgaattccgccacagtatagttttaacttttttatttggcgttcttctttatgtaggactccattctatggtgcgatttatccatctattgtctactatttaaccatgcctgaactaaaacgtatgatctactatttttgattttattttacgtacaacatcttgtacaaaacgctgtcactctggaactttgaatcgaatatacagttacattagataataccgggaaggtaataaaagtcttaacatcatagttaatattcttatcatccccacgcccgcttatgtcacttaataaaaaaaatgaaaattcagaactaaaacatctagatatccttaaaacacttcaatggaaaagcaatcattgttaaaataatgtaaaatcgatttatctgtggttctatttgtctagattttattttaatgcaagatattgtatacaattcagcgtgaaattaaaatagtcaatgttttcaagattcatttttgtttcgagcatgcgtatttgcaaccttcctgatgttttgtgataattttaccttctctgtataccgtaggcacaagaaatggtagaaatataaaaaataacgtaatcagtaatgtgattcatatcgaaatatgcacatcaaagtatgacaagcattaatcaaacatgtcatggaaccaatagatgataatgccaatgatcaatagcaattgaaggtgaacgataacatatagttcttccattatatctttgcacatgcatgcaattattcacgaattactttttaaattaggtctctttattactcacagaaaccagtatcgcaaaattaaacagcttgttcatagaaacctcagtaatttaaacaaggataaacaatacgtcatgtctttgacgttataattatacgttatatgacattgtgttaaataggtataatataacaaagttaaatataaacgtacagtacaatataactttataaaatacatccaccggtaactga

SEQ ID NO: 8672 - DNA, 995 bp, Diabrotica virgifera
  SmartBlast Evalue=2E-54; Info="Alcohol dehydrogenase, putative n=1 Tax=Pediculus humanus corporis RepID=E0VGI8_PEDHC"
catgtaaaatatttattaaagtatagtgttaagttacaaattatgtacaaaaaattatttaattttataaaaaactaaaaaactaaaaattgacttttcatttttttttttcaagaatgtctttcgaagatttattgttatggtgtatttttatttttgtttcagattttctcagttacatttttgattgttaactcctggacctgaacatgtggaggagtcgataaggcataatggattgcatccgccacatcttccgcctttagtagttcttctcccactgaagctgcgacctgctcgtgatctacggggatattactgcgcatgaaaaattcactttctgttgctccaggactaatactagttactttaattctggacttcatgtagttcaattcaaactttaacgaatcggttaaagctgtaacggcgaactttgtggatggatatatattgagtggtaccatatcgggtactttgtgtcccagaacgctattaatgtggataatgtgaccctcgatgttattttcaagcatactttgaacagcttctcttgttgctattaagagacctaatatattaatatccagcacttctttccacaattcagtctttccataacaaagcgtagaattattacaaacgccagcattattaataacaatgtgaacgggtcccaaagtttgtttgatttctttaaaggctgctaatatttcctcttctttcgtcagatcggtttggataccatgaaaactgcctttgagacctttaaatttttctgtaagttcatctaggcgatcctttcgtcgagccaagccaaccaccttaatcccttctttaaccaatagttcacatgttgccgctcctattccagcactggcaccggtaactacagctactttcccaacccagcgatcaagagacagcaccattttcaaacgaaggactaaaataactaacctaccgtttaattccggtcgcgatctttattgcag

SEQ ID NO: 8673 - DNA, 1004 bp, Diabrotica virgifera
  SmartBlast Evalue=2E-46; Info=Chymotrypsin-like proteinase 6A n= 1 Tax=Tribolium castaneum RepID=D0R8R1_TRICA
agcaaacaatgagaacaatttagtaatcaatattaattttagtcaaacttaagattttttgatatggaattaaaaagataacttacgaagtggttacagaggatgttgttttattacattttaatttgattaataatctgttaagctttatttggttaggaagaagcatgatcaccatgagaaattccatctttcttttcttacttattgttgtttatagtattgaaggctcaccactttcatcttatggaatatttgggggccaggatgcagtggaaggacagtttccataccaagtatctcttcagatagacgcctggccttttggctaccagcactactgtggagcttctatcatttctccaaactggattgttactgcagggcattgctgctatactgtgtatcctagccttcatgtagtcgccgggatattgaaggtgcatgaccaaaacgagtacacgcaagttagattagttaaggagcgttacatacatgaaaattatacttatggtgtgcaaccgaacgatatctgcgtaattaaggtaaacgaatcctgggtttttaatgaccacgttaaaccaatagctcttcccatccaggattttaatggcacaggaaaagtaatctcgtctggttggggacaatcggcaggaaatttattcccgcagtttcccgatgtattgcaatggcaagaatcagaaatgcccgatgaagaaacttgtttggagttatgtacaaaggccgaaaaactcaacccatacaacaccacatctaacgtatgtacggcaaatcctgagaaaaaccatggtacttgcgacggagactctggtggtcctttagttctagatcaacaattggttggattagcctcttgggtatttttaccatgtggcagagaaaatgctccgtcaatatttaccagggtcagtcatttcgttgactggatcaagaaacacgataacgagttgtagcaacaatttttaaataaatgttaaaatctc

SEQ ID NO: 8674 - DNA, 1002 bp, Diabrotica virgifera
  SmartBlast Evalue=3E-46; Info=Caspase n=1 Tax=Culex quinquefasciatus RepID=B0WLP4_CULQU
atagagcacatttcctttttgttattatatttagggtaattaggctcaaatgagctaaatccaatggctacttctctattgaccctcgtcaaaatagaaagagatcttcggattggtgatgttttctcaattgattgaccagagcttgtatgaagtaactgcctgtagctgggtccctccaagcataatattcttctaccgtagcatacataactattatgtcggccattatgggtatagtgtacgttttgctacttgttggtctagaatccttttctacgtatgtgaccacttgccctggatcagattcgcttcctctgcaagcctgaatgaaaaacatctttggtttcccagccaaactaggacatcgtataggtgtaaagtaactccacaatttttttgtaggataagcttggtctctggcatagattataccttcatctccatgtgacattactgcgattataaggcattcgcattcagtgtgattcattttggaaactacactaagtacttctaatattttttctaaggttaaatcatcatataccaggacatcaaaagttaattcctgaagtacattttgtagagcatctctatctaaatcagtaccgtctcttgtagagacatgatctattgtaaaagtcctatgattaaaaattatagctgttccttttactttacgtttatcgtaaacttctgcttctggaggtggagccacaggaagatctactggtagcgaggtctttttggtaaatatatcgcgcatacgaccatccacatttggtccagaagcaccatccgaatcgctgtgacactccatcgggatctgcgctttctgtttatccgattacaaatgaaaccccaaatatcactaccatatggaacactattaataaatatcaatattgttatgttatctgcaaggtaaataattatttatattgaatatatgaatccaatattaaatattagatattagaaactcggtgtctatcaacg

SEQ ID NO: 8675 - DNA, 1003 bp, Diabrotica virgifera
  SmartBlast Evalue=1E-38; Info="Zinc finger protein, putative n= 1 Tax=Pediculus humanus corporis RepID=E0W0X4_PEDHC"
gtgaaaaggttgtgacgagggtgtgtagagcgcggtataaaatagttaaaatagagataaaatttgtagttttttcccgcaagtgtgtgcaaatcattttctagataggaggaacactttaaaacagaaccgaccatgtcgtcggaacaattttccctatgttgggacaacttccacaagaatatgagttctggcatgaactcattgttggagaatgaagacttggtggacgtgacgcttgccgtgcagggaaaatgtctgaaagcccacaaaatggttctttctgtgtgtagtccctatttcaaagaactttttaaatcaaatccttgtaaacaccccatagtatttatgaaagacgttagttacgaagctttaagtgatctattgcaatttatgtatcaaggggaggttcaagtgagccaagaaaatttaaccacgttcattaagactgccgaggccttacaaattaaggggctcactggagacggaaatggctcaactgacagtgacgttgtggaagtacctgcagaaaaacgtactccacacgtggaggattacaagccagtttctgtacctagaccaaagaaacaacaacctcctcccgccccaatgtcatccccttctgtgaagagacaaagactgagtgcttcaactagtgatacccaacccttaccccctcctgttacaaaagtggaacccattgcccctcctcaacctgttcctatttcaacacccgaatcttcacctctacattttaagacagaaccctatgaacagtcagtcagccttctagatgagacaggtgatgacacttttaacgaagatacactggatgagactgtaggcgatgacaatgaagattactctatgatggaaagtggtagtggagaagaaccacaggcaggaactagtactgatggagcaggcgaaggacaaggatgtaatacatttcaatatggctaccaaaaatccaaaaataattctggaccatcacgactatatt

SEQ ID NO: 8676 - DNA, 1003 bp, Diabrotica virgifera
  SmartBlast Evalue=2E-99; Info=Putative peroxiredoxin n=1 Tax= Lutzomyia longipalpis RepID=A8CWH8_LUTLO
gtcgactgcaccggttggttggaaattgaagtgttttcaaaaaatagtgaacgtgttttatcatataatttgcataatatatgttttaattagtataagctccaactatgacttcattcaagttgattatctttagtattagtactgtcttagctataactaatgtagttgctgatgaatcttgccagacttttgcaggaggaagtgtttatccagcatctgaaaaacaggctgttcacaatttacaatactcaaaagcagttatctcaaaacctgctccatattgggaagctacagcagttaaaaatggagaaattgttcaactgaaatctactgatttcttggggaaatacttggtgttcttcttctatcctcttgactttacattcgtctgcccaactgaaatattagccttcagtgatagaataaaagaatttagaaagatcaacacagaaattgtagcttgttcagtggactcacattttacgcatctggcatggataaacaccccaaggaaggaaggtggattaggaaatgtcaatttcccaattctttcagacttaaatcataacatagcaaaggattatggagtatacttggatgatttggggcatacgcttaggggtttattcatcattgataccaagggagtggttcgtcaaatcacaatgaatgatctaccagtaggaagaagtgtagatgagacgattaggctggttcaagctttccaatttacggatcaaaatggtgaagtatgtccagctggatggaaaccaggacaagatacaatcatccccaatccagttgagaaaaagaaatacttcgaaaaacactgaagagtgaatccaaattcatgattttatcactgtaaacttaaataactagactgactgaaattttcttagaaccatcatctgacatcacatctttaccctgtgttactgactgttaatttttgttttatgattcatatagatattattggtatgttcattccatcaca

SEQ ID NO: 8677 - DNA, 1003 bp, Diabrotica virgifera
  SmartBlast Evalue=7E-57; Info=Thyroid receptor-interacting protein 11 n=1 Tax=Harpegnathos saltator RepID=E2CA83_9HYME
gcacctttaacaaaaaatacttctttccccttcagctgttatctttaagcacgtctttgagaatagagctagaatttctattttgagcaaaatcggagaatgtgggcagcactatctcactgagcacgatgggcgtttgcttgggagtgggggctctgctattggtcgtttttgttgaagaattggatggtgtaggtgtgttagtatcgagcaaactaggcactacccgaggcttcgattcgttttctaaaaactgtataaaagctctcgacaaagactcttccgtcattttgttttgatctggatttggcgccaacagagacgaaagccacccttgttgcggtttgtttagcttgattttgtcgtgctcttgttggttgaagtctaatactgtggcgatgatcttcagaatttgagtttggtctctgtttaggttattgtttgtggtgacaaagcccagaatgaggttctttatcagtagcttgtctactttaccgtctgtgctactcaaggcgttactgagctcttcttctgttttcgaaagctttgtttgaagttgtgatacttcatctttcagacctacgacggtctttttcgaagactccagctgatcagatagtcttgaagctgctaataagccttgatttcgttcctccagctgcgcctgcagattggttatttctttcctaaggtcttcttggacttgtttttcggtgttgatatgacgtcgaattcggtcggtctccctaataacatcttgttctttatctccaaactgttcaagcacgaactgtagattcgccagtgctgctgcttgttttgtattctcatcttcagcatcggaaatttgctttctcaaagaatctctttcggctatcgctgtgtgcaactgactctgaagcgactctacttgttggttggctctaatactaacagatgtatacatggtactggaactcttctccctctcttcgatatctgctaccttcgccttcaatgatgc

SEQ ID NO: 8678 - DNA, 995 bp, Diabrotica virgifera
ttccaaaatgaatcgttttaaagttataaacaatgaaagaaaaaatcgatggttttcgaaatttttgaatattttggttttttattgatgttccgggcatatttgagaaggagcatgggtcaattatagttactgaagttgtcacctgattttatctgtaaaaatccgaatgccacctctcacatccacctcaagacagatccgccctggtctatatcagttcttgctatttgcactacatcgttcgctaacgccagaacctggcttctgttgtcatcgatcatacctttcgttcgtattccactctctcttaatattgtcttcaacaagaaattgaagagtactgtggacagcggatctccctgcgttaatccccttttaacttcaaatttcatgttgggcttccttctatccttactctattatcggtcttcattagggtcatttttactagtctcattattatttatatttaattttgaactgaaattttcaagtgaaatatcttaagataatgtttaatatatttcttctgttggtaacagtgaaagtggtatccgaaaattgcatggaaatagctgatgtaaacagatagctaggcaagggcgattttatgcaaaaaggatttaatagcataagacttgtatggcctagatgtagagctacttttagactgctcacgagaatttgtaactccatagaaattcgtaatatgaaaattgagagatggcatttatttctgtgatttaattttgatcgttagcaccaaagttttgggaaggaaatcaaaagggctagttttgtacaaacaataattttaatatactttattatgaatttctaatttgtatttcgtcgtacttatttgggtgttgtgtttttaattttcgagataattttgttcggaacaaaacttttttatattcggtttttacaaataaataaggattgtgatacgaaatagtcaatgtcgttatttttaaccgtataaattt

SEQ ID NO: 8679 - DNA, 1001 bp, Diabrotica virgifera
  SmartBlast Evalue=6E-46; Info=Transmembrane protein 192 n=1 Tax= Harpegnathos saltator RepID=E2BA31_9HYME
cgctttcataacagcaattgtccttaaagatggtcagcttgtcacgaagttttaatacaaattctggaggtgcaacatttttttagcgaatctgtaaatatggatgacagacaacatcttcagcctatattggactcttatgggggtttcaaaccactgaaaactgtttccttgtttagtgttcacttgttagttatatttatcttggatctactagctattggttatgctgtaaagcatcctgatgaaaaaagcagatgccgggaatactttgttgttatttacttacatataggactgtggttcgcaacgcttattgttgatcaagttgccaaatgtcagcatcatggtttaagattgaatggttatttagatttttaccatcaaacgagacttcatattagtttacccttttatatagtaagtttatggagtgttgctctaatgtttgtacaagcattgatgcaacatttttacccagacgattttgcagagaggtgcgttaaaggaggaagtctgtcacctatgtcttatttatgtgccattattacactggagacttgcctcatatttggtgttaacgttaactatattgcgaaagtgattaaattcaacaaacataaacctctgcccgatgttcaaaaagaagactggattagtacgactgcacctgacactgtgacccaaaatgaagtaggttatagccagttgggaggcaaaatttatgacttattggagaaacaggccgatttaatccgattcctcaaggaacacaatgaactattagcgaaaaaaacaatggttttgacagctcaattacaacaattacgggctcatagagagagttaaaattttttgtaaaatttgtgatacaagtacgttcgagaatatatataatatatgtatatagggtatgctaaatttttatattaattcatatcaaaaaatttgtagattcgtgtttctttatataaactgaaataaactttaaaatcggaggc

SEQ ID NO: 8680 - DNA, 1000 bp, Diabrotica virgifera
  SmartBlast Evalue=1E-34; Info="Ser/Thr-rich protein T10 in DGCR region, putative n=1 Tax=Pediculus humanus corporis RepID= E0VH46_PEDHC"
tggggaacgaacgctaatgtacccaaaaagctcgattagtgaatagtgaaacgttagaaagcggagaagtgatacataaaaatgtgtattttgtttataaatgtggacccgaatcctgaaaagggtggttttaggttagtagtggccacaaatagagatgaatattataaaaggccagcaatgtcagctcttatcgataaaaatggaattatcggaggtaaagatatggaaccaggtcgagaaggtgggacttggctgtctttacgaacgaaagatcaggataacggaaaagccaaaattacttatttgggtgtgcttttaaatataactggagcgaaagttgataatgccagcggtcggggtaccataattacagattatttgatgaccaagaaaaacttccttgaatacaccgaattgttagatcaaactttatataatggctacaactttgttacggttgaattaagcaaagaagacgagactatttaccaccacagtaattttcccagagttaactcaagttacatcggcaagcagactctaggatttggcaattctccaatattcacccctttaactaaagttacgaaaggaagacaaatgttcgaagatattttacaaaagaacctaccagtagatgagctagaaaaagagttactaaaattgctgaaaaacgaaacaaggcatctaccagacgatgaattggaaagaagacaacctttagccttcgaagaattgagttctatctttattcggctagaagctgcaggttatggaacaagaacccacactataatactagtagattatgactggaatctgtcgtttatagaatacactatggaagaacccatagatctccataaccttaagtggaaggaaacaaggcttaatttaaaactgtgatatcataataaatgtgttctgtcaattgctattattatctgttttctattgttaataaaatatgttttttatatttaaggaatagattatg

SEQ ID NO: 8681 - DNA, 1001 bp, Diabrotica virgifera
agggtgagctggcagctgaagactaaggcgaggaagatggtaatggacggtggtcgataatttgtcaaaagatcaacttcgctcacaggccgaggttgttcgttctaacaagaataacacagaagaagagcgactggggagcaaagatggtccatttgaggaaatagattttgaaagtgttggggatgaagaatatttaaaagttgatttgacaaaagtcatttgagttcgtggcgatattgaagcaacaagcaaacattttccacaacctacttgggttgtggaaggtgtaactcaaaggtgggctgataacaccatagtgaccgtcgcatcaacctgatatgggatttcacctgtcaattaagtaaaacgctattcccaggtcgataaaaagaacgtacacatagacaaacctcaatttattgcgaaatataattctgcaatgggaggcactgatcttatgaaccaaaacatatccagatatcgtataggaatccgtaaaaaaaacggtgatggtgctttttacttggctaattgactgttcagcgcaaagcagttggaatttaaaaagaaaaaaggcttactatgacgcagctttagctcaagcgagatattatgaaaacatttgtcatgggtacagaatccggcaaaccaagggggtcgccagaatttccggtgacgtgcgttttgacaatataggacatttcttaacaaacacccctgatagaaaaaaaagagatgtgcagctgaaaactgcaaatccatcatgtgcaaaatgtgtactaaatggaaagttggagtatgtataagtagcaacgttcattttcacacacgattttaatttaatattcacttttttaactaattaaaaacaattcatgttttctagcatgtgcttatttttgatcctacaggagactagcgttgccatatggcaacatgctattttgagaaaaatagataacaaacataattataatcaagtatattcaaatgggaaa

SEQ ID NO: 8682 - DNA, 1001 bp, Diabrotica virgifera
  SmartBlast Evalue=2E-26; Info=Dual specificity protein phosphatase 12 n=1 Tax=Camponotus floridanus RepID=E2AJC7_9HYME
gtacatacagaactgacagaactaatacaaaccaaacgtccaagaatattcctttttgctctattgatttgattcagttcaaaatttcgttggccgagtataatttctaaaaagggaataaaaaaatctgtggaatgaaaataaaccttcagacttcagattatttatagaaaaaatggggtggcgggaggaggaatgtagaaaataggaagctattaaaagtaatagatggtaatatagcactagtaaatttagattttggcagagtatcctttaaactgcaaaattagtgcaaataccagctcccatcctaaaatgtcagtgctgtcaagaatatccaatatttattccaagtctggttcaaggcagtatccagatgaattggatatgatagaaactaatctctacctcagtggtgaggcagaagccagaaatgttgaaactcttaaaaaatacaaaattactcacatactcactatcaatgatttccctttaactggtactgtaaaaagtgccctaggatatcttcaaataaagtacattaggcttccagacttaagctcttcagacttattgtcttatttcgacgaaacctatgaatttattagagagggtgttgccaaaggagccgtacttgtgcactgtcaaatgggtgtatccagaagtgcctcagttgttatagcctatattatgaagaaatataatttaacctacagggaagctttggataaagtaaaaatgaaaagatgcgtatttcctaacccaggatttgtatcccaattgcaaagctacagagatatgggatacaccactattagaagatatgatcccagactggcacgatacatgatgagataaactgatcgtcattattacaattctctttgtatcatgattcacatatcacttaaaaatattcacaattaatggtaataattaatatacagggtaggtacaaacataaaaataagtaagatcaaataattgtgatattgttgtct

SEQ ID NO: 8683 - DNA, 997 bp, Diabrotica virgifera
cacaccatcttttttttcatagtccattttttttcattttttaactaattttcttttatttttatgtacaaagtatctatgataaggaaattaccttcatctgtattattgtggtaataaataaggctatatctacaaaatgcccttgaacatctttattcgaatcaaccatcaactcctcgttggtcaaaagtcgcctcccaacatcttatatactaactctggcctaagacgggctatgatctcaatgtgctcttatttcaagattgatacgtcccattctattttatcgaaactgaagacctttataggttaaatctgtacagtgagggttctaagtgtattccttgtagcactccgtatttttgttaattgttctacctttctgattgtttaaggacaggatttgaatatattatggtttttgtatcgactggaagtctattttgattgaacttttagggtatttaaaaaaggcagaaatgagattataatgaaagattccttaaaagtggttttattattctagtgtgttacgcttttacttaggaataaatgatccttcctacatatttaatatattgtttgataagataatgtcattataatgctctacgagtatttttaataaactttgatttttgtatacgttgaaaataaattcgaatccctggttagaaggtatccattaattacgcgatacatttttgactactggtcctccacgatgcgattaataatgacgcctgttggcgttatggtatagagttgtgtaaagaatagtataataggtctccacgactttactgagtcataggaactcctttctttgtagacattttcaatgacattttgcataaatgttactgacttgctttgattccctctatcaaagtgtagaggattgtgaattgattgcataactcatagactttccaaaaatctgactagcactaaggcccggcgcaaattgaacctaagcgagacacaacctgcg

SEQ ID NO: 8684 - DNA, 1000 bp, Diabrotica virgifera
  SmartBlast Evalue=9E-78; Info=Exportin-5 n=1 Tax=Camponotus floridanus RepID=E2AU91_9HYME
tgagactcaaagtttaattcatgacagttataaaggatgtttagcaatgcaagagactgaacgaatgaacctcctcggattgatgggccacactataggaactgaagcagcggaatcacaagtggtgcaaagcccattagagaggatgcagcggttccttactgcattacacgaagcctgctatcacatgatgggctctctagggccctctttaggaagagatctgtataatataccggatcttggcctggcgatcgtcaacagtgttttgtcatttatacaatatattccagattatcgaattaggccgataattagggtgtatttgaggcagtttattttctcttgccccgcaccattttacgaagtcgtcgttctacctatcatgacacatctttctcccataattttgtcgaggttacatacaaaatggcagcaagttatcgagttccgcaaccgcgaagcccaagaggacaaccaagacacccaggaagtactagaggacattctgacccgcgccataactagagaatacttagatcttttgaaagtcgctctggtaggcggcagtgtcactccggagtctaattcggaaacgatggagactgaggagcacagtatggattcccctacaccacctcatactagaactaatatgacaaatgaagttatttctgatttagggttaatgttgctgcgcagcgagaaaacgtgccattcgattgtgctggctgttctcggtgctttggcgtggatcgacagtcaggcttcattcaaggctactcttttaacaggtccaatagttagacagctagcctcggataagtccctcaacggcgaagtggcggctcacataatggcagcggtcctaaacgctctcacactgcacggacaacacgaatccaatcaaggttctctattgactttgggcgctcagatatacgaattactgcgaccatctttccttgaagttctcacggtgatgcagcagatacccggc

SEQ ID NO: 8685 - DNA, 1000 bp, Diabrotica virgifera
  SmartBlast Evalue=9E-93; Info="N-terminal acetyltransferase A complex subunit NAT1, putative n=1 Tax=Ixodes scapularis RepID= B7P5N6_IXOSC"
aggtctgacaaaagtatgatgaggccatcaagtgctatcgaatgcctcaagtggaaaagataatattcaaattcttagggatctgtctttgctgcaaatacagatgcgggatttggaaggttatagagataccagatatcaattacttatgcttcgaccaacacaaagagcttcctggatcggttatgcaatgtcttccatttattagaagaatacaaaaatgcacttaatattttagacacatttttggaacaacagaaagcaaacagttttgactatgaacacagtgaacttctcttataccagaacctcgtcatccaagaatccggtgatttgaaagaagccctcaaacacctcgaagcctcacaaaaccaaatagtcgacaaattaaccttaaaggaaaagctaggcgaactgtgtcttttattaaaacaatttgataaagcgacaacctgttacgaagaactcatccaaagaaatcccgaaaacacaaattattataataaattaatagacgctaaacaattgtccaatcctcaagatatcgtagatttttatactaaatatttggaaaagtttcctagagcaatgccgcctagaagactgcctttgaattatgccacaggagaacagttcaaaactctagtggacaagtatatgaggaaggctctgtctaagggagttcctcctctcttcgtggacctgaggagcctgtattcagacaaacataaagtagaaattattcaaaatttgttattacaatatgtggaagcactaaaaactgtgggaaaatacagtgaattagaagttaataacggacccaaagaaccggctagtgctcttttgtgggtttactattatttggcacaacattttgactttttaaaacagactgaaaaggcattaagttatatcgatgctgctattgaacacactcccaccttaattgaactttttgttgtcaagggtagatatataagcatgccggtgatcctcaaga

SEQ ID NO: 8686 - DNA, 1000 bp, Diabrotica virgifera
  SmartBlast Evalue=2E-31; Info=Diapause-associated transcript-2 n=1 Tax=Leptinotarsa decemlineata RepID=Q8IT92_LEPDE
ataaaaagatgagtataaaatttatttaacaaaaagtaacattcataaattaagcgacttcgtttttgacaggattgtggcaaattttttcagtttcggtttcaacggctttgtggaatttggcgaaagagctaagggtgactgggctcttgcagtactgtccgtggaagtcagaggaacatttcttgagtttgggcaaaactgtgcaaatattttcagttgtgggaacgggttttttgttatcccaactgtcaacttcagtggcgacggctttgcaggaatctactttttcaatgcttccgaaagctttccattggcatggattaaataattctaatacttcttctactgtagaagcacaagcttgtttcaaaacagcaagaacaattccctcagctaaggcgggaagttctttggattcttctggcaaacaaccgctaactaattcaatgactggcttggcgcatttttcaattgtacgttgggcagtagcgcacacggtacttgatccaatggtaatatcttcaatgcagttggcgaggtcctcgatggtagcattcattttcttttcaatatctgcgcatttgtccttgtgtctgtcgaattcacgagtaaggtcttttattacttgataatcggattctttaagatacttttgcagtgctttcgataccactctacgttcgccaatgtatggtttgaccaattcaccgatttgaatatctgcttcctcgatcactcctttagttcttccaccatcgtttggagcgcaaactacacagcttgcagcaagaacaaataaaccgaagttaactagaaatttgttcattttgtcagtctatctttttcaaataccaattacacaaatatgagttgtaaatttactcattatatagttcctgctatctaaatttcgtgaatctgtctcaaaaaatggttaattttttgacaaaatatctttgacatagataaaatgtttaagacgaagtgcataagtttt

SEQ ID NO: 8687 - DNA, 1001 bp, Diabrotica virgifera
  SmartBlast Evalue=5E-90; Info=32.2 kDa salivary protein n=1 Tax= Lutzomyia longipalpis RepID=Q5WPS7_LUTLO
aatattaaatgtcttttatttacaacaatatattattgaactattcttttaaatagggtaaaatattttcttcgaaccaagcccatttgaatctcaaatgttcaccttcgacttggagtaaatgcagcttgttagatgagtataatgctcctagccccaagcgatcttctgtatacagaggcgattctaacaaaggcaaaatttcttcggcttgtccaggtttgtaaaatccgaaccactcactttccacaggctcgaccatggtatcatttaaaaattttaccagcaccaaattttccaaggacttgattctctcactgtattccgcgttgatggttttttcgttgtttatatcagccaagaaagtactcttttctttgtaaagatcttcgtccagtgggtcgtgccagtaggtagcttggaccaaatctttttgtacaatgtccgtgtatgcagctccatttaacatctgtcttagataatcgcataaaacttctgatataatagcacatctaggaaggccataaacaccttgatgttgaccccccaaggaaattaaattgagtacttttacttttggacatctttgtaccaaagccctcagaaattgacctccttgtgaaaacccaatggcattgaaaccattcgccagttcaggatctgaaccaagcttctcgcatacttcatcaatttgttcgtcaggatgtctaaaaaatccattcattacatcttcaaccatattgtttccaatctcgattgagtgaatgtacgtacccccaagagaattattaagtttttcggaaaacgctcccaaactaaaggagaaacaacaactgtcacccatgccatgccacaaaactattggaggcgcttttgaactaacatcacaagttagataaaggatacttaacaaaacaaggagactggtggtcatcttggatatttgttcgatattgaagtattatcattaataattttatatcatatcatgtctcttgaat

SEQ ID NO: 8688 - DNA, 1001 bp, Diabrotica virgifera
  SmartBlast Evalue=1E-128; Info=Protein MON2-like protein n=1 Tax=Camponotus floridanus RepID=E2AXI0_9HYME
aattatatcagaggaagtagatattatgtacggcgtttctccataaacaggaatgctcacagcgtttaggagaactgttcctaattgccttaggtcgtccaaagtgaacgtattcctaacatgttgaaacacataaggaaatatttgaactaaggatgtgagaaaggtttgacttggaatgtaaaaatcttcgtgggattcgttgtcaattaagggcacagttatttcagtaccaattttcacccagactttccaggccaccacccaaatatctttatcatctattaaagtcttattgtctgtactttggtttttactttgaaagagaatttcttggaaagatttgagagctgctatggatacttcattatttttacttaaagctgcattttctatgaattctaataaaacagaccacgctctaggaaaatcgcctaaaacttgtaagagttgtctctttgtgttgaatactctagcaactcccgataaggtgaggacctgggtctcggcccactgtttctgagcagtatttctggtatgatggatcaggatattgccgcctgcatctaccttctcgctacttgcggagtttgacagacttctaactttgtccagcaatggaaacagaacttgccaaaggagaatttgccatgttgatgattttaataagctaccatgagcagatattgtggaaaataaggtttgactagctgattttctgacagcaggcctggtgtccacacataggtctcctaagctggaatacagacacatccagagcttgtcaaaactaggcatattaacggtgccaggaaaatcaggaaggactgtgctctcttccagtgaagcctggctcaattttccttggttttggtgaaagtagtctgatatattccacattaaaccaactgctgttaaagatatgttcaattcttgtgtttgagaaccaaatttggcaacagtgtctacacatagaggcagacatctccagggcattacag

SEQ ID NO: 8689 - DNA, 997 bp, Diabrotica virgifera
  SmartBlast Evalue=1E-68; Info=Glyoxylate reductase/hydroxypyruvate reductase n=1 Tax=Harpegnathos saltator RepID=E2BAZ5_9HYME
tgacatcgattgcctggtttcgattgtagcactgcccagatgtggcatcagaacgacatttggcaatgttaataattcatggtttgatggtagtggttcaggagtcataacatctaggccagcagcaaaaatagttgtctcttaagtgcatttattaatgctggttggtcaactacttctcctctactaacattaatgaatactgcggtcttcttcattttttgaaaagaattcttcattgcacatatggtgtgtttctgtcgttaaaggtactaccattataacgaagtcactgtcttctaaaagtgtattcagtgatacaaatttagctcctaattcgattccttctttcttttctttgtggcctgtatacaacaactgttgaatatcaaaaccctttagccttcttgcaatagtttgtcctatgtgaccaagtccaatgatgccaactgtcgaattagttatatcttgaccacacatccatgcccaatcatttgtgacccagttaccgttttctatacttaatctagcttcatgaagacgtctagatgctgccaaagttaagagtatagcaatatcggctactgcatcattaagtactttcggtgtgtttcccatacggattcctcgtttcctaagttcttctacgtccacatgattataaccagctgacataagtccaattgtctttaattgtggtcctgctgcgtctaatacttctgaatccagtttaataccagatgcccaaaatagagcatccattcctcgaacattttttaaaatgttttctctactttcggtttgcagctgtgtgacgttgcatccattgtcgtttagtagagttattccagaatctggcactgtaggattggtaactaacactttaaaattgttcattttactttgtcgagcttttcccagaacagacgaaaagctaataacgaaaaatagtagtaaaccactgaattaaatgcgtgatctgttaatgtatttgcaa

SEQ ID NO: 8690 - DNA, 999 bp, Diabrotica virgifera
cctttgctgacaggagccgtttaaacctgctctgaacgtcaaactttgacggaaactaacggaaatattgtttttccagacatgtttccaggtccgagttaaaactcacttgtcggtgcctaattgccacacctcatatgataattattcctatttttcgttgaccttatagtcactaatatgtccttcaaaaactccaattaataagcctactcagaatatcaacatctttcagtaaaatcttttaaaaatttattgtagtcaagtgcagctacttgtattagttaggtgttatgtactagagctagttatgtctaaactcttgataaatatgttcttcaaacactccaaacaataagcctacttagaatcgtcaatatatttctgtaatttctttaaaaaatctatcatagtcaggtgcagttaccttgtactagtttcattttgtgtaaacacttaataaatcatttttaaaaccttataatatctcgtgtaatttctatatatgtggtgtcctcgcttatatcaaattacttttcactttctattaaaaataaattgaaccattgtagaaaaattcaaataaattggtctttcctgatagaactagccgatacaggacatattaaatatcgatacatttttggcaaagtgacgtaagtgacatttttggcgaaaatcatgtttttccattaaactaacactacatatcattgtttagaatgtaatgccagagtgtagtaagcctagaattactttaaacataatatatgtataggcttactacactttggtgccttctgaacaataatagcgttagtttaatggaaaacatgatttcttaaatgacacttacgttactttgccacaaatgtatcgatatgtcctatgtttacaaatgttcttatcagatggcagctaaaacttggtttattaatgtttacaattagtaaaatcttccagactaccagtcacaataaataagtatttttgttaaga

SEQ ID NO: 8691 - DNA, 1001 bp, Diabrotica virgifera
  SmartBlast Evalue=3E-96; Info=Derlin-1 n=1 Tax=Camponotus floridanus RepID=E2A1L2_9HYME
ataaagagccacgacacttttagattttgtgaaaatcattcttaaacttaaaacttgttaaaaccatgtcaacataattataatactaaagttctagaaagttatttatgttttaaatttcctacaagtgtactgacaaaaaataaaaaatgtcagatttgggtgaatggtttaggagtgttcccatttttacaagatactggtttgctggttcaatattattcacacttttagggcgattcggtttcataaatccatacaatttaattctgttatatgaacctttaaaaagctttcagttatggaggcttgttacaagcgttttatattatccaattcaacaggctggttttcactatctcatcaatttatattttttgtataattattccagacgtttggaagaaggtcagtatgcaagcaaaccagcagactatctctttttgttgattttcaactggacatgttgtgttgtacttggattagtagctgaattacctatcctgatggaccctatgattctttctgttctatacatctggtgccagttaaataaagaaacaattgtgtcattttggtttggaacccgttttaaagcaatctaccttccttgggtattgctagcattcaacttggtcctaagtggaggaggaattatggaactctttggtatattagtaggacatttgtactatttcctaatgtacaaataccctcaagaaatgggtggtcctgtacttatccaaacaccttcatttttaaaatctcttttcccagatcaaataggaggcgtccatggatttggagtagcaccagaacgacctgccacaagagacaatcctagaccagggggaggaatttttgggggtcataattggggtagaggatatactttaggaggaaattagtcatagttctgctgtataagacaatgtgtgaatataattaaagttaactgctccttatttgttaatttatataaataaatatatataagtact

SEQ ID NO: 8692 - DNA, 995 bp, Diabrotica virgifera
  SmartBlast Evalue=4E-53; Info=Cytochrome P450 345A1 n=1 Tax= Tribolium castaneum RepID=D7EJT0_TRICA
ggctagagagagttatattggtaagccacaaaacctagttgatatagcaaacaaatctttaagggataatccaaatggtggatatacatcagatgttgaagtgtttgtgtccaatgccctactgttcttaatagccggacaggatactacaagtacaacagtaaaatttagtttatacgaacttgctatgaaccagaaaatacaaaataaattaagaaatgaggttagggctaacgttcaaaaatatggatcgcttacatttgaaggagtacaagaaaataaatatttaggaatgtgtattgatgaaacattgcgaaaatatcccgcgttgccatttattgaccgaacggctagaactgatttccaatttgaagatacagatctgatagtggagaagaatatgtcagtactcattccctccttttctctacagagagatgaaaacttgttcagtaatcctgaactgtttgaccctgaacgattttcagatgacagcattaattcagatggactcagttttataccatttggagaaggaccaaaatattgtataggtaaacgactcggaattttgatagtgtctatggttttatcacatatagttttaaatttcaaactagaaaaatgtactaaaactccagagaagatcgaatttgaaccaagaagttttgtgctctcctctaaagttggtcttccaataatgataacacctataaaggatgagatgttagcctagatttttttggttactaattcatccgaataaactccaaatgtagaagaggaaattgtagatatttttgaagagttaaaacacacgggaaataaattggagtagccttttactaaatcacttttgttgaatattttattatacttattacgatttagatcttgatttttattcagagaaataaagttatattgatgctagttatttttttaggttgttatcctctgtggcaatattttgtttaaataaaacttcaacagta

SEQ ID NO: 8693 - DNA, 997 bp, Diabrotica virgifera
aaatttgtctaaagtctgttcagtttcagctgctataatttgcgttgctgataccgctgactctgtatctattttggcttctgcttgttttcctaacaattcaattttttgatattctccttctttttcttgtacttgatgaactgtttcaactagacctttatacggtatagtttctacatttgcaattgacgaatcatctgatacagttactagcttcttaaacgtatcttccgtatatgtttctgattgttcaggaactgtcattaaattatattcaagatttgctatttggcctgatttggcagcaaaattctctaaaatgtcctcgctatcttgaggaataatttcagttacagtcaaaccttgtgatttttcttctaaaccaatagtagcttcacttgtaaatggcttaaattctcctgtaaattccgtttctttttcttgagaaaggttttcgctaaccacaagagaattcaaaacttcttctttttctttggcaactaattcctctaatactggagttttgtgcaaaccagtactttccacaacatcacttaagttttgctcaacgactttatgtacaacgtcaatatatggttgtgcctgtttcaattctggtaaactgaattggctaagtacatcttcttttagacctactatttcttcccttgtagaaattgattcttttgtctcgaagtctactgaagccaaagcttcaagtgcttttttaggtaatacaagttcctcttcgttatcaaccgttatctgttcttgtactgttacgtaatccagaggaattgaaagttcggcagctttaccatgttgcgataactctgtaacaagatcatctaatgcttcttgagcaagaggttgtgattgagatactatgctcttcgcgtcagtaatattcgcagctgcaaatttctcatttagatctagtttggacaattctgtttcattttcatgaactgtcactgtttctacgcccaacaca

SEQ ID NO: 8694 - DNA, 1000 bp, Diabrotica virgifera
  SmartBlast Evalue=1E-51; Info=Transcription factor BTF3-like protein 4 n=2 Tax=Formicidae RepID=E2ATF6_9HYME
caccggtcaaaaacggggcacatgtgctttgttaacaatttttagataaaactaactatcgaataattaaaagaacagtaaacttaaaccggtagaagttcttcaaaataacaaaaatgaacagcgaaaagttaaaaaagatgcaatcacaagtccgtatcggaggaaagggcaccccaaggcgtaagaagaaggttgtacactctacacaagcaactgatgacaagaagttacaatcgtcccttaaaaaattatcagtaaacactattccaggcatcgaggaagtaaatatgatcaaagaagatggcacggtaattcactttaataatcctaagactcaggcatcattagcggcaaatactttcgctatcactggacatggagagaacaaacagatcactgatatgttaccgggtatattaagccagttgggacctgaaggtatcacccagctcaagagactagcaaacacagttgccaatgcaggtggcgttggaaagattgttcctgaagatgaggaagatgtgccagatctagtagaaaatttcgatgaggcatcaaaaggggaagtcactaagaaagagggtgaagaaaaaccaaaagaaaactaatttaatgatcaagaaacatttacttttagtaaacgaaacttttttgacacattttcttggtctcgattattgtttttaaattgaagacaacattttttgatatgagttgaaatcgtaaaatctaacccaatcattttttgttgatacttgggcatatgtataggatatttcataggaaatacataaatattctaatatgtgatgttttattttaaataaaaggaaatttttctgtacaagtaatattattgtgttagtttttatatttcaataatacattactttagtgaatatactaaattactaaataaaaactaaagtgtatttatgctacagccttgtaatattaactaaaaggcaacagttttcttcattagtttattaaattc

SEQ ID NO: 8695 - DNA, 994 bp, Diabrotica virgifera
ttcacagttaagttccgcaaaaacaaaattctctctgataattaatatctcccaatttccaaaaaatcttgaaaaatctggacgcgatgtttttcctgaaatttcgtttgacatttaagtctgcatgttgtgggacatggcggtttcataatcctttctgaaacctgtttagacttccaatttacataggccttgccggagtttcgtaatttctttattctatttctcctccaattatctgggtttctttttcgcttacgagacttggtgatatctggtattttttcctcagacactagggcatcctgctggtctaaatcaaaatcatttggattaaaatcaacatctgagcttccatctgtagcatatgggtcactattttcatcagtttgatgtgagatggtcggtaaaagcttaccggtagatgtggatggacgcgtaatatcatcttggtgctgaaggacctgctcttgaaggacacgtgttgcaaaatttacaacgctaggtgtaggattatgggaatctttagcttcatcacgttgctgcaaccgtggttgttcgatggatgtttgaagatctatgacgttatctagaggtgaacaataacccaaacaattattcggagattggcgatactgctctgcttcaggtactagtaggcttatggaggtaggtattggtaagtcgtaatattgattataatgttgggaaaactgctgttctatcggtgtctcgagctggcaatactgttgttcttggtgtacgggagagtgtagacatcttaattcacctagatctccgtagtactgctggttagtatacaatgtggaagggctttctaccgtagctatagatatgggactacctgccgtatcattacttgattctccagaattctcatgttgtgttggattcatagacatggccatttttaccattaacgcacctcgtttcattattgttgttaaaattcacactcactgcaactctattt

SEQ ID NO: 8696 - DNA, 999 bp, Diabrotica virgifera
  SmartBlast Evalue=2E-83; Info=Mitochondrial ribosomal protein L39 n=1 Tax=Glossina morsitans morsitans RepID=D3TNV3_GLOMM
agcaccatttaataactttgccctttcttcaagaatgccatacgcaaaatggtttaaaataagtggtttgggtaaagctaccccctgaaatctataaatgggtccaccttcaagatcagtttccaatttgattacgttggctattgtaactcttcccatatgattggtatttggtatcatgggccccttagatatatctatatgagtgccagctctgaataatgtaactttcccgccattgtgttcagctatactaggtatctgttttgttttgtggggattatttttgaaaatgtcaaatgctatatcttttgatacatccaaacattctagtggaagttcttgttgacacatttttatcatttctattgataaaacttttagttctgatgttgtgggtttccagtcttctaattccaattgaatatcatatacaaaactacctgattttacattaggactgggaaaactatgtaggcacaccctaacattatctttaaaagcttgtgaagctactgctcccatgagaaagctacaagttctccaaaaagttttattaacaaatgttggatttggagagtgatagtgaagaagttctaatttacaggctcctggtaaacatttatgtagatgccaaagagtttctccatttactaagcctactactgacttattgcgaacagtatcacccatatgttttgcacaatcataaggtgtggatacatttttgttcataaggagaatttcattttttggtgcaccaacatagtttatttcaattttttctatccgtccaacagcttctctttgtcgtgattgttccatgttaaatatatcattttgttgctttgtatcatcagataagcacctcttaatatgacagaaaacaggcctctgcaatcgcttactaaatgtattaagagaattcatttttagaagatatatgtatatatattaaataatttaatcaattattattgttattaatacattcattga

SEQ ID NO: 8697 - DNA, 1000 bp, Diabrotica virgifera
atacgctcaatgacaaaaaccccatctaatgtcgttactttttctgagttttaataccatgattccctgaaaacaagtctatgattcctttcctctgtaaatctatctttgagtaatattacagtggtaataatgctttgtgccaaatgttatttttcctttaagcatttagtgtaaaaactgatttgatcaggccgataatgagtattcagagccatattgaatggcatataacgactaaatggttacattactaatatatcagcatttgacgtattgctatcatctgtcacatgtcattcagtgaagcttgtgacgtttatcaagattttataactacaagctgtatgccgaagacgttacatgtcacctgctatacctttgacattacattatacctggcacgcctgacattgataccattttacaaataaatacatatgttgatgctttaaggaaaaataaaattttgaaaatagaaataccacagtaggattatgttataggatcaataaaaaccacttatcttaaccgtttacctaaatgggtatcttagaaaacagtttgtattaaacctaaagaaaattatgatggagttcttctttgtcggtgagtttagtaatattgttttgttaatagcagctgatcataaattttgaaccatatatttcaaatatagttgtattatttcgttgtatatgttgtatttttttaatatattgctttaacaaatatatatagcaatcattaaaatgtagtaagtcatgcttttgtatatggtagtattaaatagatagaaatgctatacagagtgcattgtgatatttgttagctgactccattagcatttaattttttgacatatcaggttagccaaccattaaaagtaaaatcattatttgtttatgatcagtttgtttagtactaaagaatattactgatgtaagcaataactcatgtgatagttcgaccgagatttaaaaagtagcgggcttgcttc

SEQ ID NO: 8698 - DNA, 1000 bp, Diabrotica virgifera
gtctaattgggtgaattttgatgtgcttgattcacaatctaatataatgttaatatacacgggttcgatcccctgatttaacttgatttaaataagaaaaaaaaataaaaagataaaacatttcttaaattttatgagtggccaattttctctgacgcgcagtgtataaatgtatcaataaaacacggtatgcattttgcgcagggcttaaaaaattcttgcgacgtgtgtgtcactattgtttgagaggcagtagttattgttctaagattctcacaagtgattaaattgtttttttttatttgtgttgaattacaaaatatttcgtacgacatttttcttaagatttctatgtagattcccgattgatatgtggagggattgctcaaacttttttatcttgctccggtgtctctggattcgctggtgctgttgttaagctagtgtcgcccgctatgcttttggacggttcaacagttgcattactttcaacggttttgccactttcaatatcctctaccggaatatcaccctgatctccagcggcactcttcgtattgcacatatccaactgggcaacaccttcagcgcagttcttcgccgattccttctcctcatccgcatcgacattctccacttttaggtctttttccatcacaataggaactactcttgatctgcttccttctttgtctttgctgcctctcgctgaattttcgttttggccagagaagttggcctcgaactgagcggagctgaagtcggcccatccgccgactgtgttatcgtcgctgggcggagtgctgcagttggcattccaaggatcgccacttggaaaagatggcgcgccttggtcagacggcttgggagatgtccaaggatcaacatccatattgtcgtcgccagcaggcagttcttcatcactatcactactataaatgaggttattcttgtcatttttttctatcactgtttggaaagtgtgctccctatcatcgaa

SEQ ID NO: 8699 - DNA, 996 bp, Diabrotica virgifera
  SmartBlast Evalue=3E-48; Info=Probable ATP-dependent RNA helicase DDX23 n=1 Tax=Camponotus floridanus RepID=E2ABY8_9HYME
gtcgtcccacaattgtttctcctctcgtcttctcaccttctttaacctcaccttctcttgtgccttttctgcatctgttcttcttttttcaagtaattctccataaaacttgctctgatccctcttttgagctttgatatcgattccagctagattccctctgccaaagaattgcacctgatgtctctctttatacaaattgttataatccaacgaagtatcttctccagcatcccagtcaaacacaaacttcctatcattaagccgcctcactcgcctctttttcttaataagccctaaatacctctctttaatagcatcctgctccttctctttgtccttatctttctgcttctcctcctctctatctctatccctgtttcttctataatccctatcgtctcgtttaacttctacttctcgaccagcttgaacagcttctacaattttcctttcctcgtcctgctgtttcctcactttagcaatttcttcctggcgtcttttcagtgcctctgcagctctttgttccttggtaagaaacacgggtttacttttagctgcttcttccgctttcttttttgttagcagttcctccaacgaaagaggttccttcttcgctggttcttgtttaacttcagttttggtttctaccttaaccttctccagttcttcttcctcctctttttggcatctttatatttcttgtccttgtcgtcgtatttatctctatcgcttttatatttttccttgtcgaatttatcatgtttgctactactggggtaatctttttctcttgaacgagagcgatgtcttttgtgtctatcagaatcgcgaattttctctctatcggaacgttctttgcttctagatcgggaacgtttacgcttgtctttatctcggcttcgagaacgacgttttttatcacttcccattaccccacagttcttaaaagattgatcaaaaatcaaaacactaaaccaagaaccaaggccaaaa

SEQ ID NO: 8700 - DNA, 986 bp, Diabrotica virgifera
  SmartBlast Evalue=3E-24; Info=Endonuclease-reverse transcriptase n=1 Tax=Bombyx mori RepID=D7F162_BOMMO
cagatgtaattctgaatgaccaactcgagattgcagttaaaattggaacgaaactttcaaatacctttgaaacttcgaaaggccttttgcagggatgctgtctgtcgcccactttatttaaaatttaccttacacatgtgttaaaatattggactaggaaatgccaaacaatggggataccagtaggagattcttatttgtatacgttgctatttgctgacgaccaagttgtgattgctgctgataaagatgacgccagttacatgattagaaaattgaaagaggagtaccaaaaatggggtttggaaatgagcatggagaaaactgaataccttgtagtcggaggtgatactgaagacttagaattagaagggaatacataaaaggatgtgatgaatttaaatatctaggttcaatttttgacaaacactccacatgcgatcaagatatagaatatcgaataattcaaggaagaaaagctataaaacagctgaatggcatttggtggagtacaggactgcaaaatcagacaaagaaaaaaatctaccaaactatcgtggaaggaattgtcctgtacaactcggaagtgtgggaagtaaaagaccgacaaaataaacgactacaagctttagaaatggacgcgcttagaagaagctgcagaatatctaaactgcagcatatcccaaacgaagaaataaaagaaagaatggaagtagaaaaggatattatagacagaatagaacaaaaaagattaatatggtacgggcatgtccagagaatgggaccaacaagatggcccaagaaaatgatccagtatgtaccacccgagagaagaaaaagaggcagaccgaagagaacatggatacaagatgtagagaaagcaatgaacagtagacaactcaacgaggaagatattcgtgaccgaaaagcatggcgaataggatgcgggaaacggcgaatgctgtagaacacccgatatatatatg

SEQ ID NO: 8701 - DNA, 980 bp, Diabrotica virgifera
  SmartBlast Evalue=3E-53; Info=Nicalin-1 n=1 Tax=Camponotus floridanus RepID=E2AIS2_9HYME
actgcgcaagcgtcaagaccaatgacgatgtcgaaatgtgatctcgacagggcttgtgtagtcgaaatcaatttctacccaacgttccgatagtagaggtcgagatgagttacagaataccaattcctacaaattccgattcgacttgctgacttgatttgactcatttctattcgattcgtagttacagaatgggcctgaatattagattaattgtttttgatctttttgttgttggccgtgaacgaacaggctattttgtacaatgcaggaaagcgttctatcaaaaaatatattattaccaggtacaatacgatagcaatagtcaatacgaggtcgaatatagctggtttaacgctgtaaacgttaacggttcccccggtgttatggtaaaattggaaatctggatcccttttgtcaggtacggctactgtcactttaacttcccttaaaaattcattaaacgtttgtttaaatgaggctaccaagggattgtcttttgtacttattaattgaggcgatcgagcttcactagatatagtattggcccaactttcaacattttttctacttattttcaaagaacttccgaaaacggattcataagattcaccataaatatgtctagctaatgcttctgcaacgatattggtatttttcaccaacctctccatatttaaattgccccacgtatccattattgtcgattttctaaagtctctgtgggtttttaatgtagataccgtaaaagctgggagccttcttatactaaatcgttcatgttcccatcctaaaatatcatctgccagattgatttttttatgtactccttccacggaaacggatggttgtatagtgctggctgcagattttaattctttataaaattgtgatgttggtgacccctccttgggaggctttgaaacgtgcaagtaaatcgagtcattggctgccaacgtatcaaggcacatgacgtatga

SEQ ID NO: 8702 - DNA, 996 bp, Diabrotica virgifera
  SmartBlast Evalue=1E-110; Info=No ocelli n=1 Tax=Tribolium castaneum RepID=D6W8V3_TRICA
attattgattgaaaagaaataatcaatgtacaaaatatgtattggtttttaaaaacttcaaatcaaggaagaattaaatcaatattaatgttaatcacataatttttcatacttcaacatcaaattgatcgattttgttattattttacatacaggacatcatgtacatttatcaaaaactgttaaaaaaattagcactattggtgtactgctgccgcccccaacctttgtccataaacagaatacgcggaataataaggtcctaaactcgttggattaaatgcactgtatggagaagcacccaaagatgttggtaaagtgggttttccataaggatggtacctcgctgcagataatgggctcagaggtggattgggatatcccgcccgatgtagagaggctgaagaaaacaacgaatggtgactaagtaaggacgagctagctgatgtggctggatcagatccattggtgtgagttctgagatgctgtaagagttcctctgatgtaacgaacctctttccacaatatgtgtcacctgctatccaattgcatacataaggtcttcctagctgagaatacgctaaggacgatgtgggaactggacctggaggaaccaaagacatggccatggctaaattgtacttttggtgatcacactgggtgcatccagaagggcaaggacctgcagcaccactcatcagtaattgttgattttgtaaactaaattgacatcctgtgcagtagggatctttacaaactggaactaatgcttcgccacctgaaggagtcttcacacgagcataacttaagtagggacctggattaccgccagggtatcccgcagcaaacatagctgcgtgttgcgcactaaacgaagcacctggaaacggaggtctaaatgcaggattagttgcctctaatccgggtggacaacacaaagcactcaaaggattattcaaaccactcaaaccggatgataacgcactaggtttaaat

SEQ ID NO: 8703 - DNA, 992 bp, Diabrotica virgifera
  SmartBlast Evalue=2E-38; Info=Nudix (Nucleoside diphosphate linked moiety X)-type motif 2 n=1 Tax=Danio rerio RepID=Q6DG97_ DANRE
aataatgtaattataattaatccaaatccaattataaataaaaattcaatataattgtccacgtccatacatgatttgtgttagagacaattaacacaacaatatcaataaatttttaactcagataagttgttattccagtaagtaccatagaaaagttatatattcaacaaaatgaaagttgcagctggatttgttatatttagaattgtaaacaatattgaatacctcctgttacaaacttcttatggcatacaccactggactcctccaaaggggcacgttgatcctggagagactgatatcatggtcactgcatttagagaaactcttgaagaatcaggccttacaaaggacgatttaaaagtgtatgaaggttgcaagacaacattacattataaagttaataacaagccaaaagaagttcattactttttagccgaactgattaaaccaaatgcaaaagttatattgtcagacgaacaccaagattttaagtggttaggattgtcggaggcttgtgaaatcgtaggatatgaagagttgcagaatacacttaaagaatttgaaaagtgcattactgacaagagaaatcggtcaatcaactcaaaataaattttcaaaatgatataattttaaatacaatgtgataaactctaaatacaatgtgataaattatttataaacataagttttaaacttgtatatttaggctatgcatgcaacaagccaaactcgactttatgcgattttttatttttttaccattcttttctaagttcatcccttcatatgacacattatcttcaatttaatggatccgccgaataacgtaagcaccacattattcatttttaagaaatcgaacaagaactgttaaaattataataatggtaaatgtctaacacagcgtttcttaaccggtgggtcacgacccactagtgggtcgcggtgtggctcttacagtagctgaataacatacatatatatca

SEQ ID NO: 8704 - DNA, 995 bp, Diabrotica virgifera
aagtttttcaatatttcctgttcattaatcttttatttttcagtttttttttgtagctgtactttatagtacagtgaggtacaaactattgacattttaacagctattgaccaaggaaccattaattgcaaaattacttttatttgcaaggaatgctgacttagttaattctgtttttattactaatccttttaatttacagctttgattgatccaatgttaaagcatactatattgctttaaaatttcttcaatcgcattccttcttcatgacacagttcttactaatttgcaactcctacagttgccagttagtgcagacaagtcaacatattttacttaattcagtgtagctgtggattgatacaatacacagtgaggtaatatttaagtgtaattttatgctaccatgaacatatatttttccattccaacttcgctgatgcatatttttgcatacagtaatgaagtatccatctaatactttatgtgcaatatttcttgcatataaagtttgctacatacaaacaaggagaggaaacctcaagtattcatcaaatactttatgtgcaatatttcttgcatataaagtttgctacaaacaagaagaggaaacctttttttttgtcaaccttaacattcctttgtagtgaagaaactgatttatggctttatgatcatgctcagtaaagaagtgtgaacacacatttctctactgaacagtgatgcttagacatcttgaccctttctctattacaaatgaaattacctattaataaaagtatgatcattgatcacatgtataaattatttatatccaaattgtgatataaatacttcatacacatgttcaatgtgtaagtcctatttcagataccgattgatcacatgtataaattaattatgtccaaattgtgatgtaaatactttatacatgtgttcaatgtgtatgtaaaatgatgttatatgtctgttaacttgccatcaatgtgaag

SEQ ID NO: 8705 - DNA, 995 bp, Diabrotica virgifera
tcagctgtagtcatgacaaactaatgtaaagaaaatctatcattttaattaatatatttgacagtggtacgcacttctaacgataggaaatgagagaaatatattttacaacgatatagcaatattagtagagagtgccgccaaacgaattcgtttctatagatatgtttctgtaaggcagtgttgctacgtcatcaaagtcagaaaatcgtatgccggtgtttaaattattgtattctatagttcggattatcgcactgacttatattctatggaacaagaaattaacaaagtataatatattttttataaaagacacaaacgaagacaaacaaacaatctaatatgacaaattatttaaaagaaaaagaacttaaagtaaaaaatattcactatttagttaagtgaactcagcttcttgcagttcatctcggcttctttatggtataaattggttatatacatagttttaactattatttgtgacgatgtaaaattggcacaccccttttgaagataaactgattggaatgaatacataaagtgtctgctccaaggggttcctgcacttcgtctttattaaatttacttttgaaaattgtgtgacaagttgcatttggatgagtaaagaacacagataaagcaaagtcactcaaattagcataataaatagagggttaccgccaaaatgttttatttggcctactttaaaatttaacatccagatttcaattctattggaatatgttggtactgttgaagtttctcccatttgttaaggatcttttgcatcgtttgtaggtgtagaggattaaaaattcagggcagttttgacattagtggtaaaagtaggtactgcctatatgatttcacagaacacagttatccactaagtagtaataaataatgttattattgtctattgtacgtcggtagtggataacaattatattttttaatgtaatttttttctttaatatgaaaaatgtgatatt

SEQ ID NO: 8706 - DNA, 994 bp, Diabrotica virgifera
aaggaacgctcgttaccagtgattttttaattcaccgtgaataaatcaccattagtgaaatcacgtaccatcactagcaacggttccgtgtatttactgtgccgacactcctccgacaatgttcggttcggcagaatttttctcgcgaacacgtactgactagagcaatttgttacaacgcgcactgctcgtccggttcgttcggagaaaaatgcttgagtcagtacgcaccttaagatctttccatgtacttggtgaaaccaaaatcagagtctttatattcctgctggcaggttaaccattctaattttgacttcatacaaaactggatttcggttgttatattatgttttgttgtaatataaattgttgataaaaaatatactataccaggtctagagagattctttcgttacattttgttgaatgttgtggtatgttaataaaatacatactttgaagaaaaacaagagctgacgtacctacctattcatcatcaatgtgtcgaggctgaaggatcaaatatcaccttcttcttgcagtgctcaatcctcattggacgttgaccaagcactcaagcccacataaccatcacggcttccctaaataataccaacgaagtttttcgatcgagtgtctcaagttcctaagtcacgaaatacgtcgtctacctggtccactttgccgtgtgtaaaaagttgaagtatgacaattttctttgttttactttgttctttggatagcgtcacgttttgaaagctgttactttcttactgctggcctctgacaacgtccaaacttccacgagagacaaaaaggtggtaacacagagtacctgaacattcgcaatctagtatgtgtattaagcgtatgaattaacccttgaagtcctgaaattctttataaaaatacccttaattaatattccatcttccatatcctctaaagcttccaaagcttctctaaagagtaaattttgaataacatcggtgac

SEQ ID NO: 8707 - DNA, 995 bp, Diabrotica virgifera
ttaaaatgtaatttttattaaattattttgaccaagactattacactgaaacacagatccagaaaaggactaactaattcagatatctaagatattaacttacacagcttacaaactaaaagatattattgtgcgcccaccaatccacaaaaacacgtaaataactgtcaatgctaactacctttcaccactcaatttggagataaacattatgaaactagatgtatttccacaacaaccaacatggtactttctttgtactttaaggttaacagtgttgccacaggcaatgattatgtataattttcaattttaaaagccgaaatataaaaaaaaaacaattcagtctggttgaagggaaacatctagttactcaaaagtattatttatcgacaagaaaaccataaaaattggcctatataaatttaaccagccaaatttggcagtgcaggtgagttagtgtttctaatggcacaaagacacatacggaatgatatttttgctatataataataaaccaaagatattaaaaatattttcaacgacatatttgtaagattggcgcccaaatacatgggtgcggcaaaaaatcaaaacttttttaagactgaacatttaatcatcatcttcctcctcttctccggcatcattgtcgtcattatcttcatctccggagtccttgggttcttctttcttctttggtctgccacggcctcgtgatgctccggcagatttggcttttggtttgactgcgctcttctttttcgtggttccctttggcctgcctctacccctctttgcaggtgatgcaccttcatcatctgcatctttcttccccctcttttttgtatcaaccttctctgctttttctactttttcagctttctctgcattagctttgcgtcctcgctttgagggtgtcgttgctgcgtcatcagacatggttgatttgttgatttatgtaaaatatgacaaacacacacactagctggctg

SEQ ID NO: 8708 - DNA, 996 bp, Diabrotica virgifera
  SmartBlast Evalue=6E-76; Info="Bumetanide-sensitive Na-K-Cl cotransport protein, putative n=1 Tax=Aedes aegypti RepID= Q16UI3_AEDAE"
gataacattcggaatcatctgggcctatatcttctagtggtctacagaaagccagatgtaaactgggatcttctactcaagcccagacatacaaaacagctcttacaacagcccaacggttgaacaatattagtgaacacgtgaagaactacaagccacaaatcctggtactgtgcggctatccacaagttagaccactgttgatagactttgctaaccttattactaagtctcattccttactgattattggagatgtcatcaataaacgaataaaccacagaacgagatcttcaagaacgtccaaagtctataattatttaagaaatcgaaaaatcaaagcattctatacgatcatcgataatatgtcattcgaaatcgggtccaaagctcttctccaaacaactggtatcggcaaacttagcccaaacgtcttgatgatgggatacaaaaacgactggcagatttgcaacaaagaagaactccttgcctactttaacgttttacacgcggcctttgaccacagactagcagtagctattctcaggttgggcgacggcctggattatggaattcttctagatgacgccgatcaggatcgcaccagcaacgatgcctcattaacaccagcctcaagaaacgaactaagaacatctgtttctagtaacattatgcatgccgattctaatttaagcctgacaacagtgggtcttccagaaaacaactcatatatcaatctacagactcctgcagggtcacacaatggcaagcagaggaagcaacgtccaggtcttgacgaaatcatcatcaccccacctgatgagcaagctagattagaggaaaaaatcgatatgtttaggagaaagcagcccaaaggctatatagacgtttggtggttgtacgacgacggtggattgactatgcttttaccttatattattaacacaagaaatagttggtccagctgcaagctgcgagtatttgccatggctaata

SEQ ID NO: 8709 - DNA, 992 bp, Diabrotica virgifera
  SmartBlast Evalue=6E-42; Info=Lipase 3 n=1 Tax=Camponotus floridanus RepID=E2AHE1_9HYME
agactagcagtaggcctcacattttccttcgctcaagtccttaatctttttaaataaatatttataaaaatatttgggtacatctttggctatgaggaagtcaatatggttccatttcttatgaggtactacatcaaatccacatctaacagagggctggatttcggaatataattgattggcgttctccattgttgccaaccaatcgttctcactagcaaaaatagccataggaatttgtattttggataaatcgtaaacaggtggtgtaggagtaccgtatttttccaaattcttcttctctccgtaatcgtaccttttaaaatcgcccgtttcgtacatttgcaaatagtggctccataactccacacacacgctgtcgagcatctgcgtagcaaactgtggatagtgaagaggatccatttggtcgtagtcatcaccaaacagtaagttgttaaacgactgaataatatacatgcccattgaaaatcgtgtcagtggtctcaaaaataaagaataacctggtaagatttctccattccaaaatgtgtaaataagccttttcaccgttggccatacataactactatacagtgcgatacttttcactcctttgaaattgatgacaggagctatacctatcatagctttaacattctccttagcttcatccggaaacgtcgaagaatacatataaaagccggaggatcccatggagtatcctaaatagatagattggcggttggtttcttgagatacaaagttaacaacggctctgacatcgtatattcctaagttatctattgtgtacttccagtagtttttgttaccagtagttaggttgacatgacctttactgtaccacgtgcccctgtaatttaacatccacacgtcatatccaaggtcgcctaataatcgagctaatgatacgtttcctctattaacccaaccgaaagcactcatagcgatgccatgtacaataatgatgggat

SEQ ID NO: 8710 - DNA, 993 bp, Diabrotica virgifera
ggaagtagataacatccgtcaaagaggagctgcaaaacgtcaatcaatagtggaaacaatatttaaagcagatatgaataacatcacaagacaatttttaaagtaaaaacttacaagcataagtcaacacttacaagtatatacttaaattttagaatgtttttccattattaccttatcagaaaaaacttacttttattcaagtataaataagtaatatcttatcgttataagtattagcttttgtttaaaaggtactacttgtaaggtaacacttatttttattcaatagacccattggctggaattattcttccgctaagctcggcatcgatgatgtgctttgtgatgctgactcgtaaatagataaagctatctcctgttgtcaactgtcaggttgacaacttaaaaaaggagataagctttatctatttacaccaacatgcagggtcatgttggtgtttccgataggcttggtactattatcttacagacctatttatttagcacgtgatttaagttccgtacttacgtaatctcgcctgttgttttgattctgctcatgatatttatacccaaccaaacttatatggaatcactatgtatttgaaacctgcagcttttggaagctataggtgtaaatattttagttgaaacgataagaagaagagttcctgtgtcaaaggactatatagaaggaggaagttacgggatcccgagttaaccaggcagcacaccaggatcacgtaaattggtgtcttcaacaccaaaactggaacattggcaattggaaaagtgtgcgattttcaaacgaaagtaggatatgtaaaatcagatgattaacgaattcttgtacttagagggccgatgattcatgtgagaaagacaagtaagaacggaaactggcagatttgttcataaatataaaagagaagggtcatgttctagaaaggaattatgatcggtaaaaaatcctttaattttcatccaacc

SEQ ID NO: 8711 - DNA, 987 bp, Diabrotica virgifera
gtaaatgctttgacactgtaaattatttaatttgtttgtatgcttggtacaatataaacaccgctgcacataattatctaataaaacaaagatatatagtaaataataaaaacaaatctaaagtgtcaacaccgcaactgtcaaataagtgttaccaatttatgccaaaatgtcaccttcgttcgattgcagttaaagtgtgatccggacaagtgtgtttcataaagatgctttataattcacttatacaaattaaatgagacgagatatgatgtatttatttacgtttacattaatagaaatattcaaatattatttctacgcgtttataataaaatatatagtggctgtaattccagtgaacttggctaaacgattctaaaaagaaacagaccccggcgacttaaacattttgtgttagtatcatgtgacgtccccggatgacgtgcaatggtatttatactgtacgaaccatactttggggcctttgtgtagtcctaatgtgatatatatttaagtgccttgattttgaattaccaaaaacaaaaagttctgttccatgtttatttttgtagcttttcaagatccgttatgacttttgtcacattcttcctttcaggatattttgtcgttttaatttcttcatctatactaaatttacaatcaagatgcagtagaaatggacaagactaagacacgttaaatgctactaggagcactcctgaatcgtaatttacaatgtatgattatgctctttattttctctctgttaaccctccgttagtcgctatcggtgtcacacaccgacgacagaattatttattcgggatttacaacataactggttttttctatcgccactttctgtacctcttcctatcaactaacctcgtgttagtatacattcttacctacttgggtacagttgtgcgagttttatagctattttcggtgcaagactccgtagcgactaaaggtgtggttatt

SEQ ID NO: 8712 - DNA, 972 bp, Diabrotica virgifera
  SmartBlast Evalue=4E-52; Info=Alpha-tocopherol transfer protein- like n=1 Tax=Harpegnathos saltator RepID=E2BL75_9HYME
ttcttagttggaatacttttcttactataatcaaaagttgaaaaatgaaggaaattccagttgaggaaatatacaaaaaagacgataaactgaaaaaagaagatgtgctggccttaatggaatggatcgaaaagcaaccacatttgcctaaaatttcagaactggagacagcgcttttcctccatagttgttattatagcaatgaagctgccaaatataccattgatacttactttactgtcaaaacgttatgtcctgatatttttggatccaaggatattaaaaacgatcgtttacttcaaagagcaatgaaaactgtatttgttggtcctattcgtaattctccgaaatcaaatgatatacttctcttcggaaagctgatggactgcaatccagacaactatgcgtttgcaccccaattgaacttatttgatttgaccaccataatacattatctggaatacgggccagccgatggttgtcatattgtgatagatatgaaaggagtcgtttttgcacattttcttaaactcaatccagttgtaatgaagaaatttttgtattatttacaggaaggaatgccgataagactgaaaacctttcactttattaatattgtatcgtttatggacaaaattttagccttaatgaaaccgtttatgaagaaggaactgattgatgcgctacatcttcatacggatgccgaatctgcatttaaatatatccctaaagaaatgtttcctcaagaatatggaggatcttgtgagtcatcaaaaatattacaagagaaatacaggtgtaaaattatggacaacccagattattgcccatctgactaatcaagtagttgatgaatccaaaagacaaggaaagccaaagaacgctggagacttattcggtgtagaaggaagttttaaaaaactagaagtcgactagaagttattttatttattttgcaattaactattgata

SEQ ID NO: 8713 - DNA, 979 bp, Diabrotica virgifera
tcacactgtatgacgtaatgttcaaccacgtgtgtatgttcaaccaaaaactgacgtttcctcgacgttactgacgtcacttggttgcctgggatattagtggtaagaaattcatcggacatttcttgattattcaaatttaaaaaaaaaattacgtctaataaaggtatgaactagatcacgtataacgagctatacttttttcgcgttaagaacggaacattggcctatctgaacaatgtttagttcttaacgtgaaatgctaaagtatagtagataataactgcttgatttacaaaaaatttagtacaataaatagtggcaacagaaagcgttaaaacagcttgtaatattaaaatttatagacacacgaacataaagaatatactctgtgatttgtaaactgacatgacaataatgataccaaagatgagtgcttgtgttacagcaaatgcctaattgtcaactatggtgaggtctctcggctcagattttaaacaccgttttaacggcattgattaaatacatatcgtgatagtgaaacggtattattagactacataaacaacaaaacacagtatgttgtattgttgtttgttcaaataaagttttcaattgttgaagtgtctcaaacttcaaaagaactcgaaagtaggaggcaatatacattctactgtcgcataaacttattttacatgaatttacaaaattccattttacttaaaattgatcacccattgtatgatagtgagaaggtacatactctttcttttactcgttattatcaaacaaacattgatgaatttatactgggagaaatctatgtatttgtattttctgttatattgcttgctacaacgtagctgtattttttgcaaatgtaagatttaagtttttctcgcagatgctgtttaaaaattaattaatagattatattcctttagatagacatgtttgtatacaagtttcctttaacatt

SEQ ID NO: 8714 - DNA, 989 bp, Diabrotica virgifera
  SmartBlast Evalue=9E-12; Info=Muscle-specific protein 300 n=1 Tax=Tribolium castaneum RepID=D6X2J9_TRICA
tagaatcagaggaaactgatgcagaactggttcctcaattaggacgttcacattcacaatttgaggctatagttgaccatataacagaatttgttccaaaatcagatgtatatcagtctaaatcctcttacagtttaaatccagatgctgcagaatttatacccagctcacgatcgcaaataacaactgttcccgatactaaagactatactcaagtgtatgaagaagaagaggaactaagttgggagggaggtaaaagcgattcgacgatgttcgatcaatacgagtctacgtacaacttacctccagctcatactacgaaatgggtgactgatatacttgaggataatgaagataagaaacgacatgaagaaagattagaacaacaaagaatggaagagagcttgcttcctagggatgtggtttcagaactaaaagttgacaaaattagagatattattacttctcaaccatggacagaaactattagtcccaaattagaacaaagagttgaaattatacctacagctccagtagaaattaaacctgtcaataaatgggagagtttaggcggagacaagacatacgcagacatcgtagctgcaaatgcgccagttaaatcaaaacgagaagattctccagctacgattaaagaaactggtatacaaaaagtggaaatcaaagtaacggacctggacgaaccgtttacagaagaaatattcgagaaacctacaattacaacagatgctgaaggttttatggaggttgctaccaaaaagggcaagaggtccagatcaagatctaggtctcgacaaagacaaccaaaagctcctgcagattcttctccagaatctatagaggtagtaaaaactatagttactgaaaccaaagaaacttttgtgaaacctattaaaactgaagaaacattcgacaataatacacaactccccagtggtctgacttatgcgaaaatacttggatccccagtc

SEQ ID NO: 8715 - DNA, 990 bp, Diabrotica virgifera
  SmartBlast Evalue=5E-12; Info=TCTEX5 isoform 3 n=2 Tax=Mus musculus RepID=A5A4Z0_MOUSE
caactatcaaaatttttacctttctgtcaatcttatttttatcaattttaaacttatcaacaaatgtttatttctaagccctagcagctttaattagtgtaaatttagtgatatgtttatcaagtgcttacgtgcgatataaccagcgaaagatggcggaaccagtcacatttcaagaccaacaagagggtacatcttccactactgtcactgtactcgagactgacgatagagaacaggaagttcctagagttcgattgaaattaagaaagccaaggaccgacagaaaagttcagtggagtacagaaactgtagataatgagaatatgggcaaaaagaaatcaaaatgttgttgtatatatgacaaaccgaaaaagttcggcgagagtagttcagatgaagatgaagacgaatgtgatcattgccatggacatgtagagaaaaagaaacataaacacaatccatcagcgggtaacagtattgacagtgagggtggattgagtccgggtgatggacctagctcgtaaattaaaaaaaatcaactgtactccgcacattctacgtagacgaataaatttggaaagactctaccaacactgttaccttacattcttaactatagtagaatttttagtgattgatagtataaagtatttcaatgttctgatgtatttccagtttgaattccatttttaacctattgtagaggtatatcatttgatcttgtataccggctgtaatttgtctgtttgtaacagttaagccctaatcgacattgttatttactttttcaagatcaatgactataagtatccatttaaattaaataacttgcactattaattaattattatatgtatgtgtctgacattataaatgcgttttgctatcaaacacaaagagttcacttaaaaagtttactgtatttttaatgttttttcaataatataccaatatatcaaatgtttaccaatttaaacctcttcaaat

SEQ ID NO: 8716 - DNA, 984 bp, Diabrotica virgifera
catcgattacgtcatcacgcccagatggacgacgtcaccagtatgacatatatgtcaaaatgtcacacttcaaaaataaaaattgacctgtttcgggatttttccttaaagttgccggtttacgaaataacgacgttactccttcatttgcaccatactgtacattgggtgtcgaaagttcgactgtacagaaaggatgtcaaaagttcgacgtagctaacctaatgtagtccggaaattgtatgattgacttatataataatatcaatcttagtactaactcaatttctctagtttcttttaaaatatattccataacgtaataccccattagataatattgttaatataatattgttttatggtattaaaacagtaaaatatatcatgcattgtattaatcataaaaaattgtcaaggtcttacaagtcattaattatataatacatatatttttggtaactgagcaacacataaaatcacaaaaatcttttaaaagtcgaataaatgattttattaccttaacatatacatattcccagagtcaatatgcgtttagtaatgtttaaatattaacaagtgacctaagaaatctattattaggtactgtgtatcatctataaaatatagccgatctattccaaataatattccaaaaagcagttcccaaagcgaattaataatctgtattaattattaaatgtacgtttttcaaaataatttaagtggaaattttgaagggttttgagtcaatatgtagccatagataaaacatggatctcttatttcacctttaagccagtaatttattattctaactgagaaataagtcacaatctaacttacaaaatgattttattgacgtttcgactactacatcggacgtcgttatcaaaatacaaaatattacagtaatattgtgtatattgataacgacgtccgaggtggaagtcaataaaatcatttgttaagtcaaattgtggc

SEQ ID NO: 8717 - DNA, 990 bp, Diabrotica virgifera
  SmartBlast Evalue=1E-79; Info=Nudix hydrolase 6 n=1 Tax=Culex quinquefasciatus RepID=B0X9R2_CULQU
ctattgttcgctttttgtgtgcatggcctattaaataatttatattaaaatgtctttaaattttggtataaaattctaaatactaatatgtggcccatgaaacctaacgaatttaatcttctcttaatgtttcgaaatatctacatggttttcagtaaattctaattccctatttgtaatagagtacaccgtatatggttttttaagaatctggtgaatcccatggaagcagttgagcttgatacccctttcttcatattccaaatacttcttaacgaagaacttgttcaattcgtgtatatggggatgttctaaatattctggcacatccatccatttgcattccataagttccctatcacatttttttatatctgtcgtcagtgcctttaggtgaacggttatgtagatgtctgaacatctaaacatacctgcatgaccgtgccttagagtcaacactgactcaaacttcgtttttatgttggtttcttcgtatacttcacgtattgctgtgtctacaatattttcacctggttctgcgtatcctcctggtagtttgtaatgaggtagactatgaggatagtacctctctttaactaccaacacttggttttcatcattaataactacggctccaacacctaccatagtatgagcataatggggaatgttattactttctgatttaggcaaccaatataccatcataacatagtcctcctgggcatgatgaaacttaaagccattcttggccaaaactggtacccaatcagactgactaaggtgaactttgaaccagattcctctgtttccattttcagtccaagcttttagagaatctttaagtttttccgtaaattcctgatcttcacattgttctttttgtgaatctacagtaatacctttgaatctatctactatgccctcaaaaactttgcttgaatttgaagaactcatggtgtggctagatgaactttatcaaaacactat

SEQ ID NO: 8718 - DNA, 984 bp, Diabrotica virgifera
tcagcatttcgagcacatttttgtgaattttttgaatctatattagaattatttttaaattaaataaatagattcagtagagataggcgttacctcacgaaatatctaaagaaagtctgcaaaatttcaggtggatcggtaaaatagttttggagttacaatatccaccacctttgaaaaaagcagttttgagaaaaatgcgttcaaagttttgaaaactttattttcaattttatttttgtctgttaaatcgtaaagtgatgcacaccgaaatatgtttttgaatcgcggagtaatttacaaaagggaaacagctgttgaacgtttctaactacgctcaagcacgctgtagcgaagctgccgcaaagcgagtcgaaggtagggatattcacttgctttatctctggtaattttactccaatcaatctgaaattttcaaagagtagtcttaaatttaattttaaaatttcaaaccgtttcaacctccccccttaatcacaaaaccttcatctgtgttattcacttcacttcaaatagagttatagctataacactgtattggaaagattcatactctatgtaatgtcaggttttactagttcataaatattattaaaagcgcttaaaatttcagctagatggacgaattttaacttatttagatccctagtttttccaaatttttacgtgctatatttttcttgcgtacgatatacctcctcgcacattataggtactgagggaaaggttaacatccctatggtctaaattacttataaaattaatatatatcataacgaaaggttgtatgtgagctgacaatctaaaaagtttgtgcgaggtgatattttctacgcgtatgaaccagttattacttactatattattacataaaattttcaccagcaatggttaccaactttgcacacttttcttatcatttttgcaaaatctattggcaaatgagatattcaaaattattat

SEQ ID NO: 8719 - DNA, 987 bp, Diabrotica virgifera
  SmartBlast Evalue=8E-79; Info="Protein purity of essence, putative n=1 Tax=Pediculus humanus corporis RepID=E0VLM7_PEDHC"
gcaggttggtatccagccttggtacagcattccattactctcttcatatggtttcttaatccatgtaagtctctcaattgcctatatgtttccttatttccacaaatgaacatgagtaatttacgtacttgtcttcttacaaaaggtgtctgtggtgtcatcatataatcacagagatgcttgtaccatgacacatggaacgcggcactgataggctctgaaacatccgaatgcctgtgcacttggtaaggcaacctcaaagctatttctgtcaaaagttgtggatatgtatggaatacgtcttgattgtctttaacaaactgcctctggaaaaacggtgtcatatcaggtggcggatgaggcaatcgttctttaagaagatttcctgtgatgctgaccgaatcatcctcatttgtagagtttcgccagtagctcaacaaagcttgaaggagtttattgcagtagttgataatgtcagctttgtgaagagctgttgctgtggtgcgagaaacaaaggtagtgctgtctggtattggggttttgctagatgttgacgttgatgatgttttacatctttgcattaatacactgagtaatcgcaaaagtatcaactgaacttcgcgttgggtggttcgtgtgcaaacgtcagcaaaattatcatttgttagttgtaattcacttattattgttgttaaaagtgaatttaaacatactcggtctcgctcagaatggccatcgatatctgcagttaactggagtaccacttgtaagaagggtattactctgactccatcaacgtttttcaatttcggaagatactccaccagtttctccaggagttgcagcctgagaacgtgtaatctactgctactttcagtttccagttcaacttcttcgtgctgggcatcagcctcaaccataccggcaaccgtgttagcaatcgaactggtatctgatctagaaactagattgattgcttcttgcata

SEQ ID NO: 8720 - DNA, 974 bp, Diabrotica virgifera
  SmartBlast Evalue=8E-47; Info=Fragile site-associated protein n= 1 Tax=Culex quinquefasciatus RepID=B0W2V8_CULQU
agatttaacatgtgtatcgttgttctcagtttgttttgatatatcaacgtgaagttacattgtgacaaacaagctaaggaagttctccagaaatttctaagaccggccgttgtacgtagcggcagcaaaaagggggcgaacagagcaaagattttgcttggattccaaaccaatactaactctgacgtaattcaatgcgatcctgtttttatcgaaagttgcgagaagcaacagcaacaattagtcatcagtctaaacgttggaaaaatgcacgctcagttaagaagactgagaaatgaaagttctttgttagatgacgctgttattactgctaataccaacttataaatccaaagtactctttaccccgacaaaagttagatcgctttatagaggcatggaatattatctgcaatcgccggatactgagagccacagtattcctacggacgatattagcatcgacgacaaactcggctttataatgttcgaatgtggcctcgaaggtgtcgctattaaaatagttaaaaaatcgctatttgaacacgtagaagatgatccgcggccaccggaagtaccagaacctatcgataattccgataaatcaaatcatacgacgccgaagttatccgaagccaaatcgcaagggctcttgacaccgaagcttaaagaaaaagacagaaaatcgacgcaggaagacgtaaacgttaaaccggaaagacttagcgagaacaaggaggttacaatcgttcctaaagataatgggaatgtatcgtcgtgtataattgagtttaaggtcgtttggtttaattttgcagctccaccaagggctccgatcacaaggaaaatcgactatacaaggttagactggaatttgttaagtactgcatcaccagcaatcaatgcttggatgaatccaagtaatagactagctattagggtggtacatatggtgagaactatgtacaaaagat

SEQ ID NO: 8721 - DNA, 984 bp, Diabrotica virgifera
  SmartBlast Evalue=3E-51; Info=Endonuclease-reverse transcriptase n=1 Tax=Bombyx mori RepID=D7F170_BOMMO
cacaacctaccaacgatagcactattcatcgactttcaacaagcatacgatagaataaagaggaagaaattaaaagaggcgcttgaggaattgggagttagcagaaagctacgtaacatgatacatctcactctggagaatacagaaaacagagtcaaaataaacaatcaatcatcagaaaaatttatagtaaacgaaggattaagacagggcgatcctctgtcatctttactcttcaacttatgcctagaaaaaataatgcgagaagcaaaaatcaatagagaaggactcatatatcaaagaagacaccaagttttggcgtttgcggatgatgtggtgttactggcaagaggaacaaaagagctacaggagatggtacagagaatagtaaaagcagcgaagaaaatgggactccacataaatgaaactaaaacaaaatgtatggaatggacagatggtcagttcaggaatggacaaaagcttaaagtagaagtagaagaaggaacatcatacgaattcgaaatggtagaaagatttacatacctaggagcaataatatcacgtaaaccgaatcattaaagaagaaatacaagctagaataatggcaggcaatagaagtgtacatgcgcttaatgtaatgttgaaaagcaagtttctatcaagaagggcaaaagtacagctatacaaaacaactatacagccaatagtaacatactgcagtgagacatggacaatgacaaaaaatgaacaaaatttactggagatctgggaaaggaaaatactaaggaagatatatggaggaaaaataagggacggtttatggataagaagatcaaatgatgagttaaaacaattatacaaccaacctaatataataggagtgataaaggctcagagacttagatggcgaggtcacattgaaaggatgccaaacacgaggactccaaagaaggtactaaactacactataacttcaagaaagag

SEQ ID NO: 8722 - DNA, 988 bp, Diabrotica virgifera
  SmartBlast Evalue=5E-61; Info=Cathepsin O n=1 Tax=Camponotus floridanus RepID=E2AWA7_9HYME
gccgtcacaatggtactgtataactcctcctatataatgctgccaactttgggcgttaatactaactgcaagaggccccagatttgcaagaagatatagcatgatggtttcctcgttttcgaaactgtcgcatccaaaatccttaagttgaaccccatcctcgtcatcataaagcagtttacaattttgggtctcccaagtaagaggatatattttctctggaagtatcttgacattaaacgatgttaaccaatttaataaagaacaaatatctccaccgtcacagccatagttgaactccgagcagtctaccatttgttggacacttaatttggtgaatttgcctctttttagtgcattcatactctcaataactcctatcacagaaaatgcccagcatgccccacaggaaccttgtgtttgaacttcgctaagtacacctttttctctgtaatctagttttttgggaatactgtatttaacttttcgtagggaacgtttttttgcagtatgattgttagatgatttcttattggtataactgttacttatatagtcaggtagttttaaaataagtcttgagttcgagaattcttcgggagatagatctgagtatttggtcagtccatatgttgcagaatcgttggatcggttggagtttaatatttcaatattttctaaagattgcttaaatgctttaaatctctgttgatatactgtatcattttcataggacttattaaaatcctgcaaatatttctggaaaataatctcatcatcttttagccaaatggggtaaacaccaaacaacaacaaaacatatatgaaggtttcagataattttctgattttggcacatctaggggattcggctaagtttggaccgacaggcattatttatagacgttgacatcggcaataatttaaaaaagaaatacctccctttgaactaaactgttgattgtagatgtagagatgaccaccaccg

SEQ ID NO: 8723 - DNA, 985 bp, Diabrotica virgifera
  SmartBlast Evalue=1E-80; Info=Dehydrodolichyl diphosphate synthase n=2 Tax=Harpegnathos saltator RepID=E2B3T5_9HYME
ccgtggatgacatccatcagtgggtttatttatataatcttggaatgtattatttccctcatcgtggaatacattatttctcaccattctctggtacttaaaaatgattcctagtaaattccaaattgaaaattctggccataagacatcagtgaaacaaatttctgttctctgtgatatctgccaaagcaaaaaatcacttaatctgacctctcctgaagttcgtattaagatatcaggactggagctcaaataggtatataaacaacttgaaatcaattcttcagaaatgtcgttgttctctaaataaccctcctccacacctttaacaattgttttgatgctattagttatttcttccctggaaacataagaaaatgctacatttaatatggatctattgttatctttggtaagaagagtagcttctgcaactagttttcttaaatcttcagagagtaaagataagtcaccaattactcttatacaaataccttcttgcatcaatctttctttttcttcaaatagtttttggaatttttctttggccaattgcattaggtggtctacctcatcttgtgaccttttaaaattctcaatactgaatgcatacacagttacttctctgatacccagctctcggcaccaatttaaacattcagcaagtttttcaaaacctttggaatggccttctgctttctggacatttgtctttttagcaaatcttctattgccatccatgataattgcaatgtgttgtggcacaggtccatatttcaaaactttaatacaaaacttttggaaactagttaaattgttttggcctaaccaagacatgttggaaatctatagtcatacactcaaataacacgttgatagattaacacatgcacgtaatggataatggtgataacatcaccatcaatacttatattcttaaattaatggataatgataatgatagataatactactacttgacaaa

SEQ ID NO: 8724 - DNA, 988 bp, Diabrotica virgifera
  SmartBlast Evalue=2E-75; Info="Endonuclease G, mitochondrial n= 1 Tax=Harpegnathos saltator RepID=E2B9R7_9HYME"
tcatatttcggtacagttaaattatttaatagcgattccgcctatccctacttctatctctatgcttatgcgaccgttgaggactcctggagtttcgcctcactggacttcggtctctatattttctttctcggtcccgccggtctacatctctgtcccgtctgtcgaatctggtatctcgatctattcttcggtcgtcgtcccgtaaaaagcttcggtggacgtcatctctcggtggtcgatcctgacgaggcctgtctcgttcgtattgtcggtcttccctcgcacgttctgaagctgcttggacggcatgtggtgggaaacggccctctaaatgtttctgtattttttgttgaattggaactggaattctgggaaataaagttgaaaaccaatccagtttgaccagccactgcctcagcatcaatcccatagtcatattttgaccaccaccagcttttacatctagctcctcttcatcctctaaataatcttcgtaccattccagaagattggcaggagggaaagtgtaacgtatatacataaaacccaaagctctaatgtaaggagaatcacaatgacctatgagaccatttaattgttttcttgttaacttcaaggtaaataatttgtacaaaaggcaatatgcagtagatactattcctccggcacctactcctcttacaccaccacacataccagtttgtcctgaggtacgtcttgagcccttctcccatggttctagatgacttactttgtaatagatttcatccactacttcatggtatgtttttaattcatacagattaactttaaagtagtgtgaactctgaatatttgtcagaatgagggggttaagattcattgtcctttcgttgccccagagtggcaaaacgttattttgtttagatgttttggctggggcactttcatcgtcactatttccacctttttgatccatcttttcaggtagagaaactttttgggt

SEQ ID NO: 8725 - DNA, 983 bp, Diabrotica virgifera
tgagagcgaatgaactatagttgttgatggatggcgctataatcaaataaaaaatgatgtattatctatatgactataatctgtaccatttataagactatacaaatcaaagaacatacctttttataaatgaaataaacacaattgatttgtttttataccaaattatgattacgattctgacaactatcagattttactaaaatctcatgctatgattctctacatctacattattaaaatcatatattacatcattaatgacacactgaaagaaggagaagaactttatattataattctatagatatatattatgtaatacgtaaataatgcgtaaatacctgagtctttttttttctgattatagtgccatctatcaacaactggaataaatgttataaatgtgtatgtatcatggatgtacctttctttgtgtcacttgtgtcggactgaaaaaagtctctgagaagcaccatagtgtactagtctatatggcatgtgtatgttttaacaccttggctgcgttatgagacaaatagaccttgtgacactaacggttggctgcgttgactgtattataacgcaaaatgtggtaaatattaattacatgacatatatgcctcgaaagcactcaatatatgcaacgtaagtttataaatatctctaagcgcagctaaggtgttaaaaatgtccctgaaatggtttaatggttagcctaatgttgtgacaagagatatctctaatattttatacattcccaatttgtcatagaaatgattttcactgcagttagtgttattttctacaataatgttgcatccagtactgcttttgtcctttataaataagtagcttctgaaaagtgagagactgcttgaaaatgtccattgtatttatcaggtttccgctgtaaacatcaaaatatttaatatacttactctgatagtatattgtagactagataaggaatattaatattg

SEQ ID NO: 8726 - DNA, 983 bp, Diabrotica virgifera
cacatccaaaaatttaagtccttattgaatatcaattgtgctaggagtaatcggcgctgagtgccaaccgatttagaggtataattctgtatcagctagttttgaccacaaaaccttgtccgtcactaataataattagtcatatgtgattttgataagccttatacacgataaaacctgtcttataccaaataggacaattttagaatataatcgatcgggttgtttggcataagatgattttgttaaacggaaatgtacaagaatgtagatgagatgtgtgggatacattccagtgattttatcttactgttgataataactttaatagttacaagccttttgtatatactacatgttttgcatcagagtcttaactattaccaatactttagcaaatttagaactgaaataacagtcaaattagtctatagttgttccattatatctttgcacaatcgtcatgactgtgcaaaaaccaaataaaccaataaatacaacaaatgggctaatgtcattgacactcaaaatcgtagtacaaaaacgtctgaaaaacgtcacaatttatagtaaacaaggtatcaaagacatgccgtatcgtctatccttgtttaatttattatggtttctatgaacaagctgcttaattttgagatactagtttctgtgagtaaaaaagagacctagtataaaaagtaattcgtgaataattttatgcatgtgcaaagttacaatggaagaactatagctgaaaactgtaagatatataagccatacaaaaaatctttagatattggctgatccgcgttcttcaatattttccgtttcagcgaattggaatatgtaaataatttattaaaatttactattctaattgggaaataagccacaaatatattagaatagtaaattacataaatgctacaaagaaatagcttcagaacaatataaatgtatttaaaatagtaaatacatatgaaaca

SEQ ID NO: 8727 - DNA, 987 bp, Diabrotica virgifera
  SmartBlast Evalue=1E-110; Info=COP9 signalosome complex subunit 2 n=6 Tax=Neoptera RepID=E2AUH0_9HYME
taactgtgtcattgcttttacttccgcgtcattcttatacggtttagcttcttgtgagtcgaatggatttatagcagaaaccaacagcatactggtaagtataagatacttcaggcagttgattcgacgaggattgccagcttcatcgtaatttttaaaagcttcgaagaaatctgtgtacgccttctcataatctcccgatctcagatgcatctttccgccacattctctgatgatactcatgataagaggatgtggaatggccgaacgtactttaaggctacgttcgtacaattctttaagttgcttgtaatttttctgctgtgtatacatctgaatttccaacgcatatatttcgagaagttgagtacctttgtggggatcatattcatgactgtcaggagtaagagtggctttaagttgtcttagagtactagccattttcccaaaatctcccctctccaaatacactttacccaatttggtatttgttttaaaccataatctgtcgtttctggcatgttttagagttgatagggtaatttcatacaaatcttgtagcaattgtacatcttttaatgccgatgtgtaatccaaaatggaatttatagccttttcaccttggtttttagtcacagcattatttatatatcctaataggtccttgtacatcttaatcatggcatcataattcttcagcctgaaatgtacctttactagttgctttaaagatttgaagccccattctcctttatgttcaccttgcaattctagtactttttgaaaggcattaactgactgttctatgtgttcttccttcaaatttttggccaaatagtactgattttctaaatccacatcaggctctgatgtactttcttcagaatattcgtaatcataatcattttcgttttcgtagaaaaagtcgtcgtccatagttaaattacttaaatgtttaaatattactgatattactggatattaccg

SEQ ID NO: 8728 - DNA, 982 bp, Diabrotica virgifera
  SmartBlast Evalue=2E-63; Info=Pnpo protein (Fragment) n=3 Tax= Danio rerio RepID=Q6PG36_DANRE
tgggtaattggttgcctacgtttaagacgttgtttcatcagaaattatgtttttggaaagatgttttaatatcaaaacaaataaactttacaataatcaatatgataattgataatgcacaattttgcaatatgtttactactattgcatacttgttgagataatcttctgaataagctttacccggttgtaaatcaaaggttagaattgaaaacaaaatggatttaactggaatgcgagccaattataagagcaaattggcatccttcttagaaaaggacattgaagttaaagaaccgtatgacctattcgagaagtggtttaagttggtgaaggaagatccaagaacagttgaagcaaatgccatgtgtgtgtcaactgctacaaaggatggatttccatctgcaagatattgccttctcaaaggatttactaaagatggttttatatttttcacacattatactagcagaaaaggaaaagaattggaggaaaaccctcgtgcagctcttacattttattgggaacacttcaatagatcagttaggattgaaggtgatgtagaaaagttaccatttagtgatgcagatgaatactttagtaaacgaccatacagaagccagattggagctctttgtagtaaccaaagtataccggttgaaggacgccacatactagaacaaaaagctgaagaactagctagtaaatatagcgagggacaagtaccaaggccaccattatggggtggttatctagtaaaacctagacgtttcgaattttggcaaggccagacagatagaattcacgatagaatcatctttagaaaacctagttgcccaaatgaaccagatggtattgtaacacgtccagcagaagaaggttggatatatgagagattaaacccttaaactattgtttatcataagagtgattttaaaaatgtatttgaataagattgaggtaggtagttgttaaaatttta

SEQ ID NO: 8729 - DNA, 984 bp, Diabrotica virgifera
cactgttaaagaagatttaatttcttattggtgaaatttccagctagtatcactttcacaattaagaattatttaattaaatataaaaaaaatacccatacatggtagattaaagacacctatcgatttaggaacaactctgttagctgaacaaacatttctcattctttaaaaaaaaaacaataagtaaataaaataccgcaaaagaattttcctctctcctttctatttcaacaaagaaacagaaacaaaactcgagttatgacaaggatttcaaaacgaatgcaacacgcacgagtcctaaagactggtacgtgtcaatctgccattctaaacgtcaaggaacctccgaaccaacccttaaattatcatatagaaacacagccaataagtacaaagtgagaaacaaatgttaatcccaaacaactgacaaattttaccatgtacattctcctcggagtattctcattgtcccactaatttcattcaagctaaaatcacaaagttaaatgaatctccataaacaatgaaaaacaaatatgtatttataaaattgaacattacatgaaggatatatttatcctattgtctcttggagcttaaatgaaagaaaaaatttttttaaagtttgtttatcgctttatcattaaaatacttaggaataatggatttttgtccacgtttgtcaatttaatttgaatttgatatattagtacatgtatttatttattttttatatattgtaggttatataaagggtgttagcaaataagtatgaaaaattttaagggccaactctatatgaaaaaccaatgctggctgcgccacaaacacatgtccacaaatgctttgttccgagatacggggtgttcaaattttcatttcaaactgccaatttattattgctccaagaccagttgagccacgaaaacgaaatttggtgagttcctaggatgtagccactacgcaccctctgacatacaa

SEQ ID NO: 8730 - DNA, 983 bp, Diabrotica virgifera
cgtaaatactaaatatctttagtcatggttcttcttaactataatagtgattactacactcctggtcaaaaaaaactcgttcatttgcattttaaatgtttttaaaaatatttcagggtatagtagtcttaatgaggaggaagtaaacattacggtaggggagcccaagcagggatttttgcagtcactcgagcgcgtcagattattacatggggagaaaccttgtaccctgaagatgtacctcagccatatcttggctcttaatgcaagggacttcgttaagggagggggcgaatactattgttggaattcccgttttggattgacccacgtgaattcccgacatgaatccattagaatatttatgggacattttagggatagagattaaacagaggcaacaattgccagaaacaatccagtatctggatttttttgaccaagagtgtataatcaaattctggaagtgtgtattttaaaattgatcaaaaactcagtgaggtcatactctacaataaagaagcacatttatttgagtctttaagctccttttctttcagttggaactgtggcagtgtgaaatgtccgcatacgcaatccgactttttgttttgcgacaattttttattttattttgatgggaaaacattttgctcttagtgcaataactttgttttatttaatctgatttttaatttcattggattatttttcataaacttctgtatgatttaattcaatacagtgccgtatatctgtttgaatgaaaaaattaattttgctcagtatgagttatttgatacatggggaagatgttatagcaccatatatgaatttattttgtataatttgtggaaaacgagcattttttttactccacactaagttttgaattgtgatgaaaatggttgattttgatagaaactgacacggtaatttaaattacaccagaaaagaagtaagtgaaagaagaggaaaaagaa

SEQ ID NO: 8731 - DNA, 987 bp, Diabrotica virgifera
  SmartBlast Evalue=6E-43; Info="Osa, isoform C n=2 Tax= Drosophila melanogaster RepID=Q7KSE8_DROME"
atgtatgtataaagcattcgcacagtaataccaaacatgaatgaagagaattgcgtatgtgtgtgcaggaaaacagaatggagatgacaccacctgcactgccttcgcttgcaccagatattcaggccattccagagcagttggaatctactgttttcttctttatttgtttgtttatatcaaataataaataacgataagtaacatggatgtatgtttaacatttttccagaaagacatatgtcataaattacatacttatttaatttacaaatggtactaacattttccagaacgacatatgcccttattacaaacttaatttacaaaatggtacaattaaagggttacactatgtgaactgtttcgctatcatcattattagagttctggaatctctcgagctttagtcttggtgtcaaaagtctcgtctcgtctcgtcgtttcataaacactcgtactcgtattcgcacgcacactgtcactttgtagtaaagttcttcagaaaaaatcacactatacacgggtgggtagttcgggtaattaggtatgtctattctgtacaccatcaaggccgcatagacaacagttcatctcagtatctacagaggtagagtggaggattagctgtgggatatttggtagagcactttggcgagcaataaagctacttgttggtctagtatctggctcattacaagggcaagcaatctcggttcttgttgcaccatgagagtatggttatctggatgcctagctaaaaatactaaagtggcagcagctcttcgtaacatatccaaacttgttcccatagaatcaggattttctctaagagcactgatcccatgtgcattggcgacattcatggcgctttgttcagcttgctcaataaaagcaactaggagcgagacacacggtgtttgtttagcgacgactcgagccatttgactatctgctgcggccaaataatgcaacaaatttatagag

SEQ ID NO: 8732 - DNA, 979 bp, Diabrotica virgifera
  SmartBlast Evalue=2E-52; Info=Amine oxidase n=1 Tax=Aedes aegypti RepID=Q16VW3_AEDAE
atattctacttctgccgccatttttccaactacccatcctaataacgtatttacttgactatcaatgatgtaaaatccaaacacgtcttctaaccaagaccttccatcttcatcaactggtcccgaagctggcagttcgtttagtagatttaaactatctttttcggcccataataaattgaaacccttagtgccatctggccaccatttactagggaatttgattaaaattttatttacaacacccaacgaaatatgctctatacaattaactttatagggtggaagttccggtacaaaccaacttttgtggaatttcttcaaaactcccacggatgtggtgattaatatatgatccgctgtatatgaacttccatctgaacaataaaccgtgggtttactcccattcgaagtatttccatcccaaactattttgttaacctctttgttaagcaaaattttatcctcaactggaagtgttttcgtgcgatctggagttttctccatgagaacgtccaaaatagtcttgtatcccttatttctccaatttaattgttgatctccttcacttcgtataaaaccagctacggatccttgaactgacaagtcgtaccatgttttggaagactcattgcacgtgctcattttgtgacaccaatcttcaaaatattttgctaattttaaaatatttataccgtctttatacctctcattaattatatcgttaaacctttgtataaaatagtccccatagggttgatgcatatcttcagcagtctttccgcttgcatgtacctcattgtatatatcataaaggcggtctccaagctctttatcaatttgggtaccatttgaaagatagaatgtgttatcttcgtagtcattgatagaagggcttaaaagatcgaggtctttgaccatttcgtagacaatatttcctttctctccatgaacccactgtcctcctatatcgacgata

SEQ ID NO: 8733 - DNA, 982 bp, Diabrotica virgifera
ttcgaaataaattataacaaaaacctgtagctggtgaaaaaatagtacaataactaaactgaagacagaacatgtccattctacgattagtcttacttgcctacgtatttgaactgatgacaacactgctacatagctctattcatcgcttttcttttgtttcgaacacttgacacatgacatataatatatctacgtcatttgtcattggtatattataatatggaagaaaccaatgacttagagatattatatgtcatatgtcaagtgttcgaaacagaaaagaagcgatgaatatccgtagcgtattttagaaaacattacaattgtcagaaatgtcatacacaaatataggtatataacaactaaacatatactgattttagatgtatattagagctaacattattattgacattttttcagttcaaaacattttctactaataatactcgtgtgaaaattcacgaaatatagtactatttcatctacaaatgatgaaaacatcttaacgtttaaatagggaaatatatgtacagtctacaattattgttttcatcctcagtagcgaaatctttaaaaaaattatctgccttagtgtgtgtgttttaatgttttattgggcatttcccaatattttagtgattttacagtcttcttgagatattgccaggtttacaactctcatttaatactaaaacttttaaaactaaaagtaacctattaaattaagttgaaagtgataaaatttaacaacatgtacttatggcaggttaaaaagcttcttttaaaccgttagctggttggtaacttgtttctataatataaaatgtgaatttaggtctcaaagccccaatattttctgaacagtaaaactcttaattaataaattcggtgactgatcacagacacctgtcaattgtttttatgacgtatcagtgacgtaattagtaaaacatggcgattgttcaccattttgtta

SEQ ID NO: 8734 - DNA, 986 bp, Diabrotica virgifera
tggtcggggtgtggacacactgatgtttttgactgattatgttaaaaatgacgtcatcaaatgtttaggttattgatgaattcaaacgtttacttgactttgtattgtatgtagctaaggagcccaaaaaatcatgtaggtgtgtatctgggagttaataagtggatcaaaacagccaaaatctttgttttagttgaatatagaggctgcaattaaggaaactgggagcaaaaatacaataattaaaaaagcagataatagtgacaggactctgatattttgtatattttatggaagtgaagtaggaaatgtaatctcagataagcaagagacatagttattagtgaataatctaacaaaaaccaaatgtcaaagaaagaaacctaaatgatctgcaagtatcaagcataaacatttaaaaaaataagaaaaaattaaaaattattatcacaaagaaagaggagcatgttctatcgtttatcatttgtctcgtctaataggacttctcatcgattgtcatttgtttcgagcttctgtcataggttgtataatctgtatataatattaatatacactgattacacgacatgtgacagaagctcgaaacaaatgactgtgaatgaaaagccctatagacagaaccgaacttatgacacagatactgcaggcataaggacatatttgaaacgttcgatcattttgaaccgctttacagctgatagacaagttatgacaagtatattgcagatcgatgacgtatttgtaaaggtcggttatttttttaaatgacacaaaaatagacagaacactgtgttggagagacaatattcaatccagttgcagaaaagcgtatcaatcctgtcaaaaatgtcatttgtcttatctgtttgatgattatgcaaactatttccacaaaactagaaaaaacaatagacttagttgcactcattatactataaataacatcatgttatttatagtatcat

SEQ ID NO: 8735 - DNA, 983 bp, Diabrotica virgifera
  SmartBlast Evalue=4E-11; Info=Inner nuclear membrane protein Man1 n=1 Tax=Harpegnathos saltator RepID=E2BM28_9HYME
agactcagcctggaacggatttgattcaatctatctgtagcgtactccgaagccaaagatggtgaattgtaggtggacactctactgggtgatgcactagcgtaatttgatatgtttttggtagaaaaataagaactctctactgatttgacggcgagtatttgcttgtagatgataaagtagatttgagaggggaacccctttgatcagagatgaatcccttggaattgtaattagtcaggtctgactcagaatctgaacctgtgtcaaattcatcttgtgcatttttaatgatcttctgggatcgagtactgctagttgtagttactgttctgatgtccctttttactggacttggaggtgcctctggctcatcatcatatcttgtactcttccgaagtttgggacttgaagcaggtggttgcattaaaggtgcggccatagtagctcttctattatccttctttttagtaaccttagcatcattgtcactttcatcttcactggagtaacgacccagggatcttctaccttctccaccaccaatcttgttcttgttttccaacagcattttcagtttttttgccataaccttcctggttgttcctgttatgggcattacagggaatccaaattccaggagcttggtgcggagctccgcatcggttaatttgtcaacatctaccatctttgtttgtcagtggaaagattggagataaataaaataaatacgtttgggattatttaggctgtaggcacgatattcacaattcacatttgaaaccaatccctcctaaaaaagtttaatgaccttgggtatttatatatacacaaaattacacaatttaataacatgcacgcggtgcgtatttgacttacatctaaaatttttataaaagtgagattatttgtatcgtatttgcagaattattataaggcacgaaagtagcctgaacgatctacaaaactcacgccaaccgcca

SEQ ID NO: 8736 - DNA, 985 bp, Diabrotica virgifera
  misc_feature (22)..(22): n is a, c, g, or t
  SmartBlast Evalue=2E-61; Info=WD repeat-containing protein 32- like protein n=1 Tax=Harpegnathos saltator RepID=E2BE31_9HYME
atatcgttccgattggaaaacnctgatcacttatttgcatcagtctatataaatttggccgaaatgatcttaagtctgtagctaaagtaagcaagttcaaatcatgaataataatcataaaaccattagtagtagatataaccatctttgaaccatcatttgttaatttcatcctcattaaaccattcatcaaaaaaactttatcatacatcgtgttagaatcgtttggagtttttaagttccatgcatatatactgccatcgaaagctgatgtaaccatcatttgttctttttgagaccattcaatattttttacccaattggagtgtccatgaagagtcttcgtacatttttttaaatttcgtatatcccacaattttatcgatgtatcatctgaacatgtggcaaactgtttatcatcgagaaacttcacacaattaacacagttctgatgggcatcagaaattttatacattaatttttgatttgctgcatcaaatagtattatctgtttcccttcacatgcagcaaccaataatctcccatcaagactgaattctaaattgaaaattccacctaggccacttttggagtaatatcctacattattcccatcatattggtaaaaattactgtatagtttaaaagccacagaatcacgtatatttagtggatctttaacaaaaccagaagcccgtttttcaatgagattgaacaaattagcactgttactggaatatttcgcttgtactcttacaggtcccattatttagacttctagaaatgttcagtacctaaagtacattaaatagcggaggcttcctggttagtagaaatgacagtcgtcgattgtacatttgtcttctcttgagtgtttatttttgaatgattaagtaataaaccaatttgttgttatgaaaaataggaacattggcgaatccacatttacaatcaatcaatcgtattcttattattttgaatgatt

SEQ ID NO: 8737 - DNA, 979 bp, Diabrotica virgifera
tattgatataaactaagacaaggctattatttatattggaacctaagtatttcttctacgttactatttattgctgtatgagattttgtttttcaaaatggaaagaattttccgaacaactatgaatacactcctcaacatttcattggtctgtacagatttatggactttccatttttgtatttaatttagaaaatattagagtttaatattttataaaaccttgaatttcctggagaggagtgcaaaaagcccagtttttgtaagtaaatgttatgttttccatagcaattcgccaggtttatatattccttaaccctttcactgctaacttttgaaataaggcatgtctagaagcggcagttcttattggcaataaaagtgagaatgtgcacgtgtcacggatccgtgccagggcgaatattaacattgcgcatgcacgacacggatccgtgacacgcgcatgtcacggcacggatccgtgacacgcgcatgtcatgcgtagcaaaagggttaataacacgtttttagaaaatatttaaagtaattagtaaaataatggaaaacatattgcgacatttatgttacagtgaaattccaggaagttcaaaaccaaaggaaatttctgagtgtataaaaagagtatgtaaaagtttcctgtttcttcacagatttttttgtttgttgttttttaatgatctattagtcatttataaattttttgatactgttctttatcatcataacatattaccattactagagtagtttaagtaatttatttgttttttatgtattcctttaacgtaggcattcttttatgtattaataatatgaagtacattccatttttagttggttttttttagtttccttcgatactgaatgtctcattgtaatttgaaactattcagatgaaatgcgcccagatttaataaaatacagcaaacaccaaatatagtgacgctttttatctgaa

SEQ ID NO: 8738 - DNA, 973 bp, Diabrotica virgifera
ggaattttccacccccgagaaggggtgggaaccgcacccaggacaaaagcacacatcggcatagggtagactttgaataaggagatattttcaggctattcctaaaatttcattaaaatccatgcagtaggatagaattcggaggtaataacctgttcttgctctcattgactgccctaatattacaattaacaattcgaagttttatttctggagaaataaacccttctattgggactattttctggttacgcctgtattcctggtttctatcacaggagagcgtcgataatccgaactaattggtacaggggtagttcggattatcgaacatatgtttaaaatacatacaaagctcataaacatagtacatatattatatatgtacatacgttttagttacaaggaataaaacacctgcaatccgcggtcatatttgccgatattgtcatattaaatccaaaattcggtccgcgatttatatttttttaattttataatttttttttgcgttcggattaccagggttcggattatcgacgctctactgtacttgcaaatcaaacgaacgataaatgaaagaagacacggggaagtctaaaatttgcactttactacctgtatattcatcaaggaaaatttcaacgaaatcttggtccctatactcagaaaggaacaaactaatttaaaatgaaacagagatatgtatacagtattcggcaccgctctcatgaggttttccagtgccgtaacgctttcctggaggcattccaactttgatttattgttagcggattgcgcttcttcctccgggctggacgtatccgagactaatcttttctttttcttgtttgtgctcttggtcctctgtgtttgccactcatcttcgcagctttcggtatctgggctactcgcttcccctttttgtgcttctaatcttgtttcttttcctttggtcttctctcttcttttt

SEQ ID NO: 8739 - DNA, 983 bp, Diabrotica virgifera
  SmartBlast Evalue=2E-91; Info="Ras-related protein Rab-10, putative n=1 Tax=Aedes aegypti RepID=Q17J36_AEDAE"
gtttggcagattggcagtatctatttttgatgtttttgataggcttcaataaaaaaaaattatataaaaatggcaaaaaagacatacgatctattgtttaaacttttattaattggtgattccggagtagggaaaacatgtatattattccgattttcagatgatgcattcacaactacatttatatcaacaataggtatagatttcaaaataaaaactgttgaattgagaggtaaaaaaatcaaactgcagatatgggatactgctggtcaagaaagatttcacaccatcacgacttcttactacagaggagcaatggggattatgttagtttatgatattaccaatgagaagagttttgaaaatatagtcaaatggttaagaaacatagatgagcatgctaatgaagatgtggagaagatgatattaggcaataaatgtgatatgacagacaagagggtggttagtaaagaaagaggagaaactatcgctcgtgaacataacatcagattcatggaaacatccgccaaggccaacataaacatagaacgagctttcagcgaactggcagaggccatcctggtgaaaacggccggaagagacgacccggtggacagggtgacggtagacataagaccaaccactacgaataagtcctgttgtaattagtaaaaaaaaattgcaaaaaaaaacaacgtaatttaggagtatatgcatgtgaactgatttctatacaagatgctcatatttagttttattttctgaacaagtcacttaattttgttgtgttcagtggaaattcggttgtactcaaattttcctttttaatgaaaacatttgtgaattaataaataacaaagacaacgtttttgtagaataatagaatatttattatgcgatagattaacagtttttaaaagatacacaagtttgaagcagttgtgccaattttagatgaataatgaaaacttatttctcgtatg

SEQ ID NO: 8740 - DNA, 975 bp, Diabrotica virgifera
agtacaccgagagaacaatttcttttctcctaaaacaccgatttctttgagcaatatttcttaaaagttaacatatcctattaacttaaacataccggttcacatataaagaaacgagttttttaaacacaactcaataatttcttacagataatttcttcaatactaagaaatgcattaaaggttacatttaattttcttatcctaaagtttttatttcttaaattgaaaactacaaatattttgcagtataagaaatataatgttaagttaatccatatttatatttgtgaacaagaaattttcttgcaatcaaataaatattttaaaccacaagaaataattcttcagaaataccctctgtagtaactgtggttataaaataaaaactttgtcattaatgccgaaatgttacttgcaaagagattttcttccacaaaagaattgcgcagattaactatttatgatttatcgtcagtgtttgtcaagatggcgtgatatgttcatgttcatatagatggatgttggatttattggtgttctttaaaaattaacggatattttgaaggtacgtacatatataggtattaaataaaagtaaattgagtaatttaagatgtaataataatattgttgcgtatccgaatggttaaaaaagaaatataatagtatctttatatgctttttaggtataatgatggacgactctgaaataaaggagcttattattctaactgggaaatatgccacaatttaaagctgggacagaatgatataatatatagcttcagaacaatattaagaaaggagttattaaccaactgcgggaccttccagaacttcatatacatgtaagtacctttttaaaaatgtgtatacttatgtatcaactataataggtttcttgaatgtatcgtcttctataaaaatatacaatacaacgctatatcaaacatggcgggtgcaacgctgagg

SEQ ID NO: 8741 - DNA, 983 bp, Diabrotica virgifera
attattaatggtaacatagaaaaatttcagaatacaatacaataatcgaagaaaactaattttccaagagtcattgacatatattttgcactgcgttggttaaacaaattggaactataaagtaaggatttaaaattttatgacttaaaatattaaagtaaaacacatgacagtttaataactctaatgcaataaaataaaaggttagactaatacccaactttattttacaattagggctgatagtagacaataaataaataatgtaataatacatttctggacctctgaggtaaactacactatatcatttcgagaaactgtgtttagcgtgtgtttgcaacaaagttaagagcacttagaatattaatacaaatctggtattagccataatggtttgatagacaatacgtctatattttaatgataatatataatcaatttctataatccaaataataaaacaagtggattgaaaaaacttgttaaaaaaacaacatgtcgacatagtgttgtagtttacctacgaggtccagatttgtgtatttacaaaacaaaacattaactattataaaaataaatataatgacattatattttgcagtatataaaattttatttggcaaagtttattgccaatcttcattagggacaacataaatgaaaagaagaagaaaaataagaaatatagaaaagctataggaacaggaacctaaatttcagaaactccttccaaaacggagataataatagctatcaaatctctgagaagaaacaagtccccgggaatcgacaaaattgctgccgaaatactaaaaactgacccgtaggtatctaactgctgaacttttgctcctaataatccgagaggtgtgggaaacaaaccgcactccagcagtctagaaaactataacattaccaagctttcaaaaaaggacaacctcacactgtgcaaaaattggagaataataaccttgcttacc

SEQ ID NO: 8742 - DNA, 984 bp, Diabrotica virgifera
cagcaacaagatgggagtctctattctcctttttttagtaactgtaacatttatctgcgtaaattcacaactgcaacagtaccaatacgcattgccagattattcccttcaaaatgtggaacctaattacaatcagcttttacaacaacaagttccttactaccttcaggcacctcaggaacagacttattatccggtgagccaacaacagccagtttatccaactaatggcttatccaatgtttatccaactaatggccaaggagtatattatccatatccttatcaatatgcagttcctgatcaaccacaatttactccagaacaattacaacaaattgcattacaacagttaccacaatctctggttttacctcagcaaatagggaatgcaaaaaataacactgaaccacagcctgtggccgtaaagacagaacaacctaattcatttgccaatgttaaaacggaaatcattgatcttaatcctcaagattttagaagagtgatgcaacgactaaatgctagacccataattgtatcgtatgaaagacgtgtggtaggaagtggatcaggacgtcctcattataccgtgacgacaaattctaagcagaccaatgaaactgacgtcccaaagtcgatcgaaacttacaaaacgacatccaaggtatactcatttaataaaacttttgttttacatcctaccgatggtcaaaaggttgtcaacttacattttgtaaacggggagcaagtttctgatagtcccgaatcagatgaatctgaaactactactatagggaccacagaagccccaactactactacagaaagtgaaaatccggatcctattaataagtggttttagatactctctttagacaagtataaaacagtcttataacaatgttactaaaataaaatacttcttatatttatgatcgaaactattgtacacaatttaaaaataatataaatgaatgttttgtt

SEQ ID NO: 8743 - DNA, 981 bp, Diabrotica virgifera
gttccattatatctttgcacaaacatcatgattcatttgcaaacaagttaaatcatatattaagtgaaacagatgttgatatgtaatatcattgatatgtactgtcaatgtaataattaggaaatggctattattggtgcacatattttatagttatattgtgcatttatatgttacaatatatttaacacaatataactttataaaataaacacaatacaagttataaattcaaataaacacaacaattggtgctaatgtcactgtcactgaaaattataatcatcaaaattcatagtaaacaaggacatgccatattgtttatcctcgtttaaattattgtggtttctatgaacaagcagtttaattttgcgatactagtttctgtgagaacaaagatacctagtttaaaaaataattcgtgaataattttatgcatgttcaaagacagaatggaaggactatatctgaccaagtacatattgcatttttatacagtgatgagtgcgccaataactggtaaaatagcacaaaagatggaaaacgtattaatttgtgagataaaaagaaatggaactagtcgagttgggaaatttaacgatattaacctttagacgtatcgcacaagtttagcagactactgttacattgacagttttacatactcctgaacatagttgacatactcctctgatacgtgaaaaggagggaaataatgaatataatgtaaatttaaaggttaatatcgctaaatttcccagctcctactagtttatttcttcctatttcacaacttaataggtcttctgtctttcgcgctattttgccggttattaaggtgctcatcactgtatattaaaatgattatttattatgttctgctgtaagcgtctggcagctgctaaatcaggattggctgttggtcgtatattaacaacattaccagcagcatacatgccataatctggctctacaggatga

SEQ ID NO: 8744 - DNA, 981 bp, Diabrotica virgifera
  SmartBlast Evalue=2E-22; Info=Leucine-rich repeat-containing protein n=1 Tax=Polysphondylium pallidum RepID=D3BJA2_POLPA
cctatgtgtatgcaatatatgggatacaataaataagcaaaagtagaaaacaattgatatataacacaccatgattaaaaatatttgtacaaaaatgttctttattaaaatactgaataaaaaataataagtatgtaatattaaacaataaaatttttggtttcggtttctgaattcgaggttccaacacatgataacattactgccatttgctgcgacatcctttgtgacatccttcgcatataatccggcatagtttgctgtgctttggttgcaataagttccagaacatctttctggtagagcttacgtgacttcttacgctcgtcttcagtgacgggcttgtcatccaggtggactaactttgggaaaagggacaagagaaataatctgtatctcatttgctcaacatttgatcctccatttatataaaatggtagacctgggttgcccataagtgacaaatatttcaaattaggacaagaactacttaatcgatatacccaacgatataaatccaaaattttacaattattcatccatagtaattcgagttttggcagaaacggcaaattttgattagacgtaatatcattgtggtcacatattaaagttgttagttcttgaaactgttctaaaaaatccaatttttcaaattcgttatgactaatatccaaaattttcacagttggcgctacttcttcgagtaaaattttcggcattgagtgcattcgttcatgagccagggacagacgttgcaaactttgatcgttatcctctgcattatgttcttgaggaaatagcgtcatttggttcaaggttttgtccaacaacatcaatgttctaatcgaagtcatatctaaaccaacatcgatttcattttcgtaatattgttctcttaaatgcttcagctcaacaacccgaacatctggatgttcatcattattgtgtctgtaaacaattttgttaccccaacacaat

SEQ ID NO: 8745 - DNA, 972 bp, Diabrotica virgifera
  SmartBlast Evalue=2E-14; Info=Im:7162964 protein n=2 Tax=Danio rerio RepID=A7MBV3_DANRE
tgtaaatgaagaaaagaagtcagtcagtttagtttatacatttttgaagttaaaattgaaaaatcaacaacttcaaaatggtattaattcgcccagaagaaaatcagatctctagcgaagcagaaggacaagtcgctgcagttagagtaaaagctccgaaaaggattttgcatttttcagatggaatcttagaggaatacagcacagatgaagaagacaacactgatagcataaaaaatcaacctcttgttgatccttctaccttgacatggggaccttggttttggtataaggcttggcgtgcaggaaatacaactttaggcgctatggatacggcaggagaatttcttgctcactttttggcattaccactccaagatactatttcgaacttgaagagtacaagagaagggaagaccagaagagaagacagcacgataaagaagctggttggtcacagccatccggttccagtgtttctgtccccttgaaagatatgggtggagccaacaaaccaattgatgtttaaaccaagtgttcaaaaattgggagcttgtaacatgtacctcaaaaagatatatttactcaaagtgttttaagtgtttttattatacagggttgcgaaggagtctggcagcacggttgtttctccgaaaccgctagaaggatttttatagattttggtgggtggggtcttctaatgcggccgatattatagtgtcattgcattgttgtcaggtcttccgtttttctggagatctaatgaactgtcttatttcaaatggaacacgctgtatatattttgcgttttgaagtccttaagaaatactgattgtttttcatgttatgttccctatacctaagatgccataatttcggagttggtgatacatttgttaaaaaaaaatttaacaagttgtgaaactcaattttttcggcccgtgtagacattattttgggttctttgcatca

SEQ ID NO: 8746 - DNA, 962 bp, Diabrotica virgifera
  SmartBlast Evalue=2E-32; Info=Reverse transcriptase (Fragment) n=1 Tax=Penaeus monodon RepID=Q1HW07_PENMO
ataaaaaatgagaaagaaataatacaaagatggaaggaatacttcgaagagatatatgctaagcatgaaataactcaaatcatagaagatgaagtagaatcaccagagctagaagtgaatattggagaaattacaatggaagaaattggaaacactctaaaactactaaaaaatggcaaagccgcaggaatcgacaatatacccattgacataataaaagcagacaccgagcagtcagtagagatgctacatacacttttgaataaaatatggacggacgaagaattgccaaaggagtggaaagagggattgattataaaaatacccaaaaaggagacctgagcaaatgcaacaattggcgtgcaataacactactaagtgccacatccaaagtgctgaccaaaatcattttggaaagattgaagccggaactagataaaaaactgagaaacaaccaagcaggcttccgttccaaccattccactattgatcacatttgcacccttagaattatcttggaacaaacaaatgaatggaataaagatatagatgtgagttttatcgacttcgaaaaggcctttgaccgtgtaaatagggcacagatgtggaaaatccttattatatgggataccacaaaaaatcataaactttattaaactcttctacgaaggatacaaagctaaactagaacattcaggtgaaataacggaagaaataggcatagaaagtgaagtcaaacagggttgtatactagcctattccttattctgatacattaggtaatgtgaaaagtaactgacgatcgaataggcatcagatggatcatattcaaacagttagatcttgaagttccgaaccgaaccctcaaaaaataataaccatccaaataataaaataatgataaagtagaagagataagcaagttcacatatttgtgatcaatcatggaaaggagcagggac

SEQ ID NO: 8747 - DNA, 974 bp, Diabrotica virgifera
  SmartBlast Evalue=1E-121; Info=Protein purity of essence n=2 Tax=Formicidae RepID=E2AZ34_9HYME
cagaccataagacagttgctttcggcgcatatagtacgaaggattgcgatgtgttgtatgacgtctacccaaggtcgtagacagcacttagcagtatcacatgaaaagggcaaaataaccgtattacaactgtcagctttacttaaacaagctgattcgtctactagaaagttgacattaacaagactatctacagcaccaataccttttactgtactatcgctatcaagtaatctttgtaacgaagactttttggcagtctgtggattgaaggattgccatgtactcacattcacctctgggggatcagtttgtgatcatttagtcttgcatccccaattagaaactggaaatttcatcataaaagctatatggctgcctggttctcaaaccaaattagctctcgtaacagcagactttgtcaaaatctacgacttagccacggatgcattaagtcctcagtactactttttggtaccgagtggaaagatacgggattgtacgttcatgtacgatgaaggcacttatcacattttattaatgtcttcaccgggacacatatacaccgaaattttaaatgatgattcctctacgaagtatggttcattttatgtgacgaataccttagaagtttttcatttagaagcagcggatgtcattgggcaagtagccggaggtggagtatccatctattactcacatactcttggtctcctattctatagctacgcccaaggaaaaagtttcatatctcccatcaatcccaaaagcaacagtctaccgttggtgtttgccataaatctaccgcaaaccaataacaccacttcaaaaagcaatggttcgaaaaattctgccaaccaaccgttatgccaatggaccgagatcccaaaccatcccggtttgatttgttgcgccatgcaatcgaataacaatcctgttattttgatgcttaagccagacactattttgataca

SEQ ID NO: 8748 - DNA, 979 bp, Diabrotica virgifera
  SmartBlast Evalue=5E-46; Info=Pol polyprotein (Fragment) n=1 Tax=Drosophila buzzatii RepID=A1BPH1_DROBU
tttaataggttcgaattcgctgaaattgttagaaaacacggatattaatgttatgcctatttcttctttacaagtctctactgcagatggtgctatccagtcaattacaggtaaatttgacacagaaatcgtagttgccaatattcggaaaatgattacattttatgttatcccttcagttaaaaattctataattcttggcatggatttcttaaatgcatttaatagtacattaaactgttcagatttttcgttgtttatatcttcctttaatgtcgcaactgtaagtgccattcgtgagttctctagtttgtctagcttagaacaaaaccagttagagaatattatctctaaattttcttctatatcttccaaagataaattaggccgtacacatttaatatctcatactatcgaagtgaacacttcaactccgtttagacaatatcaatatcccatacctcaggcatggcaagcagatttaggtaaagaaattgattcgatgctctctctaaacattatcgaacattcaaattcttcatattgttcgccgttatggatgacaaagaagaaggatggatcattccgagtatgcttcgatggtcgcaaacttaatagtatcactactaatcgagatgcttatcccatccctcggatagatataattctgagcaaacttcagaatgccaaatatatctcttcgatcgatttatccaaagccttcttacaaattccgttaagcgaagagagtaagaagtatactgctttcgctgtcagtggtaaagggttatttcaatttgtcacaatgcctttcggtctagtttcagctccgcaaacaatgtgtcgtttaatggacttggttattggtcccaactcgaaccattcgtattctattatttagacgacatcatagttgttactcctgatttttcgtcacatattgaaatattggagaagttattttcacgccttaaagagg

SEQ ID NO: 8749 - DNA, 976 bp, Diabrotica virgifera
  SmartBlast Evalue=9E-54; Info=Endonuclease-reverse transcriptase n=1 Tax=Bombyx mori RepID=D7F170_BOMMO
ttagttatagacttccaagcaatatcaggtagaatatattatttgataataagaggaaagtacagtaaaattagcatcattaatgcacatgcccccactgaagaaaaagacctagaaaccaagacagagtgctatgagaagctaagtaatttgatggataaaattcagaaatatgacataaagataatcgtaggagatatgaatgccaaaataggaagagaagagatttacagaagtataacgggtggaaaaagtttgcataaggaatcaaatgaaaatgggaaaaaattaattgaatttgcaacagaaaataaaatgaaaattgtaagcacaagatttgaccataaggatattcataagataacttggatatctccagatggaaggacaaaaaaccagatagaccacgtattaatagaaagtaaacatatcagagcaattaccgattccagaagctacagaggggcagataccaatagcgatcatattctaacgatagccaaacttaaacaagagctgccaagaaacccaagaacagcaaaagaaagattaacatacaagatagaattacttaaagaagaaaaaacggcaaacagatttgtggcagagataaataaaagacttcgttaccccaccgcagaagatattgatgaagaatggaggaatatacagatagcgatgacagaagcaacggaactatgtctaggaaaagtacaagcagagaaacgaagagactggtttgacgaggattgtaaaatagcattgatacgtagaaataaagcaaaaatagaaaaagacaaaaataatacacaggatacgacagaaaaatataaaatggcaagaagagaagtataacaaatttgtaaaacaaatctgcagaaaaagaaaagagaacattttgacaaacgtacagtagggaaacagatatttaggcttaagatgacaatattttaatttttctgtgtggtttcttaaa

SEQ ID NO: 8750 - DNA, 981 bp, Diabrotica virgifera
cttttcgtttaatgttagcgaactttttattgttggcggggtagaagctcaggtcccagccgttgaaagtggcgttgttgcgcaagttgttcttgttacgagctaaacagttgagacgttgtttagtttggttgcgagctttcattgtatcgtgactttctttggcatgggatctgtttccgttgccgattttcaaattcttcctggtcgatttcttcttgattggagaagtaaccaacggagacgaggaggcggtgacgtttctccacttgggtatcaacgacaacaatttagattcggagggtgattgcggacaaagaggggggaaagcggcgtaatacttttcggcaagttcttgaggcgtgatcttcttggattcgtagacagtttcagctataacttctgacgagttaaagtggggaaacgtggtttcgctattgacctccttcagtttttcacaaagttcgtcaaccagagactctatttcgcagttttttttagagtgagaatatggaaactggaaatcgtcctctggatacaagacgtcgactgtatgtgaatgtagcaaactgaggatatagcgagtatatactactgcatcgataccacgagcttccaactgttcatctagccaattagagacggccgaaggcattgacaccacttgagggtacttcataatatgtttaaaaataaatgtctgaggtgccgcgttaggatttatagagactttttctctaatggggggccaaacaattgtttgcaggctctcctcgtttagaagaaacatggtttaaagctgctgtccggacatcttgatagggaaaatgttgtattagtgtattatgtagtttagtgcggaaatcgtcttctgtgtaacgccattgtagctataccttcctgttaggggcggatgttgaataacaaaattcctccacacactgaagaatttaacaaaacatggcagctaaggcgctacgg

SEQ ID NO: 8751 - DNA, 980 bp, Diabrotica virgifera
tcggtatgaagcgttttaagggtgtaatggtgaggagaagatagaagatgaaacagagggaggtataatggtatacgtaaaatatgtaatgtaagtcattaacaaagatcgaatgcaagaaccctatatttttatctagatctacgccagattaccggtactcaaatacaaaagtaatcatagtaatcaaatcatttttatcccttaaacagatcggtgaaggttgttgttatatcggaatacctatacaaaatacctacctactgagaaataggattctcgatatgattaccggtacttaaatacaaacgtaatcaaagtaacgatttgtaacgaatactcgaaagtaactataataacatcactacttcccactaatcgttttcctattgggaaaccgtttctcatcgtctttactactcgactttcctgatttccgttccagtgacagtttcctgacgatcatttcagtaatcgggtatgcaagtactcattgggctgacctgcgcactaaaatccgttctcggtttttacatcaaaaaagttgattttttttggccggactttttcaaaggaactacattaagggattgaagaactcttatttgaaatgacatattttaaaaggtaacactgctcgaatatgcatccttttacgtgttgtgagcaaatatgtatccccaaagttttagttttatttaaattccgtttacagagttatttaaagtattgtaaaaactgtattgtatctagtaattggtttattggatttttaattgtatgtatcacgtaacaggttagcaagatatcatttataagataaaaaacttagtataccctattccactaacatacgcctgttttggattgcttcgacaacgaatgttttactgtgcaaaataagaagaacgaaagtaaattgcaaattaaattgttgtttattgcaataattattagcgccatttagtttcttacttctt

SEQ ID NO: 8752 - DNA, 954 bp, Diabrotica virgifera
  SmartBlast Evalue=7E-26; Info=Zinc finger MYM-type protein 1 (Fragment) n=1 Tax=Camponotus floridanus RepID=E2AT34_9HYME
aagtattattcaattatattcgacagcactccagatctttctcataaagatcaaacaagtcaggtattaagatacgtagtcattgaaaatcaggaagtaaaagtaatggaatcctttatagatttcattgaaactacaaagctagtgaaggaatttcaaagatgattttggacaagattcaagctgatggcctagatataagcaactgtaaaggccaagcatatgataatgctgctgttatggctggaaagtattcaggaattcagcaaataattcatgaaataaaccctaaagctgaattcgtacccttctcaaatcattcgttaaacatagtttgttacacgctgccccagttgaggtgtattcagtaacttttttcgcactttagaacgttgctattctttttttttgctcatcgacacatcgttgggaagttctgatagcagctacaggcaaaagaaggattccagacacgcggtggagtgcaagaggcgatgccgtaaatgtgacatggcatcattacaaagacattctcgccactttggaaaaactgacagaggcaagtgaaaacttaaatactaggacagatgcaggtgctttactagtttcgatgcagtcattttcctttcttgttttttgggtctgtggcaactggtgctacatgaagtgaatgatgcacaaaaatatttacaaacgaggggacttgacatataagattgtgcgctcataagatattgacagagaaaagagaggaatgggcaaatggcgctgtaggttatgcaaaaatatgtgtaaataacttgaaatttccataaatcctcgaaggcgcataacaagaaagcatatttttgatgtcggaactaaaggtgctaacttttcttatgaaaatgagttgagacgaaagctgttttttcgttagatagagttgttgtagaaattcgtgagcggtttcaa

SEQ ID NO: 8753 - DNA, 979 bp, Diabrotica virgifera
  SmartBlast Evalue=3E-24; Info="ATP synthase lipid-binding protein, mitochondrial n=1 Tax=Harpegnathos saltator RepID= E2BV68_9HYME"
ttaaattttaagtatctttctttattgctatttaattgaatccagtatagtaaaaagtaggtataaataaaatgaaaacaatttattatccttaaaaataattgataacagctctgatcgtatatataacggagttttataaaaaaagaataatgcttatagaggactaaggattgtataataaaatttctaacaatgtacaataggtttactgcttccattttcctagaaaacacacatgacagactctaataaatacatgccaatcttcgttgaaagtaagcccaaattctctcgatgttagtagaaatgaaaagaattggacacatattcatccagagcgcgcacattaaattaataaaagtcctattgaattttatttaagttaaaaatatgagttacatggtgttgacgtaacgaacggtggaataagatgatgttgcccgtaaaggccgattatttagaaggcgaacaataacaagaacgccatcataagacagaagagacccatagcttcggacaaggcgaaccctaagatggcgtatgagaagagttgttgttttaggctagggtttctggcgtaaccgatgatgagtgaaccgaacactgttccaataccagctcctgatccagctactccaactgtggcagcaccagcaccaatgaatttagctgcagagtcaatgtctctgctgactggtgtagtttggaaactgcggatagcggggaggagggtaggttgcttgtgttgttgcacattctgtacctgtatttgactttggtttactacactgctcagtggcctcaagtattgttttgtgttggcaacgagtgcgcttctggtggcaggggcaatcagtctagcacaggcaaacatttttgtattttatatcacgtccgctatctacaagccaaagaacagtgtagtgaattacgcgaacttatcggaactgcaatagccgcccaatcggaatgaaag

SEQ ID NO: 8754 - DNA, 964 bp, Diabrotica virgifera
actcttggttgtatgtcaggggtgcgcaataactatctcctggagctcaccaagttttgttttcgtagctcaactggtcttgagcaatagataagttggcggtttgaagtggaaatttcaacacctcgtatctcgtaaacgaagcatttgcggacatatgtttgtggagcggactggaattattttttcatgcgaattggcccttaaaatttttcatacttatttactaacaccctgtatagaagcattcgaaatggttaaaaacgtggtcacatagctatggactgtactgtggatacaatatctgagacacgtaatgaggacagcaatatgaaatgctaaaactgatgatatagggaaagatgaagagaaaaaggagtataagaagaagaagaagagtggcatggttggaatttaagagactggtttaaatgcagttccatagaactcttgagagtagctgtagatagagatgatgatatccaacaatagccacagaatataaggattgacacagaattgagatgcttgacagaagctggaactggcaacagcgcaacggtaaataaggatagaataattgaaaaatgtaaagaataaaaaagaggtatatagtccataagagctcatattgaacggaaaacgtgagacagagtatagaccagctaaatggtgaacgataacacatgggaacatatagacagtcagtggcgtcgcacagggtgataacgtaacacctaagtttcataaaaaatataatgcataatgtttttttattgattttttaagtattacctcgaatattgcgtgttgaagggccctgtacattatagcaattactttgtatatagtatgcagatattaatattaattattgagctgtattgtataaaatatatagatgtatagtaattgtaatttgctaaaaaaatcaaacgtaagattaatacacaattatcaactg

SEQ ID NO: 8755 - DNA, 981 bp, Diabrotica virgifera
gttgtgtctggtgggtacgaggagctggtaaagtaatgaaggtcaaccaggacaaaggatgacgtttgtatttcagtatcactgtttttgatttattttgttcaacaattttgaaaattcttagacgttatgtctatttgtactaaaatagcttgctgagattttgtgaattattgagaaaatatgaattatttaacctggttacacctggccagtgtaaacgggtttatttctgatttatatatgaagattttttaaaagtatttgtaataaataatatatgagcaaaaacagcaagtttagcacacatttaagttgttttgtcgatattgggatccaaaaatttcaattaatttcagagtattgcaccatatgacgttaacatcgtaatccaatatggcgactagggtgcggttcgccatcttttcgagattcgagacgtagtaatagatcgatcgataggtacctattttattctgaggaggtttccaataagcatatttttacccaaaaactggtatgattcaaaataataaaatacttagaaggaagcttcggcttccattaggacctaaagccaatttagttggcatcttttagactttttgtagatacctattctattggttggcaagatggtcgtttattgttcagaagacttaagccccctttaagcgatctcttatagtacgggcgctactggcaaacttaggatggagttaaaaaatttacttattggttatctacccgagttttataaatttgtactaattttattctgatataaggactgtaaacaacaacatattcttacactttttttttttgtaaattagcgttctacattttaaaaactgtaacgaaatctattttgaaaacctactgtactacttattttaccaatttttgctgtcattttcttagacccttctactaaaatgataggacttttatactagttggcatttgtactgaaaaatc

SEQ ID NO: 8756 - DNA, 970 bp, Diabrotica virgifera
ataatcgaattgttaactcgaatacggcgtctaacattgattggataattatttttaacttcgtgccatttaatttttaatcgacggtatattaggcatccctaaaagtaataaacggtaatatcgcttttatatttacacatgcatattaaataatatattaaacaataatataaatacggagcagctattaaataaaatctttgacaacattgtaaaagcagtcatacgatgatagtcatatgatctgtataatataacttactgtgtatggttaactaatgatatagtttttatattcaaactggagtatatggtgaagtcatgtgtaatgagacgaaaatatgcattggcaagcataggtaacctttaagaagacattgtcatgtagggtaccaaagagtttgtatgaaaaatagaagaaataacacatcaatgagacaaaaaatgaatagttgttgggacagttcattgaccttttgttttgtcttcgttgtgaggtaaataaataaatatcataaatcacaaaaaacgtgatttatttatctactaaaacacgtcatttatttgaatattcaatattttattccattgagcacgaaattactacacatacctattgatattttgtcaagaagatggcgcttgttttaggttcaagtcatgtaggtataccatgctcagttaatgccgtctaactaagggtgtcttttgaattttaattataaatggacaaatctgcaacatttttattttagtcaaaatatcgttgtagattgctttcgtttcggtcccagtatattttttgttgttatttttgttgtcgaaaatatcacattcaatctcctatgtggtaaagataaagtctgtacttataaatttgtataaagttttatgtaatatttcttgttaaataggttcgtttattttttgtaactatattaaaatataacaaattgtgaataaacta

SEQ ID NO: 8757 - DNA, 977 bp, Diabrotica virgifera
  SmartBlast Evalue=8E-13; Info=Gag-like protein n=1 Tax=Danio rerio RepID=Q76IM2_DANRE
agcaaaataaccgcttttagtaaagacctatatacctgttttagcaggtgtacagggtcggacttacttttcacttaacgtttatcgaaataaattcaaacatggaatcacacaacagttctacaatacaagaccatcaaagtcaaataaacgcatcacagtcatactctttggcagcgtcgagagtgcaatttcctttaaagtcccaagcaattatctttagtgccttagaaaacaccaaacttcaagactaccttctcccacttggaaatataattcaaccgaaaaatataatcttctcttctagattatctaataatcgcatatgtatgtatttatccaataaacaaatagtggatgattttatgaataatcatggtcaaatagaaatacaaggtgaaattgtcagagcaagaaggttagttacaccagcggaacgacttgtgctctccggcgtatgtccttcaataccgcacgacttgctaatcaatgagttacaaaaaatcggcatagttcctgtctcccccatgacattcctcaaaattagtgcttctatgcctgagtacaatcacatccttagttttcgaagacaaatctatatcagtcctcacagtctaatactaccagagtcatttactcttgtttttgacaacacgatatatagaatattcatttctcaagacagtttagtttgctttagatgcaagaagccaggtcacattgcatcacaatgctccgaaccactagctcaactaaaccctaaccaaaataatgaagcatcggtatccagcgcaacaaatatatcttcacaagcacccaatgatacaaacccttctcagtgtgaacaaatgtctatttctaatgtcccggagataccgaacaaagtagatgcatcaaataaagacagtcacataattaatcaaccaaaacgtaactttgatgaaattatttcacctgaagcagatccatcttcaaaa

SEQ ID NO: 8758 - DNA, 973 bp, Diabrotica virgifera
caatccctctctaagaagtccaaatttttttattcagttttttacttaaattcagattgcaaggaattttctaaaaaccgcacctgtatacatctacgaagtattccgcaacatttcaatgtgttacaagattcctgtttatttgagacgcaaaaacagaatttgtaagaagttttgacaaaagtacagttctaatgcgtagatgaactttctagaacaaatgttgaaaatcaatttgattggtttgtttgaatttggtacaaagatcgaagctcgtaattggctctgaagaacggaagccggaaattgcgtagtgacaggatcaaggaattttggcaggagacggagaagaaagcaggcattcttacaatggtagtgaatcagtaaacatcgatagtcagtaaccggctttttgtgacgcaaaaagaatttccaagtaaatgggatctatcaaagttcttctgtgttgttgttaagtaggtgtaccatcagtttgatggtgtagcagttccttttttgatggtaaaagtgtaatatacgctttgtaaaaatactgcgtatgtatttatgaaagccggcatagtactaatatcgtagtgatgaattaaacccaagcctcccgtctcctggattagaaaacctatttcccgaggtaaataagcaaatttcttttgttttatggtattttcatggtataatggtatatggtgcaatcagtaattttccattgacattttccccttcgagtgacgtatgaactacgtacgtgctgtcaagtgtcatgtcaagtttcacaatggtgaagttttgaattttaaggtatagtgacttttaataattataaaattctcaaactaataacgttaatttctttcaacataaaaaaaataaatcttttggaacttaaaatacaaagatgaaaaagtaaattgttgaacagaacaaagaataattttgcttccatcattaaaat

SEQ ID NO: 8759 - DNA, 961 bp, Diabrotica virgifera
  SmartBlast Evalue=5E-18; Info=Endonuclease-reverse transcriptase n=1 Tax=Schistosoma mansoni RepID=Q4QQE8_SCHMA
gactcgcatgctggtagaccggtgttcgagacccagcacggcgagaacatctagacatttttaaaatgtctataggccccaggtcgactcagcctgaataaaatgagtactttgggtaaaaccaggggtaataataggcggttgaagcgtagcactggccctgttaccttccttgtataccgtaggccctagatatagcagactaccctgctataatcccaaagccgcgtcagcggtataaaataggagactattattattttattttttcttggcgccatagttgtaataaattaaagatagttacaaaaaccaatacaccaaatagcacaacaaacacaacgtttcatatacaacaaaatactaattaacgataattttataacactaggcttaaaaattcacattgtgattacacttaccccccccccttaacactaacatacatacacatacaaatacacactggagttcgacagggctgcgtcctatcaccgacactatttatcattgcaatagactcgatcctgaccaatgcaatcaaaaacaaaacaggaatacgatggaatgtgttcaatcaacttgaagatttgcagtttgcagatgacttctgcttgctcttctcagaaaagaggcaatacatgcagaaacaaaaccgaaataatagtaagaggcacaaaaaatgggtatgcacatcaatatccggaaaacaaaaataatgaaattaatacatctagggagatgggaatatacataaatgaataagaaataattgaaaatgtagaaaaaaatcaactacctaggaagtatactcgataataaaggaaaatagatgaagacgtagaaaacagaaatagtaaagcccgaattagcataccactcgttaaacaatatacggaaatctagagaactatccaaaaacacgaaaataaggatctttaacactaatgtaaaaagtgtc

SEQ ID NO: 8760 - DNA, 977 bp, Diabrotica virgifera
  SmartBlast Evalue=1E-145; Info="Regulator of nonsense transcripts, putative n=1 Tax=Pediculus humanus corporis RepID= E0VJF4_PEDHC"
cgcttatcgtagtcggcttctagctttactaatggaccaaagatgttttggtattggtaaccgtcttcataacggagaagtacctgttgtggctcctcatctacaccaggtttttctagatcctggaaagtggcatcgacattttccttccataattcttctaatttattgatctgttgcgcggaaatttgtctagcacgcaattgttcttgttccgaaggtatcttgactaaccacgtcaaaaaacaacggtcggcaatcaaaggtttccattgttcttgatcccaattcatatccttaagcgagttttgcgcagcacaaggttgtctgcacagtaggacaactacagaatctgctttagctggtatgaaacccaacacaaaaacgttgcgaactccacaactgtaacattccaaaattgtctctcctaatggcccatctttgtgtagggtaacttccttatgtttggctctgaccaaatgattgatgatatgacttccggaagtgtttcctcttccattgcagaaccacttcttgcagaggttgcacatgacgacacagtttggttcatggatgccacagtacttgcaggcataatcaggcagttctttagtattgaaatatccctcttcatcatcttcctcgaattgtaattctcccagagcgttagtggcagctgtgattttgttgacaatgttgttatttacctgtactccagacactttggggccagcatggtcatgttgggaggcctgtgtctgcgagggaattgtaaaatcggtaaagtcacattcggagccctgagtatccgctcctattaaatctgcatcttcggtgtccaaaaacgtgagtgtttgggaactcggtccgtatgcatccacactcattttatcattaatgtgctagcgattcgttccagtatcgataaagtgttttatccaaattacttgccttgtcgacagcaagcaccatttccc

SEQ ID NO: 8761 - DNA, 977 bp, Diabrotica virgifera
  SmartBlast Evalue=6E-88; Info=XTP3-transactivated gene B protein-like protein n=1 Tax=Harpegnathos saltator RepID=E2BLR9_ 9HYME
ctcgtataaatttcaagaattatatttgtatatttcggttgtattcattctatgattataacttaaactaaatctttgtacaactatagacattcagtagcctacattaatagtagctgttttctcagtctctgtaaaatctgtactgtctacttcaactagtccattctcatcagctttggacaagatatcacagatcagtggtgattctactcccaagatatattggcacaccttaggttcaagtaagtacaatgaaactgcattagagctactaggattctgtaaacatttcaacttaacttctgtctgtcttggtttaccagtttctttgcaaatagaacctccagagtacaagtgagacagctgttttctttgagctactggttttggtcgtttgtgtggattttcaagtatccaatcaagatgagcttgcttgttaaacacacctagatttatggacactcttttaccgtctttttccacgtgatactgctctactgactttccataacaaaactcaaacttccaccaaccagttccaccatgcaagcaattctttcctcgtaagaagttttctacaggtgccggatctaaaggtttagattctgcattacttacaggttcatctttatctttttccaattttatgagttctactttaaatcgatctaactctgatcttcttcttaactgtgctgaatcataattaagtttagccagactgtagggcattttgtagcttccatctataggcacacaatttaattgattctcccctgattccttgggtttatatcttgggtgggcacagagcaaaggtgataaaattatgatttcatagacacaagtttgtgattcatctacagaatagatctcgtgcttgccatgaatataacaaacataaagaacttttgtcatgcgaggtttgttgttgttcaaactacattgggtgccgttgtccataattacttcat

SEQ ID NO: 8762 - DNA, 978 bp, Diabrotica virgifera
  SmartBlast Evalue=5E-60; Info="Flavin reductase, putative n=1 Tax=Pediculus humanus corporis RepID=E0VYG9_PEDHC"
attgtcagttgcagtcataaggtatttgttgtgaccttcgttttagtttaatagcattaataaacacttcaacgacaataatatttgtcattcatccttatcaaaggttacttccacgtatttaataatttgtatgatatttattgatattgtaaaagtaagaagaaccggtaataattattattaataattaagaaaatggcaagaataatcatatttggttgcactggaatgaccggcatttgtgctgtagaagctgctgtaaagaaaggactaaatgtaaaggccttcgttagagatccagcaagactacccgagcatttaagaaacagtgttgaagttgtcacaggaaatgtcctggactacaaatccgtattggatggcataaaaggtgtgtctggagtagtggtagccctgggcacaaataatgatttgaaacctaccactgatttgagcacaggattgcaaaatattattaaagccatgaaagaactgaatgtcgacacaatttcagtgtgtctatctgcctttttgttctacgaagctggtaaagtgccaccaagattccaggatttaaatgctgagcatcaacgaatgtatgatgtgctaaaggtctcagggctaaaatatattgctgttttcccaccacacatagcagatgaacctttaggggagtatgtcacaaaacacgatgctgttccaggagccagagttatatctaaacgcagcttgggagcatttttagttgattccctcaatcaacctgaacattacggacaagctgtcggcatcagtaataaaacccaataaaaaatactttattaagagccaaagtaataaatgactgtattttgaaaattttattagttccttgtgataatttctataaaataaatagaatattaaataaattttatatgaacaaaattttatggtagctagttgtttatggtataattttaatgattataatatttc

SEQ ID NO: 8763 - DNA, 976 bp, Diabrotica virgifera
  SmartBlast Evalue=2E-21; Info=Putative cuticle protein n=1 Tax= Bombyx mori RepID=C0H6Z0_BOMMO
gaataattcggtgtttatccttattaagtgaaatttttttactacgaagtgtactgtgtgggagacaaaaaaaaacatgaagaatctgttgttcttgtttggatttaccagtattttatcagtattgctagccgcagatgttcgcctggtagacttagatccaccagaagctcaacagcaaatagaacaacaggaccagtctcttcactatgcgccaaaagtagaatcaaatgttcccgcagtaagatatttgggaaacgaacctcacaatgttctggaagatatttacttagctagacagtatcacggacaagacggaataggaggatacctttatggatacaacatcccagatattgccaaaactgagaaaaaagttgctggtggagatttaagaggggcgtacaattacattaatgatgatggaaccgaaatcaaggtcgaatattgggacgatggaactggattccatcaaatcgataatgttcctaaaatcttacccaagccaattgaagagtctccggaagttaaagctgaaaaggataagtttctagcaagatggcatgaagaggccgagagaaatcaacgtccagttgcttccccctatgatgctgatggtaattacgctagcggaccattatcgctccaaggacaagctgaatttaagaaaatgtttgaaaatcaaccccaaggtcagtactaccaacaacctagctctagttctggagtttaccagcaaaacggacaatatcaacccgctggacaataccaacaaactggacaataccaacaaactggacagtaccaacaacctggacagtaccaacaacctggacagtatcatcaatctggtcaaattaaacaagttcaacaaccaggacccttcaacaaggtcaatattatcaatcatctaaatcgcaatcttctggtcagcaccaacaacctggtcaataccaaccaactgatcaataccaac

SEQ ID NO: 8764 - DNA, 979 bp, Diabrotica virgifera
  SmartBlast Evalue=5E-10; Info=Stress protein n=1 Tax= Ruminococcus albus 7 RepID=E0L9V4_RUMAL
gagttagacactagagacccgaattttacgtagtagttaattaacttaaacacacagagaagacacacacacattgttcaaaaattacaacaaaaatgaaagtttacgtattatttataatatgtgcaattactttgcttcaatttgctgcatctgatcgcgcatctgacatgaaagccagaatagatcaacttaataggcagaatcaacaaggatcctatggcaatcaaccgactacaaataaatatggacaaaatggttcatataataatggatacaataatggccaacgttatcctaacagtaaccaaattggacaggtgaatcgcaatgcttccagggacctgtaccccaatctaccacaaaataataacggaaatcccaattgggcaaatcctaactacaatccaaatggaggtagctatggtaataataataacaataacaataacaggtatcctgctactggttacaataacggccagtcaaaccccaatgatccgtataacagaaataatggatataactccaaccaaaaccaacccggatctcaaggatacaattcaggaagcaatggatacaactccggaactaaatatccctataatcaaggtcaaaatggtgcaaaccaaggatatcacaactctggaagtccaggatatcctatcactggaagtatgggttatcccaatactggaagccaaggctaccccaacaccggaagccaaggttaccaaaacactggaagccaaggttaccacaacactggaagtccaggttactcaaacacgggaagtcaaggttaccccatcactggaagccaaggttaccccaatacaggttacaatcaaggcaatcaaggttatcctaactcatacaattctggtaatcaggggtccagatattaattaaatacttaatataatacatacagagaaggtttatatttaaaataggattattaaaaataaatatttat

SEQ ID NO: 8765 - DNA, 978 bp, Diabrotica virgifera
  SmartBlast Evalue=5E-21; Info=Activating signal cointegrator 1 n=1 Tax=Culex quinquefasciatus RepID=B0WQK0_CULQU
caatattgtacattcattgtatttgtaccaagaaaattaaaaatgggtgatactgctataataaattatttaaacgtaattttaggaaacgatgtatcaaacgacatcgtcagttacatcaaaagtattaagagtgaagacgattatgaagagtttatggaaaatataatagatagatccaatttagcacataaaaattcttatgatggaatcaggaatattatatttcggaaaactgcagaaaaggaaaaaccagagataacaaatgcaaacaaaaagggcaaaaagaagtttaaggacataaatgtgtatcaagaaaaaaagaaagaaaaggaaggtcgtcaagtctgtgactgcttgggacaagagcatgattttatgaataattgcatggtatgtggtaggattcattgtatagaggaaggaccaggaccatgtctgttttgtggaaatcacataactgtaaggggtgaggaagtattgaatgggagaaaacaaaaatcaattatgaaaccaaaagaaaacaaagtgttcgatgatgataacgactatttcaaagtaaattccaaaaagaaggatggaaaagatgacaaaagaaaaatgattgttgcattagattttgcttctagaaaagttattgaaggtaccaaagaagatgaaaaaataaggaaaaggttacttaaagaatctatagagcatttaaagaaggttgaacaaatgtacaaagacatccagaagcattcagaaacatcatatcaaagaaatatagtagagaatgcaaatgaagatttagttaacctattgatccagatgagacacaaaaaaccaccaggcaaagaaaatctgggcgaagaggactcttctatgccgattattgactatggaactagaatatttgatgaagattctattgtaaatactgatcatggtttatgccttagtatgcatcaaccgtgggctagtttgttagttgcagga

SEQ ID NO: 8766 - DNA, 976 bp, Diabrotica virgifera
tttaaatagtaaaaattttaatcttaaaagaaatatacatttacaatacatgcatttaaccatttccaaatccccttacaaacataattttttcttctattaaatttggttcacctttggagttgtttccttggccagtttttgtaaatcgtccaatataccatgtacaaatggtccgaaagcattaattatatcatttataaacttctcaatcccaggttcattttcattttgtgctcttctccacatatcttttataacttctggaaacattgcaacaaatgctttattaaacaagtcctctaattcttggtcacccattaaaccatgaaattcgaccggaacggattggacatccacgtctagtgacaccctcgtacagaatgaagttgtatttacgtcaacctcgataatgctaaatgcaactgagaaattcagcaagcttaatgcgaaatctccgtctccaaatatatcaaacagctctccaatattacccgacatattatattctcctatgaccgtgatatttgggaacgtcacgtttagaatttgtggaatttcaaatacagcattgtgggaatggccaatccaaattgatagatttttaaaatgagcatctagcctaattgctggatgagaaatatttgcatcatatttgggtacttgaaagaaatatgtcgtgtcatcatcattatctttcaatgccttatccttatatcggtaacatatatttatagacgatgtaactaatagcgcattcgtcaagcaaatcaggagaattattatgtaagacttcattttttaattgtaccacaacacaatacgttcaatatcaaaagaaacaataaacccaactggctaaagcgtatctatctactaataaaaatgtgtatctatagatagtcaatctatcattttacgtaaattagtaacgaacaatatgtgcacagaaagaccaagtggtttttaaaggatg

SEQ ID NO: 8767 - DNA, 974 bp, Diabrotica virgifera
  SmartBlast Evalue=3E-53; Info=Forked protein (Fragment) n=1 Tax= Aedes aegypti RepID=Q177D9_AEDAE
cttcgtgctcagatctcaccatcgtcagtctagatggagacgaagcagataagcacgggccgaacttagtgaacaaacagcgagtgttacccttcatccccccctgttccccggaagtgcgaattcgaataacttgatcaagccttcggagtatctgaggagtatcagtgataagcggtcttcaattagttccgtgagaagtttatccgaaagtgacgatactgaaagcaagtttgaagagaaaaggttggacattgtgagggtcgctccaggaccaccgcctcctcctttaccggatttgaatctaaaagaggaaggaaacaacgaaatggttaaaaaacagaaccagccactctcggcgataagcattcaagatctgaactcagttcaactaagaagaaccgaaaaaatgacagcttcaaaaacattttctgctcctacaagaagtatgagtcttcaatgtcttcaaagtgaaccgtttctagcccagaagaccgacctaatagctgaactgaaaatgtccaaagatatcaccggaattaaaaaaatgaaaattgagcgagccaaatgcgaggagagtaaggggaaagaaatattttcggaaatttcaaagcagtttacaacaactaggtttgtagaaaaggttccagaaaaagacaacacaggaaatataattccagcatggaaaaggcaaatgttagcgaaaaaagcagctgaaaaggctcggaaagaattggaagaacaactgttgagggacgcagaggaaaaacggttgcaagcgataccacagtggaaacgacagcttttacaaaagaaagaggaggctgaatataaaataagatcaaccttatacactcccaaagtagtagacgagccaaaaataaagattcaagacacagaaataatttctagatctcccgacttaaaggacgagcacgagaacgaggagaatttttacaacgatgacagcatca

SEQ ID NO: 8768 - DNA, 977 bp, Diabrotica virgifera
  SmartBlast Evalue=1E-107; Info=Probable multidrug resistance- associated protein lethal(2)03659 n=1 Tax=Harpegnathos saltator RepID=E2B3S7_9HYME
tttttccgcaacgttccagaaaacagcacgggctcctgcggtattatagaaatatttgacctaagttttttcaaacagatagtcttcgtatcaacaccatcgataagaatactgccttcaatgtgagttagtcggaacaaagcttgaatcaaagaagactttccagctccagttcgtcctactataccaactttttctttaggtttgaccacaaaagtcaggtttttcaacacaaatggatcatcaggagaatatttcaacgacatgttgctgaactctacttctcctttttctggccaggtttctcgtggtttgttcgagggttggtctatttcttgctttagatctgcgtattcttgtactctttccacagacgtcatctgattttcaaactcactccactgtcgcattccccattggaacatgcccattaaagccatagcctgtgagagtgctagacctatattacctccaaattgctcacttttaatcaataataaagctgccagtaccaatccaatataaaccacacaaacaaaatcaagccaaaatccaaatgttctgttagcacctgcgaagatgaaataagccgaagtattcaaattttgataattgtcaaattcctttttgagtatttcttgggctttaaaagctctaattgttgtcagaccttgtaatgatgcagaaagatgtgtgaaaattggacttctggtaacagcttctattcgcttaacatctctactggtttggacgaaaactatcctcattaggtagaacaatacagcaagcaatacagttggtataacaatccatatggttagactgccaattaccaaacagatagagaaaacatataagccaatctgaacagtatccataagagtcattggtaaattttcatccataacaccaatatctttcgagaacctgtttaatattcttccagaaggattgatgttgaagaacctcataggact

SEQ ID NO: 8769 - DNA, 978 bp, Diabrotica virgifera
  SmartBlast Evalue=1E-118; Info=Ankyrin repeat domain-containing protein 13B n=2 Tax=Formicidae RepID=E2BSX3_9HYME
ttcggttctcgttttggtcactaattctacattggatgcgccgaataccttgcattcgtacccattcacaatttcagtcttgtcggatctccatccccacataccagccttatttctttcaaaactaattttttctgtatcaatatatgtggtaacgattggtgttgtcagtcgctgagaaacggattcttcgtttggcattaatatacttaaagaatcctcggtagtcttcatttgttcacagtaaacttgttggagatcgtgatctatctccatcataatagcaccatcattgtgtccttgaaaaacatagcttctatttcctctttgccaactggtatgatcaaatcctaaaagtgttgtgtctatcctaacactagacccttgtttgtaaaccttgtaaatatcacttgggcacatcctggatactaatggaacccaactggtaaactcccacttcatttctacataaaaatctggagcttctttcaatcggtgcaataactgtggaatacctgccattctactggtatacctctggaaatccctgctttccaaaactatctgcactagttccgggtcccctgtagcgactgcttcttgtacaactgtccaaccattcaaattttcgcaattaacattggcttcatgatttaacaaggttctagtagattccaaatgacctaatgttacagccagcattagaggagtcctacccctaacatcctgcttttctttatcatgctgtttggatgagaggagactccccaaacgttggtagtcatttttccagacacaccagtgcaaggggaattcggcttctatatacgcttctgtaaccattttagtattaattattccgtgacttttaaacttccaagttcgtcaactttgattttttacaataattaacattacttttgatgaatacgcctctactaactagaacttttattagtcatatttacagacatgttt

SEQ ID NO: 8770 - DNA, 976 bp, Diabrotica virgifera
ttgtacctgtcgatttgcctgttttctctttggaaattggctagcacactatcaatccttttctttgcttcttcggaggtacatcctacttcttcaactattaatatccatgcatcatttgtttttattttaagggcacccgaagtcccatttaatgacaatgttaacattatgtcatatagccatgtaaccaaagcacttaaagacccattttttatttcattttgaaactagctgtattgtttagtcctgcgtagatttttgtaagttacgagtgaaagaaacatttattttaaaattttaaaatacccttacaaaaaaaacctaaagaagtttagattttattttttattttacttgtttttgtacatttttcaaaaactttacgtgggactttatattatccatctacaacatctgtaaaaatttgggccttatatcatctaaagatccagagatatttgacatcaaatgttaaaaacctagtattcgggaaatcgcaaaaacataaaacactcttaacaggctataaagctaccagtacacagtaagttgaggtcagacattcaaaaaacaaattgtaaccatggatattttatactatgtataatgtgttatatatcgttgaaaagaaaagattccagagaataattttatagaaagagaaatcataacccaaaaaaccttaaaaattcaattttcgggctttggctgcccttaatataatattgcccatgttttggatttcatatcgcaggagagcgttcatataaatcaattagttctaaacattttttttttctgttccattccatttttttaagtgcagaactaatcaaaattcttgtttgattaaacatttgccacgaacacaacaaatatgttgaacgcccgtgcccacggagcatcaacgaacaaatgctcgcttttgatatgtcaatggttgcagtgtgctctgctcattcagtttgttcgg

SEQ ID NO: 8771 - DNA, 976 bp, Diabrotica virgifera
  misc_feature (937)..(937): n is a, c, g, or t
tacagatttcattcctctacaaatggtttctgatgtcttttgatgtttttgaattttgcattgagtttcctatggctagttttccaattaaccattcggaatatagctgattcttacactcaccggctcgaaacacggcaccctgataatttctgacgattgacctgttctttttttctgttttttttttttcaaatttgagaagcctttaacacgatttaccagaaattactaaagatagtttttgaaatctcttgtaaattgaaattttccagatattgttagaaaatctcaaccatattaaagttgtcgtctttcccttactttaatgttacaaggaggctacgtacgttctattgtttgtaccatttatgtttagtgatgtcaaaagtgtttaatattatcgtgattgtatctgtatcaattattggcaatttcagtatgtctttgagtgcagaaatttttgcatttattgttactcccattcaggagagaagaagtcaagataacgtagctaacagatttcacacatagtgtacaacgtgtttttacacgttttatagagacagaaatatatcctcagagaagaacttctcatcgggacgaccgttttatagcatcttcagtactaccaaactgtcatgcaactgctagatgttagaaatagtcttcatcatgtcagaatcgtaaatgttggtggactaaccattacaagacagttaaatgaagttaatttgtgagatagctatgaaaaatgtattgtttcccatgaatccagattttgtctacgtttgcttagaagagtctggagaagagatggtgaacgatataccaagtgcacctttaaccctagagtaagtttcaaggtggttcaggtatggtatgggctggtacatcttcagaaggcctacagaattgtacgttgtcattaggggtnctgataagcacataaatgagatactgcaagattatgtta

SEQ ID NO: 8772 - DNA, 976 bp, Diabrotica virgifera
  SmartBlast Evalue=1E-120; Info=Probable cytosolic iron-sulfur protein assembly protein Ciao1 n=1 Tax=Aedes aegypti RepID= CIAO1_AEDAE
cacttagaccttgtctaaggattcacacgcattctaaactaaataacatgatataaccttaaatattgtttctgttttatcttttatatggaaataagattgaaataaattagaatcatcatgggtaaattagaactagtacaaactctaaaaaaagataacggtagagtgtggaatctcgactggcatcctaaaggagacagtctagcctcctgtggtgaagaaaaatccatcagaatatggaccaaagacttgactggcaagtggtccaatagggtggtactaacagatggccacaaacgtacaataaggcaagtctcttggtcaccatgtggcaattacttagcctctggcagcttcgatgcaacaacctgtatatgggataagaaaagtggtgagtttgaatgtaatgcaactttagaaggacatgagaatgaagtcaaaagtatagcttggtcgaaatcgggacatttattagctacatgcagcagagacaagtctgtgtgggtttgggaagtagcagatgaagacgaatacgactgtgcagctgtattaaatgcccattcacaagacgttaaaaaggtaatttttcaccctgaaaaagatctactagcatcagcatcttatgatgatacaatcaagctcttccgagatgatcccaatgatggcgattgggtctgctgtgggaccctagcaggtcatgaatcaacagtttggagtataagctttgataaaactggtactagactggcctcttgcagtgatgataatacagttaaaatatggaaagaataccccccaggtaatccagaaggaattgctacacaggacggagactcagcatggaagtgtgtttgtacgttgtcaggacatcatgagagaaccatatatgatatacattggtgccatttaacaggctttatagctacagcatctggagacgatgcaattagaattttcaaagaagaagaaggat

SEQ ID NO: 8773 - DNA, 974 bp, Diabrotica virgifera
  SmartBlast Evalue=1E-61; Info=Huntingtin-interacting protein 1 n=1 Tax=Harpegnathos saltator RepID=E2BFH4_9HYME
ttcagcgaaccaaaaactgcttcctgaagttcgagtatatgatccaaataatcaaacatttctacagtcatctcgaaataattattaatatcatttccagcgatggactccagctcttcagcagtaactcctaaatttccaggaaacctgggatttctcatgtgaaattccaacttgtataataacaaagacgtatacaatcggatcatctttccgtatccctcttttaaatgaccccacaactttccaatctcatccagatcatttctatgcctttgactatccaccaagcaaagtggatgtccttctcttaacactttgtgaaccacgtgacagagcttccacgctacgatcctgtcatccatggcaggaagacgaagagcataggaccaaaatattttggcactttgtgtgtggaaagtaccgatgattgctgagcgaacatgcttctgttttactggcgtttcgttactgttgatagctttctgaagcgcttgagcgtatttctctaaatcccgataggtatactccttcgccatttttgggttatgctgtctctcctaaaggtcatgcaactctgctaatagcttttaaaaaaatttgttgttaagtctatcaatacgcatgcaatatctgagatttttcaaagacttctctttcaatctctaagctggtttccttggatgaagtactctaggtaaagaaagtgaagccatgtcaagaaaaaagttcacatacaccttttacacgattatttatttttacgcgcgtgatgacgaccgatatttacgaatcgcgaaaatattcaattttgacacaaaaacaacacaaatcggaaaaatatactgacaacaacggcactgacaccactgacactctgacactgacaaaataatttattgtttactgttttgttctgttcaagttttgttttgtcaagaatatttttgactttctatgtgatttggaatcgc

SEQ ID NO: 8774 - DNA, 972 bp, Diabrotica virgifera
  SmartBlast Evalue=4E-71; Info=UDP-glucuronosyl transferase n=1 Tax=Aedes aegypti RepID=Q1HRH8_AEDAE
tcaatgacgaagattcgtacgcagcgaaaaatcctcttggtatgatgaaaattttcaatatggttggtttaactgtaacagaagcaacgttatcccatcctacagtgcaagcattgataaagtcaggagagaagtttgatatcatgatactcacacaatatgcagtagaagcaacaaaagctttggctgcacattttggagctcatttagttctgtataatgacaatgctgcaacgtgctgggtaaatcattttgtaggaaactcgggcctaccttcattgaatcctgaactaatattcgattatccacaattgatgagttttaaacagagactagctaacactttgtatacgatagcaacttatgtaaaccataatttggtacaatatccagctcatgctgagctaataaagaaatacgtttcaaaagatatagacttgaccaaaattcaatatgatgtcgcattggtactatcaaattcgcatcctagcttaaacaatccagcaccatcagttccatgcatgaaagaaatagcagggtaccacgtcaaggaacctaaaccattgcctgctgatcttaaaaaatacttggatgaatctaagaacggagtcatttatttcagtatgggttccaatatttacagtaacagctttcccaaagaaaaaagggagagcatcatgaaagctttctctaaaagaaaagaaaacattttgtggaaatttgaagatacagacttgccaggaaagcctaagaatgtgagaattgaaaagtggttgccgcagtcagatttattagctcatccaaatgttaaactatttattactcacggaggattcttgagcactatcgaaactctttaccacggaataccaactgtcgcagtacctgtggttcacgatcagcaaacgaatgcaaaacaagcagaaaaaaatggttattccattgttgtagactataatactcttacagaac

SEQ ID NO: 8775 - DNA, 975 bp, Diabrotica virgifera
  SmartBlast Evalue=1E-103; Info=Purine nucleoside phosphorylase n=1 Tax=Camponotus floridanus RepID=E2A5F2_9HYME
atttttgaacgatttgtgtgaaaggtttattattatttattatttacatatattgcaaacatgaatacaatttttaacggtaacatcctgatgaatggaaatggagctctcaatggaaaaactaatggcacaaacgtagaaaatggagataacggagtatacacttacgaaactttaaacgaaactgcagaatttttgaagaatttggttcccatcaagcccaagattggtatcatctgtggctcaggcttgggtctattggaatgaaggtaccttggcagatgctttggatcagaaaatagcagtcccatacgaaaagattcccaattttcctgaaagcacagtaaaaggccacacaggagccctcgttttcggttatattggaggagttgctgtagtctgtatgaagggtcgtttccattattatgaaggatatcctctttggaaatgtgcgatgcccgtacgagtaatgaaactattaggaatcactcatctcatagctactaatgctgctggtggattaaatccaagatacaaagtaggagatattatgcttatcaaagatcacatcaacctcatgggttttgctggaaataatccacttcaaggacctaacgatgaaagattcggaccgagattccctcccatgaacaactcatacgacagacaactgataagagaagctaaaaggatagctaagggtctcggtttagaaaaggatatccatgaaggagtttacacctgcttaggaggacctaacttcgaaacggtagctgagctcagaatgttaaaaatgtggggagctgataccgtaggcatgtccacagtccacgaagtaatcacagcccgtcattgcgacttgacggtcctagctttcagtctcgtaaccaatgaatgtcttgtcgaatatgacaacacagaatttcctaatcacgaagaagtattggacgttggaaaagtaaggcaagaagtact

SEQ ID NO: 8776 - DNA, 966 bp, Diabrotica virgifera
  SmartBlast Evalue=2E-22; Info=Protein odr-4-like protein n=1 Tax=Camponotus floridanus RepID=E2A948_9HYME
tctaacagcttccgtaacttgactcacagttaactttggctgtacccataattgagaagctacttttcctagaagttgtaaactaccacaagattcgattatgttttcttctgtatcatttagtaagcactgagtttgtaagattgacactaacactggttttgtagcatccccactttcttggcccttattagatctagtatttctcgacttcttctttccagaaccttccaatggctcgtctttgtctttaaactctccatcaaataaaatactgctgttgataaattatcacatatttcatccataatgatcttgatatgtttctccaaaggccaatcattttcttctttgagcaaaaaccttaatttgttaagcttgatatcacactgtacatttgtccatcttttcgcaacagacttaacatcaacgttctgtacattatgactattaacatcatagcttcgactgtaatatttctttgtctttgaagaaaatggagcacaactttttcactggaatggttaccataaagatacttatttgtgtttagataattctggactgtttgtagtagtgactttatttttgaatgtaatgggtttaggatgtcatctggggctgttatgaaaatgcccaggacatacaatccaccgggtaacattcgagttgcttgttttgcatgatcagcaacccaactaggattgaaatcttctagacttttaggtgtaggagcagatttgccagcctttttatcctcgtccgtttgaaaaggcggcgtcttggcaaaatgaacgacatagtctttgtctaaacatgactgtcctacaataaggcctacagcatatacgttttcatctgctacggctgataaatatgataacaggttatcgtctatgattaaagttctgaccattatttacagtaaaactaagatttataaattttaacctatacaaatacaac

SEQ ID NO: 8777 - DNA, 977 bp, Diabrotica virgifera
  SmartBlast Evalue=1E-57; Info=Calmodulin n=3 Tax=Culicidae RepID=B0WS44_CULQU
aaacagtctcagctgtttcacctgtttggttacctgtactctcgactccgttatctgcacatttgacgtgtttcattcagacatcctttctattgaaaaaaaaatacttagttgtctgcctctatttgacgtaaaaaatggcacactattttaaagagaaggatattgacgaattcagagaatgcttttacttatttgcccgctctggaaccataaaaacactagatgaattaactgtcataatgagaagcttaggattatctccaactaagtctgaaatgactggatatttaaaacaaaagggaggaaaaatgtcgtttccagacttcttggaagtaatgtacattcactctaaggtggaaaacattccgaaagaagttgttgatgcattcaaggctgcagaccctggaaatactggaaaaatacctgcaaaacaactgcgctatttactacaaaactggggagaatgcttgtcaccaaaagaagtagataggatttttagagaagctaatgttacagctaatagcatggtgcgatatgaagatttcgtaaagatttcttgtgctccagttccagattattattagatgacagcattgtaagcatacctatatatttagtctactgggcttaaacgagctgcaataatttttgcttactattattcgcacacattatatttttatgaaattaatgtacctacttaagttgttaaataagagcaaggtccttctatttaatcatcttccattgtgtaaccttggattttttgatattatagaatctatttaacacttataattttactacagggactagttggtacataaattatattttatttaagtcatttacaaatcattgtattagggacactttttcctctagggcaataattgttagatcatttaaaaaatgttcaattttgattgtcagtattaaaaatatttatatttatttacaataaacaattctac

SEQ ID NO: 8778 - DNA, 973 bp, Diabrotica virgifera
cactgtataatctatacagtaaatatctacatctttgttatgtacaatatatgagtgggatggttttggattttattactccaaatcgtattttattgcattactatccatatataagtttgtttgctatctcgaaaactgcattatcaatcctaatgccatcatctcttactttttttgatttttaattcttaatatgcttttgtcttgcttccttttagtttaacgtttttagtttatcaatagttaatatagttttatgtagaatgtatgacctctgttagtcttcctgcgtttggatatacaataccgtttgcttactatacgtcttcacattctactctttttcatttgcttttaattttttgtaacgaataatagacctgacctgcacaaaaccttgaatacgaaagtaaatcaaagtaaagttcgtgtaacctcctgacctaggtttaatattgaggtccgtaccacgtcttaacaacgacttacgtagccaggaccgatgtatttacgtgtcctccgaagcacagcttcagttagtgtcaatgccgggcatccaacccggcttgttaagccagtaaaacagccactaagttaggatcgccactaatgactatattataataatacgatagtggtgaatttacgatttatgataaattaagaatcaatttatgggtaggagtcgcaagtaatcgaggcccatataaaatgtgaaaaaaataaaaagagtgaattcggacaagggagtaggaaaaaattacgttgatttcttttttaaaaataattatattattttatttgtttatttgttttcatttactcatttaagggcgtaggcgcaaaattttgctaccaattcgtcaatgtgttttaaatgtacctatttattttttagaatcctgagaaaactaataagtgatttttgaaagagttaaacgcagaataaaagattatattattaccgagg

SEQ ID NO: 8779 - DNA, 974 bp, Diabrotica virgifera
  SmartBlast Evalue=2E-69; Info=Ubiquitin carboxy-terminal hydrolase CG4265 n=1 Tax=Bombyx mori RepID=E5EVW1_BOMMO
gattaatatttatttatttggctccaatgctcatatcacaatttcagtacaaaaaataatatagaaaaacaaggcacgtacaaaagctacaccgtagaaatgagtaacagctgattttgcaaacaaaaatttaatcatagtaagaataagcttttagacagatcatttttcgatttttaagaagcctcggcctcaaccaatgccatcacagtaaaattaacatcttcagagtctctctcaataaattctttgcatacttttgcagcatcctccaaaaatgattcttgagttgtttttccgtgcgtaacaggaaaatcttttcgtccatctaattcgtaaagttctccatctttttctactaaggctacaaagtggtgattgacttgctcatcaggttggacctctgtttgaccttccatagcaagttcttgatgagtgttaatcagattaaaggctaaatcctctgcctttagcaagatatctcctctttcttcgggggtcatagtcttagactcagagagtaactttttaaatgctccttctgccaactgcaatctctcgtcattatttgcaatactgtgaatcaaagcaatagtaccacatgcatttgatactttctgtttcatataccatatatttggactaagctctggtgccttgttcaaatattcttccttttgtttctgggcgtgtgcatagaacttttcactgcagggaaacagtaggataacagcaatcaccggccggggcacccaagcaagtgcatctgtatctagaccatacacatctactactttaaacttctcaggaacgcccagaacatgcatgaacttgttcataacatctggatttgattctaatggaaacagcgacatgttaatcgaatttgcacctgaaccctgaacgaattgtttaatattttataaaataaaaaaatcaatatttgcaatgtccacaaaaattttcccaacaca

SEQ ID NO: 8780 - DNA, 971 bp, Diabrotica virgifera
aatagatttatatgaacgtcgattcagcgatattgttctatcatatggtgtttcaataaaagtgaaaagccttcctacttttgatagatcaatggaaatgattatatcaaatagaacaatggttgacagtgagaactagcgttcagttacgttgacgtgtattttgtggagttaaatagtaagcataatatgagatgaggttaagttctttgtgaaaaccatagacatattataatttcgtgaacaatatcacattttaaatggagagacaaccatatctgcaagtttctttaactataccagaaagaggagcgctatggataattaggagtgaacaatataaaaaatataataaagcgggaaaaaagctatgaagctaatcgttttggaatggaaatagaaatcctgactctaaacgatattaaaaataaaattaaaagtatccggacaacctacaaagttgaactgaataaaatattaaaagcaaataaaagtggtacaggaacagatgatctgtataaacataaaccaccataaaccaaaacgtttaagaggtgtttccgttgcaaaagagagtcagagatgttcttgttttcctatttttaagtacgtttttttaaatattcacacccaatgcgaacgccagcatgcacaattttcttcgttacagccattattaaagttagcactttgtagaccgaattcaatatccttgaaatagtgtgaatttgaattatatgttcagttgcatagaatcaacgctattgatctgaggttgactaatgagaacccgccttaaataggaatgcgtattaactctctatgttcatgtgataactactctactgcagatttaaatcatataatctttaattttgaacttaataaataccatacgaaagcactatttgctagacttcaggatcagaatgtaagtttaccgctgaatatttcacacctactaagcttca

SEQ ID NO: 8781 - DNA, 974 bp, Diabrotica virgifera
gaagaatttgctttatattcacatgcttaattaacaatgatttctatcaactaacaaccaatatacctttttgtaggtgaattaatagatgtgatatatttagtaaacatatattatcatttttggcttagaatataattagaataaagaaaatatttttaatgattaataatttgagctatagcttcgttgagattttcaataacagctctcaggttatctctaataaatttggccataacgttaataataacttgtcccatgaaagtggttactaccgcactaattgcgttagctaaccagtccaccactggatttccagaaaaatgaaccgtcacatctccagaatgtttcatgtcataatgatccaaaaacacagtgttagaattaaaatcgaaacttgctatagcagatacttgtatatgtttaacagtgccgtcaacttctccactcatgctaatgaataatactttggtgtggtggtgatagtggaatcttaaatctccaaaggttattggaagttcgatgacaagttttttgttatccccttcgtatgtaagaataacatctccgcctctggaaattgtatcaaggtcatttaaattacctctagttaaatccacacttccaccagatatcttcaagtgtgtatctggaatatcgacattctgccagttgtgttgtcttatgaaattttgtaaattgttgaaaattgtatctgcatattgatttaaaaatactgtaatttcgctgcctcctaagatatcagcttcagttaaaaacctcagtctagtgatcaattctttgggaatgatattattataatcaatcctctctaaagctcttgacactacatcatgaacagatggatttactggattagctccgcaaaatgcgaataaacagattattccacaaattaaaactttcattttaactcaattattaagattactgatttaatctcaaaattt

SEQ ID NO: 8782 - DNA, 974 bp, Diabrotica virgifera
  SmartBlast Evalue=9E-62; Info=Adenosine deaminase-like protein n=1 Tax=Harpegnathos saltator RepID=E2B4Y9_9HYME
ggacaaagtcgttgcaaatactcctttatcgtcagtattaatagagaatggtagacggaaatcaatccatttttgtatgtgatgttctccataatgcgccacactttcacttaaaacatttgaagttaaacagcattctaaaggaatttttttctcgcaataaaggtcccagttttcccgtgaaccaccgtggtctggatgcaagaatataccatgccctattcgatccggtccaaattttaatatcttggaaacttcctcgtcatttttaacttcagcacaatgtatggcagtcttaagacccgcctgtctggccttttcaaataaatcttcatcgaaagtaccgaccatgggatttccactcaaatctatacctttgataatgtctggatatttttccttcattttaataattacatctaacgttttcatagaagactctttattggctcgtctatttatcgacaaaagaagtttcactaatacgtatttacaagtctttttacaatctgtaattgctttaataactgtttcaacatattcttcttcactcattgcctcctcacatctaggagttgttctaagttctaaatatattgtatgttctttatcaaagtcttcgataacactcttagcagcaagatatacgttttctttggtttttgtagcattatgggcaacattaaagagttgaaacacttcttccaaagtacgactagatttactcataatgtccgtaagttgatattctgctatagcatcattattgcatcctaatttttttaaaatatctgtatttaaggaaccattgagatgggcatgcagttcaattttaggcaaaatcctacagaagctacttatactatattttttatcccttttctccattttttaggtttttataaaagtagattgttgcttttctttttctctaaagaactttaattgtggcttttcttagtatgtactcattg

SEQ ID NO: 8783 - DNA, 974 bp, Diabrotica virgifera
agaccagtaattacggggattcttaataacgacatacctaatacggagaaggcgcaaaatgggcggaaccttctttaccattatttatagaatcagttttgaatatggtaatacaggacgatgtgtgaatttgtgtatttgtgacaaaattcaaaagtgaatgatgactcgtgtgatttcgtaaccttcttcttcttcttcttcttatttttgtgtagacaagactctgtctgtttttcaatgtgcctccagtaagttgtcattctatcgttttcgtggtctcccactgatcgtcttcttattggggagccgtctctcgcagtctgtactactctattcgttgtcattcggcttatgtggtcgtttcattctactcttctgttgtccaccttgcatctccgtcgtatatctgcacttctagctctatcccatagtgtcttaccatcgatttttcgaagtgttttcatctctactgtttctagcattatttttgtctttgttcataatttggtcattattgttcttatgactgttttgtaaattctgcttttcacttctcttccgatatttttatttatccatattgtttcattcaggcaaccaggcaacctgcggctttgtttgctttattcacctgatcttgcaattctgttttgagctttccttagctaaatagtgtgatgcctagatatttaaactccatgacttgttctcttatctgaccctccagctctaatttacaccttattagatttgattttataaccatgcatttagtcttttttggggaaattaacatgttaaattttctagcggttatattaaattggtgcaacatacgttgtaaatcatcttcactctgagagattagtattgcgtcgcctgcatagcagattatcttaatttttttttctcccatttggtatcctttttttgttcttaatttttttattatttcatccatgatcaagttg

SEQ ID NO: 8784 - DNA, 973 bp, Diabrotica virgifera
ttaaggtttatttattgatataatttacaatatactagtgagaactatatgttgtatgatttggacagtcggaatcctcaatcttgacacaccctcttttacttgcgctccaatatagctcatctggacattgaatgggacctgcccattggttattagcacaaatgtagaaataatgacagctattaacatcagcggtcaaatcaccgtttgtacagtaaacagccgttgttgattttgcaatttgcgagcagtcagattcctcggtacatccaggtatatgaacattccacaaaagaggatcagggcaaatcatatgctgttttacgttgttaatacattcgtaaaatgcttgacagtttgttgtatctggaaaatattcgccgtttgtgtcacacctaagccatggaggtattgttggttgcgttgttccggctgttgttggagtagttgtgggagttgttgttggagtagttgttggagtagttgttagagtagttggagtagttgttggagcagttgttggagttgttggagcttctgttggagctggagttggtttagctgttgttgagcgagaaacttgcgagcagtcagaggtaatgctacatccaggtatatgatcattccacaaaagaggatcagggcacacattatgtattttttctccattaatacattcataaaatccttgacaattagttgtatctggaaaatattcaccatccctgctacatggctcatttcttacggcttctgctggtatttttgcgatagtgctgtcaacaatcaggacggcgacaaatattaaatttgaagaatgcatggtgtataccttgtaatcactttcaaaacaagtgagaaaactttatcaaactaccctatttatctacaagtgtaaactgattttttctatagttaatctagaagtttcatggtaactataataattattgatttattcactccggat

SEQ ID NO: 8785 - DNA, 973 bp, Diabrotica virgifera
  SmartBlast Evalue=1E-100; Info=Probable ATP-dependent RNA helicase DDX43 n=1 Tax=Camponotus floridanus RepID=E2A0G5_9HYME
ggaaaccgagataaaaatttctggagatgcagctgcgattcaaaaggccaaagagttaataatggaattaacaacggaaagaaaatcaaattatgagcagaataatcaaccaagagaagaacctaaacaagaaatggatctagacacttttctcaaacaatgcgaagaagcagaaaaggcggaatgggaaaagtaccctccaaccgtaaaagaattttacaaagaacaccctcaaataacaaaaatgtcgcagaaggaggttgacgagtttcgtctcaatagcaacaatactatggtcagtcgtgtgtttcaaactgaaacgagtctaccggtgccaaaaccgtgtacatcgttttattttgcgtttcatcaatatccagatatattggaactgataaaagaagccggatttacacagccttcgccaattcagtgtcaagcttggcctgtacttctgagtggcgaagatcttataggaatcgctcaaactggaacaggcaaaacgttggcattcctgttacccgcactaatccatattgagggacaaattacgcctcgcaatgaaagaacaggaccagctgtgctcgtcatggctccaacgagagagttggcattgcagattgacaatgaagtaaaaaaatacaagtatagaggtatcacttcagtttgcgtttatggtggaggtaatagacgaagccaaatcgatgtcgtcaaaaagggtattgatatcgttatcgctacgcctggcaggttaaacgatttacatgatgctgggcatttaaatgttaagtacgtaacatatgtagtacttgacgaagcagataggatgttggacatgggctttgaaccgcaaattcgaagagttatgtatgcagtaaggcccaacagacaaactgtgatgaccagtgcgacatggcctaacggtgtcaagcgtttggcattgtcatacatgaaagatcccattcaggtctcc

SEQ ID NO: 8786 - DNA, 971 bp, Diabrotica virgifera
  SmartBlast Evalue=5E-30; Info=Probable thymidylate kinase 1 n=1 Tax=Rana catesbeiana RepID=C1C504_RANCA
gtacggttcttgtggcgtttcttgtgttgttagaacacacatgtagtggacggtatttgcaaacgtgcgggccgaatgataatgaaaaaactatttttaatcaaactgattacagtgttatcggcccgccccttctatatcatgatgtggaatctgtccttgaacttttaaggaaacctgagtacaaaaccaacatctatgtgcaacagttacttgaacaataccatcaggctaaagatcgagaccaacaaatagaagctccaggaaattcaaaaaagtatccattgattgtcatcgagggaatgtctggaacaggtaaaaccactgtttcaactgcgttaataaataaattaaatggtaaacaaatccattctccacctaaagaagtaaaagcattgcgggcggcattgcgcaatactacggaattagatatggcttaccaagctattggaaactacattggaggactagaagtacaacgcatgcttagagactcaccagttgtaatggacaggtactggcattcatatgctgctctggctatttccactgcagttaacaattatccagatcagtaccagtttccaccaaaaggagataaagtgtacgattggccagaggacttacttaaaccagatattgttttactactaagtgtagatgaagatatccgacagcagagattaaacaaacgaaggaaagcacatggagtgatcgagaaaccagaaagttttaccaaatttttgaaaaaatgtcctctcttcctctcacacatgcttactgcctacaaaaggatgcataatccaggagttgctgtgatagacggaaacccaacggttgaagaagttttaaacagtatttattcaaaagttaagccgctaattaagaaaagtcaaccataaataaattatttttattgtttagttatttaaaaatcaacaaccaacaaagagataggaattactttcaag

SEQ ID NO: 8787 - DNA, 971 bp, Diabrotica virgifera
gttgccagacttcagtttgcatatcaaaatgtattttcgttttttggtcaaacggatcaatttagaaaaaatggtataatacttttttggtctacattgtgccttctacctatacctttaactattttcgaggacaccctgtatactctttgagactttcaatctcactttcatctaagtctaatgtgatattttgatttatcatcaactttgttttatttaatttttaccccaattttgcgaaatctctcttgttcaaccagctggtaactatcaaacttagtgggtaggctgttgttaattattttggtaaacaatttgtacggatgtggtacataatagggaaggttaaaaatattcaatgcaaaacaagtataaaactcgaaacagaaacaactgttttttttgtttatataaattttgtcgccaaaaaattgttataataaaattaggacaataggaaacatttttatcaatctttaaaaccaattttgagtttaagctatacaactcatcatacccagagggtaaaaatacagctatactatgtatactatccagctgtaataattttcagtagaatttgcacttaaccatcaacaaggctattatattggttaaccaaatcgtataatatgttggcattttgtgatatagtattgtgcaaaccctttgaaacaaaaaaagttaacggtttatcaggaatattttgacgtagcagataaaactagttttaaccacgtttatgatacattactttgttaaatagtacatgtctcgtgggtgttcgggaacgattaacttaaattaaagtgtaaaaacaacaacttgtcaataatatatttatttgtgtcggtaaaatagcgtgaatatttctcgaaagagggtttgctattctttatgagtgtgttggtgtgaccgcatcgggtgcctgctgtgactatactgaaaaaaaccacaaacgctaatat

SEQ ID NO: 8788 - DNA, 971 bp, Diabrotica virgifera
  SmartBlast Evalue=3E-14; Info=Glucosyl/glucuronosyl transferases n=1 Tax=Aedes aegypti RepID=Q16T57_AEDAE
tatcctcaataaggtcgttaagactaagcttgggatctataaatctagtgagtaagtcccgctgccaaggtagggctagataatattgatactgctccacaaatgagttgcagatcaaattattgactcgttcgaaatagctcatgtagctggtgtgagctgtaagcggatttggtatgtaggacggaggggccggagcagcaaacatatctgacatcagggtcgaagatggtgtgggagatactagaattataggtgcttcgaatactttagctacgccaagaatggcctcgttcgctgaaaattctgctatcaccagatcaaatgtttcgttggattttataaacgccttaaacgctgcgtctgaaacagttggtcagtaacgtcgtaggttatgcggaagtaccaggctgttctacggatgaagcccatgctggttctgtctgcgaaacttgtatttatttctgttccaatttcccattcgttatcgatattgatgtacgttatattctcattcggctgtggtatcaaatctggtatggtaataaatgtaacattgtgtccctttcttgctaactcattcattagccttgatccgatcattacattatccgaaacacgtgtagggaatattcccaagattcgtgaagattgcactgtccatgtaaacagggacagaagcagaagttttaacattgtcactgttgtattttaacttcaaactatatgtctggtccaactcaaatatttactattattatagtactttatcactcatacgcaaattatcagtctacagtctacaccttaatcaaaacaaacacttgattcagtggtgtcatggcaaaattagcagtgcgggaacgcagtgccggaacgcactgctaatttttgtttacaaaacctaaattctctattattttttttcttttcttaaccagtgcgggaacggcgttcccacgcgttcccac

SEQ ID NO: 8789 - DNA, 972 bp, Diabrotica virgifera
  SmartBlast Evalue=1E-127; Info=Eukaryotic translation initiation factor 3 subunit G n=1 Tax=Tribolium castaneum RepID= D6X2C9_TRICA
gaggttaggaatagtacgtgacattttcactttattttccatacactttaaacaatattgtattcttgtagttattgcctggaaataatcactttttaagattagcaatgccagcagctgacgaaataaagtccagctgggctgacgaggtagagttagaaggaggtgccttaccaccacccagtgaagtcttcgaaaatggtttcaagattgtaactgaatataaatacaatgaagacgacaagaaagttaagattgtcaggacgtacaaaattgagaaacgtgttgtgtccaagtcaattgctctccgtaaaacatggaaaaagtttggtgatgttgccaatgataaacctggcccgaatcccgcgactaccatagtagctgaagacgtttatatgcagtacatcactagtaaggaagaagataataagcaggatgatgactctttggacaaactgaaaggaatgggtgataagaaattctttaaatgtcgtacatgtaatggtgaacattggactacaaaatgtccatggaaggacactatgtttgttggtggaaagccaccagatgataagaaaatatcagctgttggaggtgcagctgttggtgaagctggtaaacaaggatccaaatatgtaccacctaatttgagagatggaggtgtgaagagaactgatggatctggtgtagctaaacgagatgatagttcctgtgctatcagaattgccaatttgagtgaatccacaactgaaactgatttggaagatctggttaaacaatttggaccaattcaaaaactgtatttggcgaaagacaagataactggtggatgtaaaggatttgcttatatacatttcaaatttcgttctgatgcagctaaggcaatcgcaatgcttcatggacatggttatgatcatcttattcttaatgttgattggtccaagccatcaccaaattctaaccaataattgt

SEQ ID NO: 8790 - DNA, 969 bp, Diabrotica virgifera
  SmartBlast Evalue=2E-12; Info=Endonuclease-reverse transcriptase n=1 Tax=Bombyx mori RepID=D7F164_BOMMO
acatgtttaatgacattcttcttgcagtgcctatctgttccggatgttggcgattaacttggctgtccttattttgttggcagctattcagaataatcgaagtctacacctattgaaccattttctcaggtgctggagccaagaaatgcttctctcaggttctctttttctacactttgccctgaagaacgagttaaaacaagcccatttctcttaatgcggtccagatattctaatttgtgttcttttattgtactataacgcatgttgttctatgatactataacttttgtgaaatcccatttgtgcaacaggttggtaattatcgaacttatttgatagtctgttggtaattattttggtaagcagtttgtacggatgtggtaacaggctttaattttcgagtctgtaattttcgaatttgtcttgtttcctttcttgtgtagtaaaagtagctgcgccttttgccaagaggttggaatagcacccccaaaggggcacttgttcatttaaattttaactgccttcacaacagttttacctccagctataatcatgttttttatcattctgtcgtctccagatctgttccgaaaagtgtctgatcccaaaatgtcgatttggttctaaaaagtgacaggctcaatagggcgaagcctacgcagaaacaggtaataataatcgacacttctgtatgaaaaccacaaattaaaaatggttacatttttacagattgtaccaaattggagtaacaatataaattatttataattttaactatttataatgggaaataagccacaatattattaaaaaatgatttttattaacgtttcgacgcccaaatcgggtgccgttgtcaaaatacaaaatactactaacagaaacaaaaatagttgttgctcagtgaaaaaattcttctaataatttatttaatttgactcatttatatcggcaatatttcagcta

SEQ ID NO: 8791 - DNA, 971 bp, Diabrotica virgifera
  SmartBlast Evalue=4E-59; Info="Ubiquinone biosynthesis protein COQ9, mitochondrial n=1 Tax=Camponotus floridanus RepID=E1ZWN9_ 9HYME"
gatgatcactccatcattatcctatttattccagttgattcctaatatattgcgggctgtaacaaacactgactggacagtatccttagccatctgggtaccattttctgactttaacaataaatcctgcagttggactgcttcgagtaatctcttatttagaaacacccacgtatttttaaattcctctgacttatcttgaatcatatacagttctgaagctttatatacacctgctatgcctattctacgtaaataccaattatgatctactgatctatcacctgcatagtaacaaatatcatcgaccattgttaatagagtcgctaaagaatttggtacgttaggcggcaatgccataatggctagtgcctgtggccattttcctacatacggtccgaccatttttaaacgttcttgaatagccctttccgcaaagtcggccggtggaatagggttctccttcatatcctctttatacttttttaaaaattggactaacttagaattggaactagtttgaaaatagtgtagtagatctccacctcctctagaaaacatcccatgtgtaaccccgggataacctacggcttgtgcgcctttggctatcgcttctttggaccatcctagttcaggtacgttaggtaacgaagcttctagtatcttattacgaatatcttcctcataattcttatcatctccttgttcatctgagcttgttgtctctgatgaaaagagcctaatagttgaccatatgcaactggagtttctaactcctatcctcctatttaaaggaataattataaaggacatagttcacaggctattaatattttaggaataattgttttcatctgactagaactgctttgtatatctaaaaaaaccagtaaaatactcgtactacgcaattacctaactatcaactgattaattcgttttttactgcacctgcacgttgcagtcgcaaa

SEQ ID NO: 8792 - DNA, 970 bp, Diabrotica virgifera
aatcagatttcgggaaattgacatcattgttgacatgtttggggagtttcaagtttggagccgggttcgaaattagtttacagtggtaagtgcaataggaagaagtagaaatctataatatttttgtattaacgggatattctagtgtttgtaaattaattagttagatatggagcaacataaagacatcgaacaacacgcatttaacattaaaagggaagtagattcggtggatgatttcgaacatttaggacacgactcaagtcctttacaggatttgttgggtttgcaacaagacaaagaggtgacagcacctgaaacagtccatgaaatcaataacacgcccaagactgcggtgagtcatcaggccggtgcttccaaattattacattctttgcaaaatccactgattcccgaaaaaatgaatagaaatctactggaagacgatttcctggatagaggcgaaggtaaagaaaaattagatcaatttttacaggatgcagcaataccccctgctacttctgtcttcgatcacggaaataataaattattctctgcaaatctaatagaagctgaaaaattcattgagcctgagaaaaaagaagttgatcacttcttggatttcgaacaggagcatcctgaacccgttaaacctaaagaaactgtgagacatgagatctttgaagatgcttttaagtcagatgtacctgcattagttcccgaaattagtaaggaaccaatagttccagtacaacctgcacctccaaaacctcaaccagagaaaattgtaccatctgctcctgttacagtgtcagctccagagaagaaagtagaacccgaaaaaatcatcaaaaaagtagaagaaaaacctgagaagataatcaaaaaagtagaagaaaaaccagtaccagtagttactcctgctaaaattgcacctactgatgcagcagctatattctgtaaaatgggc

SEQ ID NO: 8793 - DNA, 968 bp, Diabrotica virgifera
  misc_feature (23)..(23): n is a, c, g, or t
cagcacaccatctgcggaccctncatacctatattaccaatatatacaatcacaggactcggtcccagcaataaaattgctggtaaataacttttcccaaaaatggcctattctccgataatcagcccagactatttatttaatgtgtttactcaaagggtatagactaagttttttacactattccgattcgatttatacccgaatcttacagtttggagtagtagttttaaaatcttaatacaaatacgaggtgtgactataaaatagtaagactgccatgagccaaacgctagccaccccagttcctcttcgctagttttcgtggggcgttgcagcatcgccgaaaaattgtagatgtgataatagagtaacgaagagttaatttgttcattaaacttggaacaatctttactgaaactgaagggaatgtatggcaacatacgtgtttaaacgttttcaagttgaacgagaaggcatgattcaagcctgggttgctctttcacgtcaaaaatagatgacaaatcaatcgaaggatctgactgcctgtttagcattcccataattgccgaaactgtaagattctggaacggggaacaatatttgggttcgttgaagcggttaaaaagaaaactgaccgcatcttaaagaagttgacaaaatactttcagtactgtttcgaacaatgaaaaattgtaattgtaatatatggtgtaacttgcaaaataaattatttttcacttaatttgaaataaacaatagtttgtccgtgtgtcgtctttgcttgtactcaaaattatgagtaaaaaaaattcctgtttcatccagcttttctatcattaacaaaacttctagcacgctctgtaaaattattggtaacatttatatttttttaagttaaaatcttgtctaactaagatagataattgaaaatatataatgtataaagaattacaaaatatagaaag

SEQ ID NO: 8794 - DNA, 969 bp, Diabrotica virgifera
  SmartBlast Evalue=9E-22; Info=Motile sperm domain-containing protein 2 n=1 Tax=Camponotus floridanus RepID=E2A6C4_9HYME
tatttccccatttctaatcatttttcaaagtgacatcgctcaagccaataccgtttatcatcactttttcttcaacgcagagccctaaaaataatcttgtaaaatacaaaacaaatataaaaattgtaagaacattttatgtaatactttgtaaaataaaggtatctcaatcggaggccctgcatatgagagttattgttatgggtgattacagtaggggtgttctgaagatgtgtccttggaattgcgagccatgtaccctactacgactcctagtattaaaactaaaaataaggtcaccatttggaaatattgggttattttcacggactgccgcaactctatttgcgccgttcttatctcggagatcgtcgatgacaattgactgatgctgctttggtcggtttcggcagcagttggcgcagtcacggttacgttgccgttcttggtaacttctccactttggatgcatttcagtcggtgctggtacagtttcctaccactggtattcttccacaattctggtaaatctaaattatctaattcactggtttccattggcgtactcattacaaggaatttatcacgtgacagacccccaagttgaaatccagggaatagcgttacattaacaacgacagtctcaccaggggccaaacaccctgtgcttggtttaaccctgaatttttcgggggaagtcgttttaagcttataggagacatggatactgtcatctgcattttgaagttccaaggtactgatgagttcgtttccatctttaacgaatgtgatgatacctggtggagtaaccttgaggaaccctccatccgattctttttcggcggtagtagcggctgcagcctgttctgacattgaaccatcgacaaagtgaacctttttattattatttgacacgaccaccttttccttttcttgatcaggaaaggtttcgggaacgaagctaaatac

SEQ ID NO: 8795 - DNA, 969 bp, Diabrotica virgifera
  misc_feature (956)..(956): n is a, c, g, or t
  SmartBlast Evalue=3E-99; Info=Casein kinase n=4 Tax=Culicidae RepID=Q17D24_AEDAE
gtccccaatatgctagaattgtattatttctttatcttaaaaagtccgtagtttaatttgtataacaattaagcagctgctagaaataaaattaaaatatagacagtcttaacaactaggtacagtgcggacctacaacaacgtgacatatttctctcttacagtatatactactcacttacttgatactgctttcttcttctttttccttttgaagaaaccacaacatttggtctcttcaacgatttccacctctttattctgagtgatgggtgtattactgtgtgccatggaattatctgcatgcagatctccgttggtggagttgatgaccataacagatcctgggcgatcagcaggagtgaggttgcctaaggtgctgtgtttggagttttctggtttggtgttgatagcacgtttctcacgaagcggtgatatggcgaattcttgagtggcagtaggtagagatccagccgataagttcgtcgttttaccagaccaatcaaactcgttatcatcaacataacccttacttttaaataaatccgcaaataaacctctcagatattcataatcaggagtttcaaagaaatctaacctcctaacatatcgtaaatacgtagccatttcttctggataacctttgcacaaactttcaatggaagtttcccttttcgtatcacctattttttggtaacgttcttttagagtatcagccttaagtccttgccacggtaaggatcctctaagaaaatacataaacatatgaccaagtgcttctaaatcgtctctcctagattgttctctgcccagatgggtgtttattgacatgtaccttgctgttcccgtcaatgatttatgttctctataaggaatatgtttatttgtttcgggttctatgtattctttagccaaaccaaagtctataatatgtataacttttttctctggtggcngcctgacgcccaa

SEQ ID NO: 8796 - DNA, 967 bp, Diabrotica virgifera
  SmartBlast Evalue=0; Info=TFIIH basal transcription factor complex helicase XPB subunit n=1 Tax=Harpegnathos saltator RepID=E2BTL5_9HYME
tggaatagttcatttccatggtatcttgtgacaccaacgtatagaaaaaggcgttatactcttctgctacggctccctttttcgctctcaaaattctacctaatctctgggcttcttgtcttcgggaaccaccgtgggaagatatttggattaagacgttggcttctggtaaatcgaaggaagtatctgctactttactcacgaaaatcgtgttcaccttgggattaaacttgaagttctgcaaaatctggattctttctccttgcgatgtaggaccataaatgtacggtttgttcatttttattgcataatgcttcaaggcgaacacattgtcggaaaatacaatagttttgtcgcctcttctttcgtgatatctgattaaatactgagtggctctgaatttatttggattcataacgtacaacaacagtcgtttacttgttttgcacacaagatattcccgataaaattccggtgtcatgggacaccagacttctgcgcattggactctggcaatataacctctcttttgcaactccaaccaattcgcctcatacaattttggcccgatcaagaaattcagatcagcaatcttatcatcttctctcagcaaagtggctgttagtcccaatttgcaatgactttgcactatcgtcaacactctcctgaacatcttggcaggtattgtgtggacttcatccaagagcattattccccactcttgttcctgcaaccatttcattgtttgctcggcttcccatgatctacgctgcgtgtgggtgatcatagaatatgttgtgacgagaatagcacagcccattggtttgtctttggcttcagaagtaaatcggcatatcatactatcatcagctgtggaccacatcttaaattgttgcttccattgttcgacagataccccagaattacacagcaccaaggctctttttctgactgtacaacaggcagt

SEQ ID NO: 8797 - DNA, 969 bp, Diabrotica virgifera
ctccctctagcttcttctcggccttcctcttttccttgccctttgtggtgtccaccacaaaatctgtttagggatcctgttatctggcattttctgtatggtcgtaccatattagttgttttgtttttatgccatcaattattgtatgtgtgactcccatcatttctcgtattctctcatttggtatccgatctcttcttgatttgcctgctgctcttctccagaagtccatttcagttagtagtaacattctccctgttctttgtttcagtggtgaaactttactgaaataatatgattatatgatgatctaccatgtatgtttctatcttttatagcagcatcgagtgtttcattttgatttattttcatgcccaggtacttgtattcgtcacagtatttaatttctaccccagcttctaatgtaatgggactgctttgcctctccaatacacatggcttcagttttcttaatgttgacttcgagaccccatttatattcttctattagtttccgcatcatgtaactcaagtcgacatgatcctgagcaatcagaatttggtcatcagcgaaacaaagtgtatagtgttttatcgtcattgagagggaatatcatgccattatattttcaatttacagcttgagtgtttgttccagataaattttgaaaaaggtaggcgaaatacagcaactctggttcgatcctttcatgaccttaaatcccccagacatccttgatgcagttttaatttttgtagtcgttccattatacagattttggactgctttgataagaccatcgaccatgcttaatgttggtttgctgtagggttgaccatagtttgctgaggggcgtactgtcatatgctttttttaatactaaatataccaggtaaacttcttcaacggctgtttttttctcaataacttgcgtaatagagcacaggcaaattgtatactgtgtatcg

SEQ ID NO: 8798 - DNA, 963 bp, Diabrotica virgifera
  misc_feature (697)..(697): n is a, c, g, or t
  SmartBlast Evalue=2E-70; Info=FKBP12-rapamycin complex- associated protein n=3 Tax=Aculeata RepID=E2AX71_9HYME
ttatacatttaaacacgcaagggtcgatattcggacgtttcttcaaggtcatttcacttctcggaagtgctcctttaataagatccattattttgtctacgtagggttctatatcttcttctacagcaactgcaatcaaaccaactgcaataaaggccatatttctctccttgtccctgctctttaacatgttaaacagataagtcatagcaccaggtaaatgtttttctacaaaatctttcctatcaaaagctgcgagtcgaggtaaaatattcaataatgtttgctgaacataagtatacctagaaaatttttgttgcataacatcaatacataagtatggaaacttctccagtataagttgatggcaagccgacgattcaataataataggcttttccggttgtatagctgctaaaatttgataatttgcgcttttcttatttggcgtgggatacatgaacagcggtcgattaaaattaaaagtttcttgatcgttggaacgtctcatttcagttttttccaaaagggaagtgtatttgcgctcccatgaggcgttcgctaagcgaagcagttcgttttgattaatagaaatgcatgtacgctttcgtctcttattctctctcctttgtcagcaagcagaagtgtaccggattcttcataacatagtttgtaccaagtaactttgccaacctcnctttgggcagtaactaccaatgcagctcttagagcctccacggcaccctctctgatagctactttcggatcttgaatggcatttgttattaactcaaaaaattgagatacttgttggtaaaaatatgttggcatagtgatagcgagttctttcagaactaacacagcagcatgtcttttgctatctgttttatccttttgtaaccactcaaaagcccttttaacttcgaactccacatattcagaagctttagatccagaaacaaa

SEQ ID NO: 8799 - DNA, 965 bp, Diabrotica virgifera
tttcgatttacactgattacgatgtgagttacggaatgccaatccaaacacgaaaacgaggcgatagatatccaacactccgatttcgggtaattaccattcgacttggtcatttctattcgatttgttaaaacttacagaatagtgctgattacgtatccataccaaaaattcctatttgtaaataaatcttgacgaggaacgttaaataaaacagctgtacgaaaggtgaaataaatatgatattctgtaattaaaaatcatttttaccgcaacaattttttcgttacaagctccacaaatttttaatgcaaaatggctggtgcggacacctgtaaaattttcctcgcgacattttatagccgatccactggagtgcttatgaaatcacacatgtgcaccatgtaccaatgttttgttgagttgaaaatctgtaatataaagatttagataccaaatgtacgattacattcacctaaaataaataaaatacaaaaataaatcacaaagagcacatgatataaactttttttgaattgaaggtcgcagcagattatcatgctcgaatcgtttccagcacgtgtatcgtagtctccgaaaaacctgattttacaaagaggtgtttttgatacgataggttccggatagtgtgaattgttcatatttaaaaccattaaaatcaatatttttcggaaactaaacgctacgtgctggacacgattcgtgtattataaactgccgcgacctttacagtcaaatatttataccttacatatcctatgtaagggaatagtgaagatgaaatcagcttgaataagggtggagcagtgacacgagcgttaagctcttttctctagcaaaagtcaatcaaaaaagaaacaaaaataacacattatatacgatttggaggtttgggatgttaccaaagctaataaaaacaagtttatgacgacagagatggacta

SEQ ID NO: 8800 - DNA, 969 bp, Diabrotica virgifera
tgcgagagagtgagaatgatggtaaacacgtttactgattatttttgacgaaaaggggtatacccatgcctcataattactaaaatgagtgtcaatatcaacaatagatgtttagacgtcttgtaggtgatgttgtacttttatcaaacggttgccttagtatttatttaggtctgcataatggttgtgacaatttaataccatttaaagaaagtcacaagttactaacctgtcgttttaatactgaagatgaatattttcacgccaatatggattgcgctgctagttgctgccttattatttgcaattgcgtattgtattctagtgctgtacaccagatgtactaacaaacaaagaaaaggtcaacaattttatgagaataaaaatcaaggtttcgcgtacgcaggtttcaaaaatgaagtcaccaacagtgaaacaaccacagaaccatctaagagccaattagaaactaaagttccaattgagtctgtttctactcaagacgaaaaagctgaccaaagcaatcccaatgcagctaaaggcttactagtcgccagtgctttactacaagtattgactccttccagtggcaacaatcagagttctaggcacttctttggtggtcctggaagtaacggagcaagccagcatagttcaggaaatgatgcgttcggtccatctggcagtaatagtggaaggtctcattcaaagtatgctttaggacataaggcacgctataatagtgttttattggcagggggaattgatagtgtagatggcacgtgcgactctgatcacagtaggcatgatacgggaggagatagtgggggcggcgatgcaggggacggaagcggtgccggtgcatgtgatgtctaaactattttacttttagttagtctgcatacaaatattttgtataatgtttttaaaataaatttatatttttttgtacattatagctaatcgctc

SEQ ID NO: 8801 - DNA, 969 bp, Diabrotica virgifera
  SmartBlast Evalue=7E-32; Info=Diapause-associated transcript-2 n=1 Tax=Leptinotarsa decemlineata RepID=Q8IT92_LEPDE
aaaagatgagtataaaatttatttaacaaaaattaacattcataaattaagcgacttcgtttttgacagggtcgtggcaaattttttcagtctcggtttcaatggctttgtggaatttggcgaaagagctaagagtgactgggttcttgcagtactgtccgtggaagtcggaggaacatttcttgattttgggcaagagtgtgcaaatgttttcagtggtaggaagctgtttactgtgatcccagctttcaacttcagtggggacagctttgcaggattcgattttttcaagacttgagaaactcttccattggcatggattgaataattccaatacttgttctactgtagaagcgcaagcttgtttccaaatagcaagaacaactccctcagctaaggcgggaagttctttggattcatctggcaaacatccgctaactaattcaatgactggcttggcgcatttttcaatggcacgttgggcggtagcgcagacggtactatcaccaatggtgatatcttcaatgcagttggcgaggtcgtcgatggtatcattcattttcttttcgatatctgcgcacttgtccttgtgtttgtcgaattcacgagtaagatcttttattacttgataatcggaatctttaagatacttttgcagtgctttggataccactctacgttcgccgatgtatggtttgactagttcagcaatttgcagatctgcttcctcgaccactcctctaggttttccaccatcgtttggtgcgcaaactacacagcttgcagcaagaacaaacaaaccgaagttaactaaaaatttgttcattttgtcagtctatcctttgccaaaaccaactatacaaatataagtttattatattataagagtaaatttactctttatatagttcctgctatctaaatttcgtgaacctgtctcaaaaaaaaggttaatttgttgacaaaata

SEQ ID NO: 8802 - DNA, 965 bp, Diabrotica virgifera
  SmartBlast Evalue=2E-22; Info=Vacuolar protein sorting- associated protein 13B n=1 Tax=Camponotus floridanus RepID= E2AKD0_9HYME
tgaaattgcatttaccgtacaccaggtcctacgacgagtctctttacgaagaagaaattgagtctaatgatgtatgcagggattctggtatcgacacgttggataacaaaagcatattgtcctcctctaggatcttaaaaactttaagcgaaagcgaaaaatatactccacctaaacccagcaatattttgaactcaaatcagttagttcctttcgatatcctggtcacagctggtaaaatatctctagctctttaccaagtaatcttacctacaaccggatccttgagagcaaaaaacaaaaggaagaaatcattgaaaatagatatcaacgcgtctggatatgaggcagaagaagagggtaaaacagagaatgagaataactataataaatatacacctttggcttacctttgcataagtcaaccaaacatatttatgaataaaaagcagttaactagaggtgttcagataacttgttttgatcttaatttaaaactgagtggaccagaatacctacccgttaaccacattcctactgaagatgattttccagtgaatcttttggagactaaatgtggtattcccgattataataccgaaatatatcctgcattctttactgcgaagttttctaaaggacttggtaagaacgctgctctgaatatttcaatagcgaagcctacgaagattttgtgttcgacaaccaagtggggatacttattaactgttaaagatcaggttttagatgcccttggtaataaatgcgagatgattcccgttcctagaagtattgaaaagtcttcagaaccaacaaatataatagccagtataccatggggtattaacgtcgttaatgttgattttaagcaactgttattttcaatcaaatctgatgcaggatatgagatacacttaggcatggaaaaactatcgactaatcttactttgtcaacgcgtcccgat

SEQ ID NO: 8803 - DNA, 966 bp, Diabrotica virgifera
  SmartBlast Evalue=6E-20; Info=Adenomatous polyposis coli protein n=1 Tax=Camponotus floridanus RepID=E2AE02_9HYME
gcttggtctaatacttgtgtttcgaaacgtgatctatttaactgtcttctttctttcggcgttagcttttcttttccggaactatatataggtgaattgatgtaactattactattactctcggcatctgccagtctactatcagaagttgcagttctataaccttccgtcgcacttttaaattgttccgtacatgttaacgtactatgctcactgatttctctttgtttttcaatatcttccctcattaacatttccgcggctactgtgtaggttttgtaacgatctctagcttggtttctccgttgtttcgtagtcatggatttacttaaacttcgtattttctttggtgttgattctatactgctcctggcatcggaaaatagggtaacttcatcttcgtcgttgtctaatgcagtttccattattgaatctgtaccatccaccatatcttcggcaatggttacatcggccgcagtaccatcttcatcaacgacatgagtaaagcagtcttcaaaaatctcagtctcactgcctatcgcttctgtcggaacatctgctaaagaattgcagaagtctgtgatttcgttaaaaagcgaaggtgggttgatgttttctaattcgctaaaaggttgtttcaaatcaaaaatcggatgttgagtgctctgtggattgttgataagaccgttaattagaaaatcagctctatggtcgttgggcaaacttgcaacactggtcatacttccttccatatcatacagcaggtcagacggtggattgacgtggtccaaattggacagactttccaaacttgaaccattatttagcgaattacttaaagctcgccgaaccatcaatgagggaggtaacgattttttcctttgggtaatttagggcttctgggtaaccctactgcactgtttgttaacgaattcatatttgatgggggctgaacgtggtctaact

SEQ ID NO: 8804 - DNA, 968 bp, Diabrotica virgifera
  SmartBlast Evalue=9E-54; Info=Angiopoietin-like 1 n=1 Tax= Tribolium castaneum RepID=D6WEJ6_TRICA
tgtaattatttaataagtaaaacatggtatttttcaactttgtttgtattatataggctaattccttcttggacgaatcaacattcttgatcctgataaattgtattcctttcctcggaatccatcccagttaattccgttccatctctgctgatcagtgaaaataatagttggtaactttccattcagacaacatacgtagcaaatgctatctttataccaccatcctccctcaaaatatttggcacaatccccggggataccatccagatccacatctaaagtagaaaattttgcattgagttgtcctgatagtgcatcaccaacatttcctgaataggcaccaagtgtagtcaagttgtacccatccttttcaccggctatagcaaacgatgcataacgggcatatcctgttatcccttccttgtcagtaagttctattaacagttcatactgttcagatcctgtcatctgataaatgttctgtaatcccagccagaactctccatttaaagttccaaagccaaacttataagctctccacggttggtaaaaatcttcacgtccattgaaccttctctgaacggttgtccatcctccgccttgaatatccatgtcgcaaagaacttcgatgggttctttgttacccctgggtttaattgcatatattccagatctattaaaaccactttggaggatctcactacaacttctaggataataatatgctgtagatgaatccacaaaacataaagatggcttgctggttccaactaaatttctacatgcttccaaaggattagatctgtaggtaagggtaatttcttcaggtcgtgaataccatcttccccggattgcagatctactttctgggttaagctttaagtgttctggcgtttcactcagagcaattttcaaattgccacataaaaataatacaagtattgctaacgagttcatggtattag

SEQ ID NO: 8805 - DNA, 962 bp, Diabrotica virgifera
  misc_feature (947)..(947): n is a, c, g, or t
  SmartBlast Evalue=4E-44; Info=Putative deoxynucleoside kinase n= 1 Tax=Bombyx mori RepID=Q9BKL3_BOMMO
ggcccttaggtactataattctacactgctaatatgtttttggttttaattaggcataaatattaaattgtttaaaaaaacatataatttactaaattaaaaatcactgtcatgaaaaatacacttattacatcccttaaaataattttttaaattatcttatatgcatactcgactacttacaaaataaaaaaattatcattcttttacagtaaactcaaaattaatatgtgcattaagtggttaattaaggttcttagtaatagacaccaatgcagtcaatttggtatcaattttctactttaatattattatcctgacctctacttttaacgttatgaccttgaggaattaatatcacacagtatacatgaaaaacccttacattttatcttttacataaatatctttaacctatcttaactcctacaggttttttattaagaatatgaggctcatacttttcatactcttcttcaataacagatctatccagatcagcatttagaacaataacaggagccttacagtcatgtaaagttttattatacagccaatcatcatgtatctcatgtaaggctttgatatattcaaatgcaacagtcttctcttctgacctattacgttttaagatcctctcatatgcaatctcaggagaggttcttaaatacacaataagatctatttgagcatcatccgttgatgttatatatttaaaccattcatcaatgactgccactgaagcgggtggcattaacccatctctggacattttttctacaaaacaataccttgcgctatataatgacctttccataagcttgactggctgatgtatctttttctgatggagccctaacatggtaagctgcacatatgactggaaggtaaagctccactttttttggatccttatacattaaatccaataaattatatccactgcngttctccacatatct

SEQ ID NO: 8806 - DNA, 966 bp, Diabrotica virgifera
  SmartBlast Evalue=3E-12; Info="Histone deacetylase 2C, putative n=1 Tax=Pediculus humanus corporis RepID=E0VLU2_PEDHC"
gtttattgcatcaagttacattgtgttaaatatatattataacattttatatatactgtagaatcccggttatccgtgctcctcggtacaggacgtggcagggataattgaaaagcatttatttcttatacataatacgtatgtacgtttatacatacgtatgtacctaccataaaaagatgacagaaaaaataaatctttcattatgagtctccctctcagcgtatagagtttcgtcgaatgatttacagtgacgctattttgataaaacctcaaaaatgtaatttgagtaatagaaaatcatagcacggataatccgcacacggataatcggggttctaatgtagttatattattatataatatatagttaaatataaatgtacaatataactttataaaatacatccaccaataatagcctttcctaattattacattgacagtacatatcaatgtacgtttcacttaatgttttgatttaacttgtttgcaaatgaatcatgacgtttgtgcaaagatacaatggaacaactacatacagataatttttaaatattaactccttgcaaagaatgaaaatggatcccaaaaactaggacctaaaattaatcactgtcagcattaatgtctttcaatttgtcccagtggagttcgaccctaaggttttgattgttatgttgaatcacatcaacagtcacaggtgcatacagatctttgtccattggagaccacccagtgtatatggatgtatttttatgtctaactttgccatcttcatcatatgcttcatatttttgtaaaagtgctttcccgtcaatcctccatatacatgggtgtttggaagcatcaccctcagcatcttttttaagaatgacaaaggagccagtagtgtagtcttctgaatacaaagtttttggtataaacttgcgatttcccatttgtctcacagcaggtactggacta

SEQ ID NO: 8807 - DNA, 966 bp, Diabrotica virgifera
tatgctacaacctgtgggaagtagaaatagtggtaggccaaaactcagatggaaggatggcgtggatgaggatgggagaaaaagaggcgcagcaaactggcaacggctggtaatggataggactgactggcgtaatagacttgggaggaaggtcgaggctcttttatagggctgtagcaccattgatgatgatgaaaagattttgagaaaacagatttagtgtgtcggcagttcataaatctttctgcagatatgaaggcaattatctcatatctgcagatagtatcatttctctaatcggcttagctcacgctggattaagctgttaatagctactaaactagtagtatttatgaatatgacagttttatggacttcaaaaatgtgatttccataaactataattacgatttacacgtttagagttggtgcaatgatatgaaatgattgtaatttacagacgaatatattcatgtacattgtgttgcatttgattgatattgcgttttccataagatgtgtgcggtgtcctctctcgacctcattgttttctttctttttcttcaggggggaataaagttactcctgtaaatgcaattagcaaacaacttgaatatattcttttattccaggcttattacgtttcctttcggcttgtcgttattgtgagtcgcagcatctataacaataaaggatattagtggtaaaagcaagtgctcttgtcttactcctgcaaacaggtgtaggtacaacgataatatgttgctacctagctcaggtttctaactcattacaagtttgtcaagctcaattaggttctaaagtttttccacggcttttttacgtattatacaatagaaataagaaatagaaaagaataatataaaataataaaattattttataaaaatacagagatactaataaacgacacaaaataaactttcaaaacagttttatcagcac

SEQ ID NO: 8808 - DNA, 967 bp, Diabrotica virgifera
ttcagaatcatttttatattctgatattaaatcaagagaccaagacatttctataccaagcttagtgtaggtgaaatttacaaccatgtatttcagtgttcggacacatttcaataattgcactcgttttctaaatcttcaaaaattttactagcattactcaattttgagagctttaaaaaatttctgattttaacaaataaaaaatattgttgcaaatttctgttttttgtttggcagtaaacagtataataaagaatataatgcccatgaataatgaataattgcaatgtgccatccatataataaaattcaatgtagctaaaagtcttatatttgtttcacaactaaatacaattatcctacttttgacacagtttataaagagaaaattttccctcttggttgttttttgagcacaccccgtcacaaattcttgaacctcatcaatattggaaggaagtcgaccaggcatcatttttcgtcgataattatatattttttcttatgtaactgacaacaatcttagtaattgtttcagacaaattagctgcaagtgcttggcgtataatttttgctggtttttcaattctcttgggctttacgtttacaatagttataaacaatttttcgatctaacttctgacaatctggttcatgattatgttttcggctacttctagatattgtaaaagttgcaccaatagtaaaaaatttcgcactacaagttgttttatcctccagaatacttcttcactttttaaaactttcactttataaaaaataaaattttcaaataccaataccgcctaaggtttaccgctttcactttccattaagcattccacttttgtcaaaattccaattgtgactggattactttgattaactaaattaccaggataaaatgattaactgaatcaccaatgaccaggataaaaaaaaaagagtcatcgttctggagccg

SEQ ID NO: 8809 - DNA, 967 bp, Diabrotica virgifera
  SmartBlast Evalue=1E-10; Info=Pre-mRNA cleavage complex 2 protein Pcf11 n=1 Tax=Harpegnathos saltator RepID=E2BZI6_9HYME
aggcaggcagagagcacaatttaaggaccagtgattagagaagagtatatgtaataattggaaaacctagtcataggataggaaagaatgagctgatcgtagaacaggataagacccactatgggttgtaaagccagtgatgatgatgaatcacatataaatcgattaagtactagttatttaaattatcaataaaaagcttacagaccacttataagaatgtccatcatccccatcacgtaattcaaatgagagaagcacattggagaatgtgacccaaaaaataaatatagaatcaaaatcaatggatattgttactgattttgcaaaagtgaacctgctgaaactataactgtcaaaagaaatgagatatcttggtgtcggaatcactggttaatttaagtctaaaggaaccaattcgtattgttagaataatgttagttaggataaatataagaaattatgattcaatatagtaactataccgttactacacgataaaccatactactgttttaaaattaatgaggttatttgaaaattccccctactgaagttactttattatgagccccacattttagttaataacaataaaaaaatataacctttgagagatgttcttcaattgcttcaacgataacaggggcattgggtgagttttcttctgccaacatcgtaagcacatttatcaatggcctactgttgaaggtaaggtctgccaaactggacatatactcagcctttatctcctctgaggaactcatcttgaaagctgtttttaatgttaaatatcacagataaccatccgattggacaagcgaaaattctaaattctaagatttatttgaacattgctaatgtaaatagtttcttttacaggtataacacctcataatttgcactatttgaacgaaaactttgtataaatcacttcatacgcatcactcactttcacagtacaaaa

SEQ ID NO: 8810 - DNA, 962 bp, Diabrotica virgifera
aaaggaattaaagtgttatacatttttggaatcactatttcaaacgcttttaaatgagctgtcacatgatgtactttcccattaaaaaaaaatcaaagttaggcctgtcacctgaagagggatcgtgtaaagttcgaaacattgatgttataatttactttgattattttaaaaatcgacctgtccgagcgttttgcttatgtgctaaaaataaataagttaataagggagggggggagtgtaacacttattccagtacactgtataagtgaaatcatatgaaaaatcacacagtgtaaagtcctttaggttaaggacaaaaaaggggggatttaaaaaattattattaatcaattaatatcatacattgggctattgcattcagtaattattaatataaaatacgttcatagtaggaatgaacgaaactgattgtaagaatgaatagaattgcttgtaagaaaaaccgtatttattgtgggaatgaacggaattaattgtaacaataaacgaaataattgtagaaataaacgaaatacgttaggagaaataacactgttattgacacaacgaatagtcttcgtcggtcaattaacgacgttgttgtttcaataaatagtgttcgttgactcagtgaacagagttcgtaatatcaataaatagtgttcgttgactcagtgaacagagttcgtaataccaataaagtgatattatggtatacataatgaatgttcatccattcaataaacgtaatacattggctcaacgaacgaaaataatgaattgatgaacatcgttttgttgtcccaataaaaccaagaattggacaaattttaagtattgcgtttgttgtctgaattaacatttttattgatattacgtacctttttcgttgagtgtaaaatgcccagttggtgataaataatgccagtctgattttgcatgagagtttaatgaaaggg

SEQ ID NO: 8811 - DNA, 963 bp, Diabrotica virgifera
caaggtataaatacatcctgaatacaatacattacgtgccatccatatgcctttaaaatagaatttgatattcaggtataaaagtttatttattgttaatatttgcaataactgaatttattagaaaataatttttgcgtcaaccaaataaagttggaagtttttcaactttgcccctatcaatggggctgcagaaaacctgtacatagtttttagtcaggattttcgtatcactttaccttgatcaagttttaataaacatactgaaagaagggcataataaatttttatcatgtaatgtgtaaaatccgtcaaactcaagttgtaacaacatacttagcatttttgttgcacatctgtaaatgtagtaaataatacagtgatttaatcatagtattttttttgaaaagattaatataaaagagaggacgctccttaaaccaaaattattctagaaacaacagtaaacatcttacggacttgtttacattttaaaagtttatttgctctttgagttggtctggtactctggtcgattaaatagtaattttcctaatgcaattggcttaaacaaacacatgtaatacctgcttttgtgtccagtgaaagtaccagaccactgttacatttgcagccatttttataatcaaacatgaggttgttctgttaaacgacgttttacaaaatatgtgatgcaatgttatcagtatgacatgcgataacgaatgttttgttaggaaatggccattagtgaattttagtttttgttaacagattcagatgtgataaattgacaatttttataaaagatcctcttcacataaaatttgtagtattaagaaaagagtaacgaaatattgcgtgttcccattttttatttagtgttaattttatcaataactagttgcttacttaatacatgaagcattttctggagttaaaatgtcagttcatcctatcagg

SEQ ID NO: 8812 - DNA, 963 bp, Diabrotica virgifera
  misc_feature (187)..(187): n is a, c, g, or t
tgtagctaatgaaaagtggattcttgttcgtccgattccaaatcgaatatttcagcgcgaaatgacaaaaagcggagcactttccggggaaaactcattttaacttttttaaagtatttaaaaatatgtttattttgttgttaaaaaaacttcttacgttaaaactaagtgaattacgctcaaaatnttgttggtcgcttttgattttttggtaagaaagtcgcgaaaatcactccctaattagcatcccaagtaaatttgatcgttaccgcttcgcaagttactttgcttatgtattctttaaatgatctgcaagtttcattggttcaaagtgttctttttcgaaaaaaaaaattggttttaaaataaaaaaaatttctaattttgaaaaaaatttcttttttttttcaaattaacttaaacattattagtaataccaaaaatatcaaagagtaataaaatgtacatgtacgttttgttttgctgaatattttggattttttattttcctggtatagtgcccctggaagtatttgagtatgcaaaacctgaggaccttcaactacgttcggattcttttacctgagaccttgaacaatgaaaaactgaatcttgccggaaggtgcgatggtgcattgttaccccctccctccccctatgttacgggcagataaaaagcgatatttcgcagaaaaacatttttcgtattttttgggtcattctaagcaaaaaatgttcttacaagttttttcgtaaaatgcatagcttttgagataaacgccgttaaactttaaaaaatcgaaaaattgcaatatttgagcccgaataacttttgattaaaaaataaaatagcaattcagcttacagccttttcaaaaacaaccactttgaaccgatgaaacttacagatcatataaaataacttgtggggcggtagcgagtggttttatttgggatgctaat

SEQ ID NO: 8813 - DNA, 963 bp, Diabrotica virgifera
cgaaaccttctatatcctaattacttggctacctccttccctggagacttcgtaacaattcagcagatcctgtgacgtattcatggaagaatgaaagtctcgacttaattttctcctaacataaatgcaaatttttcggattggcaatgtaaccaaaactcatcagcggtgtaccgctttgaactatggctgatctgaaaagtccttttgattttttactaagtaggtgatatccagtaagtattgctcctgcactgtgacctcccaaagttacttttgtaggatctccaccaaacagttcaatatttttatttacccatttaagaaccattaactgatctttaaggcccaagtttgcagggaaaacattatcttccgttgataaaaatcccaaactattcattctgtagttaaaggaaacaaccacaacaccttcatctacgagatactgaaaatcatatcctgtaggatttccatagataaaaaatccaccgtatatgtatacatacacgggaaaaccagttatattctctttgtatggtagttggggtgtaaacacattcaaatacaaacagtcttcattttctcttttgtcatctgtgtaatattgaagttcgtaaggaattagtggtggtaattgggttaaacatattttcgtaatatttacagtttctttgacgcctttccattttttgggagaaataggttccgaaaatctcaattctccgattggtggttcagcataaggaatttctctaaaggcgtagtatggttttccactattagaagtttctcgaatgccctgtatacttccatctgaaagtttaattatgggcttttctttacatgaatccgaacccccaataaatataattggaaaaattataaaacataagacaaatctttccattgtccagtctcctacaggttatattagtaagaattggtcaatataatatgttg

SEQ ID NO: 8814 - DNA, 965 bp, Diabrotica virgifera
  SmartBlast Evalue=7E-75; Info=UDP-galactose transporter n=1 Tax= Aedes aegypti RepID=Q16Y57_AEDAE
gatgtataagtgaaaaatagaaagcagctgtaacataaaaatattaatttaaatattgaactaaagtgaattatcgtattaacatgcacaacaacaacaaattcttcctttacgccgctggaatattcctgtcatacttttattttggaatagtacaagaaaaaattaccagaggaaagtatccatatgaactgactaaggaagatggtaccaaagttgtagaaaacgaaaaatatacctatgcggttactttagttctagtgcaatgtatactaaattatttaatagctaaaatagcggctactatgtggcctcaaggggaagataccacccgtacattatattatgcaagtatgtctttcacttatttactagccatgatctgctcaaatatggcactgcagtgggtgccataccccactcaagtaattggcaaatctgctaaacccatccctgtcatgatattgggagtattaattgggaataagagttatactgtaaagaaatacatttttgtattcatgatagttttcggcattgtgctatttatgttaaaggataaagttaaagcacagtctgaggaagcttctacaggtatgggagaattactgatagtgttatctctaatactggatggtctgataggagctatacaggatagaattcgagctgaatctaaacctacaggaattcagatgatgcaagtagccaatgcttggtctacattgtttttggctgtggccattgtaatatcaggagaatacttaaaattctatgaatttgctggcagacacccatctgtagtttacaatcttctaatgctaggtattacttctgctgtaggacaactgtttctctattcaatggtatccgaatttggaccacttgtagtatcagtagtcacaacaactagaaaattctttacagttctggcttccgtcctgctttcggcaatcccatatcta

SEQ ID NO: 8815 - DNA, 964 bp, Diabrotica virgifera
  SmartBlast Evalue=5E-11; Info=Endonuclease-reverse transcriptase n=1 Tax=Bombyx mori RepID=D7F159_BOMMO
aaacatgtcgatatcataacaaataaattaaaatttgaaagtgtgaaaaatctcagaaataataacttaataatgtcagtgccgtgaggatcacaaagactagaaatgttcagcgactcaaaaatctattgagtgctctcaattccgaaaaattacaaggcacctcttttatatacactttgggtataatatatacaagttacaacataaatacatagcctaatcacagataatattagaagataaaataaagttaaaatatttttatagtttttagaaattttatatcaaatcggttcattataacggtgcaatatgatgaacaaactcatctttttgttctccagtctcaagaatgcgttcatttagttcattatgaagattttcatcaaatagaattctttgttcaacatttaccactctagacctttgaaaaaacttgtagaaatagtaattaataaagaatatagactacagctattattaattttgtaattgtttgtttttagaactttttattatagtttacaatattattacaatttttctgtctatggtaaatgtaaaaatcatatattatttacctgtatgagcataaagactttgagaaagcgtttgattcagtccagcattgttaaaagcacttacagaatgcagcattgatcgtagttaaagagctcttcttcgtaacatatattaacagattaacagctgccgtgagaatctactgaggggacacaaacacatttcacttgaagaggggtattaggcaagggacaccatcgtctcttcaattgttcatcgctttgttacaaagtgttatgaggaacagtaattggtaaaatattggagtcaacatacatggggagtatctaaacaacttgacgtttgcagacgacatagtacttattgcagacagggggtatcatgcctgccaacttcatggctcttgtacacgagttgg

SEQ ID NO: 8816 - DNA, 968 bp, Diabrotica virgifera
  SmartBlast Evalue=2E-67; Info=Glutathione peroxidase n=1 Tax= Bombyx mori RepID=Q4H1F9_BOMMO
attaaaacattttattttggtatagtaaaataaaaatataaaaacattacttaacaatgaatatagagtcatactaacatcaagaaaatttaaaaaaataagcatttaccaatacttttctaaatatttgaccatatctttgggattggtgttaggtccatgtctttccacaggttgtccgtttttatcgatgatgaatttagtgaagttccatttaataaaatcgccaagaacacccccttgcttgtgcttcaaatatgaccacaagggatgagcgtcattaccattcacattaactttttcgaacatatcaaatttgacattcttgttctgcatgaattggcaaatttctgcattacttcccggttcctggcctgcgaactgattacacgggaaagcaaggattctgaggcctttagattctgcatactcatcgtacaattcgaccaattctgcgtagttatttttggtatatccacactgtgaggctacgttaactatgatacatacatggccccggtatttctccaaagatactggctctcctttgatgtcgtttgctgtgaattcgtagatagaattcgcatttttgtagttgtcgggactcgacatggtattagtggattgagaacaaccgtcaagactgtcactggaacaaaactgctcttctagtttagcacttgcttttactatagcgactataactaataacggtgctaataataaggttacacctatacctggtatacctatgccggtgctacaaggacgagtaataaacatgacttgatgactttgactttcaataaaactgtcagaataaaaatctgcgcatgtatcgattcgcgttgacgtgttgatgttgaatttgtgatcgttctctgatcgttctcgattataattaatcggaacacgtcagccgaccacagagccgacccacttataaataattaaaaagtttctacgtg

SEQ ID NO: 8817 - DNA, 963 bp, Diabrotica virgifera
  SmartBlast Evalue=2E-52; Info=Rho GTPase-activating protein 17 n=1 Tax=Harpegnathos saltator RepID=E2C3H4_9HYME
gggggtaagctatacgtttgttggtaattcgaaggtgttcttttagagacgtgccgaatactcttcttacatgactatcacctattctttctccaaatggggaatcagttcttgtaaatttttaagggcactttcatggtaacttctctgcactttcaacaattgtaacatatattccgaaatttcgttttctttcgctaaaacattgaacatttcaacggccaaagcgtcacgactctgctcgactttggtatcggcctcttccatgtcttctcgcaacgtttctttaccagaagcctggtatctattacttgcagaatccttatctaaacaatacttccttaagttatgtttgtgcttaagaatattcggaaaatcgttctccaggacgttctgcaaaggtttgtataccaaatcttcgactttcatctcatgatcggcatattctcgagctagctgttgttcagctttcccgcaatcgctcaggatcatctgcagcaaagggcattcgcggaattgtctggcttcttcgaggaaaacagtgcctagctgatattccaaggtctttttcgataatttgtcgatatctgcgagtccattgggggcgattttctttgtgatagcactaagagcccctcgcatgtattccactttctgatcggcattttgaagttcttcatggttgaagatttcacttttttcagccttgagaaaggtttggtcagccaactgctttacacgaaagaactgtttcttcatattaatagtcagtctattcagatcatcctctacaaaaggttttactatttaatataaattgctgatatgttcaaagtagaaccgagggaattccttcttcttcttgttgcagcaccaataataaacgtattatttacaaaaccacagacatgctttacgaaaaatgcacaaatttgttcttattgctcatcaacaacttcttat

SEQ ID NO: 8818 - DNA, 956 bp, Diabrotica virgifera
  SmartBlast Evalue=6E-28; Info=ADP-ribosylation factor-like 6 interacting protein isoform 1 n=2 Tax=Bombyx mori RepID=Q1HQA2_ BOMMO
caactaacctaaatacaatacatacatattttgagcaatctcccaaacatcaagttaaacggtaaaatattatcaactttccaacaccgaacagttgttactcgagttttctatgaccaactttggtcttggcgttctctaccaagtcggtgaatatttttgacgaaacggccgatactttggtcaggaagccattgtgcgccattccgggaagcaatgtcaagcctaaggcgacaatgtaggctaagaataggttgttgatggttcctccgatccaaatgaggatcgacaatccgataattgtgagactgaaatacatttttggattcgttaccctcaatctatagtaagaactaaccagcaattcagatttggttttatatagaatgatattcgtgcagatctcctcatactctttctgcttataagtattccaagtttcttgcttgtacattgtagacactactgatggtaaaacgtaatctccaacggtaatcatcaacccaattactgagataatggtcaataagtttggttcacataaccaaagcagcataaatatcgtggtacagcctgccgttaatgctgttgggtgccactgtttttcccatagtaaaatactatttaaattaaggatcagctctctatacgtttcaatatttaatttgagcctcctgatttgtgattccgtttcagacatgttgaccgcaatgcaactctcgaaatttcaatttttttaccttttggacgttaaaaataaaaattccagcctttgttttggttacccccgcagcagtgccactttggcgggaatttccgttccaatgcagaaagtcaacttgataggaaatatttaaatccaatttatggacgtctagagaaattttagcaagtaatactttaaaacaaagaaaacaccttacaatggtattacgtgttatcaaatgattaaaaat

SEQ ID NO: 8819 - DNA, 966 bp, Diabrotica virgifera
aagtcatcaatgtcagcgaattattcattaagtttgaacaattttatcaaaatataggtaacatctaatagtgattgtagtagttttccagtttgtgatatgtcgttggcaacattccatgatttttgcaataatgtctaccaatgcgcagaaaaactaggcgacgaaatcgaaactaatataaactactcacaaaatctcattacaaccaatgagacaatagatgtgaaacttcccctggaaaaagtgaaattgtatcactattgtgagataataaaactcctacaaaatgtaaaaagagatgttaaaaaaatactctatcacgagaaatccatcaatacattaatatccaccaaaaaactctcaggagaagagatcaaacattatttttcagttgaaaatgtgaacgaacgaaaatctacagaatattttataagacaggaaagaagaaggaaggcttcccaagtatctttatatacactaagtacgtgggaggcttatttaaaaaacaaagaacaagaagaagcagctattccagaagcatcaattgaagcaagtgcagtacccaagagaactgctccaaagtccaaaagaaaacaaaaaaagtttgtatcttctacctttaatgatatcttggaaaacgttgacaccgatattgagagtaactgcaagtctatagttgaagagaatgaggatgaggatgatgttggttatgatataaagctcagtaaacaatttcaaagttatagcgaaaacaatttaacagaaatggttgagtcatcagaattaagatcctgtgttagtgtagataattttggaccaacgaaaccaaaaatagttgatgttttgtacaagaagccaccagttacagaaatgggtttaattcagaaaatattttatccgaatattggatagagaatgacgtattaaaaggacataatagtttacttatatttgtaatataaa

SEQ ID NO: 8820 - DNA, 963 bp, Diabrotica virgifera
accgtataagaattatcgatttagttgaagaaggccattcacagcggttggtggtggaaagagtgggtgtttctcagagtgatgtctcacggatatgcaataggttcctggagaaaaactcgatacggaatagagctcggtctggtagactccgagttaccaatgatcgacagaatagatatatcagaatttatatatttgataaagacacggatctacaaaagcgcaaacatcgggaatacgaggggtgatgcataactcccgaaaccatgtgtagcaaaagcactactgttcgccactgattgctctcggagaaaacaggaagttatggcacaaatctttacttgtcttattttaattataataaaactacgaattgagcttttgtgaagacataaaatcattctaagatatcttgacgaactagtacaggttttgacagataatgtgaattttttgcagaatgatgtacggtataacagatttgactgcaaccctcaaggtcacttgcaccgcataaacgaacgtctgtcgtctcttctctcgcagttgtagataaatcgcttttgcatatcaccatgtacatcgtccatttctagttcgtaaagatattaataaatacagcattttcgtgatgaggaaaagatttgttttacaaatatcttacatctaatactttacataataaaacctattaataattatatacatttggcaaataagactaggaatatgtaactaacataaaatcagactactagcaactgggaattgttcttgagcgtaggcgcaaaatttcaagccaatgctttttaaatggattcattttttcaaatcgtgaaaaaactaataaatatttttgaaaaacgtaaacgcagaatgaaagattacgttattaccgagggccgaaagtcccttagaataaacaaaaagtttcttttgaataagatatttgaataaatc

SEQ ID NO: 8821 - DNA, 964 bp, Diabrotica virgifera
  SmartBlast Evalue=7E-56; Info=Rhomboid-4 n=1 Tax=Tribolium castaneum RepID=D2A5C5_TRICA
cgaagtaagcggaaaactaaaaaatggcacggaatgatccagaaaatatacccatggatgacgttgggtatattgactcaagaaagagacagatatttgaacagtgtgatactgacggagatggatatattacactggacgaattggcaaaatttatctccgacaatgaaacgtcctgtgcctgcattaaccctcgagctatcaaaaaaatttccagaacgctgataaagataaagatcacaagctcagttttcaagaatttgtagattttgttgaaagtgaagcttttcaatctttagtaaatagatgtatcactacatatattcatcatctaataccacatcccaaacaggcagtaagcctccgtgcagctcgtagtggtggcagacgtggtagtcaaggcgacctttgcgatgaatactcatgctttcctccacctgtttttatgttacttatttccatactcgaatttgctttattcataacagatgaactaacacaggaaggatcttcacttactgcaaccggtgttaccggccgatatcttctctacgatccagacaagaaaaaagaagtatggaggttcgtgacgtacatgtttgtacatattggatacaatcatataataacgaatctcgttgtacaactggcacttggaataccactagaaatggttaacaaatggtggagggttttgctcgtatattttttgggaggaatcgccggaagccttgcacattctataatcgacgggaacattcgtttaggaggtgccagtggaggtgtatatgcacttatgacagcacatttggcccaagtgataatgaattgggacagtttacgatttgcatcagtacaacttgtggttttcggactaataatatcgatcgatttgggcacagcgtcttatcaacggtacttcaaacaggaattaaatggaattggtgttacgtgtcatttgggc

SEQ ID NO: 8822 - DNA, 965 bp, Diabrotica virgifera
ttaaatcgtaataaagtgacatatcacgatattgaccaaaaatacaaatagatcaacttaagtatgttttaggccctattgattttgaccgatctcttaacaagcggcaaaaagcttggaatggatagctttgcattgctagctatttgaacctttataaggcatctgacaaaatcaaaattatacttaagtcgattacatcattttaatcgaactaatgacctagaaactcttcttcaatcagtgaatgaatatataattgaatataatgatttgttaatggacatacaaataatattacaaaatgtaaatattgtacatgagcaaaatcatgatctactaagtgaaagaggctcttcagtaggtatttaaattatgtaattttatttccgcaagggagcagattttaatagtatttatatctctaaatgtattgtcttctattatcttccataatatagtcttacaaggttgaatttctgtagaatagataaacaccaatatttgaggttcttttatgctgcatttgaattagaaaataaagcggaaatgaatcttaaacagttttttattatatagaacatgacaaaatcttgtgaaactattatgctggacttacaaatcaatatgtttcttgagtaaaacagtgaaaatgctctgtgcgggtttggtccatttgaaatcattattggaaacatagaaaaatacgatacaagcctgttttaaaataatattcatgttaacggtggttataacataaatctaactctctcttgtgtttatagactgttgacattacatattgatgtttaaataaagtgtttatcggtgttattgaattaagtggttaaccattttaaaaaaactgaggcttattcttgaatatttacaatttcttgtttacgaagaacaaagtagcataaaagactattataccaagtggaataaatgtattctcttaatgc

SEQ ID NO: 8823 - DNA, 966 bp, Diabrotica virgifera
  SmartBlast Evalue=3E-70; Info=Mediator of RNA polymerase II transcription subunit 14 n=1 Tax=Harpegnathos saltator RepID= E2BQN4_9HYME
tacaaactcttcaattcattttaagaaaaaaatgtaaataacaaatagtaggtgtagaaatatcgttaaattttagccgaagaaacggatagctcaagtaaaatggcccccgtacccttagaggggctccaaacgcccgtttccaatgcagtggcccaaaataatgtagctggtccccaggaaggcaatagaggaggaatgatgtctttagctatgttaatagattttattgtacaacgcacataccatgaactcacagtcttggctgagttactacctcggaaaactgacatggaaagaaagattgaaatatataattttgcaaccagaaccaggcaactttttgtcagactgctagcattggctaaatgggccaatagtgcttccaaagttgaaaaatcagcaagaatcatgaactttttggataaacaatccctcctatttgtggaaactgcagacatgttggcgagaatggcaagagaaacattggtacaagctagagtaccaaatttccacatcccagcagctgttgaggtacttacaacaggtacttatggaagacttcctgcttgtataagggaaagattgtcccacccgatcccataacaaattctgaaaagagaaatacattgttgaggttgaatcaggtcatccagcatagacttgtgactggaaatctgttaccacagatgaagaatttgaagattgaaaatggaagagtaactttccatgtgcaacatgaatttgaggtatccttaacagtaatgggtgatggtccgaacataccatggagactcttagaaattgacatcttagtaggtgataaagaaacaggtgacggaaaagctcttgtgcattcactccagactcagtacatccatcagttaatccaaacaagactcgtcgacaaccatcagcccctaactgaggtttacaactgtctacactttttctgccagtcactgc

SEQ ID NO: 8824 - DNA, 963 bp, Diabrotica virgifera
tcaaattaaatatgaaattgtccgaattattgtttacaaattgcaattcgtgaactaaattacagacccgcacatgtaattatacaataacaaattggttcatgtgatatacggggtgataaaattatactgttaaatatcggatatgaataatgaaggtttgatatttgacagccatcaattggaatatatgtgttggacattatgcttcccgagtatgctgttcctagctgttacttttcatctcgtttttatgcagtgttgtctgtaggtgagtcagtgggtgagggactggtctagaagtactctatgatatttagattggtctgtatgttctaattctaatgtattaccatttcatgcaatttggagttttcgtttagcttttttttgcgcgaaggtacaggtaatatgcagtaattatttttaagttccgagtttctcttatacttctgcaaaacgttttggtcagttgtatgtatattgaaaagcattggtgctaaaacacttccctgtgggaggccgcttttttgcattctccacctacttactttgccctccagtatgacgagaaaacgtctgttttatagtaaagaatgtgtggaaaaatatgttgtgccttattgtgccatagactgctgtcagatctacgaaagcagcctctattataagtttttcttaataagccctcttcaacgtgttctgtgtgcgaggtcttgacccgtgccagatttcccgggtctgaatcttctttgttgtgggatgaggtgcttgtcgacattttttattccggccaggatgtctcttgcatagtgtgaaaaagtgtccaaagatggaaataggtctgtagctactgggattttctgggtcccttcctggtgttgacaaggctattattttagatttccgttggtaacggcagtaaacgacaaattagtggagagttactgcttacgctcgtcc

SEQ ID NO: 8825 - DNA, 963 bp, Diabrotica virgifera
cgtcagaattgttaacttaagatgactgtcagaagagtatgcaaagactttatggacagtgaacaatttttgttcaccccaaaaaatcatcaaaagcattttgcacacaagcttattgtgatgataaacagaggaaattgttgggaacaggcacattttggaaccacatgtaaaggtcatgctgtcaccattcattattattaatagtgcaacataaagtagacgcctgaatacagtaatgttatcccaagaaataatcgcagtcatcagtaggaacagatagactgtagtattctactattcactctagcttcagctcaataacaactcatgagagctcataagacatgacacaaaagtattaaaataaccaaaaaatggtactttattttgatgaacctagaatgtagttctgttcgtgatggagatataaaggtgaatatatcaatgttgttgttcgatttaaatagaagtcagctgcaaacaaaatcagaatcaaatttggaaccatttgggtgactcgtttttagtttagtgagaatatttttacagtggtgccctctatccgttttatttacaaattcacataaaaatacatttcagaatgttctttatttaatgctaaacgaaataacgtatatatttgtactgtttcagtgacaattgtggatggtacagaattttgttaatttaaactaaatcagaaattaacaacctaatcatcagagagcatgcgctaatttacaactatcactctctgtccaagtcaccagtatgttgggccaaatttttgcgattaacagttcaaatacaacatctttattacaaaattaatatattttttttatttaaataattttatattttttacatttccattaataaaataactaaatttctttatgtaacttcttaaaatgtgtatttttaaaattaatttttaacttacatgctaataaacgc

SEQ ID NO: 8826 - DNA, 815 bp, Diabrotica virgifera
  SmartBlast Evalue=1E-32; Info=Chromobox protein-like protein 5 n=1 Tax=Camponotus floridanus RepID=E2AZR7_9HYME
gattcgctggaaaggctatggacaaggtgatgatacatgggaacctgaagacactttgaattgtccagatgccataaaagcatttaaggatgccaagaaaaagactaaaaaggtcaaaaaagatgctggagaagagtgggacgagaatgaagactttgaggttagtcgaattttggaagtgcaccataacaagaatggcaagagagagtttcttgtatcctggaagggattttcgccgaaagacaattcctgggaaccagaagagaatatggattgtaaagatttaatcgagaaatttatgaaaaaagttgacaaagctaaagatgttgacgaacgcgaacttagagtaaatagaaaacacgtgcaacgtttaacttataacacaccagacacatctcgtcgccttagtaggagaatgagcgggaaagaaagggcacaatacccaaaatgaaacgaaggggagttaaaaaggcacaaaaagcagaagatgactctaatggagtcgaagattttgtagaaaaaaacggcggtgcttcagatgtagaggatgaaagcgacgagcaaccaaaagataagaagagaaaatctaaatcaaaccgcaaaagtgcgtctcctagcaaaaaaacagttgacgaatccatggacgaagctgacccccttgaagacgttgaagaagtaaagaaaccgaaagaaaaaaccaaaaagtcgaaggcagtatctgaggatgaggacgaagatggcacaggcgatgagacccaatacgaggtggagaaagttctcgacgataaaatgatcgctggcgttcgccattattt

SEQ ID NO: 8827 - DNA, 940 bp, Diabrotica virgifera
tatctaaataagaattcttttataaaaaaattgagttccaaataatttcattcttatactaactgggctcttgttaacaatttaaaataatttagagctaccaatacaatccgtaattctatattttcgtgaaaattctataatataaaatattttttactacaaaaagtccaatttgtgtaactaccctaaaatctgataatactttccaatacatacctatctacggctaaagtatcacgggctatatttttgtgaaaaaggtaaaaattattgctacttggtcactcaaactgaacctgtgtacaaaaatatttgaagataataaagtaacatgtttttttttttgtttttatgaataaaaaattatgttctgtagcttctgttaatgttattcctaggtatttttacatcacgaacgaatctagctgtttttacaaaattgtctagtcttgtttgtgttttattatttaaaatttaacgttaaagcaaaatttaaacaattaaattaagaagcgaaaagtttatttcaataaagtcaaaagtaatattaaaatcagattaaaataaaacttttattgagatcaattttctggtaacgccttcgccgtttctataatttgcaaatcatgaaaatgacaagacaaagaaggctaggagatatctatgaattgcatcttacttccagcctgctcagcgtggcaaaaattccagcaaaatcttggtccgacatactttgttagaagtaactaataattttgctgtaaaacgaaatctagagacgtcttatatttaaattccataaacaccctaacgggtttcaagctagttagatatcatcagagagggaatatatgactttctctgaatgaactaaaacaaatccgacacttagtaccgaattagagcaaacaaagagatacggacgcagtggcggcat

SEQ ID NO: 8828 - DNA, 965 bp, Diabrotica virgifera
  SmartBlast Evalue=4E-27; Info=Salivary peroxidase n=1 Tax= Anopheles albimanus RepID=Q9XYP9_ANOAL
gcatgattttaaaaggtatatatacaattaataaaaactcaactgttactacaacacagtagatttcttcggtatatgaaatgtggttgtgtcataacttttttggagttattttatttctagtgagtttatcagtaaagcttattaatgcttctgtttgtggaccttcaccgattacatgtccccctataacagatatttacagaaactttgatgggacttgcaacaacctgaataatcctatttggggtgcgtcagggacactttacagcagactcgctaaagcgagatttgacacagatggtgtatcaattcggaaatcagcttgcactgctgaccaggatctaccaggagctaggcatgtcagactggctatatataaagatgatgacatatctgtcgattttgtacacccgagaatgtatgtaagctgccttaaatttcttgcagcggatatgggtaatcttgatatatattctgcttctgagccctgttgcacaatatatatgcagtttgtgtcaaatcctccatcgtattgcagttatatacccataccaagcaatgatcctgtctacactgaagtagatgccaaatgcatatctgttattaaaggggtgtcaaatattgaaaagggatgctctttaggatcatcccaagcggagtttgtgagtcagggtacattttggatagatatgtcaccattatatggttcaagtgtagctgaaaataaggcggtaagaaaatttagcgatggagaactgtacatggaacagagaaatggtcatttctatttacgtaatattacaaataccggacagtgtgatattcctcctggatcttacgatgcttgctaccaaactggtgatcccaacggtaacagatttccagatttcactacattcttaactttagcaacgaggcaacataacagaatagcagcgaaactaaaaaatatgaacagttgc

SEQ ID NO: 8829 - DNA, 965 bp, Diabrotica virgifera
ggcggacacggcgtccatctacctgttcccctacttgacttgagtagtttgtctaccaactcaaagagaaggataacccagaataccagtaatgaacggtagagtttgagctccgcgagtgtactgtattgtgagtgatcgtgaattcaaagtaaccatgaaagtctgtcttgttgtatctctagtagcatgcctgtcgtgtatttcattagcagtagaagttaagcacaaatcctcacattcggctgctcagggacatggacatgataataaaggtggacaagtcgttgtaaagaagcatggaagttcaagcggaaaaagtagcaaacatgatgaagcgcatgcaaataaaggtcaagaactagaagatttacacaaaacgtcgcacttagaaaaaggtggaaagaaaacatcacacaatgaagagggtggtcaccaatcagctaaacacagcagtggaggatcccatcatggcttgaagtatcaagaaggaaaaaaacataagaaagcaaattacttgaaaggattccgtgagaagtaccataaagacgaatctaacaaacatgacagtttctttagtaacggagaaaagagcggcgaattcgaaatttttggaaagaaaaattctaaatattcttctgaaagtttcgcaaaaaagaaaggaaagaatcataagaatgcatcatcagctaaagccggtggtaaggcttacaaatctggaaaaacacatcatgattctgatgccaaagctcataaaggacagggtggtttcgaaaaacatcataaaagcgcagaaaagttcgccaaaaagcacgcctcacatggaggcaaaaaatataaagttcactcaatttaagatgtaatatttataaaaattataaatatataaagtattttgttgataaatttatttgtaagtttaaaacagtttttgtaaaaaatttttaactaaaataaaatagaca

SEQ ID NO: 8830 - DNA, 964 bp, Diabrotica virgifera
  SmartBlast Evalue=4E-33; Info="Ubiquitin-protein E3 ligase, putative n=1 Tax=Pediculus humanus corporis RepID=E0VQ22_PEDHC"
ggtgttatcataaagaagtgcgttgagttctctattcagccagggtaccagtctattgcgagttaatggtgcttgcctgaaatactctggagtacacgccatgaaatttccatcaacatctggaggcgcaatggcccataaatttcgtgtataaacagatctccggaaagcagttgtagtcggaatctctcgtcttggcatctcacgtcttggaatctcacgtcgacgtctatgatatgcagaatgcctttcaggatatccacttgtactgactgaaatttggggatgtgtcaaaagcatttgttgtattgcatgttctccatgggtatccacagtaaatgttgtcctaaaatgaaagtgatgtctggtgggtggcagagcatttggtaaaaaagtattatattccctaatttcctcaacatgtatttcctcagcagtaaggtcattagcaagaatgtccaccacatgttcatcatattcgccattgtttttaatgttatgaagtattctggtaaatggctgcttgcaaagaggacattctgcttttatctttgaccattccaaaagacatttgaaacagaattgatgcaaacaagtatcagatacacatttatttgagaatgaacccaaacaaattgcacaatttggaggaggacttgaggaactaggacgttttatgagcagccgactctccgccattcttaatttctgatttattttccactgaaaaaatattgattccgaaaaacaatctttctaactacatttgtcataaccatatgaccttgtagatatgactggtagataaataaatattgcaaattttgcaaggaaattaattacgaatgcttgcaataatttcgaaacatcaaatttaaactacaactttttaaaagcaaatgcagaacaactgtaacaaaagaaattgataaaagctttccgccatattacactagggcactcg

SEQ ID NO: 8831 - DNA, 954 bp, Diabrotica virgifera
tactttcaaatttaaaagacacgaattgttttgctcgatttatttaaaattacattggaacatatttcagtcaaaaatgcaccaaacttaatctcaataattaaagaatctcaatctaatgtcaaaatttcagtcgaatcagactaatagttttgttttgaccttggaaaatcctacagcgaaatcaaggagcgcttggatgctgtgtactgtgactcttcttcttggatggcgattgttcaaaaatcggtccgaatttaaacgtgccgatgagctgcatgagccacgcccaggggccccaaaaaactggtatcacggaagataacttgacaaaaatcctgatttcgtattggcagaccgccaactgaagatgtgtgagatagctagatcatgaagggcgcatcattttgggaacgagaaagctgccagcgcgatgggtgctgcgtagtacatctcttgcatgaaggccgcatcattttgggcacgagaaagctgccagtgcgatgggtgctgcgtttgctcactccgaacaacaaacgcaaccgtgtgaccgattcagagcagtgtttgacgttgtttaaaggagtttctgcatcgtttcgtaatagtcaccgaaacatagatccactggtacacaccagagacctaggaacagtcgaaacatttgacttcaaccggcgaacttcgaagaaggcgaagacttcttatcagcaggaaaggtgataaccagcgctacctggggttcaaaaggtgtgatcgtgattgacttcgaccacctggaggaggtaaaatgttcataggctctactatggcaaattatttggtttattcggcataactgttcaaaaattttcgtttcttctgtaggctaagcattcatcagaccaccctcgtgtaagaatgcacagaggtgttagattgcttttgctagagcaatattggatattcataaac

SEQ ID NO: 8832 - DNA, 963 bp, Diabrotica virgifera
  SmartBlast Evalue=1E-99; Info="Cathepsin L-like proteinase"" n= 1 Tax=Diabrotica virgifera virgifera RepID=Q70EX2_DIAVI"
gtgcttgtcaagaataagaaaaggcataatgaaagtcattgttgttattgcttgtcttattgtgacaatcgctgccgaattgaacggttatgaccactgggtttctttcaaggctaaacattcaaagcaatataaaataacagaagataaactaagattccaaattttccaagacaaccttcgcgaaatagaagaacacaacgcaagatatgccaaaggagaagtaggatggtacaaaggtgtcactccattcgctgattggaccaaagaagaattcaaggctctgttgacacgtcaagctgcttccaggcctaaacttaacgagagtttgggggttcatgtcgccgatccaaatgttaagttggcatcctctgttgattggaggagcaaaggagcagtattgcctgtaagagaccaagctagctgtggatcatgctgggcattcagtaccgcagctgctttggagggacaactagcaatacacaaaaacgaaaaaattcctttgagtccacagaatcttgtggactgctctacacaaaatgacggttgtgatggtggagaccaagtgctggctttcaaattcattaaatcaagcggtattagctccgaagctgactacccatacgtaggagtcgaccagaagtgtcacaagaatgtccacaaaactgttagtaccatctccggctacaaacatctaagtgcaaatgaaaacgctttgatttctgctctttcttctattggaccaatctccgtttctgttgatgccagtgtttggtcactatacgcaggtggtcttttcgacgaaagagattgtggtactgatatcaaccatgcagtactcgctgcaggatacaccgacgaatacattttagtcaaaaattcttggggcacagactggggtgaagaagggtatatcagactagcaagaggacataacatatgccaaatcaacgaagataattc

SEQ ID NO: 8833 - DNA, 960 bp, Diabrotica virgifera
  SmartBlast Evalue=1E-10; Info="Juvenile hormone-inducible protein, putative n=1 Tax=Aedes aegypti RepID=Q175M5_AEDAE"
tcccctaatttcttactcaaattttcttcaaaaatgatagagaatgaatggattcgggcaaaatattttattattaaagataaatgatcataatcaaggaaatcttgaccggaatgggaataccctagctcagtaatgtcacttaatacaatcaaatcatctctaatcaagtaactttctggaataaactctaaatttgtctcaccaagttcttttaatagaggcacaaattttccatagaataaaacttcttttttgaaagccagggcagttataaatttctgaacaattgtttcttgagttggcaaaaatttaatgaaaaacttacaagttttcttttcgttttcttctattattaaaacgttgaggctggcacagtcagacaaaagtcctttattggatactgcttccaagtgataccgtataagcttgaaattgctatgaccaagtttcttctgtaacacttcgtaaatgtcttctctaagaacaattggcatatctaagtactccaccagttcttcgaaaaggatttggtttttagtggggtactgttcaagaagtatttccaacgtaaccaaaggtagtagatttcttaccaggtgttcgtattcttggaacgttatcaggctgtccaacttatgcaattctagtactttctgaattaggctgttgtagaaaagttttattaagtcatggtagtgaaggagtctttcttcttcattggtattcaataaaattattttgagagatttgaacgccagacattgaaacccaccacgtatttctgcctcggccttcttctgaaaatctttaattttcattgcatctactttattatgggcatttttaaacagtacgtcgatgcattttaagttaatattctttctgtccacgcaattttgttcagaactaccaagtagttcgggcaaaattttgagcagcactttaacacagtcaacc

SEQ ID NO: 8834 - DNA, 964 bp, Diabrotica virgifera
  SmartBlast Evalue=1E-102; Info=Cytochrome P450 n=1 Tax= Leptinotarsa decemlineata RepID=Q3I414_LEPDE
ttagttgatgaattagcccataatgagccaatagagataaaagatgttctaggtaacttttctacggatatcatcggttcctgcgcgtttggtttagagtgcaacagtttcaaagatccaaacaatccttttagaacatatggtcgacaaatatttcgcagaagtcctctacaaaatttaaaattcatgatagctaacaactttcctgattttgggcgattgattggcataacaattttggacaaagaggcagttgactttttcagtcaagttgtgagagacacagttgccaatagagagaaaaaccaagttcatcgtaatgatttcatgcagctgttgattaatataaaaaataataaagaggaggatgtggagcatatagacgatggaacttctcttacaatcgaccaaatcattgctcaaagtttcgtattttttactgctggttttgaaaccagctcaacaacaatagctttcgcattgtatgagctttctaaaaatcaaaatattcagcaaaaattaagggacgagatcagtcaagttcttaaaaagcacaatggacgaatcacttacgattctgttagtgaaatgaagtatatgaatcagattattgatgaaacgttacgaatacattcaccagcaccattcgttacaagagtttgcgttgaagactatgttgtcccaggttacgatgtaacaattaaaaaaggagtgcgtgtattcataccaatcaagggaatacatcttgatgcagagtattatccaaatcctaaggtatttgaatccagagaggttctcagatgaaaataaacacgacagagatcagtatgcgcatattccgtttggggaaggaccaagattatgtataggtatgcgattcggcttgatggaaacaaaagtagccttaaccaacattctaaaagactttaaaataactcttagcaaaaaaactgtacaaccctta

SEQ ID NO: 8835 - DNA, 965 bp, Diabrotica virgifera
  SmartBlast Evalue=1E-105; Info=Ribosomal protein L7A n=3 Tax= Cucujiformia RepID=D1M825_9CUCU
ttttttccactgacagcgactcgaagtgaggttgtctgtggtgtagatttaattttttaaatattataaacatcccttgaggatttaatttccaagatggtccaaaagaaacctaagaagaaggtaggaaagaaagtagctgcagctcctcttgcagtcaagaaaattgaacagaaaaaagaaattaacccactttttgaaaagaggcctagaaattttggaattggtcaggatattcaacctccccgtgatttatctcgatttgtaaaatggccaaaatacatccgtattcaaagacaaaaggctgtacttcaaaagagattgaaagttccaccaccaattaaccaattctctcaaaccattgacaaacaaacagccacccaattatttaaagtcttggaaaaatacaggcccgagacagcccttcaaaagaaaaataggttaaaggctaaggctgaagctaaggttgccaagaaagaggaggcacctgctaaaaaaccaaacacattgaaggctggtaccaatacagttactaagctgatcgaacagaaaaaagcccaattggttgttattgcacacgatgttgacccaattgagttggttctgttcctaccagccctctgcagaaaaatgggtgtcccatactgcatagttaaaggtaaagcaagacttggacttctagtaaggcgcaagacttgttcatctgtagctcttacacaagttgactctggagacaggtccaacttcaacaaacttttggaagtaatcaaaactaacttcaacgaccgtgttgatgaaatcaggaggcactggggtggtggtttgcttggatccaaatctgctgctcgtattgctaagttagagagagccaaggctaaagaattggctcagaaacaaggttaagaggaaggttttcttgttttaataacaggactttgtaataaataaatttattaagaaaaaaa

SEQ ID NO: 8836 - DNA, 955 bp, Diabrotica virgifera
aacaagaatgtgtgtgtactttgtacgcacgtaagaagttatacttctactacatattatgtgatttttaagacaataccaaaaatttaaaaaataaaagaataaaacgcacacaaacacattgaaaaatgccacaaagaaaaaatgatttctgaacgataataattgttggcaaaaattttaaatacgcattttctgaaaaaaaaattatataacaaatatacttacaatcataaaatgcataaaaaataaaaaaataaaacttgcatcgggaatcgaacccgtgaatttcgtggcgctttgattcgtaatcgaagcgtagactcactcgtccaatcccacattattttcatgtggaaaaataggtaactgaacgttttactgtttgacagttgttttgaatatattaaattatgtagtttaaattttgtggaagaaaatattaaaatataacaaaacagtaagaaaacaatatattagatgaagattggtagaacttttgttggtaatcaaattaagtatgtaaatcaaagcattacatacctactagataaataaatctacgccaaaaaatcataatttaaaaataaaaatcgaacctaatttgggatttctctctaaaatcccattcttgagaaaataaatgttattccaacctaatccaaatgtataattacaatatgattataataaaaactacttaccaaattagaatgagttttccttgtccaaaatagtccaaaagtccaaaaatatatatgaaaactatttaaaaaggcagtataactattaactaacttttgtttgttgtttctattcccacaaatttcaaaacgcaacaaccataaataatcaaaccacagctgtgccacagccgccgtattaaataatttttgacatgtcatttgaacatccaatcagaacaaagttataatgcgcatgcgcccggaacgta

SEQ ID NO: 8837 - DNA, 963 bp, Diabrotica virgifera
  SmartBlast Evalue=3E-54; Info=Probable sugar transporter RAG1AP1 n=8 Tax=Sophophora RepID=R1AP1_DROME
gttgatttgatgcctatggtagttgttataataggaatgtttcaatattaattctttaattttatctattaaataagaagtgcattaacaaattactgccatttttaaagttttccgaacatgaagatgagtcttgtgaatagccactattaaagaaatattgatcgtacatggaaatttggtgccaggtgtaaagacgtattttaatggaaattacctatacattaaatgatcaataatgaatgaaagtgatttcaaaagtattttggctacaactgcgtcaatttgtacaattctacagtttttaacaggaacgctaacctgccaaaaaattgttcaaaataagagtaccggagatatatcttcctttccatttgtaagtggttgtttgtcaacaagtttatggcttcgatatggatttttaattaatgacagttccataatattagtgaatacagtgggcgctacattattttttgcctacgttttgaccttttatttgtacagtatcaataagaccgccatagttcgtcaatttctgggatgcttatttttcctagtgataattctactccacatccataacaatgtgactgatgaagagctggtccgatcacatttgggactagtatgttgtggagtgactattttatttttcgccgctccgtttgtgtcacttctgcatgtaattaaaatgaagagtacagagagtcttccgtatcatcttattttcgctacgttcatcgtgtcgttgcaatggctcatttacggatatgttttaaaggacgagtttatccaggttccaaatttaattggatgcattctatcgggaatccagctgagcttgtttctgatatatccaaagaaaagtaaagtaagcgcactggtttaaatgttatagtactgataagatgtaatatattaaaatgttaacagagattaagattaaagttattaataacc

SEQ ID NO: 8838 - DNA, 961 bp, Diabrotica virgifera
  SmartBlast Evalue=3E-73; Info="Dcapl, putative n=1 Tax= Pediculus humanus corporis RepID=E0VI61_PEDHC"
tgtgtgccttctggaattcatgtcttgaagttcttgaagtgacttgctaacctgcagatatttcttccgtctctcttcttgatatattttcttcatagcctctgcttgtcgatgggccaattcgtcttcgcttaggtattcttttatttcttgtcgcactggggtcttgtagtggatggttacttcgttttccagatacttccttggtgattctttgggtctttcgggtgctggttttcgaagaccatgcaatggtatatccccacccttttgaataaatttgtaggcttcccgttgctcctttggactaagctgttgagctatcgcttcctcttttcgcctaaacaccaaggtggagtcgctttcatatccggactcctttaaggcctggtttatgaaactccttggatgaggctgaacttgaactctcctttgctgctccaaatgctgtttcgcttctttttctgagattgaggatttgccaggagtgtagttttctattcttcctggctggttcgcgtatttatccgctgagtttcgtacaacatcagaagatattgacctattaactgttggccttggcatcgtagatgaaatatattccgtagatcgatcttgtggcgccggccgtcttctatccagagtttgatatttataatcggtgaaatcactgtcataagcgcctggttccggctcagacagataaccggaagtgtaagggtattgcgctctcttctgtttatatcgtattgtaacatattcgtcattatgaggcttctgtttgtgaatagtgtcgtacatccttttgtaccattttgattgattttcgtcttttatttcagatctaagaaccagtggaagaccatctttggtaacgggaccaattccttcgaattttctaggccctaagtctgtcatttttcgagatctttcgttttcggattcgcttgtatactcgtgt

SEQ ID NO: 8839 - DNA, 960 bp, Diabrotica virgifera
tttatttaatataaatattaaaatctcttggcaacactgtccttcataagagtctgtactgaaaggtgaccgtggaacgcagtatagtagtggctcctttttttatttagtggaatataaataaaccaatcagatggcgatttttccgacttataaagaacgacacatatagaatacaggatatataatcctttgtcacctagtgactgcagcatttctcccggtattgtgtcgattcctggggatttatttctctttaacgatttaattgcgttttttacttcagagagtaataaagtagtttctctagggcaatcggagggccatatattttttgctggagtttcgttcttttattaaagtatattaaacagagtatttagttgatagaaaagtttaacgccaactatttttagaagaaaaatagtaaaactaaacagaaggttaacaaataaataaaatcaaaagaaattggaataaaaaatatggaattgacattattctaacgtggactacaaatctaagtatcagaatgaactttcgaaaaaaaaactgaatcatccgtaatttggtctttaaagaaaacacatcttgcaaaattttcggaacattaatgaactaggcatgctctaattagtgccatctgtaggctatagtggtattaataccaatttaataaactgaacgttttatagaacgaaaacgagaaacattttttgctaaataacgcgttgttttgacgtcagctgtcactatatagctaatatccaatgaattactgtacatcccgtatttaattaataaaatcataaaatgagcatgttgtataatattcttttagttgatttatttttgtatgtgatctcgattttattcaaaattagcacaatatttgagaacttgtcttttgtttgaaaatagtttcttttattaacttttcgttgtaaattacaaagtgta

SEQ ID NO: 8840 - DNA, 963 bp, Diabrotica virgifera
  SmartBlast Evalue=1E-77; Info=ATPase family AAA domain- containing protein 2B n=1 Tax=Harpegnathos saltator RepID= E2B2M3_9HYME
cgtcagctttcaaatctggttgtgtacttccttctggatgattttgttcaccttcatccattaattctggagtataaatgtaaggaggcaggtacttcaacggacagtgctttctttgacgtcgcttctgtgatatttcttgacatcggtcctcaaaatcggtatccatttcagtttttattaaagtatatgcataatctcgaagagaacacgctctatgcctaatttgtttatctgcagatgatttggcaggattatattctaaagcattttgacaaattaattcgatgtcggtcaaaaaatccttagcgcattcgtaacgatgaaaatcaactttagtcatcattgtttctaaatccatgggctgtttaataatgttggtataatcaggtacttcttcggtatctaccggtttggtaaacataaaaaataatctattattcgctaattttttacacatatccctaagaaatattctaagttctcttagcgtatgttcttcttcttcatacaattttttggtttctttttcgtcaagtggtaatggtggcggagttggtgccctaggaagaggcggaggagtttttggtaattcccttgcattttttacagacttcaaactactttcaattataaggggtttatagaagagtctcctcaagtcggcagtaggagcttcgacttctatcacttcccttcgataatatgaaaacagcttttgaacctgttcaggtaataattcatatgaattttctgctgtagccaaaaacagtataggaatattaggttccaaggatgttaactgtgaattaaatattgctcgtacggtatcagacacaagtgaccaccatgtatctatattgggaatataaactatgctgggtacatttttcctcgcttctatgaatacctgtatacaagcctcttcacaagatctacccgtttcttggtacagcattacca

SEQ ID NO: 8841 - DNA, 958 bp, Diabrotica virgifera
  SmartBlast Evalue=1E-51; Info=Probable RNA-directed DNA polymerase from transposon X-element n=1 Tax=Drosophila melanogaster RepID=RTXE_DROME
acggcagtttaaagtaaaagttaatgaagaagtctcggaatacaagcctattcactctggcgtacctcaagggagcatactaggaccattattgtacatactatatacatatgacttgcctacaaatgataaaacaaccatcgggacatttgcagacgacactgctatttttgccaagcatgacgatcctattgcagcaacacaaaatctccaagagcatctaaactcacttgaaatatggctgaagaagtggaagtttaaggtaaacgaaacaaaatcatcccatataacattcactctccggactggaacctgcccaccagtaaccatcaatcaaataaaaataccacaaagtaatcaagtcaaatatctagggctacactttgacaataaactcaactggaaacaccatataacaaagaaaagaatgcaacttgacctaaaaaccaaagaactttactggctcattggaagaaattcccatctttcaatagaaaacaaattgctaatatataaagcagtgataaagccaatctggacttatggcattgaactgtggggctgtgctagcaaatccaatactgtgattatccagagagcgcaatccaagatacttcgagcaatagttaatgcaccatggtatgtatcaaaccaaactctacacacagatctaaaaattccatatgtaaccgaagtcatccgagaaaacaacagaaaacaccacaacaaactagaagaccatcctaatccactacttcatccactactgcaacctgtccacaatagaagactcagaagaagctggccatccgacctaagaggtaactgaggaaacatcgctggatgtttacctctccacgtcaccacatttacaataattaatttaatgtaagaccaacaaattgacttatagatgtttgttttatatctgattgtcaataaagggagataaaaaaaa

SEQ ID NO: 8842 - DNA, 961 bp, Diabrotica virgifera
  misc_feature (928)..(928): n is a, c, g, or t
  SmartBlast Evalue=5E-87; Info=CG4330 n=3 Tax=melanogaster subgroup RepID=Q9VYG7_DROME
taaatattgtacttattaatactacctaatatatcatacaaaaattgcctaggcgtcgaccatcatggcgagatacagtgcttgtcagttgatgttgctcaaacgtcgagatctcgaccacgatctttcccgagcactggcgaacattatgtagaataagtttgtgccgatgttgatgccagccgcaaggtagaagaccattctccattggccgagggtttcctgtccttgtattataagccctatcacgtacggagccaaaaatccgcacatattcgctgcagagttcgtgattccatacatagtacccgcgtactgcggactcaaagcgatgtggttcatttggtttcctgcgtatacagctccaccgaacgtagctgtaagagctagcagcagctgggctgctaccttgtcgcaccccacgtatgctaccccgagtaatccaatagaaggaatgacggacgctacggaattgaacaccttgtaggatgtcgataacgataagtaccctttactaagtaaccaatcagcgaatatactgaacaatatacctccgatccaacttgtaaaatatggaacagccgaaagcaaagcatccgattgtatatcaaagtgtaaaatttgtgccatatacgttggtaattctgtcaactgggtgtaaaatgcccaagactgaccacattgtgttactaatatagcccataaaggcatgcaccgtaacatatgtttccatggtattgaagacgtatcacggtcgtcctgaggtcctatactggctaaaataaaagctttctcctgaggatcaatccttggatgtgacattggtgtatcgtatattaacagcacccaaaataagtaaccaaacgatgcccaacactccgaatatataaaaacttaaaggccaaccatatctaattttagggaacanagccatcctgatattggtaacgaaggatcgttc

SEQ ID NO: 8843 - DNA, 958 bp, Diabrotica virgifera
  SmartBlast Evalue=4E-29; Info=Integrin alpha-PS2 (Fragment) n=1 Tax=Camponotus floridanus RepID=E1ZXV3_9HYME
tacattcgactaaacacatgtacacacactcaataaaataaattaaaaaatcgagtcttttgtttgttagggcagtaaattagctaccgagtgtttaaatttgttatttgttctaattacagtgcttcgtcaccgctgtggtaaccgttcctgttgaggggttgcctttcgggagctggagatggtcgatttctcttgaagaaaccacacttgcttaacaaccatataagcagtaataacatcacaattccagccaccgctgatacgatataaatccataatggggctacttccggaacaatctccgtttctttggcaggtatttcagtaaatatttcgtattgctttagtacttgttcctgtttttctattcgtcctacgtatggtaagtttgtgatcgaccctaccatcatggacgatagttttatggcttggtcaccaccagaaagttctctaagggctctgacattcaatctcgacctcaaagcaatgtacacatccttgtctctatccaaagctccaacaacgcatctaatgtatatacatttggtagcattacacttaactagagcttgtatgttagcatagggatcaatatcagtcaatatttgcctcttagatcttgaatgccttcgtggagcatcgttctgaacgtcatcttcaactgagttgtggaagtaagtcgtaggaagcttaccactggtaaaagaaccaccttccgcagaccattctcttctatatcctccggatcctgaaccctgaccacgagtagatgtgctttgtcctgaactctgtccataagtagatgagccttgtccataattcgagccacttgcacttcctccatagtttgaactgcttccatagctcgaacttccaccataattggagctacctctataattggaacttcctccgtagttcgacgattggcttccgctgcctctgtaggattctt

SEQ ID NO: 8844 - DNA, 955 bp, Diabrotica virgifera
  SmartBlast Evalue=3E-93; Info=Endoplasmic reticulum-Golgi intermediate compartment protein 3 n=1 Tax=Camponotus floridanus RepID=E2AF11_9HYME
ttggaactaataatggtaccgtctcttctaacataagccgtaggaactatttttaaatagtactggaacattgtagagccttcacttgcaaaaacttctatatctttaagaggattgtgcgtatgactttctatcctatcgccaaatgataaatgccttattctgtgcgatgtattaaattcactagacgaaaatggctggacgtcgtgaacatgcaaatggctaacgctaaaactttctcctggtgctatatggaaactgccactcactctattcacaattaggctaccataaatttggcaaccttgcgtgaacgcggtttttaacttttcactgtatttttcatctttgcattgagatatggtttcgatgttgtccaaagcccatttgcgttcacggtaggcttctttgacttcctcacatgtgttgcagcaacgatccgccgcaccatagcagcttccgcactctgttttgttggcactgggctgcgttgtgtttttggatatagtgatattaattttattaggatcagctataggctttccttccagatctaatcttctcttatatacattatgatctatttctaaatgttgctctcctgaagaatccattgcgtctaacgctaaaaaatcacaggatatctttggaatgataaaatctatgtttatttgaatgttcggacttctagacgtatccacaaataattcttcagtaacatcaggcgtcatataatttaaaaactcggaccagaatagtaaagtcataatgataatgctaacgatagtaattgctccgcctccatatgtttgtatccttacgtcttctaatgttttggggtacgcatcaaatcgtcttaattttttaaaaagttcccacattttgttttatacttaaaaaattttaaatctagtgacgttgaaaaatgaaaactggattgttgattttccgaaat

SEQ ID NO: 8845 - DNA, 956 bp, Diabrotica virgifera
  SmartBlast Evalue=2E-52; Info=Methionine-R-sulfoxide reductase B1 n=2 Tax=Formicidae RepID=E2BEN1_9HYME
cgaatactacgtatctcccattttaaaagataggatggtaaaacggaaatattttatagatacacatattactaacattttgtatattgtttaataagtatttaatattaccaccaactttttcttgtcgtgtgggatgacaaactagagagttacgaatttttcgtactaaatttggcgataagggagatacggtgtatacgaagaggtcgctatttactcatctggtaaaaatatgcatgtgctaccttttttagacgataagtagggaccttttgaaacagatggcagattttcagaaaattatggagttacgcagtttacagattaggtcaacgatttttaaaataaataaataatcttcagctttcgtctttcttctcgtggggtataaagttcaatgatgcggaattgatgcagaatctcttcctggtcggtgggggaccatccccgaagacatggcccaaatgagcgccacattctgcgcaggtcacctcggttctgattctccctccactagtatcgggcgtgagttttacttttccttggtctagtacatcattaaaagcaggccatccacatccactgtcgtatttggtatcagagctaaataaggatacttcacacactatgcatacataagtaccagcatcgtagactttgttgtaagacccagtgaagggtctttctgttcctttttcctgtgtaacatgatactgcagaggagtcaattttttcctaatttcttctttatcaatcttttcgttggccatcacaacagctccagtatgtaggttttgtttaatagtacgggaaattagacaacggtaatcagttctggttctttggagattacgcaatactatttttaacatcacatccaatactgcaggaactgttcacaacatatgaacattctcgaaaattcacataaactttatgcttcactagaattc

SEQ ID NO: 8846 - DNA, 960 bp, Diabrotica virgifera
gctgggtttacacacgtttaatggtatataatcctcgtttcacacgctaagaaatttgaacgcacgatgacattccaatagtggctcgaacaatcatatgatacacggtggttggaacgttcggtataatgtgatagttaccatgggattcctcgagccaccattggaatgccatcgtgcgttctagcgatcgcacgttcaaattcttagtgtgtgaaaggagcgtaacagttggttgctccgcttagacgttattttcaagacaaaaaagcattgcgctcagtttacaatctatattattagtgtttagtataaagttcacattaaaaaaaataaacaccaaatacatttaagaaacaatatgagttattacagagttcccatcaaatcaaaccagtttagtaaacagcagaatagtattacaattgaaaattattgctcgtgcttttgtcatgatcagacaagcaactgtatcaaatctattagaaaaagataaaaaatgagcagaatgaatcttgtatcttagatataattactcattttgtaaaattttatggaagaaatccattactggagaattgatctggcaaaaactccattggccaaaaggtattgactggaggccacttgcctctgctgaaagattgatttagtagcggttttcaaaccgagctcttaaattattcatttaagaccaaaccgtcctgccgcggcgattaagtattgattaatcgccgtgccgttccttatcggaccgagtattgattgatccgttccatctctaatcctataccagcacagaatcattcgttctccttgatgtgtgtgtatatactatataacgcattgtcttataaaataagtattataccaataaaatgtaattacataatcgatgtattcaaattataaagagtctacttaaaatctaaaattaaatgtaaagtttgttatagggaa

SEQ ID NO: 8847 - DNA, 951 bp, Diabrotica virgifera
  SmartBlast Evalue=5E-11; Info=Eftud2 protein n=1 Tax=Culex quinquefasciatus RepID=B0VZB1_CULQU
gcagcggaagcgaatagttctctgtgtgatcgaagtgctaattattagagttgttgttgttttaaccaaaaaatggaattaaattcagatggcagaggaaatccacctgacagaggaaggattgacgatgttgctagtaatatggattatgaagttaatgaaaaacaaaaacagtctgaggaaattataaatattaatattaatacacaatcaaaacaggtaccgataacaaatccaaaaaactttttaccagattatcaggtaagcaataaaacaaataataatataggccagtccataatgtcagaggtgaaaaataaatacagtcaaggtgaccaaggtccttattttgtttttatgcagaataaggaagggaacatcggccgattgcatcgtatcgcgacagctcgcttaattttaggtgcagtacctgcaattaaagataatattgttaatattaatattataggaaaaataaaattaaaattgaatgtaacacatataaaagcgctaatattttagtggaatgtaaaaagttaatagaaagaaattacgatttatatattccaaatttttttactcaaaagagtggggtaattaaaggggtagacaaaaatatttcagaaaacgaattaaaaggtattattgttccaagatacggcaattttaaagtaataaacgttaaaagaataaagcgaaaagaaaatgatcaactggtggagacgggtacgatagtggtgtctttcagaggccaaatgattccaaaacaagtaatcattgagcgaatgatataccaagtggaaccttatgttccaagagtaatacaatgccttaattgcataagatacggccatgatacgtcacaatgtcgtggtaagaaaagatgcagcaagtgcggacaggaacatgattcagctgtatgcgatttaacagatcccacttgtatattat

SEQ ID NO: 8848 - DNA, 955 bp, Diabrotica virgifera
  SmartBlast Evalue=1E-115; Info=Cleavage and polyadenylation specificity factor subunit 3 n=3 Tax=Apocrita RepID=E2BWA8_9HYME
gatgcttggacaaaagctaccccttaagatgtctgtagattatatatcattttcggctcatacggattaccaacaaactagtgaatttatcagaatgttgaaacctccacacgtggttttagtacacggagaacaaaacgagatgaatcgattaaaggcagctctacaacgagaatacgaagacgacccaaatactacaatcaatttgtacaatccgaggaacacacactcagtggaactgtactttaggggtgagaaaaccgccaaagtgatgggtcaactggcagtggatgaaccccagcctggtaaaacgctaaacggtattttggttaagagaaatttcaattatcatatactatctgctgaggatttaccacaatatactgatttaagtatgagtcagataatgcagagacaaagcttacacttcgcctgcaacgttgcgatgcttagacacatgctgacacaagttgctggcttattggagccaatagacggagacagaaactgaaagccttcaatgcgatagacattacgatagaacaaaaagttgttacgttagagtggatggctaaccccgtcaatgacatgtatgccgattctctagttgctgcaattctacaagctgatctgttggatgttcctttaaaatctatgaacacatcaattaaagttgacagaatgcattttaaggaatgtctaattgagatgttacaggatatgtttggcgaagactcagtaccgaaaatatttaaaggagaaaagttatatgtaactgttaacgataaacgtgcagatatcaacttaactaatttggaagtgaaatgcccaaatgatgaaacattccagcaaattgtacaaacagcagttactaaacttatcagtgctagcaccacctcaagttgaaacgtaatctataatcagttttgaagtaattagacaattatcttaatag

SEQ ID NO: 8849 - DNA, 957 bp, Diabrotica virgifera
gatggctatgtggtatattactagaactaagtgtgcttttgctttttgttagtttaattctgtctttaatgccagctagtctcgatgacgacgatactcgatgcactaacggatggatctttctggcctgttcagcttgcttaagtttctcgctttccatgtgaactaccgactttaggtcatagcagaatttatcattgcagaccatgggactttgtagagctgccaacggacttttcaccaacaccgaatcctgctggttgttttccggtgtgtccaggaagaatttcggcactgaactttgtctaattattggaacctctttgggataattgatttttaaatgtaaacttcgagattgtcgcctttccataagagatttccggggaacacccattactggtgggggagataggaatgtattttctgattgtgctgtagtagtagctattgtattttccagtttcgtgtctgtgatatctccaaagctgacagtctttttaacagctgcggaattgtcctggaactccggttctagtgggtttaagtgggtcgtatcacttccaagagaatcgtatcctctttcttcatagtgcggatccagaactactgaaggaatatttggtatagaagaatgacttttgcttttctgtattatggtatttcttcttgtgggctgtacgatgatgggagatttatctttttttccggtaggggatctattgttactattgcccttccagctatcacagatacgctatcgtaaaacgccatattgtcgcaaaagttattgtttttttcgtcttttgtaattggttcctgataattggctatgctttcgtcgaagcaaaaccgttcttctataaaatgccaataacatgattccaggcaactctgacaacatttgcacatatttggtatgaacaccattcaataactgtctttgtgcgcgcttct

SEQ ID NO: 8850 - DNA, 958 bp, Diabrotica virgifera
  SmartBlast Evalue=0.000000001; Info=Pol-like protein n=1 Tax= Biomphalaria glabrata RepID=A3FMR3_BIOGL
gcaagctgttcgagatcctatatagacgtctttcaatagtatatttaggacaatcaattaagaaatgatttgtactgtctgttacattacaaacggaacattttggagcttcgctgtttgtaaataggtgtgcgtgtgtatacctactatggcctagtctcagacgtgttgagattatttgggattttctgcttattgctgtcggttgccactgagaaatgtcacttttaatcagttttagtttcgaaacagaattttgccactcccggttccacgcacttaacaatttatttttgaaaaaggctttaaattgctagccacactccgatattcgacctccgattcgtcattaccgataccatcgcgagcacttacatgtgaatgttatttttgacttaattgagaagtgtcactgtcactgtcagagtaagaattttctttaccaatctgaagatacattttcttcttaacagacgttaatttgcgctttatacttctatcttttaagtggggatatacttttgtgaacatatcagttagactgacgtaatcttttgtgtattcttgaatgatgctcaagggatcagcagaaccggtaatgttagttagaagcatatccagttggttgtaatcaagaacgaaagatggagaatgattttcaataaacgtttttgcgggttctagtagcagtgatacagagttactactactttccgttgaaacattttacttttcttgattttttgccgaattttaggctcacggaacaacttacattctgctgaagaagactcgacttcaggtgaagttatatcatcaacggtgcgcttatgagggttggattcttgagcaatgtttgttatcgtagttgttgtgtttgaatcgtgggatgctaacatcggttcttctaaaagttgatgtacatgtcgggaatctgcattgctgggaacgtgggaga

SEQ ID NO: 8851 - DNA, 958 bp, Diabrotica virgifera
  SmartBlast Evalue=1E-74; Info="Sarcosine dehydrogenase, mitochondrial n=1 Tax=Culex quinquefasciatus RepID=B0XBR3_CULQU"
gctttaggttgggaaagaccgtctatttcgtaaaagatcgtactgctcctgttaaaccttatgattggtatggctattacgatcatgttcttaatactgacgagcgctacaaaaaagagttggagagtgaacttacatatggattttctagaagccacgatttagttaaagaggaggctttggctgcgagaaataacgtagctatgtttgacctcacttgctatgctaaaatgtatctagcgggaccagatgcagaggaagcagctgattggttgtttaccgccaatgtagatagagcacccggaagtattatttatacatgttccttaaattcaagaggttatgttgaatcagatgttactgtaattccactcgaagaaggtgctggaaccttagtcggccctattttaaaaggaaaaggatattatattgtagcaggtgctaaatctggatatcaaactaaagctcatttcagaaagcaactctacaagaagaactttaagagtctggtaactgaaatgaccaacaggataggaattctctctatacaaggaccaaaaagtggcgaattacttcaatcgataactgaattccctataactaacgagcagcttccatatggaatgtctaaaattctaaaaatcaacggacacacttgcagagtactaaggataagttatattggagaattgggttacgaaatccacattccacttgcttcttgcatccctgtatataataaaattatggaagcgggaagaggatttgatttgaagcatgccggatttaaagccctagaatcgttaagttgaaaaaggctaccatctgcttaaccacgatctaagattagacgataatccaatagaagctggtttgggagctttttgcagaaaagatggacaatacttgggaaagcaggcggtagaaaattcaaacaaggtgttacaaagcgaagagt

SEQ ID NO: 8852 - DNA, 952 bp, Diabrotica virgifera
gagcgtataaattcacatttgggacctgtaaacttcacagattcacagatcttgaacaagatcgtttgaatttacaccactagggtattttacagtctacatcaataagccacagaccattttgacgacttggaagacaacattcgtcacgttattagcgatgtacgatgctaaatgatgtaaaacttgatcaacaattaattgattccgccaatatatcgtgaaaaaatccaggtctcacgaaaattcgaaacataaaccaacacctgaaccttttaaataaaggttttcatcaccaaaaaggaatatggcatattcgtgttccttagtgtactcagatctttgctaataatgtccattggatcagtggcagtcttcagttttcttttaataacgattctagattcctctctcctatggcgctacagtccaagtcgggccctaggctcccccagcatccgcctccaagtatctctgtctatagctactctcctccagttgtccatccctcaatatctctttagcatcggttctcacttcgtctaaccacctctttcttggtcttcttactggctgacgtcccaccatagttcctctaagtgttctgctaggtgttctgtcgttatccattcttataaggtgacctgctgtggtgttcctttctgcataatattattattattgttgtcattatgtcattctctcatgtcattgtcatatcattgtgtcacagtttgtcaatcatatgtatgtacaattttagtttattttaacctttaattctcaaggttttcattattacaatttaataaactaaaatttattcaacaatggataaactactcaagcctgatcgactagacatcgattccaattcaacaaatacaacacaactctggacacactggaagagaactttcaaaactttctagaagcagctaatgtatctgaa

SEQ ID NO: 8853 - DNA, 945 bp, Diabrotica virgifera
tagtattttaccttttgtatctgcttaattttagtctgtgatggtatttacttagggaattgtatatttaatttagacatgtacgagtatgcatcaaacccacccttaaaattgatttgtcatccgaaattcagattctgaatgctgaatgtttgccagtcacagtgttgccaagcatttttttgttaatttctttcaagaaatctatcgaaatcaatttcaatcaatggcataatgtacaagaatagattgtacaagaacgtttaaaatataaagatagacatagcgttgattgataaatatattataccagtttgctggtatttgtattaattaccgcttatagaaacgaaaataattatagaaaagacgccgtttttgggaaaagttgcttatcagttattttagctggaatcaaatcttaagattgtatgtattagtaatatcttacattatacatcttagcttcatttatctcttttatttatcagtttatcttcttttttagaacaattttaattaactttgatttaaaaccatttatcatcttttgaggtttttgtgtccaatatttacactaacattttattgtttacttttcaaaacttttccttatttcaaaactatttataaaaaagcaactgtatgcaatggcataatatgaaaaattgaagatatggcaacggtgtcgtatttcaaatttagaactagtaacaaacggatcacagaacacaatttcgcttgacaatgcggggttgccacctccgcttgaccgcgtgaaatagaaaattcgccgatttcgatttaacttgcttacgatgtgagttacagaataccaatccaaacacgaaaatgacgcgatagatatcaaacattccaatttcaggtaattacgattcgacttggtcatttctattcgatttgttataagttacagaatagggc

SEQ ID NO: 8854 - DNA, 950 bp, Diabrotica virgifera
taagataaacaaacactttgttaacatgttaaaacgttttttacacaacattgtttctgtttatgttaactatttcatacaaattattattaacaacctgcctaaactttgtacgctgcttgatatggttaatataatattaatgatcgtattataatatgaaaacaattttacatcttcaacatttatatagctcttatattttaacaaatataggtataaaaactaactaccacactatcttagagcctaaatgaacactttactttgtatttgtattagtaagatttgaacttattcgaatggtttaaaaatttttaacctaaaggtgccccgctcatcattttttctgcgcagtaatgggggaactgcactccagagagtagaatctccgcaaaacccgctaacggctccaggcaaacacttagtggatggactataatgtataatcctgcacatattcctgctatccaaaatgaaacaattatcaaaataagcagccagatgattgagtatacaacattccccatctttaaatctcttgatgtgctttgattaaataataacaaaacaagcagcaaagttgataatcaacctctgcacatgtagtatttgtgtcacactcggttaagtaatgtggaaaagtataggcgtaaccataaagatgggaaaacgagtttcgatatacctcaccgctgcttgctttggttacctatacactataatacagcacacgtaggatttgtttctatttttacttgaactttatttcccgctgattggattctctctcttcttctatgggtgcaccaacggaatggtaaatggttttgtcatcaagcggtgaccggtcaccttattgttgatggtgtaataagtcttaattttttttaatttacttcaatgattactatgaatgaagtaagactgatatgatgtgttaacattgt

SEQ ID NO: 8855 - DNA, 958 bp, Diabrotica virgifera
atacagcgaatgatatgttcttgtggctgattttatcctggtatgaacaaaaattcttaaatattcgaagggctttatggatctactagaatggatctactagatatgaataggagtgatctgagaatcatcgtggatctgttaacaggacacatgatgtcgcctcaaggggcacatcacaaaatcggactgacagaaagtacaaattgcagattctgtcaggttgatgactagacggcgaaacacgttctattcaactacccaccgttggataggataaagctcaatatatttgagcattatcaaatcgagctctacgactttgtagaagcgtcaactaaggccataataaattttattaaaaagcctgcgctgaagggactttaacctagggatgagccacaataataggcctcttaggtagagtggaagaatggttaaagagactactcatatttaacctaacttaatctaacctaacctattcacagtatgatccagaaaataacacagctcggatacattaaaaccaaaactcttcagttaggtactcagtccgactaaagatatacaaagttagtaacaacggaaaagtaacaatacgatttttgagcatgtcgagaaggcgttaaattggaaactcaattccactgtagaaagtgtcaataaatcgtactcaaaccaagaagatggttttggataaatacactaatccacactagctgctcttagtaccaatgctggatggagagaaaatatgacgattaactgtcaacaactacgaacccttaactactgaagaagtattaaatattatcaaagactttcatgactgaaaatctccttggctaaacaaacgaatttcaaaacttttggtttagtcaattttctggtattcgtaggtacattaatagtctaatgtggtaatacgcaaaactatgaaatatacaagcaacct

SEQ ID NO: 8856 - DNA, 957 bp, Diabrotica virgifera
  SmartBlast Evalue=1E-111; Info=E3 ubiquitin-protein ligase HUWE1 n=1 Tax=Harpegnathos saltator RepID=E2BHC6_9HYME
gctgatatttctgatttattatgtcctttgcaacaaatattattaggatcagttcccaattggattaaatcattcaataaaagcattatagccctagtagcgtcttgtcttaagctaggttgatgtcgcattagttcgtccatggcattgcccaaattgcaagctgtatcagctgttggttcagagctgcgtcttcttctcatagctggcaaatattttggcgatactaatatgctagaaagtttttcaaatggtttaagcttcgcaaaggcttctagtcctctcgtatttaaacataatgcactgaatacatttggaagagagcctagaacttctctagttgcaggtacatcctttactaatagggagtgcagtacaatgtcagttagtccattgtcttgtaaagcagaaagtaatgctggctcttgatatacatatacagtgactacatcagtagcaagtagaaatagggatggaccataatattctgcattggcaataatatttttaagtgaatcaggtaaagtaccttccataagatgcctaatgctttcagcaaatgtggagtcttggaacgcttttttaagaaagttcaacatggattttagtaaagctgccctttgtggaagacagattttgccctcattttctggaagatgtactatatccacacaaagagtctctcctttatctggcgctctagaagtgctaggtgcactttcatcgtgttcaatagtagtgttgtgttgaatttggtaatgctggtgtggtaggcagtaggtaacttcattatctaatctgtttatgaaactatgtaaacctccatgagtttgaaatgctgccatatcaatattagtaatcaaatcaattacgcgtacagcacgtgttacaaatgttatatgatctaatgcaaatccttgccaatttattacttgtaatagagattccatcattcca

SEQ ID NO: 8857 - DNA, 941 bp, Diabrotica virgifera
ctcttgtttcctttttttgtattatcactatcctttttctgtgcttgtttcgtcaacgttattcctatggtacagttatttgttagttttttgatgctgttttgatcattgtgccccctttgtcgttccacttccattcgatgttatttacccatattttttttactcccattttgacttcatttcctttatttctttcttcctgggcaatgtttctaattgttttctgtatatctcgttcttttatggttgtatcttcgttgatatataccttgtgctctttaatttcttttaacttatactttttttccattatttttcttttttcttcttggttttctaattcaatgaggcatgttttttctcctagcttgtgagcattccttattttaacctctactcctaagtgttgtttgatgaaattgttagttgtttcttttaaccctgcttgttcatatgtgtctatccttagaccgttcatgactacgttatttattcgtcggtgtttttccataacttccatgtggtttgttatttctctgagttcctccttgatttctattttcttgttttagttccgcattttcttttctcagctctctgttttctataatgagcttttctattgcttccttgctttctttttgatttctttttatttccttaatgtcatcggtgaggtggctcatcattattattaattgatcaatttttgtttcttcatttcttttctcttgatttttgttggatgttctcgagaacttttttgttctttgtaaaaaatatcattttcttcgttatccatatatctgtccttcctttttgaccctccttctgactgtgtgtcatcactgtctaaagtttccagatacctttccattttccggcgccaaacactgtcttccacctcaacagtgcagagaagacagcgtttaccgtat

SEQ ID NO: 8858 - DNA, 959 bp, Diabrotica virgifera
  SmartBlast Evalue=1E-115; Info=Pre-mRNA-processing factor 19 n= 3 Tax=Aculeata RepID=E2AHR8_9HYME
aggacataccaaaaaagtcacaaaggttatttaccatccagatgaagatttagttttaactgcttctccagatgccaccattcgtgtctggaatgtaccaacatcacaaacaactttacttttgcgacctcatgaaggtcctattactggtttgtcattacatcctacaggagactatgtactgtcgacatcagaagatcaatattgggcgttttcagatataagaactggaactttgttagctaaactttcagataataccaatacacctttaacaacagcacagttacatcctgatggtttaatttttggagttggtacagcagattctcaagtcaaaatttgggacttaaaagaacagactacagctgcaaatttcacaggacattccggagcaatttcatctatatcattctctgaaaatggttactatttagcgacagctgctgatgatgcttgtgtaaaactgtgggatttgcgaaagttacgaaatttcaaaacattacaattagatgaaggttaccagatcaaagatctctgctttgaccagagtggtgcatatctagcggtagctggaacagatgttagagtgtacctttgcaaacaatggcaagaactgaaagtatttaacgatcacactgctactgctaccggagttcgattcggtaaacatgccagatttattgcctcgacttccatggacagaacgttaaaattgtatggtttagattaaaagaattcaatagtaaatatctttaaatatgaacttaaccttcttctatttgagcgctcttattgtttctggttatattattggttgtacagcaagtatttggaactgaaaattaaagctatttggtgctttgcattctgtttccttattagcgtttgtaggacaaatgtttttaacacgggaaatcaaaagttttatcttagtcagaattttaagaaacagggat

SEQ ID NO: 8859 - DNA, 957 bp, Diabrotica virgifera
  SmartBlast Evalue=1E-63; Info="Aldo-keto reductase, putative n= 1 Tax=Pediculus humanus corporis RepID=E0VK94_PEDHC"
cattgtgttgggtacaaactgaaagtaaacttttttgcggccctattttgggcggcggtgttttttgcaaataatcaacctagtggtgccgttttgtcaaaagatttaaaggcgattttacctagtggagatcaaatgccattgattggatttggtaccagtaaaattttgggcacagaattagttaaaaataccttagacgacgcattagcagcaggttacagactatttgatacagcagctgtttatggtaacgaagaagatattggaaaggcgttaaaggaattgttgccaaaacataatttaaccagaaaagatatttggataacatctaaacttgctgcacgagccgaaactcttggcaaaaatgcctacgctgccttggaaaaatcagtaaaaactatcaactgcgactacttggatttatacttgattcattttcccggaattccatcgcccgaaaagaagaattattcagccctacgcgacgaaagctggcaacaattggttaagggcgtcaaaaatggtttaaccagaaatatcggagtatcaaactataatgttcatcatttaactgaactagttaataatgatcatggtgttaaagttgcagttgatcaggtagagtggaatccacgttttcatcaagatgatctcataaacttctgcaaacagaatggaatccttcttcaagcatacttctccataggaggaacaggcaatacagatttaataaataacgttgaagtaaaaaaaattgctgaaaaattaggcaaacacccggcacaggtgctgttgcgttgggccgtacaacaaaatgttgcagttattccaaaatcactatcaagaaaacatatggactcaaatctagatttgaatttcgaaataccacaagctgatatggaagttctgaatagcttcccacagaaacttaagaatcctggttggaatcctgat

SEQ ID NO: 8860 - DNA, 957 bp, Diabrotica virgifera
ttcactgcatgtacctgtaacctgtgatacaaattacaatagctgcaatgttaaactttttgataaacttctctttgtttggtggtgtggttttggtttcgccttttgtgattttgacgttttttgttttaaaagtctataaagcactatggatgaatgtgctttccatgctacaccccaatgtagaattcatcaaatatgatacagtgagatcattgctagacacgcaccggaaccaggggatcgtatgtgttcttttaagtataaaggggcaagcccaacccgaagcagtcagaagacatttgcaggaagtggttcgacgaagagataaaacgggaaacttggcatttttaagacttaggcattgtttggtaactaagtgtggatcttatggttggcaaaactcgaagttcaatttggatcagcatttgacagtcgttccatttacttataaaggaagagctgtgacagaatataacatacaagattatgtgaacgagatagtttcaaaatatatgcctggaaatatttctccctggcaaataacaataataccttcttcagaagatcaacattatattctattcagactacaccacatacttctttctgaaggccttaacataggagacttgctacctttaatacctccaactcggcgccagttgggtcgtatgtatcaagaagccctttggttagaagtatttaaaaaaacctgaagtcatccttgtactaaaagatcgattaacagaagaattatccaaccgttggaatgagttcgtagcaaataatgatccactagaacgaccagagttactaaaaagtaccccaacttttttccagtttgtatcatactgcctactaagctttgtctctgttattagagactgcagaaaaggttttagagtaattaaaccagatgctttttctagattcaaatatgtagtacaatctgtg

SEQ ID NO: 8861 - DNA, 959 bp, Diabrotica virgifera
caaatttgactaatacatgaatcaattttatatatacgtttctatgaaaatgaaatttttttttgaatgctcctcattcagtggcagaaaactctattggcagctgcccaaataaaaccgaatagtaggtacacagtttatatacaatataaacataaaatcaagatactctgtcaaaatattcacagtagttatttgaatttggtggcaatgaagttctctctgggtgtggcaattttatgtttactattaattaaccatgtacgtggttcatttatctatggtcaaccgtgcacagaaaaaaatacagcttacttacaagttggaacatggagaataccagaaaaccgaacctactgcgttgatgtcactgggttcaagaaaaacatgcactcgaggattaacctgagcaaatacaaagaattttttgacgcagtccagttagcagataccctttactcagaccaatgcaatttaaccagatttccaatagttattgtaaaatcgttgccaaatgttgagctggttgatctttcgattaatgtcatccataaactacctaccaaactggataaatatgctccaaatataaaaaagcttcttctgtcagataaccgagttttcgtaccaaggagaggacctttgttatcttctaaaactctagaaactttaagcttaagtaataatcaaattaataaagtatataagtcaacttttaaaaagttacctaacttacaggtattgtatctagataacaataaccttcaaactcttgagcccatatttgggactgtacaaaatttacaatttttacatgtaggacgtaattatctgacaagtttacctccaaaggaggagatatctcattccttaaaacgctatataacaaagtcacaaaaggagttaagacaatagtgattagaattaataagtttagtttttagataataaaatttaac

SEQ ID NO: 8862 - DNA, 956 bp, Diabrotica virgifera
  SmartBlast Evalue=6E-60; Info=Uncharacterized family 31 glucosidase KIAA1161 n=1 Tax=Harpegnathos saltator RepID=E2BP96_ 9HYME
attgtataactagaccagtgtgtagataaaacaatgctattatctaattaaaaaaaatattttttattatggctccatctatcgacaactagaataactagaataaatgttataaaaatgtcaacgacgaaatgtaatcaccaacgtgccttttttctgtcacatacaatttaatgcgttagaaagaaatcgaaaaactgtgacgcactgaaagatgatcatgagaaatactgtattaccgttctattacacattatatttgcgatcgctggagtaaagaattgtatattttattgagaatttttaacgatacgacgaatttactgctggttgtttttttttaaatatcggtactgggtattttcccattgattttgttttattttattttttttgtttagtcgaactttacaaatgtagtttggtcgaaccgtatccgaaaatggttgacatgttgatcaaaaacgagtatcatcaggcattcgttcaaagtaggcgacgttatcttcttctaccctgtagtcatgaatccatcggctgccctttcttaaacttccgtctattccatctttccaaacaccggcaggtagatatatttccctctctctagcaccactatgtaaaacaggagctacaattatttcatcgccgatggaaaattcgtcaacagccaaatgacacgcgggatcgtctgagtccaacatccataacggacgaataattggcaaacccaaatttaatgacacccttgcaaatttctttaattttggtgtaatactttcatgtcgtttcttagctaattcctttgctaaacctgctatgttattttgtgaataactatttggcaaatgccggtatcttactacaggaagaaatgtagctagctgcaaccatcttatataaagctctggatctgctaaaacgttttccgttccatttgtaaccaacattgtttc

SEQ ID NO: 8863 - DNA, 958 bp, Diabrotica virgifera
  SmartBlast Evalue=2E-75; Info=Chromatin modifying protein 1b n= 3 Tax=Endopterygota RepID=Q2F5S8_BOMMO
ttaagaattccagaaatttgttgattatataggtttttaagtttataactgttccttactgttttaaaaagtgattttataatttcagtggaagttggtgaagattaatcataaaattaagtaactgagtacaaatcttcaataaaaacaacacacctttttactaatataagcaatattaaaaaacggaatatgggtaatgaaatgtcttcaactgctatggaaaagcacctcttcaacctgaaatttgccgtgaaggaactagagagaaactccaagagatgcgaaaaggaggaaaaacaagaaaaggccaaaaccaaacaagccatccaaaaaggaaacatggaagtagctagaatacatgccgaaaatgcaattcgacaaaaaaatcaatctgtcaattacttacgaatgtccgctagggtagatgctgtagctagtaagattcagtcggctgttaccactaggaaagtaaccaattccatggcaggagtggtgaaagccatggatgtggctatgaagagtatgaatctggagaagatatctcaagttatggataagtttgagcaacaattcgaagatctgggtgtgcaaacggatgtattagaaaataccatgggccaaactactactacgcttatacctcaaaatgatgtggattcacttatgcaacaagtagctgatgaagctggattggaattgaacatggaactgccagaaggacctcaaagctccgcagtgagcacctctacggtggttcacgaacaggacgaactgacccaacgattggccagattgagacaggccgaatagaaccgccgcgcttaagtgatatggacaataaaaatattatgatctactattttatattctaagcttcgattaatttgtcagccattttgctggagattatgaaacttatcaatgaaaatatttttgttattaatgtgtagaaggg

SEQ ID NO: 8864 - DNA, 956 bp, Diabrotica virgifera
ccccgttaacgctgtagttccttttagctctcttattttgaacataatcaataacctactaatatgatttaaaatgcttcttaacaagttaaaattatggaaagcaatgaaaaaatcggtttttaaaatcaaaacctgatacctatggttgtgtttctaaatgtaatacactatctcactatttgaaaacttaattccgttaacattacacaattttcactctattctgctttgcactaacaacttttttacattagatgacacagtctgacttgtctgtccttccactaacgtctatattttcaaaaaaattagatatatttattcacccaactaaaaactgactcttggtaacatctggtaaatttgtaatggtttattggtttcaatgtgtgtccttttcggcaatacaatgattcttagcactttattctcttgtaaataggtggactactgctgcacaactttaaaacttctttcatataaaattatttttaattagacacatattcgatgacacacagttttgcttgcctatcacttttgttaaatggtaatcttattagattagtggacctgttgtattaagaaattatgcagctgcttttgccctttttatttgcagaatcatcatcgactactgtgataacatagttatcttccgattcctttcttcctttccttttgtgccacctatcccaatctttctcatttctgggcagctttttaactggaaatggttcatgtaagccccacctgttatcagatttaggatctggttctgaggaaaaagaacggtcaaaggaaggaacgttttttgctttatccatacttatttcacttgtcttgtagaacgaacgtattattttattactaaacgattaacaataactcacaaaaattaagtatatgaattaatatcacgaacatgtaggtattgactacctgtaggtttc

SEQ ID NO: 8865 - DNA, 957 bp, Diabrotica virgifera
  SmartBlast Evalue=9E-11; Info="27 kDa hemolymph protein, putative n=1 Tax=Pediculus humanus corporis RepID=E0VKF6_PEDHC"
agacaagagtatcattctggacctgttgcacatggtgtgctgttatttagttttagcttataattgcaagcgaaaagagtggtagtagtaacgaattagcattcgtagatttcgctcagtaataattttagttctagtgaattagattattcaaaattatgaagcttcttggaaaagttcttgtaactttattgataggttgcgcgtacaccctgaaccttaataaacgcgaagactttggaaatctaaatcaaccaggagtacattttggtaacagcggaactagttcatttggtggcagaggaaataatccatttggtagcgttggtaattcacaggcaaacgcaaattttatgcaggcccaaagtatgctagcgcagctctcagcaatgataaaacagaaatgtgaacaaactggacattctgacgtatttcagacttttcaggcacagtttgagcagactacaaaatgcatggaaggcaaaataaatttaaacggaaatgttgttggtgaagactttagtaatgctgcacgaactaaccagctacctaacttttttaagaaatactgtaagctttggcctgacgttcatgggtgtactcagcctattgtgacttctattgaaaaatgtttgaatagcgatgaaaagcgcgctgttgaagaatcagtttctctcctcgatgacacgaataatttcttctgcgaaaacaatgctgatcgcagtataagactacttaatggtaatattgtgcaatgtttgcagactgtaggtagagagatccaagaatgtgcaacaaatctggcgcagaagaggcaaactcaccaaagtggccgaaagagcttgttcccttatgatgaagaggactgcagcgacttcaagactggccgtcaatgcatcaactcaaagctaactaaatgcgaatcaaaagatccttccaaaatctttgatgactatt

SEQ ID NO: 8866 - DNA, 958 bp, Diabrotica virgifera
  SmartBlast Evalue=8E-52; Info=FAM96B n=2 Tax=Culicini RepID= B0WXK4_CULQU
ggctatcactacacctactccgatacagtctacaaaaattacaaacagtaaattctggataaattggaaaaacgataactggagaactatcgagaatgctatcgttgttatactaagcgctcctgcaaatagaactagaaatgcaggatcgtctcttgcgtattgtgacttcgcttgcttcctagccctaaataattttattagtttttggggattaacaaataaataaaacatttgccacatggcaaactgaaagtccatttggtcaaatttgaatatttttctcatgtatctagcacatttactataggcagatgccatgttacatggagaagtgaggtatatgttagaattactcattttagcctctatttcttgaagcgatacactgattaataactttaataagatgagaattttctaaagctgctgctactcgttctttatcggccaactgtttgttgacttgatgttcagcgttgtgcgttcctggggtaacttcaactcttactttgaatctcgaaggcaggcaccgaagtaatttcactcttatggacagacctatcagtgtggccatactacagtgcggaatagttggagtaaagttgataaggattgaattctttccattatcaatgctgatgagattttcctggacaacatgcaattgttctaaagatagtggatgttctgggtcgttgatatctctgattaaatcaaatatttctctttgatcaaattcatccactacagtgtcatcctcttcatccaaagtggctgttctgtcatcagttgttttataaacgttgggattttggttttccaattgacctaccgacataatatcaaataatttttcaacagtaatggaagttaatttatacctacaaaatttattggttattgagaagtatttaaaacgtaatttattttttgccttggataaattccatcgcaa

SEQ ID NO: 8867 - DNA, 958 bp, Diabrotica virgifera
  SmartBlast Evalue=0.000000003; Info=Myosin light chain kinase n= 1 Tax=Culex quinquefasciatus RepID=B0WJM6_CULQU
cctgaggatgtaaaactgatagaaaaggtcacaccagtaggtgtagaaaagagtacagtcaaacaaagaactgttaaacatcgtagaggtagtaagttgcaaacgacaaccttaataactacagaagaagaaggaaaggaaccacaaacatctgttgttattgaagaagacgatatatttgaagaaattccaaaagcacctttggttataccagaggtagtaattgaggaattaccaactgaagtgaagattgtagaaacaatcgataaacgcggaaaacctaagaaacaggtcgtagaaaaaagaactcttaaaaaaacggaaaggcagtaaggaagaaattattaagattgaaatagtacaggaagaagaccgaaagcctcaaggttcagtaacaattgaagaaatagatactgaagaaacaactttacctttagaacccacttacatcgaagatactcctgaggaagtaacagtgatagaacatattgacaagaaaggtgtacctaaaaaacaaatttctaaaaagaaagttatcaagaagagaacaggcaataaagaacaaacaactgaaatatttactgtgatagaagaaggagaattgccaaaaacaacagtgatcactgaggagcatgaaataacgagtgagatggtggaaacaattccttcgatagcacctgtactaccatcatacatagaagaacttcccgaagaagttattgtaaccaaagcacaggttcaagaaggagaacaaattacaaaaatagtaaaaaggaaatttaagaaacctaaaggagataaagacgagataattgaaattttatgtattgaagaggaaggtaaaacgccacaatatagcatagtaattgaggaagaatttgaggaaccggaaacacctaaggtaaagaaaataaagaaaaagaaacccaaggaagaaaaattagaagaagaaataccg

SEQ ID NO: 8868 - DNA, 954 bp, Diabrotica virgifera
gagaagggaataaaaagaatggagaatatctaaaccacgtacgatatgccgatgatgtcttaccgatagaaagtgataaagaggagttaagtaatgtgcttttgaaactagatagagaagcacgaaaaatcggtcttagaataaactatgagaaacacaaaaacaatgagtaatacctccgagaatatcacaatagcaatacaaaacaatcatgacacaaaatgattacaatttacgtatagttgggacaaatcataaaatttaacaaagaaaatcagactgtggagataagacgtcaaatcgaatagcatggaaaggacaaatatctgcaaaaccatctatactttgtttcacgttaagattagaacgttacgcttatggagatcagtgctgccaaacctctcgggcacgggtggctactcgactgccgatatacgaatcattttaatcagtacggagtggcatcggcgcgcttttatcgttcataagaaatatatggggctatctccgcaaggttctattcttaacgtgaaacgctctatatcagtaatctggtaatggtgatgaaatggaaagctgcaggccatatcaggcagaagcaccatagatggaaataaacaggtgctgcattggagaccctggaaatcaaaacgatccaaataaagaccatagatgaggtggacaaatgatttaaataggcatgtcggtcgaatatggataaaaatcgcaatagacagagaaaatggaagtcagagggggaggcctatatccggacttatgatataaaaagggctttagatagatagattgatagttacgttgtttatatctgatgtataattaaagaaataggttagagagagttaaaaatatttatgtattttatgtatttatatttatccatattccagttagaaatggtaaatgtgacggatatttggttaacggtagtac

SEQ ID NO: 8869 - DNA, 956 bp, Diabrotica virgifera
  SmartBlast Evalue=3E-66; Info="Collagen alpha-1, IV, chain, putative n=1 Tax=Pediculus humanus corporis RepID=E0VEK7_PEDHC"
gaggtcctcagggaccagtaggtggtccaggtctagcaggcacacctggacctgaaggaattcccggggagaaaggtcggcagggagattctggagctccaggtttacctggacatgacggtcccagaggttttccaggacctcccggtccacagggacctagggggttcactggtgaaaaaggagcaacgataccgggtcaaagaggagatgatggggaatcaggacgcgatggtcttaagggacaaaagggagaaaaaggttttcctggagcaataggtgtacctggagacgctttaaatggcataccagggttaccaggtcctgtcggaccacagggagagaagggtaatgcaggacgaccaggagcacatggagcaccaggtacgccaggagataaaggagatagaggtggccaatgtattaattgtatacctggtgctagaggggacaaaggggacagaggtttcgatggtagagatggacccccaggaccaagaggacctcctggaccaccaggatttgttggaccagctggttcgaatggattacccggtcgagatggaccacctggcaatcccggtaaacccggaagtgatggcgttcctggagaccaaggtctacctggtattaatgctcaagttccagttgatctagttaaagccgaaaagggtgagaaaggtaacagaggtatagacggtttaccgggagcatcaggccctattggaagaccaggactgaagggagacatgggtctaatgggacggcaaggtgaaaagggtgataggggattcaaagggttcccttggtttagacggaagaaatggagaacctggaattcctaggtaataaaggacaaaagggtgatagtataataggagaacctggatatcagggtgaacccggagataaaggagatgtaggaaatccaggagaccgaggtcctcaaggtcttc

SEQ ID NO: 8870 - DNA, 956 bp, Diabrotica virgifera
ggttatgcctatgggttttacctgcaagaaaatatttgagcctgctcttgtatagataatatataataattgctgacattgtaaaaaaaccttcaaaatgggggacacgcctcaatattacgaaaaatcagacaattattacagaggtagatcgtttcaccggccgccccatcgcgggagaggcagaggtcgaggagacagcagggcttcagctccttcaacttatcaggtacaaagaactcttgatgaattaaatgtgaccgatctaagacaacacattgacaggatacatgaacagtcaagaagtggtcctccaccagaccccacctataattattcaaaaaattcgccaagggataatgagggctataatcctaaggccagtaccagtctacaacgttcgaatagtggtagaggtagaggaagacaaaaaaacccagacttgttcattcaaaatcccatgaatattcaagttcgtgttagtacctccactggagaaagaaattattctgcacttgaagattctaaattggcggacatcagacatgtaccagactatcaactgccacgtggcagaggcagttttacaagaggaaggaccataagatcaaggggaaggggaaggaatataggggagccagctgacgaagagcaaaggattagggctaaaagtgtggaacggagaagacatgaccaaagaggtagtcaagttaggagtagaagtgttgaatataggcatcatgatggcgatggtgagagatccgaaggacactttagaggtagaggcaggggttctacctccaattattctgaatataacagaagtagatatccatctggtgaaggacaaggttctgcctccaattattctgaatataacagaagtagatatccatctggtgaaggacaaggttctgcctccaattattctgaatataacagaagtagatatccga

SEQ ID NO: 8871 - DNA, 957 bp, Diabrotica virgifera
gaggacagtaaagtcacagatgaaccagaaattgaaatcactattcctggaaccaaagttacagaggaaaccgaaacaaaagaaagagaagaaatttcggttaaaattaaaaagaaagttaagcctaaagacaaagttaaagaacctgaagtacctccaactgaggaagaggtacagcccacacctaaagttgaagaagtcgaagaaactgaaaccataattaaacctaaacctgaggatgaggaagaagttacaattaaaaaacctaagccaaaacctaaaaaggaggaggaagatgaagcggaagtgacagttaagaaaattattcctgttccaacagaagaacaaaaagaagagactgaagttgaagcagaaattgtaattaaacccaagcctgaagaaaaagaggaacaggagactgttagcatcaagaaacaaaagcctaaacctaaagaagaagaagaagaaagcgttgaaattaccgtcaaaaagattatacctgtcccagaagataaaaaggaggaggaagaagtggaggcagaagttacactaaagcctaaaccaaaggaaacagtcgaagaggagactcttaaaattaaaaagcgtaaaccaaaacctaagcaggaagatgaggagaaggtagaaataaccattaaaaaacctatccctgttgacaaagaaggtgatgaagaagcagttgaagctgaagtaacgataaagcccaaaccagaagaaaagaaggatgaaaatgaaaagtcagaagtagatgtagaagcagaggttgtgcttaaacctaagcctgaagaaaaggaagaggttaccattaccaagcccaaagcaaaaccgaaaccagaagatgaagttgaagatgaaattacgattaaaaaggtagtccctgtgccaaaggaagatgagaaagaagatacagaagttgaggctgaagtaacaataaagcct

SEQ ID NO: 8872 - DNA, 940 bp, Diabrotica virgifera
cgaataaaaaccacacacaggctcacggaataaatcaaaatcaatgtcggcattagacaaggggacagcctcagtccatgcctatttaatttaataatggatgaagttataggtacttagtgttaacaaatgaatcagggatacaaaattggtaaccgaaccatgagaatactttgctacgctgatgatgcaatcttaatagccgaaaaacgaagatgacttacaacgcctactacaaaaatttaaaataaccgccgaaaagtataacctgacactatccacagagaaaacccaatcgatggtaatatccaagaaccaattagatgtaaattagtagtggacgaccatataatcgaacaggtaatggattgtagatacttggtgtggaaatatctagcgacaggcatctgtggcaagaaacaaaacagcaggcaacgaaagcagcgagaatatctggtttcctgagggatataatctggcggaataaatatatgagcaccgaaagcaaagtccgcatttataagacatgtgttagacccgtactgacatacgcagctgagacaagggccgagacaacaaagaccaaacagataatgagaacaacagagatgaaaaccctaagatccataagaggtatcacactcagagatagaatacgaaacgaagacacattgagagagctaggcgttcaagacgtagtgagatggacaagagcgcgacgacgcatgtggagggaccacgtagatcggatggaccctgaacgtatgacgcattgggcgaaaacacagaagtccaacacgatgcgacccataggaagacccaaaaaacgatggtacgagagctgtagctccggatcgcagcagagactgtaacagaagaaacaggacatagtcctattaaaaggagaagaagaagaagaaggatcagatgaaacataatt

SEQ ID NO: 8873 - DNA, 952 bp, Diabrotica virgifera
  SmartBlast Evalue=3E-23; Info=Putative uncharacterized transposon-derived protein F52C9.6 (Fragment) n=1 Tax= Harpegnathos saltator RepID=E2BUQ3_9HYME
cgccttcacaggctctctagatccatgttttcgaggtggatccgtcctccattcttcttttcttagactgcattacatatccggttccagctccttctgtctcttgctctttcttctgcatttctaattcccatgccctctagatctcgcttcacctcttccagccatttggacctcggtcttcctcttcgtctccttccggccggagaccactttgtcactatgtttattatcgcttcttctcctgctctccatacatgcccaagccatctcaatctttgtctctttattctcctgactatatcttgtcccttcaattcctcatttatttcgttatttcttcgactcctgtattcaccctctgctgtttttattggtcctaatattgcccgaattatttttctctcagttcttctcaaattttcttcgtctgtcttggtcattgtcatcacttctgctccatacattaatgtcggtctaattaacgtttcatagagccttaatttagtagtttttgttaatatcttgctttttatcatttttttgttggcttggaatgctctatttattgccaatgatttctcttttatttcgttttctcttgttccatcatttgacagcatgactcctagatacttatatttacttacttcttcaaatttgtatcttcccactttgaacctctctattagtaggatttttccctaatcttaaaatttttgttttgttttcgttaatactcagacccactgtttttccttcttgaatgagttcctctaccatttgcgttaatatatctcttctctttgccattatcacaacgtcatcggcatatgctacaatttgacctcctctatttctgagtgtacctttgttcattttctggtaatatattatattgccatgttgaatagttttgtggataaaccatcaccctgcctcactcctttgt

SEQ ID NO: 8874 - DNA, 955 bp, Diabrotica virgifera
aatattattttattgacaagaaaggactttttgaatataaatggacatttaaatttttgaagttgttgaaagatttttcgtaaatagatatgtttacaaggggtactttttaaattttgaagttccgtaattagccaaaaattttgtatataggcaaagcattacattgtagatgatataactgcactacaaaaacctttgagcctgttaacgatttattacatttacttttattaaagggggtagtttttaagattgttgaagggttgacaatgtataaaataatcattattataattgacaatatttcaataacagtgaatataaatttttttgttgcatttgatttattttgatttaaatccataaatgctttaatatttattttttcaatatgaggtcgtgttcaccccttaaaaataaaaatattagccagcgcatatataacttttgaagagggagataagggggataagataagtctaattccaaaatttttagcaaaatcgattccgttataaaaaaattagagttggtgacgtgttttcctccatgctgttgtacgagtgtcttcgtcaatataaatctgaacatcgtactctaactgttctcctgattcaactgggtcaatacgtaaaactacgtactcccttccatatccaccttcttctacaactggtgtactgaaactttcatttatatcggttacctgaagacaagtgattggagcttcaaagaaacctgtgcctggaatgcgtacatggataacccttccttttaatgtattctggtaaattagggaccgtagatggctggtttctggacatttgttataattatctgctctggatggggaaatatcgaccaatattaatgttgttaccaaaaataacagtttaaaaatagttgaaaacattttgatttttaataacaaagctgcttcacagcacaaaat

SEQ ID NO: 8875 - DNA, 948 bp, Diabrotica virgifera
  SmartBlast Evalue=2E-79; Info="Protein bem46, putative n=1 Tax= Pediculus humanus corporis RepID=E0VZT2_PEDHC"
tatctgttgtgacttgttgaggcataacaaaaactaataaataaaaacaactcttcaggaatgttagacttgccaacttactagtaatttgcgatactctgcaccgaatatttacaaatttgaaaaacacacctatatctcctaatctatctaaataatttgtacatctatccatacactctcactcttggtgttgttttcattactaactttaatatcaaagttaggactatgactaatactgtccaacctacaactttgtaaaaacacagccatggaacggtagtacccttgtaattgccacgtttcgttgtgagtgcccgcaggtacttgcagcagctgcttcctgagactgttgcagcggttgtggagttcctgcatcattcgaggaggcaccagcgagtccgccatacctgatatgaataacgtcggcagtcgaaggcttttcactttctgatatgataagaatttgttttatagaaaaataatggaaagtactgcagcatcctccaacctaataatacttttgccatatcaggtatgcttgtaaatgtattttctacaattaaacaccagatttttccaaagtattcttctcttgtagccaaatctatagccacagcaccacctaaagatctaccaaaaattatgatttctgaatgattaatatcattcctggtaaacaaataatctagacttgctttcgcatctaaataaaggccatcttccgaaggtacgccttcagacaacccatatcctctatattcgactaacaaaatattacattggagcttactgtacaatcccgcacaattttgcaatctatggccaatgttccctgcatttccatgaaaatagactatcgtaggacacggtttttgtttatctttggactgagaaatgaaatacatatgaatttgtattccatctgaggttttggtcattacg

SEQ ID NO: 8876 - DNA, 947 bp, Diabrotica virgifera
aacgagattttaatcaggtttatattgttttggtagcaaccgcgtttttgcagttgaaaatatagtaacatttgataaacaaattaaatatctcgtaaattgtggaatattttttaaccatttttttgcttaatactggtaacgtagcgcacttcccctattaaataaaataatttatagtgcttatttgataggcaaaaaatattttttttgcaaatttgatttttggaagtttatacataattatttgaataaatggggggtcaaatttatttagtgagtcttaggggaaatatttgtctttcagctttgtagaaaacaaatccctaaaaaccttcattaaaatgtacattgcctcagcagttggaaaagtggatattttgcaaaagtgacccctttttaattgtttgaaacaatgatccccttatgtgatttggatgctttcttgaaaatatcttttgtactcaccgaaactttgatataaaatttgttccaacctgtatgaatttacattttgatttacatgtagtgtagtcttattttactagactataaataaattcaatgtttgtctcccagcagtgtcataaacgccaaagtcttgaaatgtcccattacccaacctaaaatggtttaatgtgctcttgatcaaaaataagaagactcgatcggactttttgttttatttgctaatttaaaaatttccttaactttttctgctacaataccaaaattgtgtatgttgtgctatctattttaagatctttataatttcgtccatttttattcgatagagaactagataatgttttttgagagtattttcaagatgaattattattatttatttatagttaatttacaaagtattatacaaacaattgttctctggcgaagatcaacttaagctgtgttatatttccaaatttttcgtctccattgaagtc

SEQ ID NO: 8877 - DNA, 951 bp, Diabrotica virgifera
  SmartBlast Evalue=3E-12; Info=Histone-lysine N- methyltransferase SETMAR (Fragment) n=3 Tax=Camponotus floridanus RepID=E2ALB3_9HYME
tctaggaagagatgatgtacagtgtagtacgaataaagagagagagaaaaaaattgttgctattaatttagttttatacgttttaatattgtatgagttctggatgtttatccattcttctttggatttacatctccttctcatcccttgactccttctgatgacactctaaatattgttacaatagctcgagcctgtgtcagatatacggcttcttgtaagggtttttccaccaaagtcttcatttagtctgtccatcgtgttgaagatcttacttttggtcatccacagctttcccacaacgcaccacttccttccctttgatgcaaagtgttctaattcttcctcctgctagcatgctacttcatagagtcctattgttttcaattcttattcttagtttcttgaagcactgttccaatttacaaggaaacggaagaatttttctgaactcactcttttactccccagtgcataaatctttggatatcgaaagtaatcaattagaacaatagtgtcaacaagttgatctgataagtaacctcctttgcaatggaaaacatgttttcctgaaaattattttattttattcgatatagtctccttttaactcaatacaatgattccagcgattttccagcttctttatacagttcgaataatacaattctggaacctctgcaaaacagttaattgtttcgacaattatctattcgttcgagctgaattttttatttaagagacatctattcagatttggtaacacataattaataatcgaatgaaaccaaaccaggggaataagtcggatgagaaagcaattcgaagcccaactgatgaatatttgccattgtcactcttatgagtgggggcattgtattggagaaccaacacactttcttcggtatatggggccgtttctcgctgagttcggtaatgtacaataatatt

SEQ ID NO: 8878 - DNA, 954 bp, Diabrotica virgifera
  SmartBlast Evalue=9E-78; Info="Apolipoprotein D, putative n=2 Tax=Aedes aegypti RepID=Q16IR4_AEDAE"
gcatacgtatttttaaattttatttaattttatcctaatacacagtcttataaaattattcacgtaattatataaattaattcaagttaattgcaaacgaaaaatatcacatcttagatctaccttctatggcaaccactcagcatctggatcttgagtttgtttagaaggtttgggatgatcagctcccgtattgtctgagattttatggtaaacttctttagctttttcggaaatgtactcaactccatcacctatttttccacctgcttttctgataacctctgcagcagcgtgagcagaaatggtttcgtcgttgatgtttatgttgtagcctgcgttagggtctttgggacagttcgattgggagatgatggagagatcgtaggggctgatttgggcattttcaagttttcctctcaacttattgatatacatagaatcgagtgttttcgttcttgacaaaattgtggccgattgtcggtgggcaaaagtcaatttttggcaagtgaatattccagcgtaactgctgtaatcagtattgaacacagtgaagcttgaagatccagcaacactcaatggaaacttcacagtcattcttgctggaaccgatgggtctactactttcaatgttcctctataatgatatccatgtttaattggtgttagcgatatcaagaaatgctgactggtttcctcgacttggtattgaccaggttcatcagatttggttatgttgtaaagtatacagttacttgctgtgcccgttttttcaattacgtaccagatacctaacatcctgtccatttcaaatccagacataggttctataacaggacatgcccccaggtgatacgaatgcatctccacatatcccgtgaaacaaaacaccaaaaacaccgcaacgaattgtttaaacatcttcacccgttactctctactagtgttaacaat

SEQ ID NO: 8879 - DNA, 948 bp, Diabrotica virgifera
ttttttctatttttaaggacaaaaaaatgcaagtggaactgaattcaaaattattttgcacatcatatttgaaacattatttggttaaaacatttcatttttgatggtaaaaaatatattaatttgtctggttgtaattacggttttgtagatatgtgtagattcacacaatgttgccaaactaaattttgttatatccggtttaaattttctagggtatttccgagcctactgtacaagcttcttccacatttaaaagtaaccgtattaggtaagaataaatcaaattcaaaacaccaaaaatcatgtcagcttatgttattaataactaaattagttcgtatatttttaaaattcaatcttataactttaaaatgtttgatagtaaatactatattgaggtcctaaagccttggtttcctcgtaagcggcaccgaaaaactgcgaccgtaacactgcgatgaatgatgtcataaaaactgtaccacgcaaaataatagcggtggtttccaaggatgcgttgaaagccaccgcttgctgagtttacacattgaatttttcaccgtaatctgacgtcattcatcgcagtgttacggtcccagttgtcggtgccgctttcgaggaaacccaggtttcagagcaacagtgacttagccacaaatcgatcatttttatattaatatatcaataaaagcagcaacattaaatctttggattaacagcggccaacacaacctacctctatatttggctagatggcgctacataatttatagcgccatcccataaacataatgcaaagattacatttgcctcagaacttcgtttttggacataggtcactgttgatctgatagcctcaattacataatgatttcacaaatgtttactgttattttaatgtttttttggttttcctatcacattgctaatatcttctgtatatta

SEQ ID NO: 8880 - DNA, 954 bp, Diabrotica virgifera
  SmartBlast Evalue=1E-129; Info="Phosphatidylinositol 4-kinase alpha, putative n=1 Tax=Pediculus humanus corporis RepID=E0W3P8_ PEDHC"
tttttcaagatccataaaatgataaaataatctcaaatgtatacaatttacccttctttcataatatttgaatttaactacaatacagtcttcaatacaagttcacaatatttatctaatacggaatttggttctgataatactgtatcatgtcatatgtacgagtcctgaaattcaagaagctgttcctgattatctgcagcatataatttgcagcctctttatcgttaactcccggactgaaacgacctcgaagcaacttaatagtttggcctctgaaacacggaaggcccgtgtctagcattaaggagacgagtgatatgattgcttcagtatgcggtcgtactgcgaggtatgcttggacacataaatcagagaaccatttgaaaggtgcagcttccattttcccacccattatcataaccatttcgtctgttagttttatgtcgggttcgaaacccaaatttcctccgggagaagattcaaacataaacccaaagtcaatatgtataatatgcccatcagtatctaacatgatgttgccgttgtgtctatctttgatttgtaaaagaaatccgacaacgctgtaagctgccattgaaataataaaatttcttctagcattctggaattctctggtactttcatcaccatattttttcaagaaatattcatacattccgatatcagtctgtctacctagctgatctcttgatttggcattaggaacacattctatgacgccacaccctggagctgtagctactaccctataaggaaacaagtacaattctaatccaactgtttgaaaaatatttttaaatattccaataacttgtaacgccaacatatcttgtctgacatcgtctccaactttgaaaattgcagcttgccacaattcaggacccatactttgatccttggcttgatttgttgatacagccattgctatac

SEQ ID NO: 8881 - DNA, 948 bp, Diabrotica virgifera
  SmartBlast Evalue=9E-11; Info="Leucine-rich transmembrane protein, putative n=1 Tax=Pediculus humanus corporis RepID= E0VC27_PEDHC"
ctttactgaaagcagcaactttactaaacgaaacctatataacagaaatcttaatagaagaggaagatgttccagtgttgaagacgggaatattcgacagcttgtttctgcttcaaacagtgaacgttaggaatacgaacttaggtgacattacaaccgaatatatttaaaggactgagacggatcagaaaaatcagtttgaatttcaacaagatctattccgtccctcagaatgtttttacaaatatacctgtgtatatagtagctcttagaggtaatgggataacacatattagcgaaaatgcgttctataaccttcaaaatctgagaaatttggactttgggtagtaataatatcgaactattgcccaaaaatctttttgttaacaccaagaacctcaaatacatcgatctgagctacaataagctaagacacttccctgcagttccttacaaaccgtatcccttcttcgacgtagctttcgccaacatggtacctggagagccatcttttcttgatttaagttacaataacttctccttcatcagctactacctccttagaggcatccactatatcgatgagttgcgtctgcacaacaaccacatcaaactgatcagtgagtacgcttttgatgatttcacgaagattaatactttgaatctggatagtaacgatctgaacgagatgagtgaagggttactgaatattcttacgtacgtagacaatgtgagggtcgaaaataacccgtggagtgatgcattcgtgtgcaaatatacggactggtgtcaagaacatgaaaaatctaactatatggagaggaagtgtcctttaaaacagtaattataatattttaatagaaattttgtttattaatttttagaattgtacttagttgttatagttgttataattgttatagttgttttattaattatttaataatt

SEQ ID NO: 8882 - DNA, 952 bp, Diabrotica virgifera
  SmartBlast Evalue=1E-127; Info="Serine/threonine-protein kinase minibrain, putative n=1 Tax=Pediculus humanus corporis RepID= E0VL86_PEDHC"
tggcgtggcacaagcacgaacacgtaatgctcatggataaaaataaaccaaaaatgccagtagcacctggtggtggaggagacatgtctcttagtcaaaggcggcatgttcctctctatggccgcttagtagctgaagacactttggggatcccacccatggcaaattcctcatccactgatattcaagctatgcaagcaagaatacctcctacctttagggactcatcttcagcaccccttagaaaacttagtgttgatttaatcaagacttacaaacatataaatgaagtgtattacgctaagaaaaaacgaagggcagcccaaattcaaggagaagattcttctcataagaaagagaggaagatatacaatgatggttatgatgatgacaaccatgattacatagtgaaaaatggtagaaaagttcctggagagatacgaaattgattctcttattggcaaaggttcttttggtcaagtcgtaaaggcatttgatcatgttgaacaatgccaggtggctataaagattattaaaaataagaaaccctttcttaaccaggctcaaattgaagttaaattattagaaatgatgaatagggccgacgttgagaataaatattacatagttaaattaaaaagacatttcatgtggagaaatcacttatgtctagtgttcgaactattatcttataatttatatgatttacttcgaaacaccaatttccgtggtgtatcattgaatctcacaagaaaattcgcgcagcagctctgtacagccttactctttctttctactcctgaactgaatatcatccattgcgatctgaaaccagaaaatattctactatgcaacccaaaaaggtcagctatcaaaatagttgattttggaagttcttgccaacttggtcaaaggatatatcaatacattcagtcaaggttttatagatcgc

SEQ ID NO: 8883 - DNA, 953 bp, Diabrotica virgifera
  SmartBlast Evalue=7E-78; Info=26S proteasome non-ATPase regulatory subunit 8 n=3 Tax=Aculeata RepID=E2AVX2_9HYME
ttgtttgtttattaaatattgatttttatataaaaaaatcctaaatataagaattaaatacacctattagacaatcatttcaagttccttggcatactctatagcctgctgtgccagttcctgtgagggtatgggttcgtgggtcttctcttcaggaagaaagtggaaaaagtcattgttgagcttccacggtttgagctggaaagcctttttggcaaatgttttagcagcttcttcgtttggcaggtacagcattctggctacgtcttttactgagatcttttcataggctactgataaacagtctgcaatttcttctcttatggtgtccagcaaaatatccataaagaagttataactcttagcaggtacattacctttagccagaaatattttattataactcccttccattaaatattgttcaatagacaagggatgtctgatgtacacatcattctgaatatgatcggcaggtaaaagttccaattcagtgtgaaattctgctactcggttttgtgacagcaggaataacaagtttaatccaagcagttggtacttaaatggtgattctggtagttggttgttataatcgaagtaataacattttaattgtgccatgtatctttcaaaagatgtaatatcattggctgctatactccattggactcctatctctagaacatctctggctagaagtagttcttgtttggacgcagtagatgtggtaatcggcagaaacattagattggtgagctcaagcttaagagttgagagtagtttttcacatttacttaaatttgggttgttggtattccattctgattttaactgcttgtacaaattagccacttcatttactttcgccattgcttgtttaattaattaaatcttcagaattttagctataaatactcgaacaaaattcttccacaaattacactatgactagg

SEQ ID NO: 8884 - DNA, 953 bp, Diabrotica virgifera
cacataagcaaatggctgtctttcatcaagaacacaggacttttttggtagaattaactgaaaggggaggatatggtacaaatgtttcacgatcaagtgtcagagaagtagtgtctcgcttgattgaagaaaaaaggtagaactgcatcatcagtagccgaactttagaatgaatcattgattctggccatggtcaaagaatgcgaactactacatacttactatatggtttttcagatcttttaatatatttcctgttctagtatatctatctttatattttattgcaattacaacggtgaatactggtgaatttacctaaatttgagtcttacttggttttcttagtttgataaaaaaaccaaatatgaaaagtgaaaaatttattaattaaaaataggtgaccagagctgccatgatactgtgagttactttcgagatctttaaaatttaagtgtattttgcccgacttacggatggtttttatgaagagctaccttaagaattcttacatcattcactcaaattaaattgagatattgctaaagatcataacaataataaactgttatatataaataaaaaagtttgttaaaaccaaaattagatcaaaaagtgacgtattaagtaacgatttataggttagtaagtacacacgttttcaaagtgtagttacgggatccacacattggagggcccaatgtcaaaactcatcaaaatccctacacatcgtgtgagactccgatgtaatttgacgtgtaccgtccttgtccttcccctacacactgtgcgtgtacagctctttatttctcaaactcccttttacgaattaggagataagatcctgtgttttctgttatgatcccataatacactggttttaaacgtggaacaattttatcgtcacttttgtataattttgatatttaaaatataacacttttaatttcagg

SEQ ID NO: 8885 - DNA, 948 bp, Diabrotica virgifera
  SmartBlast Evalue=3E-47; Info=Endonuclease-reverse transcriptase n=1 Tax=Bombyx mori RepID=D5LB38_BOMMO
aagatgtaattccgtcaaaaaacacaataaccggattaaagaccataccaaccaacttgccagaagactgtccacacaataaataatagaaagaaaagaagaaaaactgatcagaaaatctaattagagtactgacagaatcagaaacaaccaaacagagataagaaacttggcaggttacgaagtagccagacaatttaattacttaggctccgtaattactaacagtggacaatagcaataatcacaaagatattcaacaacatatacaactctggacaaataccaacagaatggctgaagtctgagcttattgcacttccaaaaaaaccaggagccaaaaagtgcgaagaataccgtacgataaagcctgatgagtcatctcctaaaattgttcctaaaggtaatccatagagaatttacaagctgtgtgaaagtcaaatttcgcccaaccagttcgggttcataaatgctgttggtacgagagaggctttgttttcaatacaagtcttattccagagatgcagagacgtcaattgcgacgtatacgcatgtctggttgattacgagaaggcgtttgatcgagtacaacacgccaagatgatgcaaatactaaaagaagcaggaattaacaaccaagatctgaaaataattacaaaccttactggaatcagactgcaaacctcgagagttgacggtgaactcaccgaatatgtcaaaatcatgcatggagtgaggcaatgctgcattttgttcccctaattttcaatctttactctgaaagaacatttatcgaagctttgcacgaaactgaaaaggtattctactaaacgggtaccggctaaataatatcaggtatgcagatgacaccatagtatttgcggacaacctagaagacctacaagtcctcatggacaaaatcacgtattacagtcaacaatatggact

SEQ ID NO: 8886 - DNA, 952 bp, Diabrotica virgifera
taaaccttatggttgtcagaaaacggagttacaaccaatccactccaaatggagtagtgttcaattaactttgtatagcctctgaaataagttagaatttacatcaaatgtttgtggtcccaaaagtcgtacgggaacaacattatggagaatcctcttttatcagtgaaatatgtacaacgaattttaattgatcagaacaaactgttcaatataagtaaatacaagtaatttaacacaccaggtttaaacaacctttaatattttcgacaaaatattttcctttggccaacctttcattttcaggccggttattcaactgaaacctacaatacgtttagatttggattagatatagcccactaaaggaagccctgaaatcggcaacattgcttactccactatcgtgggcgatgaagataataatgacggcggagtgtcagaatcggcgccaatcaggtgcattaagagggaagtctcgtttatagtcgacggggcgctgttgccaagtatagggtgtatatctaatttaaaactaaagctatgtcgataatattctattttgtttcttgtacctgttaatttgtagactctctcaacattgagaagtgttgctggtaacaccctattgaataaacaatatactaatattatatcttgtttgaaacaagcataatatataggattagagttttgattaaagcgcggtatattttacatttttgtgtaaaaggctgtctttatctaaggcggtaactgccaaaatagtggtgatcacatttttcccagtatggaagccaaagttcctattatactaactactaaaaaaatgttctgtcaaatctacatgtatgtaagatatgacttcttttgtgaatttaactctagtgcacttagataaaacctacataagtataggcttatatgggacttaccataacttagagaggga

SEQ ID NO: 8887 - DNA, 951 bp, Diabrotica virgifera
  SmartBlast Evalue=1E-17; Info="Paramyosin, putative n=1 Tax= Ixodes scapularis RepID=B7QGR1_IXOSC"
caatggcctgtactcttctcaattcctctagacgatctcctatggctaatgcctccccagtacacttctctaaatcgttttgcttttgcctgatatctggcattgcagactctattctcgattcgtaatctttgatcctttttttatcgaattctccattggtcgacatatctttttgtttgcttcgtatttctcgaatttcatcgttgacagatcttattcttgcctccaattgtttgactgatttggttagatcggaggtcctatttccttcttcgttaatgttttgcttgacggctcggatttcctcattgattcgttctaattctgcctgcttttggttgatcgttcgtcggcattcgtccatctcttgttccagaaattgaacgttttgtacttccggttccacgctggaattcagctcttcgagttgtcttcttatttgagctctggctgtgttcacatcttttactttcttctccaactcgttcctcctaagcatccgttctctcatagtagctctatgttcctgcaattcctgaactttagcggcaaacttattctccaactgcttgatgttttgctgcaactgctgggtggcttctttggtgtcgacttgcagaaatttggcccgatggtatgatgatgcgtatgatttatagttcggatcgggataatacttatcacctttaatggtaaccccttgattgcagtttctaggtacgttccttctgtcagaaagtagctcctgagctctggtgtcagaaggtatcagcagaatattctccggactgctgttgtcgacgatggcgttggatacgacggggtcgtcgatctcgatggcgttgtacaaactcttgcaatcggaaggctcaacgaccaagtgagcggaaacattatgtttcttcaaaataaatttggaagttataatctgagggtggttactctttc

SEQ ID NO: 8888 - DNA, 942 bp, Diabrotica virgifera
gttattaacttttattgctatatattactatggcgagtttactgagttttgtcgcactcatcaatcaccctgtatattgaatttaaattattttaggacgagacattttttttgtcattactttttaaaccacagaaatgtctggcaattataattcatatttctaataatgtttaaaaagtaatgacagaataatttttcctcttacaataattttaaattcgatatgtttacctgcacaggtgtgcagcgcagtaatgagcgcgacctgtgccagcggccagatggccggtgcggtgtccgaggaggcataggagataatatgttaaagaaccagttgtcttaaaataatttttttttccgacgtctagctattggttcatgagttctgagaattttgttttaatatgttttatcaatttgtttgttctctttgcagactcgctcagtatataaaaatatataaaattttctgaattttatgggtggcccggtttctctgacgcacagtgtatttatatataatatagaatatggttacattgttttaatttggttgtataattttggattttaaaaagctcatctatcaatgtaggcaactgaactaataatacattcaatgcacatttttgttaacttataatactcccgtgtttgtgcaatctacaatacatagtctgacggtttttatttgtatattaatgaaaatgttacttctttgctctttttataagaatcatcatcatcatttgctgtacaacccatggtgagtcttagtttgttctaggttcagcttccattctttcctatcctccccttggttttccaatttcttactcttaaccttttatgagaataataggtaccataaaaatagaggggatgaaaattttattaatatttctctatagttgagggcgtaggcgcaaagtacttagt

SEQ ID NO: 8889 - DNA, 950 bp, Diabrotica virgifera
  SmartBlast Evalue=2E-12; Info=Endonuclease-reverse transcriptase n=1 Tax=Bombyx mori RepID=D7F170_BOMMO
gccagaactacaaaagaagaagtgttacgaatcgatccgtaagctttattccatatagacaaagtcccttgaagaagtattgtttgctgtttttaaataaagtaattattgtaaagaagtattacaataagcattataagcaacatactgaagcagggaatttaagaactgagaaaaggagaacacactgaaaaaaagattttcaaattttaaaatttaagcaatttactaattacagatgacaagataggtaatcacagacgacaaccacatagaaaaagaggtctcagcaaagatagctgcggggaattgagcaatacactccctgtcattattattaagatgtaagttgctgaaaagaaaatctaaattaagactgtatatgtcaattattcatccagttgttacatatggaagcgaatcatggactttatatcagcgggaaataaataagctgctggtatttgaaaggaaggttctgagaataatatttgaccctcaaagagatggccaggaaagtggagaaggcgccgtaatgctgaagtggtgactctgtatagtaatgaaaacatcgtctaacatataaaagctaaccggataagatagacaggtcatgtggtaaggtcagagtatggtggtactccacaatcaggaacgtcccatgttggttgggggtagttattccctatagtaggggttggtgaagtaaacactactcgctgtatacgtatttatttaccaactctaagtataacagtaaagagttggtgtgcttacggtataaccatctgaacgaatgataattgataacagatcgaattagaatgaattacgtttcttctgctggatgtataagtaaagtgtaaggtgttgttgttttgaatgctgatacagcgtggccgtgaattacaatattattgactagctgaccaagcgttattgccgattag

SEQ ID NO: 8890 - DNA, 949 bp, Diabrotica virgifera
  SmartBlast Evalue=1E-103; Info=Phosphatidylcholine transfer protein n=1 Tax=Tribolium castaneum RepID=D6X0R2_TRICA
ctacaatgcaaactttttcgccttattaataaaagtgtacacggttttcaaaacacaaaaaattaaactacaaaacgtaattttaaaataaataaataataatttacagcttaaattctatattcaagatattctggtatatattatattatagaatttgaaatgcttatcacaagaaattgaatcgaagtcttagagctgactccgttcaaaatgcaaaattcgttgtcttggtacccttattcggtttcgtcacattctcctggattttcgggtagaaggtcatgtccaacacaatctgagatattgatcctgggcgaactcatcgtttgttccggatatatccacggtttaaaatagggattctcttgcgacgatttccacatttcgtacccttcagcggctttcttcagttgctttactacttttggtgcgaacttttgagtgattttgtttaccaaccacggaggaagttttcccctggggtctgtttgtgatatatatcccaggaaacatcctttcgcagattctctaatgacgaatccggtcatgtgggaaatcgcccttatatatcctttcctaattgcataatccttatggttgactgaatgatttaaaattagtttttctgcacccatatccagccacgacctttgaaggacaaaatctctattttttacaggtgttggacacgatagtgcataatatcctacatcattatttggatttaaataacctatttctattgacgcttgcatgtgctcgtcccattctttccgatatccggggtcatgtaaaacgtcaaataaagtatttgcagctacatcttggaagactgtttggacttttaccattttaaagtttgtgtttggagtcgactttgtccataccttggttaggtctcctttatcgtattccaatttccattcggtgtgttcgtcgactaatc

SEQ ID NO: 8891 - DNA, 949 bp, Diabrotica virgifera
  SmartBlast Evalue=1E-37; Info="Synaptophysin, putative n=1 Tax= Pediculus humanus corporis RepID=E0VJ67_PEDHC"
tttactaatataataatatatgtaattataaacatacagaattttatttcatttccatttcagtgtgcatcgaaaatgttttgttgtacatgtttttatatgttaactgacacccttgtagctgtaaatacaaaatattaatataaaaacattcaaaaatactggtttgtacaaatgagagtaaaataatttgaaatttagcatcaacaatgttgtgtagaatgactagttcaacttgaacaaattgtacacagtgcacattttttacactccatcaccagtctgtctttgatttccttggaaccaagatgtctccttataaaggaaccataaatctgatgcccataagaaaaaatttaaaaatccgaagatcacagatatgttaagtgtggtgtaactacttgtcgttattgtgcaattttgacattttgatgagtccaatgttgtatcagttttcagaccagttaatccattagcccaagctgcactactagacagccataaaactgccataataacagtgatgacaaaatcaattaacgggatcttgggattgctcttatacattttatccagtttcgtatatacaaccataatagctagtgaatataacatagacaacaccccggtagtaacaaaaaatttggcatctgatgaaaagtctcccacaatatctatactgcattttgatgaaatattttggataatcacttcaaatgggtaaacgaatgtgtgcttagtgagtgttccgcaaacaacattaatatatcctgtataaccagttattgtagcaaatccacagattgagaaaatgaactgcacaattctcattacccctcggggttcttgaaatacagccaaattgaaatccatgatatattgtcaatatcaatcaagaaaaccattcattaaaataaatatttttgagaacgatgtaagactgtttttg

SEQ ID NO: 8892 - DNA, 930 bp, Diabrotica virgifera
cttataatgacatttttgagtcccttctattataacattattttttccattgtgctttaacgataaagaatggaaatttgtttcagtaaacgccaggtcactgtaaaatcgtttaaaatgatatttgacgaaaaaaaaaaaagaaaagaagaagaagaaaaacagttggacattaaatgtcttatttttacgttccgcagaagagatacaccaattttcggacaaatcggagattcaaaagttttctgatccaaaattgagtgatttgaaatggaatcacccttagatattttaaattcgcagtatttttatattacttttagtagcaatttatctgtgaatgcgaataatgtgatatcaattttgtaaattttttatatgatgtaagtatatgtataaattttagttatgtattttagcataatgttataaaacctcattaacaaacgataagtgaagcacaagttaagatttgttcagaaagtacataatatgtaactttatttaaaaatgcacttaaacgcatgaacaaaatgttcttaatacatgttcttgtccgtgctaatctaagaacatgtattaaacaaacgaacggggtactgtgggatagacaggttaccagaaatacaaagaagagaaatataacaccctggtaccttggtacgtagtataatgactatggagcagagaattgaataataaacaaacgaaacaggtccaaaattacagcaactgaaatggaggtcatgagaagaagctgcagagtgacaagaatagatcgcattagaaatgagcagataaaacgaagaatggcagtagaacaagacatagtcagctacatcgaagaaaaacgttgaattggtatggacatgtgagaagagcagattgtacaaggtggatatcaaagattacggattggagcttaatagg

SEQ ID NO: 8893 - DNA, 942 bp, Diabrotica virgifera
  SmartBlast Evalue=2E-15; Info=Cuticle protein n=1 Tax=Culex quinquefasciatus RepID=B0XF04_CULQU
cattgtgttgggcagtcctagttctaggaggttagggaaatcattaatctcagcaaaatgaaaattttgattctcctttcttgcactttcgctatctctcaagcaggatttgcttcccactacaactattatccccagccccaggcagttataggacacgatggtcggcctgtagaaacgtatgaagttcaagcagccaaagctgcccattttgcagctcatgcagcagctaaataccagagtgctccttgggctcaatctggatacgcttctcacaacgctcttcccgcagatacacccgaagtagctgctgccaagttacaacactaccacgactacgctgtggctgctcaaagaaatagcgttcatggttatgctccagctgtagctattggacatggccaaccagtagatacacctgaagttcagtacgctaaagctgcccattttgctgcccatgctgaagctgctgcccgttcctacggacacggacactacagaagacgccgtgggtatctacgattttcacatccccgttattgaccacaatggtgttccagtagaaactcctgaagtacaagctgccaaagcccaccactttgctgaatattctaaagtattgggccgcccaggacaaaacattcctgacactcatgactataacaatggcggagctggacattacgctgctcctgctcaatatgctcctgctcaatatgctcccgctgcttactctcacgctcccgtttcgcacgattactatagaggacctggaggcccaccagctcaaattggtcacgatggacaaccaattgaaactcctgaagtacaagccgccaaagctgctcatttcgctgcctatccggtacaatcaggacatccaggtcactaccactactagttcaaaattttcgttataagagcgactggagtttgtgtctc

SEQ ID NO: 8894 - DNA, 949 bp, Diabrotica virgifera
ttccaagagcaatgccaaactttcagtattatgctacctattttttttttcaaaggaatcacccagtgaaaatatagaaaatgttgcatatcttttaaaacccttattttatagtattagacttgttaccaaaaatttagcctattttgttatataaatttaaaataatgtagttattacatacctttgaggttcaatggagagcttcagctgatttaactacatcactgctttttattttgaaatcatgtcggttcggtaatattttttaatatatatgagaaaatttggagtcaaaagcttagctgcgttccacatctactgacacttaaacactttagctgccactcacttatgagtcactcagtattggtgccacttagagcctccatacacgagcagcttgaagcagtcgagctgctttaagcgacagcttaaagttgcaaggttgcggtcgactttaatagcaactttccagcttcaagatgtcagcaccgtcaacatcaagctgcccgcaccgacaacatcaagctgcccgtgtatggcgggtctaaaactctttatcaaaattttccaaattcattttgaacggtacgacagtgatcgataaataaccaaaacaaggacgaggtgccatctgcattcgagaggggtacacgaagagagaaagcggaggtaaccgctttgagctctccgtgtatggtggattcggcagctccaagctgccaacagcacgccaaaattcgatcgcacatcaactgcattcttgctgctgaattactcgaatgctacgtgtatggcgaacatacaattttgtttacaaactgcagttcgcccagccgcgaccgctttaagctgcccgtgtatgaaggcacttatatctgtgctctgtgcgtaaagcgatttaagtccaaaaatggtcgaaattacctaatgcactatctgtatg

SEQ ID NO: 8895 - DNA, 948 bp, Diabrotica virgifera
caagaatgttaccactaaaccacttttttaaatattactcatgaatatttactacattttacaatttcaaactagtgtgtttgattctcctatacctatattttacttttttagtaaacttcagactgttcaggatagcataatagcataggaggcgaattaaaaagaattaatttacttacaagaaaagatatcacaaacattaaactctcttatggcattgatttgaaagatgggtatatgtacaatgatgatgcaaccagtgtttatttttgggttgaatgcttacagactcatgtccaatattattttacaaacaacagggcatactaatggatattcattctgaatttaacatttatgatttttgtcttattttccttaatactgtgccaaaaggaaatgttaattaagtttggtaaatcctttatcgcaatcgatggaactcatgggctcaattcctatgactttgaacttatgacagtattagtaaaagatgaatttgggaatggattttgtactgctttcttattttcaaatagaaaagatacctactttaatttaccaatttttttaaatacatgtctgtgttggtattatatgtatagtcaaatgttttcatatcaggcataaggacaccttttacaatgcctcgtcaaatgtaatgggtattgctcctaatagactgttaagtgcctggcacatagatagggcatggtaagtaaatcttaataaaatatctgattctgaaaaaaatcctattatgtatacaagatgtattaatgatggtttagagagtattaatagctttttgggtagacttctaagtgatgcagatacatacaattttagtaagtatttccagtagaactactgcaataacatccaacaatgggcctatgttataggaaggggttgtggaattaataccaatatgaccattcaaaa

SEQ ID NO: 8896 - DNA, 943 bp, Diabrotica virgifera
gccatttctgctttcctttcaagagtcaacaaatacatacttaacaacaaataaaaacaaaaactgcctttatctaaatacatatttgttcattaataatgatgttccatttataacaaaatatagacaatcaaatggacaaccaaacaacatacattgtatctggtttatcacaaaaacctatttaatgttgttatgaacctatttaatatcaccccataactaaacttttttataaaatctcatagtgcccccaatatttggccagtagggactgtatagtctacggcaaaagtaatttcacagtacctattcgttacttatggaattttttcttgttctccgtttacacattttggtggttttagatctcaaaatttattcaaatacagttaaaaacgagactgccatttgtccaaaaaactaatttttatagctcaactccgaaaactgtcggtaagatgacttattttataaataggtagtcgctgatcgaatcttcgatattacggtactaaaaataatataccttcgaatacggtatcttgtgtatgaaaataaaactgattcttttaatcagttgtgttagtgtaaaccttcacaaataaacgtcaatactcaatgcaatatttggctttagttgtttcactaaactttgtttcatataatacctagaaaaatgccaaattatgtttttaccatgttacggacagtgtggcgtttttatctctgtagaccataagttcaaaatagtttaaaatattgtccaaatacatctttagctaagataagttcaaaaatagtttaaattattgttcaaatacatgtatagctaaggcaagttgttgttctaaatagtattaataagtctaaacaatttgtatatagttttagttgtacgaacgtagacaccaaatattgtcattataaagtctatattttt

SEQ ID NO: 8897 - DNA, 945 bp, Diabrotica virgifera
gtaactataactattcgtaacggcataattcgtaacgccaacacttatttttttaattttcgtgctgaattattattttaaagtaatatagctactgttacaggtagattatattcagtttaagacacaatttttaaaatatatttctccatgaaatataaaatgtgttaaaaatgtttatcctgatgctctttcgttaaattgataaacgtaatctcaattaaagctgtaatattaattggtttccagcaaaaataaacagaataattcaaattttgacgttaagaatgaattataccgttaggaatagttacgaactgtcgatgttacgagatatcttagcaccaatcttaacaccgcgttaatatcgaatttgagattaattgaggtataatcaacattttcatctttataagaagcttcttagggaatgtaacaaaatagactggtgggggacagtagacgattatcggtacaacatgaatctgctatacaattttcgtaatcgccacggagtaataaaattgtagaagcgggcagtgtcaggtgtgggtgcccatatttttgcttacagggtacacaaaatagacatttaaaaatatttgttacgagtaggtaatgatatttcggtatctactttacatgttgtttcagttgtttgttgtaaatctataaaagtgactattacacttattgcattaggaataaattagctcataaacttgcgctgatgagcaacaaggtttctgtataggaaggtcgtatacagagccaatattcgtcataagacagattacagagaaagcattagaatgcaatagactcgcatttctatgtttgattgacttgaagaaggcatttgacagagtaagatgtaatacatctcttgcataataaagagatgtatctggatattataacagcaacttgaaaaggtctgtcaaa

SEQ ID NO: 8898 - DNA, 949 bp, Diabrotica virgifera
agaaattccgcacaagctgtctaccgaagtccttcaaaacatgaaacaaagttctgacttcctagatacagaagtgaaggtttatcatgatgtacgaccagaactagacaaaagttttacagatgataatttcaaaccagtcacactgtcacccatcgatacttcgtttacattaactacagaaactactaaacatgaagaccacattaaacatgaaagacacatcaaaacagaagaaacccaaaaatcaagtcagtacaccacagatgaagcatttgcagaaactttagcagatgaaagtccaaaaagaacgatcactactacagttaccaaacaagaaataccacacggagaaagaacaacgaaagtaaagacggaagtgctaacaggcacaattcagttatctcccgacgtattgaacgatattgaaaaattagaaaaagaaattaacatgaagttggaagaactaagaaaacaaacagattctaccgatgacctcaggaagcaacctcctcatactcctcattctggtggtgtgataatcccagaagtttcaacggaagttacatcttacacactcgaaaaaccaatggtcaaaacagagcttaccagtagtcaagaattgtttggtaaaaaacttccttctgaacttcctgattctcctcttccgggtaaaatttcagagttgtcattcgatcaaccgccaccaagagacggaaaactgtccagtgaaacgctcaaacatatgcaagatagccacagctttctagtgactgaactagaaaattatgacgatggaaagttagaaattgttactgatcttgatgaagaccccaaagttaagtcttcaggattgtttggaatatttagtaaaaaagataaatctgaaagccctaaaatagcaaaaaggaaattaaaaaaagaccaaaagagaagtctgtagaagaag

SEQ ID NO: 8899 - DNA, 946 bp, Diabrotica virgifera
gatataaaaaaacgtaacacctaacaaactaaccaatatatgtgcttcaaaattaaaaagcgctatttctcttattttgtgaagtcaaatacgatcacataagatgaaaaactatgatcagatataaataaggaccttagtcataaagtagacttgaaaaatacatggtttctataaaaaaaataaatggtgttaaatgcaattaaaatttgtgctccatgcgttacataagataaaaataaaaaattacagaaagaaacatattggcgaaacaattaaaaacaatgcagagacaataaagccatagaacctaacaaatcagtgtcaccccacattatttattgtcttattttatgttattttacaactcaagtgttgatgttcaaaatattcagtaatcaaaatcaatataaaaacttattcgttccaaattttcaaaatttaagtcatttcaaaaaccacctcaaatcagtatgcataaagacaacgaaacgtaagaaattcaaggattaataaaaggcaagtattacaaagtattacaacgttattcaagcatgtattgtttgaaaattctaatcatttccataaatactaattttataggccaagacacgtttgcaaaagcatccgaacgttgaattctgaaacgactcagtagatcaatgtgtcttaatgtcctcaagttggtagtttatccacatgataaattcatcgaaatatttgtaatggaagtattgcaatgaactttattcatgtaaatttaaattattgatgtaatttgatgaaagacacaaagatgaaatttttacagaaagagctcgtttcaaaactcaattgatatcagttcttttgccacgatctcatgtcctatagcgaacataaaaaataaggtaatacaaatgtagtgcaacctaaggccaacttgctgtgagtatatttactttga

SEQ ID NO: 8900 - DNA, 948 bp, Diabrotica virgifera
aaaatctgttgctagtaaacaagataaagtatctttttgccaaaggtcataattttatttctatgaagacgcgatcatttaaaaacattaaaagaaccgattttatcgttatgaatgaacgttttttactagtaatgtttacttccccctattaaaaccattatacactgacaaaatacaaaaaacatacaaaatttaagtgttcggattttgtttgagcaggagggtttttgtttatgtttttcttgatttattgtatcaagaaaatttgatatacctattatctaaaagttagctactcggctgtttgactattcttgaggacattatctttttccttcagtctttactactaattattttcatcaaagcttctattttttcacggccttgtagtaagtttcaatgtcctatcgttactttaaatctatacaaaactatttctccaacagtcattgttaacggatcagttcgactttggttttttgttttgtcgactttcggcctacacaaaaaatatatgactcaaagttcttttcttatgaaaatactttgatttttttgcttaatgtctcttgttaatattttaacatcattttttcgatacttggttttggttatatatacctcataattgcaattgaatcaataaatgttaccaagcttttttatgaaaatccttatgagctgagtcccaataatgatataaaacttttgtaaaaaaaaatcaaaagcatatccttctttgggacaaatttctgtacgtgtaactacaattgaaagtgattgtgggtgaagatctaggaaactagatggatttatattttacctctaatacgaaagatcacaacttgacaaaaaaactaagatcacagtgaacaaacttgagatatactcaacaactcagctcgaaaacaagttgaattttgctgagaatgtcgatggtgg

SEQ ID NO: 8901 - DNA, 945 bp, Diabrotica virgifera
acatttttcattaagagtagattaagattaagtagattttcattcagtagatttaagacttgtttacacgggtagagtaatgatgcaagtacttgatagagtagagtaactctacctgtaaaaatgctcagcacagtagaatagctggtagagtgtatagttggagttaaagtagagtgactagcaacctatggcaaagtaactactctatgaccaccactactgccaaaatgtctactcggctgcacactctacccatggaacacgctcaattatggcagaatagagtaggtaggagagtacatgggggcgctgtcattctggctggaattgtgttttgtgtaaatagtgaaaatgaagttcaccgaagatgaaactttaaaacttgtagagctataatacggcgaataccagtgtttatggaatttaggtagtgtatactacagaaataaaagtttgcagcaagctgcggaggatgaaatcgtcgaaagaatggcaaagggggctttggagtaaacgagcttaagcaaaaaattaagaatttaaggtgcacttataatcaagagtgtttaaaaatacaaaaatcggtttcactatactagcatcagtactatacttgtactctcctcatgtgaatggtatcaagccatttttggtagagtactaccgctactctactctcctcaaaactctacccatgtaaacaagtctttagaaacagtggaaaatgaggtagctagtagagtagtagtagagtaaaatatactggtttagcaaattacaatgttttaaggtaatacagtagcgataaacaggtagccaaaacgtgttccaagattgccactgcaaccctgaacatttcctcgaggcatttggcacacgtattcgtaaaataataaagaatggcggcacagagcccaatttgaaaaatacattaacatgtgg

SEQ ID NO: 8902 - DNA, 945 bp, Diabrotica virgifera
ttgctatatttacattacagcttttaaataaaaaaaacacagatctatgtacctacagcttatattttttataaaaaccttaatatcacaatattgtcaatgtctatatcaaacagtctgaataatggtagagtgtcatctttggtatcaaccagtctaatctaccttttcttttatagtatgtacactccgaccaaaataggaatagacgtcagctgcgcgtaaaccggagaagggatgcagaatttattcgaggcttaaattacagagttgccccggttattacaaaaatattaactgatttcttttaaaacgttgtttacatgaatcattgcttataaagagtggcatgtaattatttaaaatttgcaaattttaaatggttgtttaatgttcggttactataaattagttaattttattggtttaaacgattagccagatgatgttaatcaagattgtttatgatattcaaaacagaagagttgtatgtttgaagaagatatgtaggtatatgactggttggtaaaccgttggtgatacctgcgaattaaaagtattactggtttctggtcggtgctacgaataagtctgattcatactagcagctttagcattatagaaaaaatttgaatgaaaaataaacgaaagctagcgattatgtgggatttggtacgttagacatcaaatagaacaactcaacttatattaaaagtttccagtatttttcgttgcgaaagattacctattgtattacagttctttagtactgaatttttccagaatatgaaagaaaaattggaattcaattatagggcgcaatacccacactttcagtacatagttcctacagaaatctgtataaaatactgaaagaaaataagtattgtcggttaatgccactctcactgcaccattgttatagaggacctaccaatttcagat

SEQ ID NO: 8903 - DNA, 948 bp, Diabrotica virgifera
  SmartBlast Evalue=1E-113; Info=P27BBP/eIF6-like n=2 Tax= Obtectomera RepID=A0S6A4_SPOFR
ttgatcaaaaaacgtgttttttgacttgacttttacgtttggttgggccgacttttactgaatttttgtggatattctttcttataaaaatggcattacgtgtccaatttgaaaataacaatgaaataggcgttttcgccaaacttacaaatgcctactgccttgtaggaataggtggttcagaaaacttttacagtacatttgaaggcgagttaggtgaaacaataccagtagtacatgcttcattagcaggttgtagaattattggaagaatgtgtgtaggaaataagaatggtctgttagtcccaagttccacattcgatacagaacttcagcacatcagaaatgctctaccagatacagtaaaagtacacagagtagaagaaaggttgtctgctcttggaaatgtgatagcttgtaatgattatgtagctctggttcatccagatttagacagagaaacagaagaacttatagctgatacattaaaagttgaagtattcagacagaccattgccagtaatgtattagtgggatcatattgtgtcctcagtaaccaaggaggtctgttgcatcctaatacaaccatagttgatcaggaagaattgtcatcattgttgcaagtacctctcgttgctggaactgtaaatagaggtagtgaagtggtaggtgctggattggtagtgaatgactggtgtgcttttgctggtatggatactacttccactgaactcacggtcattgaatcagtctttaggctgaatgaagctgctccatctaatattacatccaaaatgagagcaactttgatagaaagcatgtcctaaatgccccacccagtacaagaaatatgtaaggatactaataataaaacaagttttttaagttatatgttaaaattcataaaatattaatttgtaaaaatgattattataataaaacgacacg

SEQ ID NO: 8904 - DNA, 947 bp, Diabrotica virgifera
  SmartBlast Evalue=1E-142; Info=Heat shock protein 70 B2 n=1 Tax= Culex quinquefasciatus RepID=B0X501_CULQU
cgacagtcgctagacgcggtttgcagagttttcgagagtgtgcgtaactgtgataaaaaatcttgagagagtcaaccggtcaataatgggtaaggtagcagcaattggcattgaccttggtaccacctactcctgtgtcggtgtttggcagcatggtaaagtcgaaataatagcaaatgaccaaggaaacaggactacccccagctatgtcgccttcaccgacagcgaaaggcttataggggatgccgccaagaaccaagtagcaatgaaccccaaaaacacagtattcgacgccaaacgactgattggcagaaaatttgatgaccccaaaattcaagcagacatgaaacattggacttttaatgtagtcaatgactgtggtaaacccaaaatccaagttgagtacaagggggaagtcaaaacattcgcaccagaggaagttagctcaatggttctcaccaaaatgaaggaaattgctgaaacatacctaggggaaaagtaacagatgccgtcgtcacagtaccagcgtactttaacgactcgcaaagacaagccacaaaagacgcaggtgccatagctggacttaacgtattaagaataatcaacgaaccaacagctgctgccttagcttatggtctagacaaaaacctcaaaggcgaaaagaatgttcttatttttgatcttggaggtggcaccttcgacgtctctatcttggctattgatgaaggatctctctttgaagttaaatccactgccggagatacgcatttaggtggggaggactttgataacagattagttaaccactttgttgaagaatttaaaagaaaacacaagaaagacttaagtaataatactcgagctctaagacgtttaagaacagcttgcgagagggctaagagaacactttcgtccagtactgaagctagcattgaaattgatgctct

SEQ ID NO: 8905 - DNA, 944 bp, Diabrotica virgifera
tattggaaatttattatagtgtaaatataaaattatcacttttaaaatcgataacattaccgacctatgaagcaaaatctacttttgattcacttttttggtcattcatttttgcaggtacttgcagaggaataagattttgcttcatggtaaaataaaaacatagaaaaccatatatctattggacggagtcaataccactatacagtaaaaaaatattcaaaaaaacatgtaaaaaattttaaaaaaatcagatctattgatatatatcaaagagtcataattttaagtccaactgagagatacgtggtgtgacaagacatttcgtaacgcgagagttcgtaacgccgcataataacttaaagtgataattaaagataaacaattaaaaaaaattctttagttgtcatattaagagtgtgtcatatgttccgatggtgtgggtgttaacggaatcaattaaaaataagtgtaaataacgaacagtgatatttattttatttttggttaaaaggcgtgcttattcgtctcataagagggttgtttattgtttgagggcagcgacggtgcgtctgaactgcgtgcctgccgtgacgatactgcggagaccacagcacggtcatcatgtttgcggttttacaatatggctagaaaaggcaataaattactacatctggcgttttaaaagctcagaacctttctgtagttttaagaaacgtcttcgaatgcatttaaaaagtgcgttgacataagatcgataaggtaattaatttatggggaagtttcagtttgttaaactgaacacaccaaaaaacatatggttagggatacatttcgtttcgtaaaacttcttagcatctggtttgtatattaaatgtgaattttatgtgaccgttttgagaaaagttattaaaaaataaaattagcaaaaatatgtagtaatt

SEQ ID NO: 8906 - DNA, 945 bp, Diabrotica virgifera
  SmartBlast Evalue=2E-46; Info=Acid phosphatase-1 n=1 Tax=Aedes aegypti RepID=Q17E63_AEDAE
acaccttcacaacgtggcgccaactttcgaaatgcagctcgatgtaaactgtacttgcaaaatctgggggataaggaggattgaaggatccaaacgagtttaagagtgatgcgatgttgctgtcgtgaccactgtaaaattgatatttttcagaagactttggatcgtctgccattttttcgaagtattctactactttgttcaaaaatctgcccttaatgagtctcttcatttgtgttgtcctagaaaagacctcaaaaagccaccctgcgatcgacgttataggttctgggtacacagctttagaccaatctggaagaggaagtcctacgtcctcttggatcttgaaattgtcaaaaacagtgtgaatttggaaatagcttttaatatctaatccactatatttactaatatatttatatacacctgcatattcttcatcaatagattgagacaacttatcgtttagagcttcagttcttaatatataaaagttaggacatgctgaatctccccagaactcatccctgcttattggatgaataggaattggctgccaattcaagtttctacgccacacctgctcgtcagtagctggaaagagggagtatatattgctttgtgcggacatgtgggtgcgatcaacatctgttgtataagcgtggaaacttgacgcgttatatttcaagggaagaaaatttggatatcttcttcttgtgtattgacccaaagcaaaaagttggcgttttccttcatttgttagttgtcctgctccaagatttccccaatattccccatctaaatatttgcttgttggaaaaaatttaacgggtatcctttgaccatgccgaactacctgtacaacagctattaattcagcactgactccaagaatccccaggaaactaacgaagagacctgaagttaggacacccattgtggatg

SEQ ID NO: 8907 - DNA, 948 bp, Diabrotica virgifera
atatctactaaaaataatttattactacttatttataattatttatagcgttttgttatttattagcttttttgtagttgcttcattttttagtatgtggtgttatttatttagataattgtatatttaaccttaatttatttggcatttgaatgtattttgtttgccagtcacggtgttgccggtgtttttttgtttatttcttatacaattgcaatcaatggtataatgtacaagaagaagattgcttaagaacgtttaaaatataatgatatatgatatagcgtttattgatacatatataccagtatacttgtatatttatcaatcaacgcttatatagtttgaacaaattatagaaaaaaaaaggccatttttgaaaaaatttctttagcagttattttagctggaatcaaatcttaagattgcatattattagtaatatcgattttaattaatttattaataacaacaatttgctgttttgaataaccctgttcaaaatattgcctattcgtgataactctggccctgaaaacgataattttgattgtagtacaaaaaaaaccttccctttttgtaaattatacgtcaaaaatatttagtcatcagtttcaattcaatgcaagcaacatttcaaaaacatgcttaaaaagctatgtcaatgacctgtggtctgcgttttcataacaatgctacacattcgtaacagcgcaaaaatttttcatggatgcacacagatcctcaattaagttttctaataataatgcccgtaaatttgttcccaaaagcgccaaaaaaaaggtcaaaataatcgaaaacatacgtataactttcctcgcaatgcgtgtttctagcattggaattgaaattaatgtgatgaaatttcgaaaataatttcaattattttgatacatacaaaatcttatactgataacaaatacttat

SEQ ID NO: 8908 - DNA, 945 bp, Diabrotica virgifera
  SmartBlast Evalue=1E-77; Info="Alpha-aminoadipic semialdehyde synthase, mitochondrial n=1 Tax=Camponotus floridanus RepID= E2AAL3_9HYME"
ctgtatctcgttttttgttcttctttggaactaccttcttggcttttttctttttatctgtttcttcggaatcctctttctcctcttcagcagaggattcatcatcggaactgtccatccattcatccatctcagatattttgagctctttctcttttttggatgtagatttcttgctcttctcttcaccttcatccaattcagtttcctcttcaccctttagcctctttctcaacatcaaagaaaaataattcaaatgtttgttccttttactaaattccatctcagcttcttcagctgacaaagctttatacctctggataggttgaaatttataccattcttgtagaggaaatgcttcaattgccccatcttctgcatgtgtaaatacataatatgctgtattatttgaaaccccaccttctctaatgcctttaaacttcttaacagtgcttccatatgactttaaaatccatggttgatcttccgccttgtatttcctagccactatacctagctttttacgcctggcttcctctttagcttctctaccaaattccgaaccagcgccaaattttggaacttcttcatctactcctttaaattctttcatattgttttctctttccatactgactttggtccatttttcaaaatccacatctaacgtcccattgaatcgcattacatgatatcttttttgcacattttttggaactcttatagaaaactcctggacattaactgttggagattgtccaggggttgttgaggcttttgcagtttgcatgtttcaaatatcaaaaattaaatatattttaaaattatatgaatattaattaagcttcatttaatttacaatttatgattactgttatatttcttcagtactttgatatttaacataaaataattatattttgtaaaacctgctgttaccttgtc

SEQ ID NO: 8909 - DNA, 941 bp, Diabrotica virgifera
  SmartBlast Evalue=8E-33; Info=Serine protease P91 n=2 Tax= Tribolium castaneum RepID=D6WP86_TRICA
ctcgtggtagacacactggttttatgttttgtcgttaaaagtgattggtgtaacccttaacagagcaatatcgttatctgttgtttttgttcgtagtttggatgtgaaattatgtcttcaatagctaagtcctgagtaggatagttgcagtccatctcatcacccttcccaaaacagtccacacctttattggtaatgttgtattcacccactcttacacccaacaatctcgatctatctactaagcagtgggctgccgtgaggatatatctattgttgataattgaaccagcacagtcgaacgctcctctattatcaggtcctctaaaactcagtaaagtcatccatggataatcacgtcctgcgtcctgtccgtttatgatttttgtaccgccacatccaaataaccacagtctgacggcaacagtccgtagtttctatgcttagtcatatctacatcagacgaaatttgtccgggatcagacgtatcaggatccgttcgattggccagttcctttatgacgattggtacacgaggacaacacaccttaaagtctgtactgcaatagtaagcctcaagttgttctcttgctgtatcagataagggtctttgaacagtgagaagagccgtcatcatagatggacatgatcttacgggaagacaatttccctgtattccagcgggagtagtacaagggtcacctccatattgtccattggaaaggctaactacaaccaaaaacacacaaaaagatttcaaacattttggcaccatgtttttatgtacacaatcacaaatttttgcatcgaatctggttttgaagatacacaagaatctggttgaaattttgagatggtattcacatcttcgtacctcttaatatttatgttattgcagaaaagttaagattaagaggttgacattcctaatattggactga

SEQ ID NO: 8910 - DNA, 943 bp, Diabrotica virgifera
  SmartBlast Evalue=5E-16; Info=Putative accessory gland protein (Fragment) n=6 Tax=Nasonia RepID=D2J5L2_NASVI
tgtgactatagattctacctttaggtttgtactttttaataaataaggttccaatgtaacatcaaattagaaaatttaactccaaggaaaatcagaagggccggtcctatcttgaatttgcggagaatgtctaggttttgtaaatatatctttctcctgttctgtcatatttgtgtaattttcagttacttcttcttgaccgtgtttattcttctttttgatgacacaatattccttatccccgattttatgacaaacagtgctttcttcattaccatcgttgtccctcatcgtgcgatgggtttcaattgacccatctggatttacaattgttctcatactttgactcgttccataaaaaaagttcttcttagaaatctgtggttcatgtggagtaatttggtgattgaatttttcacctaacacagaagctatatcgccagatttaattctatcatctagatctttatctaccatttccgaatattgtgttttaggcttttcataacctggtttcaaaactgatcacgtacattttgagtactctcattttcgtgttgttgtggtgtctgtgaccaactgtcgtgtacatcaggaaatccaatagaaaattctccatttccatgaaacccaaacattttaagcatttcattcaactgactttcaaaatattgatgcatttggatgggatccgaaaaaacgtcaaaacttcttctattaaatgggtcttcaggaacaacattatcaggtccatctgttctatcatttactgtaggaactccccaagatctattggactgatcttcattatgatgtagcccaaatattctccgaaaaatatccatgttctatacttcaaatttaaactttactttagtgaaaagaactttagtgaaaaattcaaaatatttttaaaaatattcataggaacctgtcatactgt

SEQ ID NO: 8911 - DNA, 945 bp, Diabrotica virgifera
  misc_feature (877)..(877): n is a, c, g, or t
  SmartBlast Evalue=2E-66; Info="DNA replication factor/protein phosphatase inhibitor SET/SPR-2, putative n=1 Tax=Ixodes scapularis RepID=B7Q573_IXOSC"
aacaaaacaagcttcattatttgaaacgtatttgttgttgaaaatttggaccgcattaagaaaaataataataattatgtcgggggatactccaaggaaactaaaaagattctctgaatcagataggacgtccgaatttgatgcagctacccaaaaagctctggaggagattgatatctgtcagaacgaaatagatagcataaacgaaaaatctagtgaagaaatactgaaaattgaacagaagtataatcagttacgaaagccctttttcgagaagaggaataatttaattagtaacattcctaacttctggattactgctatacaaaatcaccctgatttaagtgagctactagataatgaagaagaagattgcctccattttttgataaagatagaagtccaggaattcgaagacattaagtctggttattgtatcaagttttattttgaggaaaacccttacattgacaacacagtcattaccaagacatatcacttagattgtgctactccaacttcccaaagtaccagaattatatggaaggaaggctgcaacattggacaaaatattgaaccaccgaaatcaggaagaaaacgccgtattgaaaggtccaaaactttctttgggtggtttgttgataatgttgacccttacactgatgatattgcagaagtcatcaaagatgatctttggttgaatccactgcagtactacctggtagctgatgtagagggggatgcacatgtaagtgaaatatcaagcagcaatgatgaagaggaggaggagggggaagaagagagaagccaaaataactaagtctatttttttaccaatgaagtattattgtcatacttccattttgatcagttgctnttggtatataattcttaatataaataaaattgtgaaagactcattaaaatataattgtgccgcaatca

SEQ ID NO: 8912 - DNA, 946 bp, Diabrotica virgifera
  SmartBlast Evalue=4E-80; Info="Metallo-beta-lactamase, putative n=1 Tax=Aedes aegypti RepID=Q16K50_AEDAE"
gttaagctttcagggagatcctcgtaaatcattcttactagatcctcttcattaaaggactttgagcggttattgtttaatacttccattatttgtgattcacgttcgagtctatgtttgatgtagaaggatattttctcagcggggttttgtatagtatttccatgtccgggaaggatagttgcaggctgtaggttagcaatgtcctgcagggaacgcatgtaatcatacaagtcttcaaagacagctgtgccctctcccaggatacagtccccactaaagatgacattgtcttctagtaaatggagcactatgtggtcatctgtatgtccgggtgtatgaaccactctaagtgttgctccttctacagcaaactcttgaccatctttaaatgattctatcaattcgttcttgttgatgtcatctttaaggcttgggtatttccaaacttgacaatgttttgttttttctctaagttctgtcaatatgtcattgagtcctccaatatggtcatgatgccagtgagttatgaaaatatgagccaaatcgatgccttcataggttaaaacagatttcaaatggttgatgtattgaggtattccttcatctcctgtgtctatcaatattctccttttgcctgttccaacaatgtacgtgttggttccctgtaatgtcataaatccgggattacaccctaatattcttattactctgggagaaattttagtaatggctggtattacagctgccattgtttctgtattttttcgtaattgattttcgtttgaacttgaactctttactctctagcgtgaaaattgaattattatattcgatttcagttttctacttttcaaatcgtctgaactcgataattcgcacttgttaagggcacaaaaatgtaaaaatgagcacttgaacttcttgaaagtttgcaagaacgtcg

SEQ ID NO: 8913 - DNA, 940 bp, Diabrotica virgifera
  SmartBlast Evalue=8E-15; Info=Endonuclease-reverse transcriptase HmRTE-e01 n=1 Tax=Heliconius melpomene RepID= C6Y4D5_9NEOP
acatatatagaccgttgcaatcatagtagacgtatcggtgcaaagcagtagacggatcgatgcaattctagtctctcgcgtgtttcaaggtctagctatcatcagggtaaacattttttttttctattaaacaactgtatcaaatttagatggtgtattagattttttcttgaatgttattaaatgacgagtgaactgggtgtgtgataagacaaagggggtctttgtcaaaaagcaaaagaggacaaagctttttgtcaaaaggagtcactagtcttagaaagtttgggaaatacagttataataactatataaaaaataccatctataacaagattaaacaggtaaagattccgtgaagagccttgaggggaaccaaccttcaatggagaactttttgtcaattcaacacaagtccttactttggtggagtagtagagcctctcatacatatccttccctagccttaaatatttctcagcaacccatttccctctcatacatctccatagctcttgtataggaacggtgtcatacgccttcttaagatttataaatgccaaatgtagctctctttttatctcatcgtatttctctatcaaagcaaacaaggcatccgttgtccttctttctggcgtatacccaaattattcttctcctatccttgtctccctctatccttcgcctttagttctctcacagatttgttgtctctaagaaatattgcttaataacaaaatatgtaagattatacgtaactgtcaggattcttatcaaaaagttttgttggtggttggtgtgtcaattttgacgagaagttgatgaaattattactattaattgaaactaacttgtattaaacgtgagctgtgataataaaacaatattttagaaatattttcacagaaaattagtgcttaatactatataaatgttaaac

SEQ ID NO: 8914 - DNA, 946 bp, Diabrotica virgifera
  SmartBlast Evalue=2E-81; Info=KIAA0152 homolog n=2 Tax=Caligus RepID=C1BRJ2_9MAXI
gaaatctacaaaatcacataatttaatcacaatttgcataaacaaaataacagaggtataaaggctcctatcgcaataaaaataggaagcatcagggatgtatcatcggcaatatatggatcaggttgtttgggtccactaggtcgcctagattttggaatggtttcactttcttcttttaattcttctacagtggagcttggttcagctggaattgatggtagttgaggaacatcttctaatttacccttaatgacatacatagcattgattttaggattgtctttgtaaccctttatgaactcaactctaatacgccctccacgaatatctgattcttctccgttgacatgaagacgtccttttattatattgaagggtatgtattcgtcatgagcaacacctctcccaactttctcgaatatgtctaaatcagctacaatcgtatgatctccatttaaaacaacatcaaatactttctgatccggggcgttaaaataaacttcgcaaaactttaatactagtacataatctccatcagatattactggaatgtcgtatccaaaggtgtttgtgtggtatctttcagtctgatacaagatgtaatcagttgggggcacccttccaattaacagacgtttaccataatctgatgcgataccaatacggccgtgaagaggatctctttcataccgaattccaaaggagtctgtatgagcttcaccaccacaattcacagcataaatgagctgaccattacttccaccaactcccaaaagaatcactaaacttaaaactaataacttataaataatagagttactcattatttaaatggaatatttatcaccgattcatttaatactagttttcgttatgtttaaccatataacgaagaaaaacttaaataccaggttatgttgtaaaaggcagttcttgaatactt

SEQ ID NO: 8915 - DNA, 946 bp, Diabrotica virgifera
  SmartBlast Evalue=2E-40; Info=Ecdysteroid UDP- glucosyltransferase n=1 Tax=Harpegnathos saltator RepID=E2BS88_ 9HYME
gctcagtcaaattggcactcttcacgtttgatcccaaactgaagtaaactactccttgtggagcggagtctaggtagtcttgtatatctttaggtaacggtttcctcttttttatatgcatttgattaatctcaatcacattcggaacattcggccttacattatgtataatgggattcacatttaataacaataaactaatatttttctccagatctcccaagtaaggcatgtcgtctccaaaatacttcctagcgatcttatctgccttaggaagcgcgtaccagtaatagaacatcctgtaccaaatgttgtacaggaaactctggaccttgtcgaagaatgataatttgccggagaagttgagcatcatgtcgggtgatacgattggatgagttgggttgccgagggcatcgtgagagtggaggaatagtcccagtgaggagattccaacaacaggaggttctccaaaagcatgagccgctgctaaagccaaattgaggttgtaagatatttgaaccagaaccaaatcaaacttctctcctttgttcagaagacttagtacctctccaagttgttcctcgacaacgcctgatgttatatcacacaaaaacgcgactctgccaaagatactattggctgaagaggccttatgaggccaacccatatcataaagcctgccgtacatacgcgaagtgtctatctctgtcaaatttgtcaaatttggatctttgagagggtcagtagttattactgtgacgtcatggcctctcagtgaaagttccttccaaactggctgaaaaattatctgatggctaatagaaggaatggcaaaaaaccccaaaatttttgcactgtggccaaaagtacacgacaataagaatattaaaagtttcattttttgttattcaatttagatacgcgaaatatctattcacacacaatg

SEQ ID NO: 8916 - DNA, 943 bp, Diabrotica virgifera
  misc_feature (934)..(934): n is a, c, g, or t
ttcacggaattgtgcgcttagtgtcctatttttcacagcacgtgtaatactcatgtttagttaaaaaatatcaagtgtattctaaataaacaactcttcgaagattttatctggcaatgtcgcaaaaccactgatttcgtgcacagtgcgacgcattcaactgaagttccctctccttgatttgctacctgagtgaccttcgcggtttctgtataattgtagagtaaacgttaactctagagaacccaagcaaatcccttttacttcggttgtatgcattatatgcgttataatttttcgtttttgattggagtaatattttgggtttacgcgacaaaatctaacaaaaacgtgtttttaaaacctcgatagtatcaatttaatggtttgcatattattgcacaaccatcatccttatcccaatttcggttgtacttaatttttttcagccaacgtagctgactttgtttttttttcgttgtttattataagttattgtaataatagtgtgttcagtgttccgtattgtgtcgcttaatgttgttatcatatttagtaatattaattagctttagttgcaagatataacagatataacccgcgtcaaataattgttctaaaaagtctgtaaattgtgataaaaaatttgttttacgaatattattaataactttaaaaaatattctgaattctgaacaacggtacaatcgatgaaacccaaatttgaactattttcgattgtcatgtgagttttttctgaaatttatttcttccatccgttacatttccaaaataatggttagaaagaattaagtgattcttattactgtacattaacaatagcgcttttcatcgattgtcatttgtttcgagctgctgtcatattttgtataatctgtgtataatattaatatacacggattatacgacatangacagaagc

SEQ ID NO: 8917 - DNA, 940 bp, Diabrotica virgifera
  SmartBlast Evalue=8E-49; Info="SMC protein, putative n=1 Tax= Ixodes scapularis RepID=B7Q2A3_IXOSC"
cggaatcggcataaagatatcgttcacagacgccgatgtggagatgaaagagatgaaccaattgtccggtgggcagaagtctttggtagctttggcgttgatttttgctatccagaagtgcgatccggctccgttttacctgttcgacgaaattgatcaagctttagatccttcctacaggagatcagtcgcaaacatgatccacgagttggcaggcgaagcccaattcatcaccaccaccttcaggccggaattactcgagcacgccaacaagttctatggagtcaagttcaggaacaaagtcagccacgtcgaatgcgttagcagggaagtagccagagatttcgtagaagacgaccaaacgcacagttaaatcgttcttattttagtttttattaatagcaaactccccactgtttatcagaggcatattcttttatgggaataataccagatagtaataataacttgttttaggtctgcttcatgtattcttgtcaggattcgatctgatttacctttaatgtaagtttttgggtaatttttaaggtccgtttctgggacgtccttctttatgatattcatacgttttctaaagtattcttaggttgagaacgaccaaatacacagttaaattgtttgattattaatatcataaactccacaactgtttatcggaggcatattattttacgggaatagtaccagatagtagtaataacttgttctgagtctgtttcatgtattcctgtcaagattcggtctaatttgtctttattataaatgtttgggtaatttttaaggtccgtttctgggacgtcttcctttatggatctccatactttttctaaagttttctttcgacgaggacgattaaacacacagttattgttcttacctgatgtaataataacttgttttaggtctgtttcatgtattc

SEQ ID NO: 8918 - DNA, 942 bp, Diabrotica virgifera
ctaattacaggacgccatcttcagggagctctggctcccttaggaagcattttcggactggatgaattgggttgaagttggaataacttcaatttataagaggaatctcctgtcatcgtttgtcggtggagtttgtggacaccctgtatatttgcgcctatgtatcattccccttattatacacttaggttttatctctaatatgcttcattaacctttataatttttaaaatatttccattctgtttttcattaattttataaagtatacaattttaattaaataaaagtgtcagttgctcgttttccttattttcttcaacgaaaaaaaaaattatacaagaaaaagccatgatcaatttaatatttattagccacaacagggatgccaaacaaaaagaatgacttcgtgctacagagttttcggtcgtacaactttatctcatgcttagcagttcatttttttttttcgtattaagatcaaatccatgttcgctacttagctggtggacgtggtaaaaattacttcttgattttgtaaattagctacattgacataattcaatcgcagaaacagtcatattctgtatcgaccactaaaaatcttattcacatccctttctaacttatgttcctaagttcggataaattcactgagatttaatttttgttataaagaatatataacgaaataaaacgaccaataacgtgaaattgaggcttagaaaatatgcggttatatagtagcaaaccattatatgtataacaatcgaagttcgtgttttttcggacgaaaaatggatcataccttcagtatgttaaccttccagtgggcgcgctattgtcaattttacgacaaaagcacgtgatcgtacccccacccataccacacagtcaatatctacaaaatttccgttattcgcaaaattaacgtcatgcgcc

SEQ ID NO: 8919 - DNA, 944 bp, Diabrotica virgifera
  SmartBlast Evalue=1E-60; Info=Cellulase II n=1 Tax=Apriona germari RepID=Q6SS52_APRGE
aatgaaattcgcagtggcatttttattgttaagcgtttatgcgtcggccgaacttttggaaaccgaacctttagaagccggaaacgtcatcattgaaaaaattcctggaggtttatctggttccggtaccaccacacgttattgggattgttgcaaaccaacttgctcatggcctggaaacgtaaattacaaaacccctgtaaaatcctgccagcatgatggtgttactgcaattgaccctgaaacacaatcaggatgtgtgggaggaggtgcttatgtctgtactaaccaagcgcaacgctcagtaaatgactctattgctttaggttttgtagccgccaaattcattcactccaatcgcaacatgtgctgttcttgtatcgtttttagattcaaaccagcggaacttgctggcaaacaaatggtcttacaagttactaatactggagatgacgacccacatgcaactcacaacgagttcgatattgcaatgccaggaagtggagttgggtattacacccagggatgttcctcccaatggaacgctgacgtttccaaatggggcgatcaatatggtggtgtgcacagtatagaagagtgtcacaatcttcccgctcacttgcaaccagggtgtgaatttagattcacttggatgaaggggtactcgaatcccgatattgaatttgacgaagtcgtatgtcccaaaagattaaccgatattagtggctgttatcccgcatctcatccttaggtagtaaaaatattgacaatgaaaataaagacaaataacattttacattcaactacctactgtctataccaggtgtgtctaaacattcatcccttatggtcgctaattattctgtaaaatatagtctgcgatgaattttgaatataagcaaatattcgaggaaatgaagcattttggctcgcaattttttcgt

SEQ ID NO: 8920 - DNA, 942 bp, Diabrotica virgifera
gtataataagaaatacgatcatctctttgaagaatgttgcaatttgtgtttgttttgttcgcttgtttggtaggtggaattctggctggttacccagatcattcttctggaaatgacataggaactgccaacaacaatggaaattcttacgggtatggttattctggcagtttttcaggtccaggtgctgctcccgaaaatttccaatttcctcaggaattatccaacttgttcaagactttaaataagtatcaggaagatatatttaaaaacttccaagcgcaagcagcatcagttcaaaataatttacaaagcaggggcagctttgctgatgcgggagactcctcttatgggggtggatacggagggtcatttagtactggaaatggaaatggtcaatcatttgggggatccttctcaagtgggtttccaggagctggtggtggtcctggataccaatttataccaggaccttctgtaactgggtcgtttactccagatgccaatggcgcctccgcttttggagtcattggaccaggaggtattcaacaaggagcttctgtttttcccgaaaatgctaatgctcccaacgtaaatgtaaggttctcctcagatcaaccagatggattcaaaagtgtctatacatcaagttccagctacaccaccaacgtggatggaaagcctaaaactgtccaaaagtcctctacgactgtgaatgacaatggaaaagtcacaacgtacgaagctcacaatccataagaaaataattttaataattattaatgaaaaattaaaattattttcttgtttattcaatattttgttcgtttatttgaattaattttttatccagtatacccaataaaaaatatctacatatatagtttcagtatttaaattataaataggcgatattttgtgtgtataataaaagtaatttct

SEQ ID NO: 8921 - DNA, 944 bp, Diabrotica virgifera
  SmartBlast Evalue=1E-103; Info=Multidrug resistance-associated protein 7 n=1 Tax=Harpegnathos saltator RepID=E2BGH7_9HYME
tggagctctttccagcgccagttctaccaacaaccccaagtttctcgtacggcctggtatcgaacgatagattcatcagtgatggtggcaaatgtttcctataatgtaaggtgacatgttcaaaagagataacaccttgactgggccaagcgaatggaggatccataacaaaatatttactttccattggaatggattctacgtattggttgatgcgttcgacggccaccatttccctctctgtctccgtgaacgagttgacgacgccgctgagtgatccagtgattcccagagcgtacgaaatggccaatccgataaaacctggatccgcgatatcatactgatgctgaatgacggcaataaaactaacacctgtaattatgatcactcctataaactgtaatctaagaccaagccatcgagctgccgcttgactggcgaattgagctttcagattagcttctagatgttgattgttgtcgtgtttgaatttgtggatcactctcatcgctctaattgtagtcaacccttgcaaagtttcattaaaatggttatatatgggagaaagcgttacactagatatcctttttagttcccttgacgttatcctgtactgatttaataaatatgtatatatgggtactaacggaatgaggaagacacatatccaaggcaaaccgtacatcgttataaaaagagaacctagtaatccgaataactgcgcaagaaatatattaagaataaacggcaacgaatcatcaacagtgtaggtatcgctagaaaacctattaatgattcttcctattggtgttacatcgaaaatgtacatctagctcgtaacacggtcttcaataacaccttatgaaactttgtagctgccagaattccaccataagcaaataaaaacgatacttattagcgtgaatagcgtattgacacacgcc

SEQ ID NO: 8922 - DNA, 944 bp, Diabrotica virgifera
  SmartBlast Evalue=2E-55; Info=ALY n=2 Tax=Bombyx mori RepID= E1AW12_BOMMO
gcgaggtgaaagtgacgccatcggccatcgtagtatttttatttcatcagtaagccataatatccaaaaatggttgataaaattgaaatgagtttggacgacataatcaaatcaaaccgaacacaacgagtccgaggaggcagagggggcggaagaggtcgtggaggaggcggtaataggagcagcggtggcggtggccaacgccgtggaggaaatttcagaagttcaggtcgtcccggtggaaatgtgcaaagaagtcgtgggcgaggcggcatatctcgcaattacacgcggggagacgtaaacagtgcatggaagcatgatctatttgaagggtatggcccaagaaaagttgcagctgctagagctacagtacaagccactatgggaccaactaaacttttggtttctaacctagattttggagtatccgactcagatatacaggaattgtttgctgaatttggtgtcctgaagggtgctgctgtacattatgatcgatctggaaggtcccttggaacagcagatgttatttttgaaagaaggagtgatgcaatcaaagccatgaagcagtacaacggagtcccacttgatggaagagctatgaatatccagttagcaacatcagaaatacctgctccactaagaaggcctgccagtagtagtgttgatagaaaattccaaagcagaagtcctaggggaggcagcagaggtagacttcctagagggggaggacgtggccgtaatccaagaaaccagcaggcaaagcagccaacagctgaagaactggatgcagaactagatgcttacacaaaagaagcaaagtaaattcggggggatattagactttgatctgttttcacacgtgtgtaaagtttatgttttgtgagcgtatttttttatgtctttcttaatacgctactaagaatatacgagttgtttgt

SEQ ID NO: 8923 - DNA, 946 bp, Diabrotica virgifera
  SmartBlast Evalue=2E-15; Info=apolipoprotein O-like n=1 Tax= Nasonia vitripennis RepID=UPI0001DBBF61
cactgtcaaatcctgggttttggaatttctgggaatacagttgttttcttgtttatgtaatcttcaagtcatacatttcttctgtaaaaaaaatttgaagtaaaaatgttgaaacaacaggtattcacaagatgtcttgtacctaccgttctggcagccgtagccacagataccaaagagaaagctgtatctgacaataaaattgatccaaaactgtgtaggccaagtgaactaccattatacacacctgatcctatccataatgttaaacaaattgatgatagtgaaagcaatcaacttgaagaagcaataagggctaccaggttgaaattagttgagattaacaaagaagtcgaagcttataagagggtaggagttgaacagtttgagaaaggaaaagatgaattagattgggttgtaaattacctaagacaagaagataacactctgccaaaagtaggtgccataggaattggtggtctaaccggtcttatatttggtctcaggggtggttttatcaagaaaactgtttatgctgctgtaggtgctctgggtatatcagctgtatgttatcccaaagaagcatccgagtattctcaagtggcactaaccgaaggcaaaaaatatgcagtagtagcatataacttcgttcatggagtgaaaaaagatgatccaccattagaacttccttctctgcctaaattgccaactagcttagatgaggcttgggaatccgtgaaatcattcgtttcatctgattcatctgaaaagacaccagaaaaaagtaaagatcaacaataaaaggtagccatcttgacgtaatgtggtgatttatcatacatcagccactgaagtaatgcaactgtacatattttaaaagtaaattataccgatattgttttgtttttgtattataaaaatgcttattcgatgtcaataaaaatta

SEQ ID NO: 8924 - DNA, 944 bp, Diabrotica virgifera
  SmartBlast Evalue=3E-61; Info=Ubiquitin-conjugating enzyme E2 N n=6 Tax=Caligidae RepID=C1BN15_9MAXI
atttccggtaaagataaaccatttgatgatttaattaataaaggtaaattacaaagtgagtaccaaattttaagcatctttagtcgatacaatggctcttggatcgaaaaagcgtattatggtagaaacaaaaaatttatcgaaagaccctcctcccggtattagtgcaacacctgatgaatcaaactgcagatactttcatgtagtcatggcaggcccttctggatccccttacgaaggtgggttatttaagttggaattatttttaccggagaactatccaatgtcccctccaaatgtgaggtttctgacaaaaatatatcaccctaatatagataagctaggaagaatatgtttagatattttaaaggaccagtggtcgccagctcttcaagttagaacagttctcttatctgttcaagcattactaagcagcccgaatcctgatgatcctcttgcaaacgatgttgctaatatgtggaaaagtagagaacaggatgcagtgctcaaagcgaaggaatggacaagactgtatgctatggaataatctccaataatgtcacaagactgactgtgatactatgtattaacatgttaaatgttataataatatattttgttttaatgtgatgtttcttcatattgactataaataagtagtgttttttaaaaaaatttgtatcatttagtgacttgaaagttgttttgggtggaggagactaacagatattcttatttacatcatattaagtaagtaaacctctgtaactcgtttcatatttcagaagactgtagaatttaaaatttgttaacacattcactgccactgtcgccaaaaggcatagtcaggtgccactgaacaccttttggtgttcataaattcataacctgtggaattaaatagagttcttttcgtattggctccatataaaagtaactgaata

SEQ ID NO: 8925 - DNA, 944 bp, Diabrotica virgifera
  SmartBlast Evalue=3E-19; Info="Ofd1 protein, putative n=1 Tax= Aedes aegypti RepID=Q16LR3_AEDAE"
aacgaatacatcgaactgagttgacgttttcgtactttaggtcctaaagtatcagaatgggaaacgtacctagttcgtatttcgaagaaaaaatcgacgaccctttttggtccaacgacgcatccgcatcgaaaacagtcgcaaaaagttcgtcaagccaaattttggtcagtgcgaaaacaaacctgagcgaagttgtttcgaaagagctttccgaggcaaacaaagaaaaattaagcgaatttaagttggaactcgctagaaaacacgaaaaaagaagagatattattctggaaaaacgcaaagaaatggatgaactgcgggcagaaatagaaaagcttaaagcggaaaatgaggaattaaaagcttccagaactgaaaaccacgtagaaaattgtgatgaagaaatcgaacaattgcgtaaagagaaccatgatctcaaaactcttcttagtgaaaaatcttgtattctagccgaaagtgaaaagattatagagaaaaatcgagaattacggatcagtattgttgagctacaaggagaattacaaagacttaacacagaagttttgaattttgataaggaaagagaagactataaggtgcatgtggttgctttgaaagatgtcatctctgtgtccaaacatatgttgcaaattagggaatctcagctgaaagaacttaaagaaaaagtagaaagtattgagcaaaacctcgcgtctagagaagcaacaatcctctctcaggatttgagggcagaatatgaaagacagattgccaatatgagaaatctaaggctgctgtatgaagaaagacagaggctagaaaaaagagaaaaggaagaattgacatctcagctagcagatgctacaaaagatcttgaacaagaacaaaagaaaaatacagaacttgaatcaagaatatcggaattgcaagatgataattcc

SEQ ID NO: 8926 - DNA, 938 bp, Diabrotica virgifera
  SmartBlast Evalue=1E-127; Info=Heat shock protein 70 B2 n=1 Tax= Culex quinquefasciatus RepID=B0X501_CULQU
cttattcaggtctactcttcaaccagtggagaaatctttaacggatgccaattagacaaaggagcaatccatgatgttgttttggttggtggttctactagaattcccaagattcagaaaatgctgcaggactttttctgtggaaaagctctaaatcttagcatcaatcctgatgaagctgtagcttacggtgctgctgtacaagcagctatcctaagtggagatactagctcccaaattcaggatgtacttctcgtagatgtcgctcctctgtctcttgggatagaaactgctggaggtgtcatgaccaaaattgtcgaacgcaattctagaattccttgcaaacaacagcaaacattcactacttatgccgataatcaaaacgctgtcaccattcaagtctttgaaggagaaagagctatgacaaaagacaataatcttttgggaacattcaacctagcgggtatcccaccagctccaagaggtattccaaaaatagaggtcacttttgatttagatgctaatggtatcttgaacgtatctgctagagacagtagtactggaaaacaagagaagataactattaccaatgacaaaggaagattgtctaaagctgagatcgataagatgctttctgatgcagaaaaatatgccgccgaagatgaaaaacaacgtgaaaagattgtggctagaaatcagttggaaggatacatttttagtgccaaacaggctgttgaagatgctcctgcagataagctatcagctgaagataaaaaattggtccaagacaagtgttctgctgttctctcatggctggacgccaatcaactcgctgaaaaagatgagttcgaacacaaaatgaaggaactacagcaggagtgttctccaatcatgatgaaacttcatcaaggtggacaacaaggaggacaacaaggggg

SEQ ID NO: 8927 - DNA, 943 bp, Diabrotica virgifera
ccctgctacagaatacttttttttcagtttgttgaaagcatttcttgcctgtgtcctattctcgctttaatctcttccgtgtattcattattttcattaattattgtaaatatatttatatttttttaaactttttttaacttgttctccatgtattgttatgctttcttggcgctgttggacttttgctattacaataaattctgtcttttttgtgtttagggacagtcaggttttttcactgacttctaccactctgtcaaccatttgttgtaaatcttcaagacattctgctaacaaaatagtgtcgtcggcaaaccgtataaatgcgttcgcgggtgcctgtcggcgacaaattagcaaaacgcatgcgcactttaaaatgatataaataatattgttaatagataaatatacaaggtatatttacctactataatttaataattagttattaatattaattaaaagtaaataaccttgtttatttatctattaacggtattatttatattaagtgaggttagaaattgtcggcgacaatttgtccactgtacccccgaacgcaactaaagattggtcgaccatagtgacgtctaaatagaatgccagaaaatgtattggagatgttaagtaacaatgacgacctctcgtggacttcggcggaactacaactgaggcatttttatttttattgccttgctataatggggtttttaatgtcaaatcgttgtcagtattttcgaaaatcaataaagtgaaaaataatttagtagtcccatcgattaatctaccagcatcagtagaatcaaaaagaacgtgttcatcctaaatatactccaaatattctgcaacgcaacatacaaataagaacacttttgataaaaggtttgtaagcttttaattaaatcttttgtattaaaatttattaattatattgatt

SEQ ID NO: 8928 - DNA, 938 bp, Diabrotica virgifera
  SmartBlast Evalue=1E-71; Info=Cytochrome P450 347A1 n=1 Tax= Tribolium castaneum RepID=D6WN91_TRICA
ttaacgacaaatttcaaaaagttccatgataatgatttcgaagttgacaaagaaatagatcctattcttggcagaaatccatttgtaatgaaaggagcagaatggagagcaaagagagcacagctatcattttgtttacttcaggaaagataaaaggaatgtacaaatttttagaccaaaacagtaagaatatgataaaatacatcacagaagaagtcaaatccaaagaacctttagaagcccgagaaatttgtattagatttacactcgacaacgttgcagcttgtgctttcggattggaaggaaaatgctttgaggaaaattattcagattttagagatttggctaataagttcctatcaccggattcactgagtagtctgcagtggcttttgtttacagtatggcccaaaggttttaagtatcttaagtttaaattagtacctaagggtgtagaagatagactgctagaaatagtgagggattccataaaatatagggaggaaaataatttagtttttaatgactttcttgatgtcgtcaggaatttaccaacagacgccgggttatttaccgaacttgatatcgctgctcatgctgccagtttctttgctgatggttatgaaacaagctcaagggtaatgagtttcctgctgtttgaattggcattcaatgaagatgcacaagaaaagttacggaccgaaattaccgaagcattggaaaacaacaataatgaattttcgtatgatcttattcatggtttacaatatttagatgcatgtttaaacgaaagcatgcgaaaaaatccagttacctactttcaaggtaaactgtgcacggaagaattcacatatactccagcaaatccagactataaacaaattagcgttactctaaaaccaggagatgctattatgttaccattcgaaggattacag

SEQ ID NO: 8929 - DNA, 943 bp, Diabrotica virgifera
  SmartBlast Evalue=5E-73; Info=Carbonyl reductase [NADPH] 1 n=1 Tax=Harpegnathos saltator RepID=E2BU93_9HYME
attagaagatattaattgcaagcaataataaaatttgttttaataaaaattaattgaatattattgtgtgacgaatttagtatggtggatttggcatttcgttgctgtaccaatcaactactgtacaatctctccagatatatttccccttcacctcagcatccaacgcagcaaataaggcacttctggcaccttcatcggtagttaaaagacctttatggcgtgtcatgtcagttatgacccaccctggatgaaccgagttgattgaaatattacgattgggcttttctttgtcgaagagtctctgctggataacggtcagtgctgatacacccactttagaaacagcgtacacggtagctcctccccaaccgtcttctacgtgtgtgttattttctgtagcttttacaaacttttcaagtaatttactgagttcgggtatggttaaatcttttctcgcaaattcatttctgagtttctctgttggtattttcgacagatgtccttcagcgctagaaagatttacaactcttccgtttttcctcaacataggaaacaaagcttcacaaactcttaaggttccaaagtaattgccttctatagtttttgatgcttgaacagatatagattctggagcatctgtactaaaggaaactcctgcattattgattagcagatccaaacctccatgttttgttttaataaaatcccttaatttatctacactggcttggctagtaatgtccagttggtgaaacactgctttcttattttctttttctagctgagctacagccgctttacctctttcttcatctcgagctgtcaggtaaacaatgccatcaaatctgttacagaggcctctgacaataccaagtcctattcctttattcccaccagttaccacggcaactttttgcgaactcatcttgtgatttgtgat

SEQ ID NO: 8930 - DNA, 942 bp, Diabrotica virgifera
gtttatcgttcttacacactacaaaccgtatgcgacgaaaatcctttgatcttcgctcaagggccgacgaccgatggagcgtgtgtgttgtgtgcgtcgaaaattcttgcgtccgaagtatgtgacgaacacgtccaccttagcacaatttacctcgagcacccaaatatttgccacgaacagctggttcgtcacaaatttttaccagtgaagacgcggctttagacactaaatctagattgataaaactagaaatcataagttttataaatgagatttaaattaaagtaagggacattaaactcatattaaaattttcagtttttaccgttaactcggcaagctggtagatttactgtgagtaacttaatggatttatggtttgagccatattctactcagaaatttttcaaacgtaataccataaagtcatcattttataataactaccaaaataaaatgtctcaagaaaataattttagatactcgtatcgttatgttaatattctaaagatctttaggtgctttaatgttagacaatcacgttatttttttgtaaatatacctacttaaaataatctaacataaaaatttaaacatattttaaacccaaaatatttttaaaaccaggttgaagctaaataaaatactaaagtaagcgatagatgagtacattatcggttttgtttaattttttaggattgattatatattctgactttttaaaggctgttggtattgtgataaatattctaccaatatattagtttaatatttgtttagttccgtcaattaaaattatttttttacgattatgttagtctaataagtattgtttagtttaaattatgaattttgtgatataatctttgtttaatcaaattaaaaaagtttccttaaaaaaactttaaatttgttaaattcagtttactgcaataaatt

SEQ ID NO: 8931 - DNA, 933 bp, Diabrotica virgifera
tatttctgttgtactataatatattatatttttgcaacatattaacactacgcaatattttgttggtctgtttggtacaatgtatgtttattttttgacacaaaagtaatatgacatgtgtacattaataatgtacatatccgtccattcttccttcattttctaatgaactcatgttgcaaagcatatctttagtaattagatctcgtgagaaacgatagtgctatgccaaaaaagaaaacctacagcgtttgttatattgtctaacagaccaatattataaaaattaattttcacaatgcgaaattgtacattttttacatacacagaatttatttgttttaaatataggtacctgaaaatataagtggttcagtatttatgcgttgggcaatcgaactttgtcaaatatgggaccatggttataattgataatataaaatttataacaaatgataaattgaattattacatttttttaaatggttgattttaaaagataaaagtaaaatatgtgtggcagcagtcagcacaccattcaattacaagttgtaatgtgggcaccacatcctactccgattatttctttccctaaactatgttgaagatgtcgccacaaattatttttcccttttctagcggccccaccaaaatttgtattagtgttgtcagcacacatagctactaatttttccttaaggtttttgttttttattagttcctcaagcattttgctctgggtatcagattgttcgtttggaagcgaagaaaatgaaatcattttaacgtggactccggataacggcaaaaaataacgaacaagtacaggaaacatttttctgcctttttgtttgatgcgtctatgctgagagaaatagacccacacgtactcaattcttcgtccacttcgttaatggataatggagccaagac

SEQ ID NO: 8932 - DNA, 940 bp, Diabrotica virgifera
  SmartBlast Evalue=2E-60; Info=Signal recognition particle receptor subunit beta n=1 Tax=Harpegnathos saltator RepID= E2BYA5_9HYME
caatgcaatgacaggtatcttaatttttagggttatgtgattttcgactgaaaagtaattttcttttctcggtctgtatttatggaatgaattattgaaataaacgaaaaatatggcagataaagttccaataaaattagggggaacagattacacccaagtgttcattgcagtttttgtcatagttataactttggttctaattgctctttacaaaagaaggaagagttctcgccagggaatacttttaactggtatctgtgacagtggaaaaactttaatattttcccaactaattcacaataagcatattcaaacgcacacgtcaattaaagaaaatgttgcaaactatataagtaacaatgaagttctgaggatcatcgatatccctgggcatgaacgtttaagagacaaattttttgaacaatacaaagaaatcactaaaggtattgtgtatgtagtggactctaataccattacccaagatataagggatgctgcagaatttttgtacaatatgctagtcgatcctgttgttattaaaaataaacccaaattgttgattttatgcaataaacaagactacacttttgctaagggaggatctgcggtgaaggctatttttgaaaaagaattaaatacccttcgtattacaaaatccaatcaacttgaatcagtggatcctaagatgaaaaagacagccttactaggagatcctgaagaagactttgattttgcggccttgccattgaaagttgacattgctgaaagttatgcatatcacaaaaacggcactgttgatattgatggattgaaaaagtggcttgctcatcatgtctaatttactgattgattgaatttagagatcagttttttttgtaatttaatttttgtttagcaaagattttgtacttttttttaattatttattgttgtggcc

SEQ ID NO: 8933 - DNA, 938 bp, Diabrotica virgifera
  SmartBlast Evalue=4E-91; Info=Ribosomal protein L17 n=1 Tax= Chrysomela tremulae RepID=D1M7X8_9CUCU
cacttacatagctatttactttttatttcacttgttatcaacaatagactagccccagccgataaccgagaccagcagaaaaacttaaaacttgtatctcaaagcgatatgggcacatgtatactactcagaattcaaatacgaactataaaaaaaaataaaaaactatatcgacaaagtcattattttaattattaacaggtgacagtaagaacatttaatgggtcacagctggaggtgcttttggtctcttcactttgtcaagggttgatttctttttctgtgaagcttttttgggagcatcttgtgaggattctccttcagttaaccataattcgatatggcaaggtgaagacatgtaaggattaatcctaccatgggctctgtatgtacgacgcctcaaacaagcagctctgtttacctgaatatgttctactactaatctgtctacatcgagtccactgtaatctgcattgctttcagcatttctcaagagttgtaaaagaaactctgctgactttttaggccatcttccctgagtggtaccaaattgttttgcttgggcacaacgacctactccaccattaaaccttctaaatggaatacactccttctgaataattacattctttaaatatgctacggcccttttgaggggcatcttccttattgcatttgcagtttcacatgtgttcttaaagtgtactcttaagtttgaacctttagctttacaagattttgcagcattttctggctcacgtgcgtaccggcccattttttaaacttttgtttaaagtacgtttcttttgggatgctttgtatttttttagatttatttcatgtccacacctctctaaagagagtttgtatagaaagaaaaggagtagtttactgtattaccaacataaattttgaactgtcatgtgtcaatccttaca

SEQ ID NO: 8934 - DNA, 935 bp, Diabrotica virgifera
  SmartBlast Evalue=3E-63; Info="Nuclear pore complex protein Nup133, putative n=1 Tax=Pediculus humanus corporis RepID= E0VYF6_PEDHC"
tcgctggacgagagataatccaccggaatcgggagttcgtattccatgcaggtgttgcaccaattagaagacaacaaaaaagccattagtctgtatttgaagtttattaaggattctggattgtggaaaaaattgtctggttgtactattcgaaatacggcaatggctacagttcatgttctgggagagtacgttgagaagatctccgctgccattatattaaaaagtctaccgaataacctcttactcgaaaatgcaatcgagaaggctctcgataattacgaaacggaaccctgcaacagtcttacaaaccaagacgtattttatagagaagtcagtaaagtgtacactgtcatccaggaactggcaaattgttgtgaggatgctgctcattcggatttaagcccggcgcagatcgcacaaaatgtacacgataccaacgaaataatattgacggttattaatgaagttatacaatttagaaaccaaaatatgaacaattttctaccatccgaagaaacaaagactttagatcttgagtacgttccttggacagctgccaatggcgaagaaggtctcacggatgctttattgcaacagcatattctgacctacagctatggcttaaagttggttacacatggacagttgaggcactctctgttagaccatttcgtgggtttgacagatgtcatattggacggaagaaaaagtcatttggaaagtattcaaaacacggctagagcaaatgttctatatagacaatactgcaatgatagacacaaacttatcaaacctttgttaagtgaaaaagaatatgaaaaagccatgctgttagcagaaaaatatttagactttgaaacattagtaataatatgtgaagccacagacaaccaagcacgattggacgaatacatggatagattcagtaataa

SEQ ID NO: 8935 - DNA, 936 bp, Diabrotica virgifera
ttcaacacaacaaccacagatcttttaagagcagcagtatgcaaagtgcagattgccatgatggtcgccaacatccgaaacgggtaggcactacaagaagaattctattacaacgctcacatcgtcaatgacagtgacaatctgtcgatgtaccaaaataaaagtcactagtaatacaggattgctaacttaatttatgatttaggctaataaatagtcacacttgatgctacgttcatccccaaaataagttagaggccacagtttcagacacacccaatgatctgaaattgtgacctcgaacttatgttgggattgaacgaagtcataatatataaggaaatgaataatttatcgaatttatgatagatttgtcttaaatagaatttggctagacattttttattaaaaatataacgattgtatataaattgaattatgagttttgtttttatttatttagaaattatattcagtaaacgattatgttagggctttcaaacattttgatgtgttctttaacactgtacataagtagaatgactgatctattagaattctttaggcaaaaattgtacatagattcgttgattttttgttaaaattttaacaagtttttatattgtatttttgtagttataaccagtagagacagaaggtaaacttattcactagcataatgtatttattatcatgttttttatttaattaaactaaatctaaaattatagttagtataatggaatgtatacagtgtgttcggaaaagatccaacgtcatgtagaacactttgtatatttggaactctaacgttctacaggacgtgcaagtgtattgaattagacactacctccatatggttcctcgacgagaaaaattaaacttacaaggtgaaccgacattacttgatatccctcaagatgatgtacaacgggt

SEQ ID NO: 8936 - DNA, 938 bp, Diabrotica virgifera
aatctgatccaattctaattgaaaacataaatatactttttcaggaaaatttaaatagcaatcatgtaccaaaccagtggaagattagcattaccataccaatacccaaaacagaaaatatgttgttatgtaacttcagtacgtagcttaaatattattgttaattttaaaagagagaccaaactggtgcaattctgtggatctatcaatacaactaaaaatactccggtaaaccaaaaaacatgtgtttctattagttgtaaatgactctgcaattgccgttactgtctcttttacttccaggcatgcagaatttgggcaaattgaataatgacagtctatcagtgcctttaagacattccacgacaagtgttgtagcgtttacgtcaaaaataccaccgccttgctgaattgggaggcatggtccattaggttttcccatttcgtagcaggttcctttgtatctggcaaatccttcttcacatggatttttgttacagcttggtatgacctctcctcgtagaacgactaaatgttcgccatctttacatggtccttgccgatatgcaggataacagaaatcttttggagggtaatagatgtaggttgggccacaatcacagatccagtcatgttgttggtatccaggataatatagttgattttctggacatctatttggtgcataaaggggtacccttccctttgtttggtcgctatccagtctttgcgtaggtagttccggaaatgctatctgacacagtgtgcatatacttagagaaaaaatcagagaaatctgaatagctagttgttctttaaataccatttttatcttagcaattaacacagtatattcacagagaaactgttggtattcctagcaaaacggcccaagttgacactgcaaaagcaaactggacgagatcaggccaacggat

SEQ ID NO: 8937 - DNA, 937 bp, Diabrotica virgifera
  SmartBlast Evalue=1E-34; Info=Ribosomal L1 domain-containing protein 1 n=1 Tax=Camponotus floridanus RepID=E1ZYJ7_9HYME
cctgtgtgccttatcgtgtccgaaattaaaggtataggtaacagagaacacgaaaaacatgttgatcactatgaaaaacttctagcggagaagaacgtcaccaacattaaaaaaatcatgactgtacacgaattgaacactgaacacgaaactttcgagcaaaaaatcagacttgcagatttatatgacgcgtttttagtgtgtgggaaagttagtggcaaggttgtacataaatgtggcaaaatcttttacaagaagaggaaagttccaacatcggttaatcttaaagctacgaagttaaaagaacatattgatagaaacttatcaaaatcatttcttcatttacatttaaagggcgatacttataatgttcagttgggacacagtaagatgaccgtagcacaaattatagataattttacatctgcaatggaatatttagctagcgaatttcctggaggatttgaaaatattaagggattacatgtgtgtacaccgagaagtacatctattcctgtatatgtatctgcaaagaatccaaaggaccttcaagatgtcagagtaaagaccactaacaaatataaagctaaggcggttcaagatgagttaacaacactacctaatgccaaggttcttgttaaaccaagtggtcaaattattgttacaaggatgcgggacgatgaagacgaaggtgatgataaagaaaaagatgatgataatgaagaaggtgatgataaaataaccttaaaagacattctagatgatatcaagaatagtaaacacgtgaaaagcaaaaatgaacaagacgaatctaggaagaaattaaaaagcaggaaaaaggcgaagaaaagtctactaagtgactggaaagaagaaacattagacacagaggatttatctattgaacctatgattaaaaagaagaaacagaaaagtt

SEQ ID NO: 8938 - DNA, 925 bp, Diabrotica virgifera
ggggatgtctaaatatctttatttttaggtaggggggggcaacattgagtcagccccccacaaaacatattaaattcctgcccagtgtaacgagctcaaaatttttaatctgtgagatatgaaagctcatgaggagttcataatttagcgctatttgtttttcaagttctgcaacatggcgggcagctcaacaggggtctatgaccgactatttaagtttatatctaacaactctatgaacaatatttgtacactttcagttaaagttttgtacaatctaattatttcgtttctaaaaaataatctattaagtgacggaatgagttatactttgttcatggcgaattagaccattttctataaagtttggggctgtataataagaatatttgtataaatatataacatacattcatgtaatatgagtaataaattgtagaaaaaaaaaattaataatatacataaatttctttattaaaataaatatatttaacctaaattttttttagtttaatttccagtctatttacttatccatatgacatatgacatatgacatacactcaccacactgtgtgtaggtgatttataactaatttaaaactaaataatacgcagtatatgatttcacagcaagtatgcattttgaaaagattacttgttttctatattccagtcaggaataattgagacgaattatttcttcttaatgttttgtcttcaactaaaggcgatcttctaagagtcttccgctaaggattgacagtatctgcccaagttgtattgtagacgaaacgtttataataaataactcgtcagcttataagtctggaaacaagataataatatgattacaaactctggtatataattcccacaatacttatttagttttaattatttaacatgtgattgggcacgtcat

SEQ ID NO: 8939 - DNA, 932 bp, Diabrotica virgifera
  SmartBlast Evalue=5E-12; Info="LINE-1 retrotransposon-like element, putative (Fragment) n=1 Tax=Aspergillus flavus NRRL3357 RepID=B8NZ53_ASPFN"
aaagtttttatagatgttcgtttattgttttcacaaatgaggagagaaaaatagaaaatattattaaaataataaaacttttttcttgggggctgaagaggataaagaggacatagcactgcttgcttccattccatcggtagttcttccttttcccatatattttttggtagtttgtgtattttgtctgtcagctacactcctccatattttaacatttccgctgctatagaatcccttcctggatatttttgtttttttagattcttaataacaattacaacttcatttagggatggccctagatcttccgtacagtagtttcgcctattcatttttaagtctgtgtattattcattatcgtggcctaagtcttttctaccatcagtgccttattcattgttattatttgcatattccccatttaaaaattcatcaatatgttattttcatcgtcttaatatttcttggtcatcaaatatcattttttattctttatctctgtaataattaggctgcggtttacattcccttttttgatttttttagcaaaccaaaaaatccagaattttttttaatccgctaacagtaatattaattttcacttttatacaaattgctctgcaacaacattaatttcaaccaaattgtcaaaaagacggacaagcaaagtaaaatgaacaattaatgacagattatataaaacttgcgttatatttggtaattattcagactacgagatggccgaaagttatcattttttacaaattactcattaacgtataacagattccataaggcatttttaccaaacccctgaataaaagatgccaagttggtaatgagacaaataattatgtagatttgtatgggcacgcgagaatcccgcaatttctaaataattaccaataaaagaatatattaaaaaaact

SEQ ID NO: 8940 - DNA, 938 bp, Diabrotica virgifera
  SmartBlast Evalue=2E-54; Info=N(4)-(Beta-n-acetylglucosaminyl)- l-asparaginase n=1 Tax=Aedes aegypti RepID=Q16VX6_AEDAE
gaccttttccagtcattactatcattccaattgtatcatgatttgtagagtcatatacactaggtatttctttaaaaaattttgattttcgaaatcactttctatgggtgtataaggtccacaagatgttttagaatcaggtgagacattcttccaaaaattaggttggcacttttcttgcttccagctttcccattgattcaacgaatagtttgtcgctagcgattcttcttcaaaacccagattcttggaaaaactagtagctaaacttcccactaagagggaatgttcggtgttttccagaacatatttagcgacaaatattgcgtttttaattcttcgcagacctcctactgctcccatattgatggtatccccatcaaatatcatggcgtctagggcagtttctccattttcatcgggtgaaccaccgtatccaacggtagtatcgcatctctcatcttggcacgttttacaacctgcagcaagcgcatctacggctagatccagttgttttgtttccccgaatgctagaactttccaggctgctctagttgcattttgaaagccccatgtattaacaactaaaggtaaatctgcgaaagatccgtgaaaaagaaaatatattataaatattggatagttcatgatgttatctaagaagttagtgatatatggccaatgaagacacttcaggactagaaaacagcatcaacagtgaactagattactatgcagttttgcaatgtaatcagaactctacactagaagaacttaaacaaagttatcgcaatttgataaaaaagtttcatccagataaacaatctcaaacggggagctctggttctgaacaactattcattcttattgataaagcatataaaacattaagtgatacaaaattaagaaaagagtatgatgctcagttgacagaaaat

SEQ ID NO: 8941 - DNA, 933 bp, Diabrotica virgifera
  SmartBlast Evalue=1E-42; Info=Zinc finger protein 593-like protein n=1 Tax=Harpegnathos saltator RepID=E2BF02_9HYME
ttcatgagaaagcgtttgactgtgtaggtcattaggtaaactaagaatttttaacatagttgcttcctctatatcataaaaagagatcttgaggtttttgaggtcatcctttacaatcttagcatgtactttatatttttccacttctgatggatcggtatctgatttttttaacaagttagttattttttgagcaatgtcttgtctagtaagctccaaaagatgctttcgctttgaaacttcttggaaaaatgtccattgtttcacaatatcatcaaagtcaatttttaaacctctaactctaatattcttaactactttatttttgttaaccaaatgtttttcaaaatctataactggagttaaaaccacaaatgttttttgagctttatcaccagttatgtatagcgcagatgagtaatatctgctagtaaaatgtttaatttttaaaaaagaaaacctacagttattcatcttcatcaattttcattttcttgctagaaccttctgaatcttctttgtttggttgtgtttctatcttcctcttgctcggtgtcttccagtttcccaatcctgctgcccgttctgagtcttcaatggtgtagggttcagtttccaatgccttaagtcttcttttatgaacttttgttttaaaatgatcctgtagagcactatcactaataaagtacctggcacaatgaatacagtagtgctgagctgagcctggtttgtcaaaatctatgtcttggttaagcaatttttctgtgttctctggtttgatgtcttcatcaatctgatctaaatctttagttcttcgcttggttctccactttttcttcaggtgggtatcaccgtagtggtactttttccttttataaaccatgagagttaaaagtaagtgtgatttgggaaatattttcaaaacacatgttt

SEQ ID NO: 8942 - DNA, 930 bp, Diabrotica virgifera
cgcgacgtaacgctatacgcggcgtacggcttctggagaccaccgccttatattcgaaatcctcttatagagggtgttcaaaattcgctccacagtaatataagtagtgaaacccaatgaaatatattcgatgtagaaatttattcaatcattttaagacttaaaaaaattttttttttgaaaaacaattcaccgtcggttcttggacgattttaaacaattgctttcgctgcactccacaaaaagttagtcagtgatagttcagagtccttgttcaattatgctatcgccaaagtcatatgcagacagtgtcattggttatgagcagttgcaccttcttgtttagatgaagtggttccacataaatatgtaattgatttacagtgatccacaataactccacagtatatatttaggtaccgtacctggataaatagaaagacgctttatgtatggcaaacgtttcattacgaatatccattccattttgttgaatgaaattattgagccattcactctactgcattcttttgccgtgatcagtaagtttttattcttacacgactgtcactttttgggaatagttactatattttcctatatacagcagtgtgggatattccaacactaacaacagtgtcctgcacgatttttatcattgacttatttggacttaggaccaccaattattcttgcgtacatctgctcgtatttctaaatgtatcatcagtcaaatcttgcactgagtttatgtattttaccagtgctaaaacgaacaaaaccaaggaactaacatgaatttttcgcgttaatgtgtaaacatcaggaaatactgactggctgagaaacgaaactgtgctactgcggagcgactttttgaatgcactgtagaacactaaatatttgttttgattcttctttagtcttaaa

SEQ ID NO: 8943 - DNA, 932 bp, Diabrotica virgifera
  SmartBlast Evalue=1E-124; Info=Myo-inositol oxygenase n=1 Tax= Bombyx mori RepID=Q1HPR7_BOMMO
aaagtatttaagtattattgaacattcttacagtttactttagtttggttgcagtttcgttagtgcacagatttttagtgttgaaaatgagagttcttaacgaaactggacccgtaaacatcatcgatccctctgaattactcaggcccgagccaaaattcgccaaaaaacctgttggtcagttcagagactactccatcgacgaaaatgatcctattaaagaacgtgtcaggaaaacatacgagctgatgcacactaatcaaacagttgactttgttaaagaaaaaattgagaaatggaccaaattcgatcacctgaaatactcaatgaaagaagctctcataaaattaaacgatttggtagacgaaagtgatcccgatgttgacattcctaatatagttcacgcttttcaaacagcagaaagaatcaggaaagattacccagacgatgattggtttcatcttacaggattaattcacgatgccggaaaagttttggccttttttgacgagccccaatggtgtgttgttggagatactttcgtagtcggagctgaatggagcgataatattgtttatagagaaacctcttttaaaaacaatgtagatggtaaaaatccgaaatacaacactaaatatggcatgtacaaacccaactgcggacttgaaaatgtgatgatgtcttggggtcacgacgaatacttatacagagtgttggttcataacaagaccaaacttcctccacaagctttagctatgatcagataccacagtttttacccctggcatacctctggcgactataagcatctaacaactgaaaaggatgaagaaactaaacaatgggtgctcaaatttaaccaatacgatctctacacaaagagtaccgaagtccctgatatagaaaaactctggccttactatgaaaaactt

SEQ ID NO: 8944 - DNA, 935 bp, Diabrotica virgifera
  misc_feature (13)..(13): n is a, c, g, or t
  SmartBlast Evalue=1E-10; Info=Endonuclease-reverse transcriptase n=1 Tax=Bombyx mori RepID=D7F170_BOMMO
acacattgtcaanagatgtaaaattccacttgagattattcagttataagaacttaaaactgttcttttgttatttgttgtattttaaattggctattttttacttaatttgatcttaaatatcagatttataatcaatagttcttatttatgaatatctctcatcttatataataaatggaaatatagagaactaaaagaattcttttacgaaatttttattatgttgttttttggctgatgtgtttgtatttttaatatatcattgtattgtttaaaattcacgatcttataacaaaaaggcgtctcaccaaacatttttatcttctactatttgactaattatttacattttttcagtctttcttgtgtattcctacatattatattacatttacacattttttttaggctggtgttaggtacatattagtattaccatcagaattttcgtccacttttgatccaattgaggccaatcgatctcacagatactttcagtcccaaaaaaacttatccagcttgttaagatatgcgtaaatggctgtagatccagagtacggataggtaaaaaactctcagaatcgttcgaaataagtagtgacctggaacaaggagatgcgctgtcacctatccttttaatataatcctggagaaagtagtaagaacagcacaaattagaacagaattgctgacagtaaacggactaaaattactactagcactcgcggatgacattgacattgtgggaaacacagtcaccaatgtgaaggagactttcaataaattggaggtagaggcaaagaaaactggtttaaggataaataaagagaaaaccaaatacatgtgcatcgatagacaaaagggacgagatagaatagggcaaaatgttacgatatacccatataactttgaaagagtggagagttttaaat

SEQ ID NO: 8945 - DNA, 933 bp, Diabrotica virgifera
  SmartBlast Evalue=3E-28; Info=U4/U6.U5 tri-snRNP-associated protein 3 n=1 Tax=Camponotus floridanus RepID=E2AAC4_9HYME
ttattaatacatctcataaataatatatattatcatcatcttgtgaatgtgcaatactcaattttgagtataaggaacaagccatagatatccgtttacgatgctcaaacagacttcggtttgggtgacaataatttgaactaaatacgcagtggtctctagggacctccatagggtatggggtactttctattgtgagccctagggaccgccatggcgcttaacatgttaataatgttatttaccaactaaaaaatgaagcaaatgtcccttggttcaatataaataacctgaaactatggaggtataggtatagaaaaaaaatataaaaattgcattctgatgaatgaggttactgagttgaggtattggttgttcaaagtaatgcctgttgaatcacaaattatgctacaaagtccagaggtcgattaaatccgcctttcctattcatgtattgcctatattttcgtttgaggatcacgtgtacatcacccacgtcatttccattaacttttttaccttttgttgtatcgaaattacaaaatcccattaatttcatcatttcttgctcctctgcactctttccttccagatcagctgcagttatcaaaggtcggtccggaactttattttttcgtcttctatccaccggagacccagatctagatcttgaacgggaatacttcctgtgatcatccctttccgtggaataacgtcttctttccctgtctcgcgaccgatctctcgatcttttccgcctatgtctctccttatctttgtccctatccctgtctctgtccctttctttatccctttctctatcgcgatcccgtctccttgaaccaaaaggggattttgacctacttctccttcccattttccaaactagagtttttgatgatttttattttgacaattcctacctaataaaaa

SEQ ID NO: 8946 - DNA, 936 bp, Diabrotica virgifera
gcatcacattaatatgtccgaagtggataatcgatctggtaaactgattaattatcttccatttcttgtgctctgatgtttcacaattcgttattttgatattttttgtaactttttcttttgatgtgactctattgtactaattgtaaccattttcttgttgtccttttgacatttaccaaacatcacttagctgtttctttatatagttcatttgttctaatgtattggcccacaatattttttacttctagtaccatttctcattatcgaatctgctaacttcctagtcctagggatataaatatgtaacaataagcttctttttgattccggtacttactttccgtgcccggaataccaacaactttaaattctgtacttccaatggatggccacgtagatggccctatcatttgctaaaattaaatcttcttactgtgcaggtgtctctctcatcgctgtgcgtgatagtagatagtagagactactctgaacagcgccacagtcactggtatcatctttctggtatccccattctttcaggtttctagtatccccattctttcaggttactagcacaatgtgaaacgccgattcttagtatgtgtacgcttttcatgttgtatatatggcaaattgtgtccagcagcgattacctttcatcccttctgggatgaaaggtggttaagtctatgaacgctactcatgttatttctttttgttcacaaagggattatgagtttagtagcactttcctgatctggatttgattccggtgagggacaatttttctgatacttggtcgttagacatttgcaccaaatattcctttcatcgtcatcatcagtggcgtcaaagctctttatgagccaaagtcttctccagaacaatccattcatgtaatcatgtgtcatgtgcccttgatgaaagccg

SEQ ID NO: 8947 - DNA, 929 bp, Diabrotica virgifera
  SmartBlast Evalue=4E-47; Info=Cathepsin L-like proteinase n=1 Tax=Diabrotica virgifera virgifera RepID=Q70EW8_DIAVI
gacttccaaagtgtctcgtgcgctgtttgaaaaaccggcgacacacgtttctatcgtagcctttttgccaaaatgaaatataccggatttattttattggttgcattattaatcgtatgtgagtgccgaaatgatagtacaaaggaggaatggaaacgttttaagttacagtttaataaaacatacgcaactaataaagaagatttaaaacgatataaagtatttaaagaaaatcttaagaatattcataaacataacaaacgatttgagaaagggaaggagacgtatttgcaggaaatgaatagatttggggatttgacagataaagaatttggtgaaatttatggtctcgccgaaaacgaaaatgttataaaatatgacgatgatacaaaggcgaaggaaaagaaatctggaaacacatccacttctcaaagtaaagatgaatttttggattggagtaaaactggggctgtaactccagcaaaagatcaaggcacgtgtggatcttgctggatatttagtgcagtgggtgccttggagagttacaattttagaaaaacaggaaagttgatttctttcagtgaacaaaacattgtggattgtttctcaaacgatacttgcgaaggaggagtaccagagtatgctgctaagtatatatacaatcacggaatacatctggaatctgattatccttacacagcaggacaagacgcttgcaaaatccttataaaaccaactattagaatagcttttaacgatacttctttcaagaaaggtactgatgaggaccttaaacaaggggttaaggagcatggtcccctttctgtttgtttgtacgttactgcaaattggaggttttatggtagcggagtttggtaccataacaaatgttcatacgagtcaaatcactgcgtgctgttggtcggata

SEQ ID NO: 8948 - DNA, 933 bp, Diabrotica virgifera
tgattgaaatcttccccctatttttttagttatttggtcgttttctatatctcctcttctttcttctacatattgtctgcctttcttcgttcttcttcagatttttcgcgcatttctcgtgtttctctttgaatatactgcacgtataagtgcttcatttcttttgtctattgtttgtttatattcttcatcaaactaaagctcttttctttgatgtgttttaattcctatcactctttttttttcgtttcccatgtcatcatcttactcttattccattcttcttgtatcatttcctccctttgttctaggagttccctattcaattcttttcaaaaatcgattttcaatttctggatttttcaggtttaatttttcactctctgtgtgtttatccttctgtctgtttactttcataattttctaaacaaccagaattgattaaattacgcaaacttacattattgcacaaaactcttctgtacaaacggagcaagcacaagttagtttgcacggtaatttgtagtgtaacgtaagttgcctaacttaacatatacactttgcatttttattttacatcttgatttttacgcaataacacatcaagtaacatgcaagtaaaaacaccatacactgttgcataatggtttggtggataaaaaatatagtatgctgtgcaatataaaaattatctatttctggcaatactttatcaataatatacacaatttcgttatatttaagaaaaattttatgcttttaggtatatttcacttagtttgtagttttagtacctattcaataaattgcttattttacaaaattgactccagttctgctatgtaggtcataaattatacgcaatggtgtaatagttgttgcatacatttcagactgagatttataaagtaggatatccgtctataaaatgtt

SEQ ID NO: 8949 - DNA, 927 bp, Diabrotica virgifera
gacaagcatacagttcttcatattgcggccaaccgtagatcaagttccctatttttacccttattggtatggttgaagaatattgagttaaaatttcctggtattacgcaaagtatgttactggccaaagataaacaagggcttacacctgtagaactagctgtttacaacgaaaatgtagacgtaacacgtttattggaatttgttagagcatttttctatcaattgtttaaagagctcatatcattaaaactcaaacaaaaatattctatacaaatctattactcaaggaaggacaagtagcaccgaattattattggaatggttttttgaaaatgtcgacagcatacacttgaagaatatactcttaaaaacagtaaatcttggaagaacatgtttacatttagcttcagctcgaaatcatcattccaccgtcaaagttgtgttggagtttctgcgaaaactaaacaatatacagccatttagtaatattttaatcgatatgttgttcctaactgaaaccataaatggccgaacaccattcgctaatgcgctcccttggatttcggatgaacactcaacgtatttttaaattttttcgacgaaaatttacatatcgatgtaatcaaagacattataagtgaacgtgacaatcatggaggtacctgcttacacatattagtagaatcacaaacaccctttatcaaagccagcaaattagaaaagaaacaaaaatgtcttctaatgttattaacttatattttaaataaacacgggattgaatttgtacaagatttaattatttctggagataacgatggcaaggcagctacacatacaccaaatcaggttctattagattttatctacgaacatacaaacatatcttatcacaaaacaatgttttttaaaagaaataattatggg

SEQ ID NO: 8950 - DNA, 935 bp, Diabrotica virgifera
  SmartBlast Evalue=5E-35; Info=Serine/threonine-protein kinase RIO3 n=1 Tax=Salmo salar RepID=B5X4M7_SALSA
cttgatgccacaagatattattttctgttagatctgcgtgtatcaagtttgctttattgtagagatttttcatactttcaataacctgtccataagctttcacccaatcatcatctgtgagttgggcatgttttaatgttaaagcacacaattggttttccccaagaaactccatcaccaatatgtgtttatcaagtgccaatacttttgggcaaggtactccagcctcgtatgctcgcatcagattattcttttccttctcggcacaaatacttatggtccctctagaaactttgccttgttttctgttcttgaatctatgatcatatttctgaaatttatcacatcctttgaaatcggataaaatcgttttatagacttttatagcacattccttggaagagggatgtgaattgccatggacaagtattgcttcttcgcctatattaataataccatttacgtggttcaaaacttgtgtttctatcattgtataaagtatgctatatgtactgttttctggaaaacatttgataggatcggaaaggaatctaaatggaaatagtctcaacttaaaggcacttttaattcttccatcacaccataaccttttgtcagcatgtgtctgttctgtaggactttgtaagaacactgtggttttaaaacaaattcgggtcctaaagtttcaaatttgtcccagaattttctttcatcctcgtctaaaatttcttcttcatctgagtcactgactgaatctctatcaaaagaatctgttctacaatgattaactagtgacacattggaagatgtattcaattctttcctggattgttcttgttcatcaatatcacaaatcttatcgtttacaaatccaacaggtaatcccactgggttttcaattccttctttagtctcttgcttcaatcttttatctt

SEQ ID NO: 8951 - DNA, 934 bp, Diabrotica virgifera
  SmartBlast Evalue=1E-159; Info=Budding uninhibited by benzimidazoles 3 n=1 Tax=Tribolium castaneum RepID=D6X4M0_TRICA
gttatgtttatgaagaaaaaattgaattgaaaacaaagatgaaatctcaaaccgaatataaattaaaatcagccccagaagatgcaatttcagctgtaaagtttggcccaaatacaaaccaatttttactagtaagttcttgggatggatatgtaagattgtacgatgtaatcgctaataacatgagacacaaatatgctcacgacgatgcagcagtattggattgttgcttcaccgatgcagtccactcatatagtggaggcttagatgcagtattaaaatcttttgacttcaattcaaccaaggaaagttcagttggaaaccatgcagcccctatcaaatgtgtcgaatattgcagtgaaattaatgctattattactggaagttgggaccaccacgttaagttatgggatcctcgtcaacatgcatgcagtggcagttataatcaaggagaaagagtgtatacgatgagtgtttgtggtgagaaattagttgtcggaacagcaggccgcaagattctagtgtgggatataaggaacatgtcatacacgctacagaaacgtgaatcaaatttaaaatatcaaactagagccataagatgttttccgaataaacaaggttacgttttaagtagcattgagggtagagttgcagtagaatatttggatacgaacccagaagtacaaaagaaaaaatatgctttcaaatgtcatagaattaaagaggatggtttagaaaagatttaccctgttaatgctattagtttccatcctatacataatacttttgcaactggtggatcagatggttatgtcaatatttgggatggtttcaacaagaaacgtttatgccagttccatcaataccatacttcagtgacttcattaagcttcagtcacaacggatcagtgttagctattgcttgctcatactt

SEQ ID NO: 8952 - DNA, 935 bp, Diabrotica virgifera
  SmartBlast Evalue=3E-60; Info=Gamma-aminobutyric acid receptor associated protein n=2 Tax=Coelomata RepID=D3TLZ5_GLOMM
atcattcctaaatttaattacatatttttaaaaataagacaaataaataatttcattgttaaagttataaaacgcagtaagctttcttttattttgacattgtattgactagtgagcagttgagtcatatcatcgattattttgttagacaacaagaaaaaggaaaaccaagaagacacgtagattttgttgctaatcgaagtcttgttttgtaaatttcagtatttaaataagtgcgatgaagtttcaatataaagaagagcacccttttgaaaagaggaagtccgagggagagaaaattaggagaaaatatccagacagagtccccgtaattgttgaaaaggcccccaaagcaagaattggtgatgttgacaaaaagaagtatttagtaccttctgatctgacagtaggtcaattttattttcttattaggaaaaggatacacttgagacccgaagatgcgcttttcttctttgtgaataatgtcattccaccaacatctgctactatgggatccctttaccaggaacatcacgaggaagatttctttttatatatcgcttactccgatgagaatgtatatggaggtgacctgtagaaacatacccctgaacgattaatctatattttacggttcagcaatctgatttttaatgtataactgaaatttattaaatagttaacaacaactttgtgattattaaaaaaaatttcaagtttttcttttgggttactgacatttattattagttatggtgattatgatttttttatttaaggaataagtacgtatgtgcacatatttaatcttaagagagctacagctagatattagatcttatccacctgatttgatggatttaatgtatttagatattgtgattaaaattagttaagttccaaaaaaagtaataaaatgtttatttaagaaaaaa

SEQ ID NO: 8953 - DNA, 934 bp, Diabrotica virgifera
  SmartBlast Evalue=8E-68; Info=Multidrug resistance-associated protein 4 n=1 Tax=Harpegnathos saltator RepID=E2C457_9HYME
gaacacacttttataacatcttgatacctctttttgttaaatgattttccaaataaaatattatctttcacgtttgatacaaacaaccatggctcttgagaagcatatgagatctttcctgcaatattcatgtaacctgacgttattggtaattctcttagaaataactgcaagagactacttttccacttcctacattacccaccacacaacataaggttccacatcttaaatgtagatcaatatcaatcaatgttggtacgatcgatttaggggaccaactggcagtaacattgtttaaattaatacatcccacatgatcaccgtgcttttcgtttactactgtttcttcttcaacttcttctaatagaaggaatttttctaaccttgctatagacacgtttgcttcattataagatgatagtgctcttggaaaattaatcgccatgacaagttgtatgttattaaaaaggttagcaagggaaaatgcaatgcctcctgtcaatctatgtccaagtaacacaaatggtactaaagttacgtaaaggatcagtcgttcagtaaatacactagtagctgataaaattccatacaaatatgaggtcttggctatcacgtctatttcgtattttcttgacatttctacaattttttcaaaggatttctcccatgcgtacattttgattacttgtattccagatgttagttcactcatcagtttaattctcttatcagttcttagggcaattttatacctcaatacaccctgccatctggatattgttccttgtaatggaattgattccaaactaataaacgccattccagtcacagcagcaatgattcccacatagatatacaagatatagaatgtaagtaccgcgtatataggcatgatccaaataaaatgtatggaagcggcacacacatcgaa

SEQ ID NO: 8954 - DNA, 935 bp, Diabrotica virgifera
  SmartBlast Evalue=7E-37; Info=Serine protease P8 n=1 Tax= Tribolium castaneum RepID=D6W9Z5_TRICA
cgctcgagaaaatatctgccaatatgaatcaaagaaatttttcgattattttgactttgtttttgtgtgcatgtgtgggacatacattgcaaagtgaatttgccagaaatcctttaattcctgatgttgaatgcggccgttcggttgagggcccttcgtcttcacttgttggaaataaggagtttccctgggcagtcagaatttcatttagcaaacgtcccgatctatttgcatgtgacggagttttgataaaccaaagatatatcctgactgctggcttatgtgtagaagataagactttaacacgtcaaggaaatatagacaaaattcgcttaggagatcacaactgcttacccggtgaggaaaattgtgacagtaaggattacgttgatgttgaaatcgaaaacgtaattttacatccagcctatggaagccaaaatcaagttaaccatgatgacatcggtttaattcgattaaaagaagatgttaaatttactgacaatatttcaccagtgtgcttaccaaaacctaacgaagcagctaaacctggggagaaagtatttgaagtaggatggtctagaaggagtattgataaactgaaagcagagattaccatcagcgaccaacaaaaatgttttgaaaattactcgaaaaatttcaatttcaacttaactgcttctcatttatgtgcaggaggctatcccgatggcaagtgtgcaagttcttcaggtggtggattagtcagattgaggcaacctgaagagaagtggttgttagaaggtattacatcttttggaccatctgtgtgtagtacagacgtacccagtatcttcaccaaagtggaaccttatttgaaatggatacacgaaaacgttaaaaattaataaagatgctgtattgatcgatgagcgtttctaataaaattttatacgtat

SEQ ID NO: 8955 - DNA, 927 bp, Diabrotica virgifera
atacagtggaaccccgttaactcggattaatcgggaccgcggccgatccgggttatcgaaaattcgggttagccggagaaaatggtaaaaattattaaaatatggtatgcttacagataaactccgttataattggcacacagacacttgtaaaccacgttcgcgttccacacatacaaagcgtcgtcgagagtctcatttttagctttcttagctttgcaccgattgtccaaactgtcttttgttatcattttgaaacaaaaacaacattttaagttttattgccattacgtagacaaaaaatcacgcaaaaacaacaaaatctgaatatatttacgcggaacgaacaatgagactttactacacacacacaataccgtctcgcaacgagaacgaacttatgttatttaataagagtgaagactaagaccattgtttgaaaaataattttttaatagtcttttctaaacaatgctagacagtttcaagtaaataaaggatactacagatgcctgttggtttcgataacacgacaaagagcgttgtctgccatgccagttatttttactaaggtatattatgtatcaaattacacaaatacgcattatctctcattgtataatgtgtttgacattgaaaattgaaacgaatgaactacataggaattcgctaaagcgacaaatttttacgaagaaagtttattatgataaataaaattagcctgaaaaatataagatattatagtattcgaacaatatgtttataaggaaagataaaagaaaatattttaagatgttgaaaagaaattggaaaatccagcataaaggacatacatttttattgttgtaatgtttgtctgataaaaatcggtccgggttagccggacttccgggttatcgggggccgacttatcgaggttccactgta

SEQ ID NO: 8956 - DNA, 931 bp, Diabrotica virgifera
  SmartBlast Evalue=2E-12; Info=Endonuclease-reverse transcriptase n=1 Tax=Bombyx mori RepID=D7F160_BOMMO
caaatgcaagtctgcgtcttttgtgagcagtattggccctgtttctgaattgcaagctatcaaatcctgttctcttaacctctgtcgaacaatagacacgctgattactggtccttgggattgttgaatatgccttcggaaatttctaacaatttgcgcccagtgtcgcaatgtagcaatagtgagaaagcgatcttctctgactgttgtcttctatttgtcacctgtaccggagcgccgttaatgagatcaggtctcaagaaatcgttggtaaattttgcatagtttaacgactaaaatttaattgtcttggcacatccttttggcttgtttcatgttcgagcaatataacaatctgagctgaacagatatgtatgtatgtatcggttttagaacgtctttcgacgttgtccgatgcctaacttccacgtccttctatcatcccattggccatctctaagatctcttgtactcattgctttggttaccccttctttccatgtctttttgggtcttcctcgttttttgcggtttggtggtacccactgcatgatctttttgggcaatcttgtgtcttccattctttgaacatgaccataccaaatcaactgtttcctctcaatgtctgttgttaagtaaccatctattccaattcgtcgtcttacttcctcatttcgaactcttttactgcgagatatacctaacgatcttctaaacacatccatttctacagcttctaatttttttctgttgttctcggttattctccaagtttctgctccgtaaagtaggctgcttttaataagtgtttcatagatattgtattttcgctgtattcctatttcggagctccaaagtattccatttaggcagccaattgttcttctagcttgtgttacccttttctttatttcctcatcgtcttttcccg

SEQ ID NO: 8957 - DNA, 934 bp, Diabrotica virgifera
  SmartBlast Evalue=1E-98; Info="Cullin-associated NEDD8- dissociated protein, putative n=1 Tax=Pediculus humanus corporis RepID=E0W4A1_PEDHC"
ttggtgataacttttacaagatcaccgcagaagcgttgaatgttctacaagaattggtaaaagtgattcggcctttgaatgttaactctggttttgacttcacaccattcaccaaagacatttacagttgtacgttagtgcgcttaagaactgcagatatagatcaagaggttaaagaaaaagcaatatctacgatgggacaagtaatttgtaacttgggtgatcacttgaaagctgagctaccttcttgcttacctttgttccttgatagactgaaaaatgagattactagactaacaactgtcaaagccctaacaaaaatagctgggtctcccttaagtattgagttgcccattttgccggatgcaatgccgatcttaggactattcttaagaaaaaatcagagagctttgaaactgactacgctgcaattaatagactgtttgatcaaaaattatcacaaagacttaaacgaaaatttgttaaaacatattgtagttgaaataccgccgttactcgatgaatctgatcttcacattgctcaatggacccttattattttaaaagctattgctgtgtatcatcccaaagccttgatgaacatcaatgataccattatgccgcagattttagtacttgtgaaatcaccactgttgcaaggtaccgccttacagtccatgttggactttttcaagtctttggtcgtgtgcaatattccagatttgagctacgatcatttgttaagactacttttgatgccaatctcgaatctctcagtgaatccatcagctactcttcacaagcaagcgttctattcactcgccaagtgtgtagccgtcatcacagttacttgccattcacaggctcacccaatagtaccacaatttatcaatgagattcaaactgcagcaacagactctcaacaaatatttgc

SEQ ID NO: 8958 - DNA, 932 bp, Diabrotica virgifera
aagaaataaattttcttaaaaataaggtttagtctgctaaaacgctaatcttgcaacctaataaacaaaattatttggaagactgattctcagataaaacaaaattaaaacttaataaaattcggtgtaggttaaccaattaaaagtgcaggcgcaaaatttcggaccaatgctttttaaatgcattcacttttttcgaatcctgaaaaaacaaataacaatctttgaaaaatttaaacgcagaatgaaaggttacataattaccgagggccaaaagtcccttagaataaacaaaaagtttattttctcttctttttcataactgtaactcattaaattaaacattatagaagttttcagagactttcggcccttggtaataatgcaatctttcattctgcgtttaaaatttacaaaaatacttattagttttctcatgattcgaaaataatgaatgtatgtatttaaatagaattggcccgaaatttggacctacgctcttaacttggcgattaaaattaaaccaaataaataaattcttaaaaataaatatatccagtcattgcacgaaatttccaaataaaaacatcgaattaaaacaaaaataaatcacagtttgaggacaaaacggtttagagcagaaagcttttgaaaatgttaaacgattgcagcattctactctaaatacgctacaagatttctcagaaaatttgacttaaaaattgaaaattatgtatacaaaactgtaagtgacacaacttgatataaatgcaatccgatcatacatttatattcagtcattagcgaaattattgagaacctctgtatttcttactgaaaataaaaatgccaagttctccagcatattacataagccccggcgcaaattgattctaagcgagacacaacctgcatcggcgaactgcgtggac

SEQ ID NO: 8959 - DNA, 929 bp, Diabrotica virgifera
  SmartBlast Evalue=1E-57; Info=Angiopoietin-like 1 n=1 Tax= Tribolium castaneum RepID=D6WEJ6_TRICA
aaacccgttcgaacaacaatgatggctgctaaattaatttatgtgtccagtgtaatctacctctgtatcgctacatgctatggagccatcccagatcctcctatagaggtagaaataactacagatggtaaactggacaacagaattgactcacgaggtccttttgaaagtatgcttaaatcgactgataaatctcatcaaacattctgtcccgaagtttgtcaaaatagttattgcaagaacttagttggagtgagtaaagacaaatcttgtccgatcaaaaggctaccagaaaggggagagcgaactcctaaaaattgtagggaaatttttgaaacagggaataatgtctcaggtatatatgaaatattacctcacaacaaatccaaacccattatggtcctttgtgatatggagctgcaaggtggtggttggacccacattcaaaacagatttgatggatccgaagatttctacagaacttggcgcgattacaaatttggatttggaaacttggaaggtgaattttggattggacttgaaacaatttactatctcacagcatttgaggatatggagctcctggtagaactaacagacaaaaacgatgtaaagtactatgcgaactatggacggttttcgattggaccagaactagatggttacattttaaaagctgcatcgccttatagtggcactgcaggagataatatggactatcatttggggcaaaagtttaccaccaaggatctggatcaggacaaatggcctcaggataattgtgcaaacttttcaatgggtggttggtggtataacaattgttatgccagcaatcctaatggacaacatcgaaatatgaaacacttcgaggaaataaagcgaaaaggtatgaactgggacaaaatttcatctccagatggatacttttt

SEQ ID NO: 8960 - DNA, 935 bp, Diabrotica virgifera
  SmartBlast Evalue=1E-107; Info=Copper-transporting ATPase 1 n=2 Tax=Culex quinquefasciatus RepID=B0WRZ5_CULQU
cacggcagctaggatgacggagggactgagactgtctccctgcatccagatttttgctacttccagtgtacctttcgttattgtaccagttttgtcgaacatcacggctttgactttatgagcattttccaaaggttctgcacctttaattaagattccgttgatagcgcctacccctgtgccaaccataactgcagtgggagtggccaatccaagtgcacaaggacatgcaatagctaacacgcttaaagcacatctaaaaacaaactgaaggataatttccgtgttattaaatcccttttttatcactgtcacccagaggtagataattgatatcgatagcacccactatcgaccaaattatcagcgtcaaaactgctaaaagtactacggtaggaacgaaataacctgctatcttatcggccaattgttggatgggagccttggacgtttgtgcttcttctactaatttaactatttgggataaagttgtggcttcgccagtgtgcgtggcttcgactatgagaagaccgtgttgatttattgagccgcctataacagtactgcctatttttttgggaacgggcatgctttcgcctgtaataagactctcgtcacacattgattgaccctgtaacacttttccatctacaggaacttttgagcctggtaccactttcaaaatgtctcctctctgtaccagatccacatttacttgctcttctgtcaaaatttctccctttttgacctaaagtaattatcacagcttctgtagcttttaaagacaacaaccgacttaatgcttcggacgtctttcctttagctatatgttccaaccaacgtcccagactgatgaaaactagcagcataggtggagtatcgaagaacgtttgtggagaactgtgttgttgtaagatcatagctgccatcaccac

SEQ ID NO: 8961 - DNA, 933 bp, Diabrotica virgifera
gtttcattcttggttctttttcctttaggtcgtttctttctgtggtttctcaggagatgtacttcttcttggtgatactgagggctttcctgccgctggtagttcttcaggatgtttcgttattggttctttttccttatgacttctttctttttgcggtttctccggagatgtacttcttcttggtgagactgaactctttcctgccgctggtaggtcttcgggatgtttcctgattggttctttttcctttgggcttttatctgtaagtggtttttccggagaagaacttcttttaggaccgacagaaggttttcctgcagctggtaattcatcaggacgtaacttatctgttggactgtaactagtgtcacttatgtacttcctatcagtagtagatgaagaagtgtcagttataacttttccatcgactacaacgtagtgttctaccaaggtggactgattaacgagagtttcagagttaatagtgtttgaattttgtgtatctacaaaagtttcagaataagatgtaatctgatctacagtacctggttttattttactagacgaatcgcttcttcttgatggcctcgaaggttttccagctgctggtttttcttttggatataaatccacctgctttggttgatccctacctgttttgtctggacctggagctacaggtacctttttaccatcgataattacgtaatgttcagttaaactagtgtgactaacatttttagtatcagtattttttacgaaggttgtatttttaatgtcactcacatcagtagtttcgtaattttctattgtaaatgtagtgtcgcttgtatgataaccttcaggaaattgtcttgaaagatccttttttattactttatgatttacatcatcgaattcaacattagtcatctgttttatattctcctg

SEQ ID NO: 8962 - DNA, 927 bp, Diabrotica virgifera
  SmartBlast Evalue=1E-18; Info="Ankyrin repeat-containing protein, putative n=1 Tax=Pediculus humanus corporis RepID= E0VZ49_PEDHC"
caatagtaacgcatatcacttaaaatatgtttaaatttgttaaaaaccctaactagtgttacaatattgtaaggtatattcaaaatactgaggaattccgattttctatatgattactgttagtgaaatacataaatattcgaagtattcatagtaatcaatgtaacgaataatgtaaattattactttacacaaaagtaacgaatacatagatacttgaaaataactataatcaacatcactacattttagcaactggccacggcgacagcccacggttgggttcaatatgcgctgcagtagaaaaataaatgcaagggtcatccgtggccccggagtgtattgtgtctcggttgggtcaaatttgcgccaggccatatatcgactaagattcttttccattatacataagaatatgttcatctagatagagttgtttggaccggatgaataactttgggttccctatcttgatgacactgaataaacatgcattttacatgccaaaaatctagaaccatcgtatatgaatacatcacgatggttaacagaatcgttaacagcgaaacaacacgcattaccttcttaagttaaaacacagttagaaatgggttagtactatttaggtttcgtatctgttaaggcacgatggctacttcttgcagccagtggtgaggaaggggttttcggactatttgttgattttgctttttttaacttcacgttatgagacttttggctattcctctcatgagcgtagagcaggactccgatgtgtcggtgaccggcttccatagctattgctagagctgtgctgccatccatatccataatggtcgaattgcagtcaggttgggaaaggaaatgtttaactatttcgatatggccgtgttcagcaccacacattaacgccgtactgccatcttc

SEQ ID NO: 8963 - DNA, 932 bp, Diabrotica virgifera
tggtgcaaaattgaggaatttgctagagatcaaaaaatgtgataacagatttttcaacggcactggttggcattaaggtttcctaatatgtaatataatttccaccatatggctgatcatgctgttaggctttaatggacaattggatctttggcatgagaccattcaaattacttattttgcttatgattcgagaaccatgtactaatgtcaaagcctttttctgatcctcaataggtaacaagataagagtgttctttttattcattgaacctctccctctctcttaaaaccactctctagcctgttaaagctcttcagtcattgattatttacttcttctcccagtattacttcaaattcttcattttggatacaaatgaatgatattgcagttgaccaaaatctctttaacgtcttcgaaaagtcattgattgtttacttcatcacccactatcgcccaaaatgctatattttggccaactttcccacactctagttgacaaaggcccccctaaagccatcttttagccttcgacaaccctcaagtcattcattatttatttttttagccactaccacgtgctcacataaagtttatcagtgatttgtgatgtcacttccgttcctaaaggcaattttgatgtcaatacttgaaatataagaagacagccgaacaaaaatcaatacaaagtcctaaactcaacaaagtaatgaaaaaattaaggtggcagtgaacttattatgaggcaaatatgttagcaattttttaatgtccaaaaatataggtagattattatatatatataaaaaaaagatatttcatatcaggattaattatgttgtgatgtaaaatgtatataaacatatatagttatttgcgaaggaattcgaaaatgtaattcgattgtgactagtgtatttttcgaaag

SEQ ID NO: 8964 - DNA, 933 bp, Diabrotica virgifera
  SmartBlast Evalue=1E-109; Info="Hect E3 ubiquitin ligase, putative n=1 Tax=Pediculus humanus corporis RepID=E0VFB3_PEDHC"
tcaccttttggttcgatgttatcctcgctttcagattccgatttgcgatttcgttcttatccacgggaatcatccactcgccggggctttgtaaaatagcggccacttccctatgtccttcatctgctctttcccttgccttatctaaaggtgttttaccatcttcgtcccgtaaatcaggattggcaccatggcgtaagaggactttggcgatcgctggacggccgaagcaagcagcgtaatggagggatgagctcctctgacccttatttacatcggcacctttttcacatagatattcgaccatttcatgggtgccaaaagcagatgcccaatttaatagtgtttgtccaacgtcatccatgaaatttacttcaactccgccattttctatagcttcaatcaatgcatccgtatctttggatcttatacaatctattagctgtctgtgagatttttcagctgctgaatccatgcgcctcattcttggcatcagttggccagacgaagacgatccagattttcctaaagcgcgtcttccttcgaaaagcagcactaacagcaaatcaactagacgcattgagtccaatacacatcgttcgtctccttttagtgatttttcaatggcgtccagaagctcagatcttagtaaatcatatgttatagaaggtgatcccctacagagagttgaaaggaggctaataatggtcgatattgaagctgcgttcgctttggaatcaggtgtagctgttgctggattacttgtagatggagttttaccgggtgttgtttgagtaccactggcagctgctggcccggcagcattagagagcctacttaacagttcattgaccagaccgtgctgagctaaaggagctggatctacacctcttcttgtaaatctgtcggctacagaagcgaaacatctaagtg

SEQ ID NO: 8965 - DNA, 929 bp, Diabrotica virgifera
  misc_feature (39)..(39): n is a, c, g, or t
  SmartBlast Evalue=3E-63; Info=Symplekin n=1 Tax=Harpegnathos saltator RepID=E2C4N2_9HYME
gcttgagttgaatcgatgagatgaagagctaccaacagntcgctaggagttatgggactgtctccgtgtaagcctaaaagacggttaaaaacttctcgaacgaccacaacgttgagtttgatcaatttgggcagcgcagcaatcacttctttcttagtgaggccgttcagtacgggtattaggaatctaacgtcagttattcttgattggtataaatcccgtactctagagaccaattccggcgttggtgaggctttatcggttaagatatggatcaacctagttactagagtttcggaacctttaacacattcttctacgagcttcagcagttctttagactccattcctatttgcttcacaggaacatcgatcaacctcaatattactcgcttgatatcgggcgaagtgtccacataaacctttgctaggtcgtgtatgaggctctcgttggccggcaagcagagatatgtaaggcatcaaacaagcttttatgaagtcgtcaccccagatttccgcttttagcctaccctggttcaaaccgcagaggctttctggaggtttaggtagcttcaggaactccaagttcatcctggcgaattcttcaatcaccaacttcaactcgaaccgtttgtgaagctccaaaacgtggccgatggcgtggtctctaaccacggtgttttcgtaggtggtgtagcccagagagtgtttaagaagatgagctgcttgggtggttttcttacgaccaggtctctgatgagacctagagcccaaccagaacgtctttcatctctgcacaccactttcagttcttccaaagcatcctctgtgatcaacggagactctagaagcaatcgtgtaatgatcaacgcgtcagtagctgatacattaatgaaactacacagcaacatgttgtagaacttttccga

SEQ ID NO: 8966 - DNA, 935 bp, Diabrotica virgifera
  misc_feature (288)..(288): n is a, c, g, or t
ctggaattgttcgtaacagttaagtgaactctggcttttcaacaatttgttgtttattttactgtgtataaaacattatcaatcatgattttcttcatacttgtatcggttcttattgcatctgcaaccgcccaaaacagaccatcgttcgcaggactcagtggaaaaggcgttcctgatgtagcagcacgatttaagccaggaggcgccttgtataatccacctcaagacgtcgtcaatagatttggaccagccgatacccccacagaaagaattcctgttgacgcnaatgttgatcttaaaaaccgaattaatacctggccagaagaaaacaaaccattttggtatgtcaacgctgaagccattcaaaaacatatcggagcttctccaaaccgtgaaaccaacttaaatggaaaccaacctttatctgatagcggaaaccaagtgtttgaaagcagatttggaagtggtagtagtcagtcaggaccggaagttgctggaaactcttttagtattgtcatgaataaccaatggaaaacgtacgtttacgacccaatcacagatgcttggtatgccagaagaaattagtttcatacaaattatgattggactagctgtgatatcatatcaataaactataagacttagtaataaaccatatttggccacataatccaccaagagctataaagacaatttgggattatttccatttaaaatcactaaaaatgtaacggcaaaaacgctttagaggaaaaacagcaaaatggtgattatgaataggcaggttgatatgaaaaattgagaatatttaaaaatgtcttatacaaatagtacctatatgcttaaaaccaaatttacacattgaaacttcacccagtgagataatgattctattcaagtattgacaaacgataaaaaagaatctacaccta

SEQ ID NO: 8967 - DNA, 930 bp, Diabrotica virgifera
  SmartBlast Evalue=5E-37; Info=Trypsin n=1 Tax=Phaedon cochleariae RepID=TRYP_PHACE
attggttatcagttcgtcacaatttcaattgaaatatttccagttcagtgtattttattcttatacacttttttggcaggacagacaaattttgcataatgaggacattttactttatatttgcatttattggtgttgctcaagcgatttccagtggtcataacactacaattatgcgacaccaatggcaattatccttaagacataaaggagaacatttttgtggagcatctcttatctccaaacagtgggccctcacttctgccagctgtttgaaccaacacacttcagatctttccgtgcgggctggatctgccaatcttacaagtgggggttacataatagacgtggacgattttgtaattcatccgaaatacaacaagaaaacctataactctgacatagctctactcaaattcgcaaaagaagtggagggaagcaatgtttcaattgctcttgtacctttccacgatacaagcgatgtgtccgatcataaaggggttgctatgactggttggggtgctcttgaacagggcgaaaattttaccgaagtgctccaaatgggatatccttcctcaatctcgagaagttcctgccaaatggcgtacccgaccaaaatcatatcgttaaacatgttttgtgctggggtttacgacgtccaaaatattacagcttgcgatggagattttggaggacctgccacctttacaaattgtttacaagggataatttcgtggggaggacaatgtggaagttttcagaacccgacagttatgacgagagttgctgcttttaaggattggatactcactaccacaggtgcaacagattatttgaactgtcctctagtctgagttcacatattacacataacatttatttaccatgatcaataaatacatcagcatacttaataaaattaaaaatttt

SEQ ID NO: 8968 - DNA, 933 bp, Diabrotica virgifera
  SmartBlast Evalue=4E-38; Info=Endonuclease-reverse transcriptase n=1 Tax=Bombyx mori RepID=D5LB38_BOMMO
attcagagtaaatattgaatagtagtggagataaaatacagccctgtcgtactcctcgttctattgcaattttatcagttaactggtcttctattttgatttttgccgtttgattgtaataaatgtttctgataattattagatctttgttgtcaattccaatttcttgcattagaattagagttaataatttgtcatgttttactctgtcaaatgctttctggtaatatgtaaagcatacgtatatatcacaatttacatccctgcatctctgaaatagcacttgcacagcaaaaagggcctcccgtgttcccagagcatcacgaaatccaaattgtgttcttgttagttgttcctcgcactttgtatatattcgtttgtgaatgacctttagaaatgtttttccataggtttccattagctgccgataaatacttaagtgtcaatgggcgataactttcttctcctctctaacacagcatcgcagtataatgctaacgaaacagtacggtcactcctcgaaaatcctttgttctctatgttccattttggtgacggcgcggtgcatcaaaatgtttagtcttttgcgcagatgaatgacagttaacggcatcctacgtttgccatgattggtcgttatcgtcgcgcattagccgtgattggtcgttatcttcacgcattaaaaattttgtctcgggagtggattgcaaaattggaaccgtcaaaattcgagagtgaatttattgattctttagcattaactctgcctctactttctggacgtcccttgcataaaataatttttgatttcatgaggtaactttaaccttcggatgaccaagcgggggaaattgtgaccccagcgtatgtttttctttaataaattcaaaagtatcttcaatttttaactcattatttttttatttgacttta

SEQ ID NO: 8969 - DNA, 927 bp, Diabrotica virgifera
ctgtttctttcttatagtggcaacggtttcttacttacaatgataaatactaatatcttcattgaactcgaggctgatgaaataattgttactgtggtatttgttgactgatgtatgttaaatgatgatatgtatgtgtctactctataatacttggaaaactgtgtttcgcaaataatcttattgccttatttattggaatcaaatcacgggtcccaaaccaaactgtctgaccaaattaaccttgtatttgagatgcgcacaaagataacggaacccgtggaactcataagtgagacaggaaacgaatgtataatatacagtaatccctcgctatccgcggactcatcaaccgcggtttcacttatccgcggttgcgatatctgttcaatctttaatgagaatattttattatttttatatattttttataatttgaccagtcgcgttaaattgctcatgatacgccactggcgcttgttcttagtagtaatactatggcaattagtttacatgtagttcggaaggtttaaatgcgcgcaccacaatcttggcgaagttacttcgccaaagttgtccgaagtacctctctacacactcgttttacttcgcgaggaagtgcgataccgacaaagatccctttgactcggatgcgccagaccgacagagaatggaagtagaacgaagtgaggcaaagttacacaaggtggccgtctacactctcgtacttgttgaacctcgatcgacttcggcgagagtgtagacggcgtataaaataccggcgaatgtagacgatgcgtctcagcgtctttattttgtgatatgataatactatttcacagatatgcaattttatcatatttcttctatgtactaatatacgtatccaattggattatatgtaatattctgctttggatcgtggat

SEQ ID NO: 8970 - DNA, 933 bp, Diabrotica virgifera
  SmartBlast Evalue=1E-91; Info=Bloated tubules n=1 Tax=Tribolium castaneum RepID=B6CY69_TRICA
ttcattcctatgaggttttttatgtatgttgttggattcgtttagttcagaataaatgttagttccattgcttgtatttgtgctttgcttttcaagtttctcctccttttctttaaatgcttcagctacagctaactttttagttcgttttatggatttggtatagtctttcgtaccttttctttttaatgtaaaatctctttcgccagattgagctttgctattccattggacccaattgtgtcggcttattgggtcctttggtccccagttctttgacggcctgaatgatgttttaaatctctctatgaatgtatatccatcctgtttctttaccacgtagaatccagtaacaaatataagcaaactggctgttagaacaactccccacccaacaccgtacagccagattggatcatctttgtaaatgccctccagtggcaatgttaccattccccatgcgaacaagccagtcaggacaagtggggcgatccaccataatataagccagaagtgagataaaatgtgtccaagcataaactcgaagtctgatctaattcggtcgacaccataaaatgccagtaatgttaatacttctagaatggctgttatcaggatgagatttccaacgatgtagtgatctagtagatgaacgatgtcaaagtcttctttaagtaatatggcgcatccgaagataaatccagaagcacttaaaagaatactggcttgccaccaactcagtcttgctctacttccgacagttatggctttcagtaatgtgtacgtcattgttgccatagttataaatccagataatataaataaactaaatataacaattatccatacttttttatcagtggcagtgctcgcacttccaatatcgtaaatgacagagactagcatcagttctgctatgtcatccttatttgc

SEQ ID NO: 8971 - DNA, 927 bp, Diabrotica virgifera
gccactctcaatgttcattcgtacagtttttgatgtgtcatatcattttaaaagacattttgaaacatatggcacgataataatttttttaaatataataacacaaaattgaaaaggaactcgggtacatttatcgagagccacaattaagccttcaaagagccgcatgtggctctcgagccgcagtttggccacccctggtatattataatatgtaaatgcaaatctattactgggtattgttaagaaattatttacctgatgtataataatgggagttacgactttttacctctatgtctttaaacaggtaatatgcaaaataaaaatcgtaagtgattacaaaaatagtatattccgtatttaaaaatgcaaaaaccaaatcacaatgtttggaacaaaaaagaactcttatttttcattatcccgttttaacaccctcaaattgccatttaatataaaaatggagctacgattgtttaccactaccgcatacgaaagcatactatctaatatacgcacttatctatggagttgctctggatatactactgtttacctcaactgactaatggagttgctattgtttctaaacgccttatctaggcaactaataacgctggatgtacgattttttgccacaatatgctatgaaaatctgacaagagcgtggtccatttcggcaaaaattggagttacgactgtttacctcgacggtacagaatatgtttaattaaaaaaagtaattgtctgacaaagaaaaatgacgcaaacttacaaaaaacagaaatctttttaaacagtggtattctacttgtactttgttggtaacctcacaaatcacctacctctctctagtctagacgcttcatgacaatgctttgtttagatatgaaacgtctagttaattagtctactatgtttgca

SEQ ID NO: 8972 - DNA, 925 bp, Diabrotica virgifera
ggcctggagaatgaatgttgcttctctcatagaatatagtttggttatggaggtataatggcatgaggtaacagttctttggaagcacataggtacagatcttctaatagtaggggaagatgtcttgaatgataataggtaaattaaggaatataggatataggattattttatgatttatattttactacggaataaaaaaattgtaaatgaagtttttctaatactttttagttttacttaaaacaaacttagtgtccggttaattatgcgtggcagtgtagatcagcgtttctcaatttgtggtacatgtaccactagtggtacgtcttattatttgtggtggtacgcaaaaatatagccaaaatcagctccaccattatagttaattaaattacctagctagattacgtcagttaggtggtaccaaaaaaattagtacatgactcaaaaagtttgagagtcgctggtgtaggtagtatctgcttaagtagttttgtcagtcgttaattaagtaatttttaaagtttggtgtggaggagagattggggtgagtattgacgaatgagttggttggcgtactaagttacgcttttctacttcttctacttcttttttgcatagtccaaataacctaggtttggttaggttagaagcatagacatataaaacctagactgcgcgctacaatctaaaactgtttccccagtgagacagacaaaagtgtttgtaaacacttgcacatgcatctcatgtggtcgataaacaccgctgattaaaaagagattcacaccctgtttacacttttctctgtcgcacatgggaacagttttagattgtatcgcgcagtctacttattatatgtctatggttagaagtagaaaagacaaaagggagacacaagtgttaaggtgaatattaatca

SEQ ID NO: 8973 - DNA, 925 bp, Diabrotica virgifera
aaattaatgcatgtatttccagtgcataatatactactaaaagattgatgacatcgaaattattagacaaaagaaccaaaacaagaactatctacagaacattggttttgattaggtccttagtaacctatggttgtgaaacctaaataatgcgaaaaaagatgaagcccaaaagacattcgagagaaggatactgagacgtatatggcccggtacaagaggaatacggcacatggagaatcaagaagaacgactaggttaatgaactgaatgaagggtatggggccgttcaagtattacgtaacgcaggttggggggcggggggtcaaaaatcttcaaaaattgccttacgcaatagttaaacgcccattacagtgcgttacgtaggggttgggggtcaaaaatcttcaaaattcgcgttacgtaatacttgaacgctccctgtgatattgtaagatttgtgaaaagtgaaaggccttccgatgggaaggcgaaaaaaggaaggcccaggtagagatggttggatgacgtggaagccgacctgaaatcatgaacaggcaatggagaagggcacaagaaagatctgaatggacatagccagacaggcaaagacccatctaggcttatcatgccaaaagaagaagtgaccccaactttctactaatccgttaatgttggtatattcttgttgctgacttctttattattggcaaccagagcctgctacattctgctgatgggtttcctacacatggttcttcgttaaattaaatgagagctgcttttttacgagatttgcgaattatcatcaatctgtattggaatcaaaaggccaatatgaagatagaagaacaagaatccgagaatatttatataaagagaggagtaagacagggttgtgttctgtcgccgctactgtctaacc

SEQ ID NO: 8974 - DNA, 929 bp, Diabrotica virgifera
gacgcgatcgatcatgggcaatccttcatctctccgactgtacatattattaaataatagaccagagaaattagcaaataaaaagactttttcgtgacactctgatatctaacaactgattttgataaattttgtgatagcaatatgaataaacaaaatatgcaaaagattaaacgtcattttttatttacatataaacaatgtaataccgttatttgattttaaatactgaaggtgaagactggtaaattatatggaaatgtgataaaattttactgaaaaggtacagaaaattctttaaaacggttgtttggaaaggtatttttgttaatttgttgcttaataattatttcaaaaatgacttcaaaagtcgattttttggatattattaaaaacttttttaaaaatacacaaaaaacctgaattttgcgtgagaataaggacaatatcacaaagattcaactataaaaatttcgagaagtttcacttaggtaatacttattgcaaaattgaaattgtatatcccaaaaagcttatctacaacgatattatgcgtaatctattagacctacatgatttctaaatgcataaaatggaagaaaaaggcttattttaacaaattaaatattaaaaaatttatgttaaatattgaaacaattaaaaatgaatcagacgcatcaacatgaaagaagttaatttatttttattcaaaatggcatttttacacggatttaaaaaaaatacaatgtcttacgatccttagaacccgaattagccctttttttttaatccgtggctttgtttataaacattaataggcctggatcccgagtacaaaaaaaagttgatcaacagcaagccgaaaacttgttaataggtcaacggtgtctagtcggacaaacttccatgcacgggaacactgaaacagg

SEQ ID NO: 8975 - DNA, 930 bp, Diabrotica virgifera
  SmartBlast Evalue=1E-59; Info=Protein YIPF1 n=1 Tax=Camponotus floridanus RepID=E1ZZ84_9HYME
atgataaagaacatcagtaaaaacttcctctgtgaaaatcgtaatgctggcattaatgttagcaataatactgatccagatatgaatgttccaaacgctaacaaggtccactgcaatatgtttatttgaattgaccataacgcagatactggaatgtatatgaataaggaataaccataaatacagattaactccaaaatgccaggtgataattcctcatctagcccttcgacatcttggatatgaacactccattttaacaatccccacaatatcaagggaattattgttacatacgaaaatatagtggtagcggaataagatactaaatggaaatcatatctccaatgatattgggaactggaactttgtaaatagttggctatatttccaccaattgcaatggtaaaaataagggtaactgatatccagaatggaccatatagatccggtttggtccttaagtgattctttagacgattatcccatttaggagttatggatgccattatcctctccacaacatctgacgtgtctacatcaaagtacttttggtaatattctaaagtccaaaatgctttttctgttgtgggatttgttccatcagtgactggagcatctcctggcccagggggattgtgacttgggcttatatttccatctacataatttacattgatctgagcctctgaaattggtatggttctgttgtcttcaccggagatgtgaacactaggaaaatcttggaatgacaataattcgtctgttggtacttcttgaagatttgtcattgtgtttgttttctattatacgcacatattattatagctatattactttatgttgtagtttttgtaattgactgtagctggttaaaacatttatcgattttttaaacgtaaacaagaacacgacagcacttactatttt

SEQ ID NO: 8976 - DNA, 932 bp, Diabrotica virgifera
  SmartBlast Evalue=2E-23; Info=Mitochondrial ribosomal protein S31 n=1 Tax=Culex quinquefasciatus RepID=B0WW32_CULQU
gctggaaataatttgatgggggatgtgtggtggctagttttaaatcccgttcatataacttctgccaagtatttgtttcattctcttgcatgtccttgttggtaaagatacctagaggcttactaccaaagaggtcgattttttgtaccaccatttcttgtttgggtttaaattgttgctgtggtttcctcccttgggacataggtttcctaggatcttgccgttgttttgcttgcatattttgcaggatattcctaatttgttcagccctagatttttcagctgattttacctctctgtcaattttcatgcctttgacaatatcatttaaacttttagaagatggtgtgctatcaccggggcccaagagtttagatagtaattctgattcagtttgttttgtatcaccacctatatcctttgccacgtctgacactgcatttaccaatttggtttcaacactttctactttttttgcctgtctctcttcctttggaacccttttactttttggtctagccaacactaagttagaactcttagcaacctcatcattttgaattaattgttgtaaaagactgttaagtttggtgatagtttctttatttttattttctgtgtcttgtttagatggtaaacccagatcactatctgaactagagctgctactgctactgctcgaactactgtcttttttattaggccccgtgcttttgtaggcatatgaatacttttgataacaaactgtaaataataaattattcttggacgaattttgcctccatattaagtttaatttgtttaaactcatttttaattttatgtaaaaactaattaatcaacatttaaagcaattcagacttatttttttaattaatttaattccattcaccactatttggaggttgtatattattattcttctacttctg

SEQ ID NO: 8977 - DNA, 931 bp, Diabrotica virgifera
  SmartBlast Evalue=1E-38; Info=glutathione S-transferase S2 n=1 Tax=Nasonia vitripennis RepID=UPI0001C4B5AC
gtgctgtgttcgtgcgttcggttcggttgtgcggcgtgcggcgttttagtagaacattctcaattctcaccggtgctggagtgaataggtgtttagtagttttcttttttgctgttgtcgaatttaatcaaaaatgccaagttacaaacttacttactttaacttcaccggaagagcagaaccagtcagagtactcttacgttatggtggaattccttttgaagatgttcgcgttgagcatgctgattggccaagcgtaaaaccaaccacaccatatggacaagtaccagttttggaagtcgatggaaagaaattcacacaaggaatacccttggcaagatacgtagccaatattgttggcttagtaggaaaatccaacgaagaaaatttggaaatagaaattgcagttaatattttatcagagattctaaaaactgcctatgaatcccatttcgaccctgatgaagaacaaaagaaaaaacacttgaaaaccctgcatgaattgcttgctaaatatttaccagttcttgatgaagctgctaaaaagaatggaggccacattggctctaacaagcttaattggggagatgtctactttgtaacggcttatgaagatataagaaacatcctgggaaataaagacatcgtggaaaattactccgggttacagaacgtgaagaagaacgtactctcagacaaaaatattaaagaatatatccagagtcgaccaaaaataccaatctttgtatacgatctgagaagcgaagcgtaatttttttaaggaaatgcagaatgaaatatatatttttgtcacacacataaaacatatacgtattctcttaagtgtattgctttcactaaactatatgtaaaagtaccagatttgtattactattttattttttacttgaaataaaaaaacttttctttt

SEQ ID NO: 8978 - DNA, 928 bp, Diabrotica virgifera
  SmartBlast Evalue=8E-54; Info="SMC protein, putative n=1 Tax= Ixodes scapularis RepID=B7Q2A3_IXOSC"
aattaggaaaaaccgaaactgccatcaacggtatcgtctcggaaatgcagaagactgaaactaaaaatagcaaagctaagggaatctacgataaagtcaaaggagagctgcgtctcatgcgagaagaattatcaaacatagagcgattccgaggccctaaagagcgctctttggcacagtgtaagtcgagtttggaagctatgcaaaccaccaaggaaggcctcgagtctgaattgcaccaagaactgttggcacaactatcagtccacgatcaagcacaagtcgattcgttgaacgacgacattcaacgtttgacaagggaaaacaaggatgcgttcagtacgagaatgaaattagaggctgagaagaataagttagagaatctactgactaataatttaatcagacgtcgagatgaagtattgcacgcccttcaagaaatatctttagaagatagaaaacgccagctggtcaacagtaaaggggaactagatgaaatcgataagaaagtcgacaagatcaataaggatttgaccgtagtagaaaataaaattaaagatctaactaaaaagctaaaaacggagcagagcgagttagatagttggaaaaagaaagaaaaagaggctcaagacagaattgacgaagacgccaagcatttggaaaatttgcatcgaagcaaaaccttttggagcaaaaaatagccgaatcagtggagaaaatcaatcaactaggagcgctgccggctcaagatttgtattcgcatttcattaaaatgtcctcaagatcgctatttaaagaactggaaaaggcaaataccaaactcaaacagttcagccacgtcaacaagaaagctttagatcaatttatgagcttttcagaccaaaaggagaagctgcaaaagaggaaagaagaactagatagaggggac

SEQ ID NO: 8979 - DNA, 922 bp, Diabrotica virgifera
  SmartBlast Evalue=3E-38; Info=Serine protease P157 n=1 Tax= Tribolium castaneum RepID=D2A4W0_TRICA
ttgggatttataattccatcgtccaatagtgatttcaaatgcggagtggctattaggaatgaacaaccaaaaaaagaggcactaccgtttatattaagtggtactgacaccgagattggacaatacccttggctggtcgctttcttcaggaacaggggatccaagtacgaataatgctctgcaacattgatttcagatcagcatgtcctcaccgctgcacgttgcgtccaacattataaaattcaagtagtacaaaccgaagaaatattcttaataatgggtaccaataatttggacaactggaacagtaatggagccgtcaccaggaaagctaagcgagtggatgtacatccgtcttttatagaaaattcagaatctgctcatggggatattgctattattttaatggaccgtccagtccaattttccaatgttttaactccagtatgtctatggaaaggcaacacagatctctattctctgatcaataaaacgggagttatatcagactttagtcacgcattaaagtcaaaacaaccggaaattaccattatcggtcaagtcgaatgccaggaaactaccctgggattccaggaccttccgtctgagaaaacattctgcacaaaacgccgcggagaaacaccacttactggtccctgcagtggagacattggtgcaggattcatcatatccagggacggagcatactatttaagaggtatagcgtcgctattcccgacgataaacacggaatatgtgatgtgtcaaacacgtactcagtgttttgtgacgttgccaaattctcgtattggataaaatcccacatgacgtaaatgagtgtagtctaaataaactgtgatctttaaactggatactttggtggacattcaatatttacaggctgtttgttgagtttttgcta

SEQ ID NO: 8980 - DNA, 929 bp, Diabrotica virgifera
gtgtagcacgttgatatggagtatcgtgatttgttggaattttatacgtttttcttactatcgggcgatcttccgttggaagactaggatcatactctatttctgaatcagaaggtggatctttatttgatgcgtcaatagatgtgattctagtcatttgttgttttggaattataggttctttaaataatattatatcgttatgtgatgtcgaagcgtcgcgtcggtaggatactccatagatttgatgcttatagtcgatgtcgactttttaaatttctttatagtttttgttaatttttttttgtttacagttttgcatcataggtactttagaattattgtcgtcgtctgttgacgaagatgaatattcaacgtatctacgtttatcgtgtctttgtttgccgcttttttcttgttgtaccttattattagatcccaaatcatcaaattcatcaatattctcgatatccgatggcatcggggttgtctgatgaatttttttcatcatcttctacatgctgattataataaggtatgttagttactgatggcgtgtctattgtattgattattatatctttatttttttattgttttgtgccatatttcgacgacaatgatgatgatgatgatgctgctgcaacaactactttatcgattgtattagataaagatacactgtcttcgtaatcttttaacggtgtttaatattttccaattgttgttgattagttttatattgtatacaagtctcgatctgttgattaaataacgattcaattttaaatttgtccgtctccaaatctaattttcatacatccattcattgtcagattgagagtcgtactcgttactttcactatcatcactattgctactactactactcgatagatacattatatcattatcgtcatcatcatcat

SEQ ID NO: 8981 - DNA, 906 bp, Diabrotica virgifera
  SmartBlast Evalue=2E-62; Info=Endonuclease-reverse transcriptase n=1 Tax=Bombyx mori RepID=D5LB38_BOMMO
tttgacgaaggctgatcttgccttctcgatccttatcttaatttccgtcgattggtcccactgttcatttaagtttgcacccaaataacaaaagttggtgatttgtgttataggttgttggttaactagtaattgaccaggtggtatactatttttgcttataacaatgtatttggttttttgatgttaaaatcaagcccaaacctgctacttacttctgccaccctggagacaagtgtctgcagaccttcaagactgtctgcaaaaatgacagtatcatcagcgtatcttatgttgttcaatcgttctccgtttataagtattccctcgtctatgtccgttagcgctaggttcataatgtgctctgaatatgtattgaacaataatggggacaatatacatccctgtcgcacacctctctttatctttatgtcgtctgttaactgatcccctactctaacagatgcagtttgttcgtaatagatattgtttattatacggcgatctctgctgtctagaccaattgaatttaatattttcatcagttcgtcatgttttattctatcgaacgctttctggtaatcaacaaaacacacatatatatcacaattcacgtctctacatctttgaaagagaacttgtattgcaaaaagtgcctctcgagtacccaatgcatccctgaagccgaattgtgtgtttgtcatgtgttcttcacacttttttatatattcttttatgtataatttttaaaggttttcaggagatggctcataaggcttatattattattcgataatcttcacattttttggcattgggttttttaggcattgttataaagttgatcttagccactgttggggtatttttcgctttggtatatattgttgaagatcaaggtaagtc

SEQ ID NO: 8982 - DNA, 929 bp, Diabrotica virgifera
gtagatagaaacacgaaacacaggggggaaacgctgtaagtcaattttttaaatttttggaaaacgcgatttttagattcaaaacttcatatttcataaataaacatgctaaaacactgttgcattgagtatttgataactcatatatacaaagcatgatattataaaactgaaattgtcatgtacagtaggtaacaagagaaattaaaaaaaaaaaccaaaggtctggaggaaaaaaggacaaaaacgctgtagttgacaaaatataattgtaattcaacgaaagaaaaaaataaacagaactagacttgtttaacttaactaaacctaaaaacattaatattatctgttaagtgaatcaataacattgtaaaattcttaagataaaaaataagtcatgttttttttttagctgatcaaaatacattcttcctttttctgaatgttgttctgaagctatttccttgtggcatttttacaatcaactatttttaatgggaaatttcctttttctgaacaaatttttttttaaaagttggagatctttgtattttgccattggaatgggcagtgactcagtataggatcgagaaggaaaacgaattcttttccagtatacggtggttccctaccagtcacttttttgttaatgacagcagaaaccattgttccattgtaggtgtctctgaaataaattagtctgggatgttgctttgaaatgcttaattttcttattggtctagttttaaaaggtgcttttgtagcatacataggtgcaagaaaagtgtcccagctacgcacgcagtagttatcaacctcttctactttataaggcgcaggtttttgacgagccaattgtaacactgcttcccaatcttctggggtttctgctgtacttttttggttaacgataccaaaatctttatccg

SEQ ID NO: 8983 - DNA, 928 bp, Diabrotica virgifera
gcagatctgaataatacaattataaatgtaacaataattattcaagtagttgggttattcatgtacacgttaataatgtaatgtagaacatagatagcttttacatacaaatacaaatctaagtttcattaccaaataaaagaaatttaatacatgacagggttacacaattaacagtaattaacagataattctgtagatttttttttgcttgttatacttgaatctttttggtaataaataccttattatttaatcgtccacagttttttgtttctgtatcacagacttttaagtccaaatatacttcacacaattcacacaaccaatttaattacataaaatatataataaaatacatattagttataaataatatatatacatctacagttttgtatgtgtcattttgtatggggagagaggggtgagtttggatagtggtagacaatgtttacttccataattctcacaattttcatgtagactattagctacatgtcgccggttggggtgtctaagctctaaagttttacatggtgtggaggccagccacacgcaaccagtaaatgacatttgcaactaaacagccaatgagacctatatacctctaggaataattaaaacgatcgaaaagatctaccagaacaacacaataaaggtaaaagtagaagaactaacagactcaattgaagctggcaacggtataagacagggttgataaccatgagtcctctattgttgatgcaatagtaatctctcaaagtgaagctgtttacaatgtatgctgcaccaatttaatataaccgccagaaaatttaacatgttaatttccccaaaaagaaaaaatgcatggttataacagcaaatctactaagctgtaaattacagctgggaagtcagataatagttaaatatctagacatca

SEQ ID NO: 8984 - DNA, 927 bp, Diabrotica virgifera
  SmartBlast Evalue=7E-27; Info=Probable RNA-directed DNA polymerase from transposon X-element n=1 Tax=Drosophila melanogaster RepID=RTXE_DROME
ctacaattctatgtacctgttgtattgttgaatgttgttttataaacccaaattggtgtggtggtattagttttttgttttctagtataggcattagcttagtaagtgtcagcttttcaaaaactttggataccacgggaagaagactaataggacggtaggactgtacattttctggttcttttcctggctttagtatcattgttatttgtgctagtttccactgtgatgggaaatgacctagtctcattatagagttaaataactgtgtcagaaattggaaacctttctctgggagttgctgaagagtttttccagtaataaggtcgtatcctggagcctttttgcatcgttgctatgtgttattgatgcgaaaggtagagattactgttgcgcatgaagtcgcagtagtcgaatcgtttttttattttctagacgaccaaaagtgtattttgaatttaatttacgacgtatatggctgatccaatatttgttcatcgattggtcgtaatttttgttatgttatattgtagaagtggtagattttgttgacaattttctatacttgcctattaccacaagaaccagcaccaaaggttttacattcggtaaaattctacagaaaaatacatcacaaaaaaaaaaagaacaaaagagtcatgggttgagtaacctatgaaatctaaacctttggttggattgtcaatgacattttgaattgcaaataaatcaaataatatttaattgaatagaaaaatccaaaactaaaatttcttaccaaatttacccagtgtaaaatcttaagagcgtttttaatgttatataagtatctcacgattgtagtcatcagttaagcaatgataaaacaggctgtgctttttgaatgagctgatagtcagctcactgaagctatgagcaagatagaca

SEQ ID NO: 8985 - DNA, 926 bp, Diabrotica virgifera
tacgataagaaataaatacaatatcacaacaaccaacacactgagatctattatatccaaaaccaaaccaaacaacatacaggggatcaaagaactgcattcataaaataccttgtgaatatgaaacatttctatctgagagaaacctaaagaccactaagtgttatgataaatgagcaggaataatacaccaaaaaaaggggactttgggcacagagtataatggaaagatgtagcaacaataagcattagagaaacacagcaaaaagagaaaaatcatagaaataatcttactcaataaagaaaaatgtgtaataaaccagaataataataataataataataaaatacaatcctgtgggagttttttgtcagttcttctatcaggcgcggccccctgcgaatgggggatgctttctgggtattcgtagcgccaatacccagagagtagcagggatacttgccgtggaacaaaaactgacacctggcagtaggtataaaatgcacacccatgagaatggagaataataatttatgtttaggatcgctgcctggggatcgccagggcacgtctggagccggcgctggacgtgacagcatgcgggacgtcggtggcagggtgttgaggaggcgggcccctgtcatacaatcagctacagcccaacaacaacaacaaccacaagcgagccaaacaacagcaagagctccacccgctgaaggtgctgcgctggaacatcagccggcgctcactcaagcgggacgaccgaggcagcgcatgaaatggactgtgtccattaacgaaagcattttgcgctcctattataaggtgacaaacttcggtcaagaaacgatcggctacagacaacagctgtatgccgaattttgcagggagtacccagatattcaagtatcggagcaaagagtat

SEQ ID NO: 8986 - DNA, 930 bp, Diabrotica virgifera
  SmartBlast Evalue=8E-89; Info=Brain peptide ITGQGNRIF-like protein n=1 Tax=Tribolium castaneum RepID=D6WT52_TRICA
caaaactggggtattatccgtctaagtgcaagtgggtttttgaagagttttgagttgattttgtgaatttttttgtggactttttcaaagagaaaatatgaaaagcatactggtattttcgatcctgtgtctcgtcggccaaaaagtcaatgcatggggaggactgttcaacagattttctccagaaatgttggctaacatgggatacggaggacatggaggaggtgggggattaatgagaaacgacggggatgaaaatgccctggaggaacccctaggcgaaggcggcgacgatgatccgtgttatatgaaagcctgttcagccaacgaatattgttgccctaatcaaatttgtgtcgacgttgatggaattcacggcacttgtctgtactttttcggtcgtcgagtgggagaactatgcagacgggataatgactgcgaatcaggcctggtatgcgcggaggctcaagctggtgtatccacgagagtgtgcaggccaccacttcgacaggacaagcaatattcagaaccatgcaacatgtcgagcgaatgtgatatttccagaggactgtgttgccagttgcaaagacgtcatcggcaagcaccgagaagggtttgctcctatttcaaggatccacttgtctgcgtcggtccagtagctgcggatcaagtgaaaaacaccatcgaacacacagctggagagaagaggttaacatctctgggtagctttaaaagacccatgcactaaactaatttcaaattgttgtaaaacaaacacactcagtaacgtactgttccaattgagaaacgtagattttcttcctaactggaaacatgcgttttgtgtttctaggttggattgagttggattctttctgagacatacatatcctgctcattggttacatctttacgatatataactctctt

SEQ ID NO: 8987 - DNA, 928 bp, Diabrotica virgifera
atttatacctttcgaaatattctgatgaatctgaatatttagaattgatcgaggtagaaaatatataatatcctggagtaactctccccgtagaaaataaagaaaaacaacaaaataatattattaaagagattagcgaattgaaaaaagaaaaaggcttttaaaattattaatttatatgtatgctacattattaagtacaaattatgttcttctctgaatactgtgttcatattttttttattaaattaaattattttttaagcgcattcttaattttaattaattattcttgttaagatacaatcgacaataaagttttatagttaatttaaaaaaatccaaaaatatcattgaactgtttaaaaaaatcactgaacaccccgtcactgtaaacgaagctttatgaggaaggggagagaagatattaaaaagtctaattttttctacggacgttgtttatggatattcccaaaatatattttgacttgatggggaaataaatttataaaatattttgaagtttgcgagtcccatcataaagatatgttttttttaattatgcatttatatatggcataattatggcggcaaaaatcaaatacacctgcggtctttgactaggcaccaaataccgtctatgaatggtgactggtcaaggtacagcgtggtaccacgagacagggtgttatctttaaattgcttggatacgtctatacatatgtatttcaaattaaacaatttattgttaggaaaaaaactgtgaattcagcaatcttaccacctgtagttttagaattagacaagaaaataagacgcttaaacgcatatctacattcacttaataaataaattggtttaaaagaaataatactaggcttagagaagaaaaccaaagtttttcatgtaatacagatttgtctaatat

SEQ ID NO: 8988 - DNA, 928 bp, Diabrotica virgifera
  SmartBlast Evalue=4E-80; Info="3,2-trans-enoyl-CoA isomerase, mitochondrial n=1 Tax=Culex quinquefasciatus RepID=B0X2M5_CULQU"
taaaacttggaatataaacgtagactttgatcctttattttcgatcaataaaagtctatttgtgcatattttaaccattaaaaggttttagtacgtttacttcatacacaatggctttaagaagcgtttttaaaacaaatatagtgaaaagtggtgtgagatgtttcagcaaggaagctagttttgtatctgtaactgtaaacgataaaaatggagtagccacagtggaaatgcagagaccaccggtaaatagtttaaattatgaactactcagccagttgtcttctactttaacagacctagagaaaaacaaatcaagaggtcttattctgacctcaaaaaatgatggtgtcttcagtgcaggattagacatcttggaaatgtataaacctgaccaagacaggatgaaagcattttggacagctcttcaggatacatggattaaactatatggttcttcttatccaacagtagccctaataaatggtcatgcacccgcagggggctgtcttttatcattgtgttgtgagtaccgagtgatgtttaagaaccgtaccataggattgaacgaaacacagcttggtatcgtagctcccaaatggttcatagctagtatgacaaatgtgattggaaatagaaaaacagaattggcgttaactggtggtgtaatgtatacaaccgacgaagctcttaacatggggatgattgacgaaataattgaaactaaagcagaaggaatggctagagcagaagcgtttataaccagatttgccaaaatttcccccgttgctagagggcttactaagaaatatattcgaggtaatactatcgaagatatggtcaaaaataggaaagaagatttagacaattttgtaatgttttctaatcagcctgcagttcaagaaggattgggactttatatacaaag

SEQ ID NO: 8989 - DNA, 929 bp, Diabrotica virgifera
  SmartBlast Evalue=4E-40; Info=UPF0172 protein CG3501 n=1 Tax= Camponotus floridanus RepID=E2AIA4_9HYME
caacatataaatcattactgtatttaaaatgatatttcaacaacatataaattgcaaacttttacatatctacaaaacataaataaaatgacagatggtactagcagaggtcaaatttgttgaactttgcaataaaggcatacctgtataggaatgtgtatttagaatctatttaaatatttttgtgaagaaaaaatcaattaacctaagctagctgtcctcataaaaaagaatgaatctccttattcaattcactattggtccagtctaatgaaatatcatcaagatggttatcaaaatctactaatttttcatacaatgagtcattaagtccagatatgcacacattcatggcatcatctgatacactgatgtcatcacactgctttaaactaccgtcattgtactgacctacttttaaagctattttacctctttgaatggtattggctgtgctgttcacaatgacaacataagaaggactacaatttgaggcaatcttatcagatattcgattgtacattttgtcaaaactggtatccctgggattctcgggggctacataatatcctgctatagtcaagttcttttttgaagcatattcatcaatttgcattaatgctatttctgccatcggtgttaaatttatgcacacgtgaaatagaggtacacaatcaacaaattcaacttccttattattgggggatgatttagttaaaagaataccatttacagtacagtgaggatatttagaagcatgcaatatcatcttgcaatatgcttgctcagtaaatttaatactggtcatttttatagaatcaaatatgaaatatttaataataaataatttacatgaactaaatgaataaaataaaatattgacacagactgactactgtcactgtgatagtgactactgctagtctgag

SEQ ID NO: 8990 - DNA, 927 bp, Diabrotica virgifera
  SmartBlast Evalue=8E-60; Info="Phosphatidylinositol 3-kinase catalytic subunit type, putative n=1 Tax=Pediculus humanus corporis RepID=E0VQ65_PEDHC"
ttaggtgtcggagatagacatttagacaacttactgctaactagagatggcaagttattccatatcgatttcggatatattttgggcagagatccgaaacctttacctccgcctatgaagttgagcaaggaaatggtggaagccatgggcggagttcactctgaacatttccaacagtttagaaagttgtgttacactgcgtttcttcatctaagaaggcacgcaaacttgatgctcaatttattctccctaatggtggacgctagtgtacccgatatagctctagaacctgacaaggctgttcgtaaagttcaagacaaattgaggctagatctaggagatgaagaggctgtgcattatatccaaaacctgatcgagacttccgttactgctataatggcggctttcgttgaacaactacataaaattactcagtatattagaaattaaaacaatcgctgtgaggatttaataggaagtatacgtatagatatgttacaaatatataaaactaaccgatggatgatatctcacggatgtcgaccgaatcaacaagctattaggagtcgacatttttattctatcaaacataaaccatcactaaggatacaggaatgtgctctatggatatcatattggaaaatggctgcgattacatacctcattttaaacatggaaaggcccttttgttctttttagggtaacgaagctgttgaacaaggaaaagcaggacagtaacttaagtttttccactgaataaaaattatataatgtgcaacttaggttacctgatttttatatcgtcgccttgatactataacttgataactcgaaattagtagttttgagataaacgagtttaaagattttaaagatatttgtgctgctaccatgatgttggtaaatacggaattcactctgcggctc

SEQ ID NO: 8991 - DNA, 927 bp, Diabrotica virgifera
  SmartBlast Evalue=1E-147; Info=Receptor-type tyrosine-protein phosphatase N2 n=1 Tax=Camponotus floridanus RepID=E2AM06_9HYME
ggaccggggccggactgggttggggcggtagggctttcaggatggcgtgtacttcttctgcgacagcggtgagcacgaattcgaactgttgtttggtagctaccattctgggtctctggtctcgtaggtgttccagtgttgctgcgatatcgatttcctttgcgcctttggccattcgactcagtaccatgtcgatgagacagtaggttccggttcttcctgctccgtcgctgcagtggactacgattggacaagatctgccgcggtaagacttattgacttttctcctaaattccagtagtgcttttgtagatgcgggtattccagtttctggccaagataaaaagtggaactgagtaaccgtcctcgtctctccagtacgaacgttcttcagatagaaagatcgaaccaaatagtcatcacaccagatatgttcactaacgagatgtacttcgtagatgtggtaaagctcagatccttcttcgggccagtaacggtgacacattgcattgcctccctcagttaatcttgtcaacataactataaccacagctccttgctcccaaattagctgccaaaagtcaggggctgtatggggcaaaggaccctgcgtagcaatataagctggatttctgggatcatgatcggttatgctagaagcgttgatgtaatccgagccgttggcgttggtcagttcattcagtaccacacgagcatgatcgtagggcaccacctcaggataccggttgttttctttgttgtctttctttgtagctacggttacttcgcatggctcggctacgtaggcacaaagtgcgacccattcttgctccaagcggtctttattcttgagatggtcttccatgtagctcaataccatatgacctgttgatatatccatattatgcaagctggttcctcgctcca

SEQ ID NO: 8992 - DNA, 927 bp, Diabrotica virgifera
  SmartBlast Evalue=1E-125; Info=Glucosamine-6-phosphate isomerase n=8 Tax=Sophophora RepID=GNPI_DROME
gagattcgatttgggtattcgaaaaaaggtgtgtgcgctagttcagttcaaattacagttctttgtgtgacggttaaataataaattgtgtaaataactgaatatgagattaattattttggataaagctgaagaggttgcggaatgggcagccacgtatataatgaaaaggatacaagattttaaaccatccgcggaaaaatattttgttcttggactcccaacaggaagcacacctctgggaatgtacaaaaagctgatagaatttcagaagcaagggaaaatatcattcaaatatgtaaaaacctttaatatggacgaatacgttaatttaccaaaagaacacactgaaagctatcattactacatgtggaataatttttttaaacatatagatatacaaccaaataatgttcatttactggatggcaatgctgcagacctaaatggtgaatgtcaaaaattcgaaaaggaaatacatgaagcaggaggaatagaattatttgttggaggaataggacctgatgggcatatagcatttaacgaaccaggttcgtctttagtttctcggacgagagtaaaaaccttggctcaagatactttagttgctaatgctcggttctttgataatgatatagagaaggtaccaaagcaggcacttaccgttggagtaggaactgttatggacgctaaagaggtaatgatcctcattacaggttctcaaaaggcattcgccttatacaaagccatagaagaaggtattaaccatatgtggaccgtatcagcattccaacaacatcccaatactttaatgatatgtgacgaaaacgctacattagagttgagagttaagactgtaaaatattttaaggcactaagtgactatcataccaaccaactgttgaagcatgacaatattgaacagtt

SEQ ID NO: 8993 - DNA, 928 bp, Diabrotica virgifera
  SmartBlast Evalue=1E-104; Info=Proteasome subunit beta 7 n=2 Tax=Obtectomera RepID=Q1HPQ9_BOMMO
gaatacaatgacatttatttaactgtaatatttaagcaacatccatttcttcagcttcaatgggaatcactgagacttcctcaacatccaccacctgggtactaagcactgcagtggttcctctttgatatctataagatccttgtttaactccctttttgttagcctcgtcataggttcgtttgtagtctactgaaccctttcgtattacacagatgtctacattggaacctgaacctagatcattgaatataccagctgcaatagcatctcttactagttggacaccatcttcctcttccatttgaggcttccagcgggattcaaagacagatatggctgctaaggaaccagaacccattgtagcataaggaagatcaacactggatccatgtggataaatcatatatagatgtggtccttcaatatcaacaccacccaggattaaagcagccccaatatatccctggtagcgaaatagatattgttttaacaattggtttgctgtacacactctagtaactcggtttgtgtataatctgtggagttctaatttagcagagaccatctgagtggtcatttctgtatctgctgcagtaccagcaccacaacaatacatattgggtgcaaggaagtgaatcttttcacagttcttgtctgcaactgtggtgtcttctgtagctctagtatctgctccaagaataattccatctttgtagactattcctacgatcgtagtacctgttttagtggcttttggaagagcaaggcccttattttccagaagtgcatttcttttacaattttcgaatgaaaaaccaggcgttggtatttctggacacaaaactgtagccattttcagttaattttacttaaaagttaaaagcttccttcaaattaacaatttacacaacttgcaaaattgttg

SEQ ID NO: 8994 - DNA, 928 bp, Diabrotica virgifera
  SmartBlast Evalue=8E-17; Info=Protein outspread n=1 Tax= Harpegnathos saltator RepID=E2C758_9HYME
tagctaaagctcttctgtacgcagtcctcaggttttctacttgagtcaagtattcagttcttagatatactggcctttcttcttctagtaggttatattttttaaatgaactgttttcatccatagcttttctaatatcttctaaactatttctcaaattaacgcacatctgacagacgtcactccaggttcttaaagcaacatcttcacggttaacaggtacatctagacatttctgtaggtccgtcactcttgaagacatctcatttaaataaacaagaatctcctcaagttccggttgacttaacatagcataacaatcttgactaaatttgtctaccatacaattgaattcgacttctaaactttggtttatctgtactagggattggtcttcgatgagagaccaatatttttcgtttctatccaacaaccgagggtatttctcgagtcgttgtagtcttcagggatatactgaccactgagcactgctattctagcatctatgagtgatttgtgagctataatttcggcataatcgtgaagcatcgtggtagaagttcgagtatttcgtactgattcaaccctacacctccaattctgcttgagcaatttatttaaactattctggtacatctccgtcagctctgtgatgcttttgttaacctcttcaaataaacaatctccaacagaatcggaccacaattctaatgcagctctttcagaagcgaaaaagctgaagaaaaacgcatgatctgcatccagattcgattggtagacctgtgctgctctcaagagtacgtggtggatttcggaacgaataagttcggcggtaacgacatctctggctgttttgctgaactcgtccgtaacggattctatcctacaggactgatccgacgataaacagatagtttctacagctaag

SEQ ID NO: 8995 - DNA, 928 bp, Diabrotica virgifera
  SmartBlast Evalue=0.000000002; Info=DNA-directed RNA polymerase III subunit D n=1 Tax=Culex quinquefasciatus RepID=B0WKN9_CULQU
ataggtgattgacatacgacgattagtaaattaataataatttaaacaataagaagctaatataattcaataaaatggtcaaagacgaggctccaagtaatacaagactaacatcatttaagttaccacgagatttaacccttgggcctaaaaaagcaaaaaaagtatttgtgccaaatttaaatgctgttagaaagaaagaaacaccgaaagaatttaataaaagggacgacagaaacaaaaatgggggcagggaaagaagacagaaacctagagataatacccccaagtttgtccagtcttcaggaatattttctgagggtgttggtgctgatgttgtccgagttcgatcttcagaagggcgcagtgataaggaaaatgatgttgctcctcttttgaccatgccaaccataaagaaaaattcattccaagttgaccagaagaatgaagatactgtatttaaaagaataactgactgtgatgaagaaagtgatgatgaaaaactaccttttagacctatttcctgggaaaacaaatttcagaatccattgtatgggaaaaaagaaaccaatggtattaaatctgatagtttggaacctagtcttaaaaaattgaaactggaatccagtgaatatgttaatggtgtatgtgtggactctcatgagtttctgatagaagataaatacaattatgatatgccttccatgtcattatgggctctaccagattcttttgctggaaagggcttaagtgacgatcctaattgtaagaaactatttgactttggactgaaggacatgcaggaaggacagataggcaaaatagttattaggaagtctgggaaaatggaaatccagataggctcaacacagtatgaattaatacaaggagattgtgattataaagaggaagccattgccgtggatct

SEQ ID NO: 8996 - DNA, 926 bp, Diabrotica virgifera
  SmartBlast Evalue=1E-47; Info=Zgc:56719 n=2 Tax=Danio rerio RepID=B7ZVF3_DANRE
gtataaataatctgtgaatgataaactaatatttttaaaagtttaataaattgagtattatttatagataagtgcattatactaacataataacattcatagataagagcattataatatatgttaacttctgcgctattatagttttatgtcattttctattggaaagaaattgctcaaactcaaattccctttcagaatggaatttttaaagcaatatgctcctgatacagtgagtaaacaaaggaaaaaagtaaactttccttcagcagacagaaacaaagaacctatcctagaagtgctcaaacaatattttgataacaccattgaagggaaagttatagaaatttcatctggaactggccagcatgcagcacattttgctccacattttccaaaactaactttccaaccaacagaaaacgagccctccttattagaaagtatttcagcttatgccgcagatacacccacaaaaaatgtcaaagaaccacttctggtaaacgtggtggatgattggacgaagtggaacgtatcgaatgattttgattacgcaataaatgtaaacatgatacacgttacaccgttttcatgcacgataggccttttcaagaatatcagctcagttttaaagccaggaggattgcttgtcacttatggagcgtatgcaaataatggcgtcttggaacctgagtctaatagacagtttgacaagagtataaggcagagggatccaaattgtggagtaagggatattcaagatatcgttaaagtgtcagaatcttatggaattaaacttaaggagataatcgaaatgccagccaataataaatgtttaatctggcaaaaaaacaatgaatgaatatttttatagaatgtataattgtaaaaaaagaataaagtattagaaaaagaaaaaaaaaaaa

SEQ ID NO: 8997 - DNA, 927 bp, Diabrotica virgifera
  SmartBlast Evalue=1E-122; Info=Vacuolar protein sorting- associated protein 35 n=30 Tax=Euteleostomi RepID=VPS35_HUMAN
gagcagtgccttctggctagatttatacaccagatgatgtccagttcacctgatgaccaatttcttattttaactggagctagaaagattcttagtaccggtggaccgctacgaataaaatacacacttcctcctctggtgttccaagcctatcagctcgcttacaaatataaggacctaaacgacgataaatgggataagaagtgtacgaagatcttccagttctgccatcaaaccataacggctctagttaaggccgaattagccgaactgcctttgcggctatttttgcaaggggcgttggccattgaccagatcggttttgaaaatcacgaaaccgttgcttatgaatttatgtcgcaagcgttttcgctttacgaagatgaaatctcagattccaaagcacagctggctgccattactcttattgtaggaacgctggagcaaattagatgtttttcggaagaaaactcagatcctttaagatcacagtgcgcattagctgctagtaagttgctcaaaaaacctgaccaatgtcgaggagtagcgacttgttcccatctgttctggagcggcaagagccttgcaaataatggcgaagaaacacacgatggcaagagagtggtggaatgtctaaagaaaggaattagaacagccaagcagtgtatggatgtttgcgttcaagtgcagttatttgtagaattactaaatcactacatctacttctttgagaaaggcaatgatcaggtggatgccgatattctgaatcaattaatcaagaagattaaaagcgaacttgctaacttggaaagctctgacgaagctgagcagatcacaaaacatttcaataatacattggcccatttgaagctcagaatggattcccctggaaccgaaggcgaggcttacacaggactattgcttaat

SEQ ID NO: 8998 - DNA, 926 bp, Diabrotica virgifera
  SmartBlast Evalue=2E-13; Info=Microspherule protein 1 n=2 Tax= Formicidae RepID=E2BA40_9HYME
cgcacgcctctggctaggagccattctattgaacggcacctgactgaagtaaccatatcactcgctgtgcgtgaacgtcacctgactgaagtaaccatatcacgcgctggcgcgtgatcagtaacgaatggagtaaacgaatattaaaatatacattaagttggtaccaaccgtaacgcacaaatggttgtttaatttttaattatttgaccattccagatcacgtgactttgacagcaagcaaacattgctttgaagttttcattgttgtttacatgtttgcagtgttctttttccttttttctcgttttattattaaaaatctgtggttttaactgcagaaatttcaaatattggatattatgacaccctcacagggaacgtaaaaacccggtataatcgaaaaatcggtattcttaaaaaatctttcttaggtttatttagtgcaattttgtatccttatcttttctaaaatatctggaacatattctcgcattctattcaggatttttttgtaatttggcaacaatgttaacttagatatttgacctagacaatgacgtgcaacggtgtttatactgtaccaataatatttcattatgaacattccaaaaattctgttttaaacgtctatataaagaaaatacaacgcttaataaatggttaactgcaaaatggatctttatacgtaatactaatcactggagtagcttatggcggtaaaccatatctaacagattcgttatgaatagatctaattaaatcttggttgatcgaaaagatgaatcttaggcaagctatctcgacgacggcattatcgtagaggcgggtttgtttccggccgttatcgggtctgccatcaacgaagattggtcgtttgccttccgaggatagatagaattctccggtatttcgtaaccttaaag

SEQ ID NO: 8999 - DNA, 928 bp, Diabrotica virgifera
aagccttcgaatgtttagagactaatttaatcgtaccattggttacgtttcatccgttccatccagtccaatctcgttcttttacctgtgttttgacaggttctgggtctatgcatgtttcttttgccctgccaactctatagtgtaagattgtatgatcttaaaagcttatattgctatgtttattacattttctgcaaacattttcatgtctattcattttgtaaggaattcttccattgttgaagaatgtctttttccttctctgacctctgattcagatagtctgtagattttactttctgtgagaagaacagaggtgtaaagatataatccgtcactgggtgtttaaactagaatcacattccccataccctacggcatatgccagaatacttaagattacaggcactaagatggataaccatttaaaacgatttgataatcaaagccataaaatactatatctattctttacttgtagtacaccaagcaaatacagtcgtataccgagtaaattttgttacctgtattttgagtggaaagtgtattaagattgaaaagtcagcttttggaattctttaaaagatcatgtattgagagcagatgtatcctctaccttatcttcataaaatctgctctccgaatagttggatactacgtttattctcaagataagctcttgatccttctgacgcccgattggtgcgggtggcgtatcgcagcttgtgattggttataaattactttctaaccaatgacaagctgtgacgatacgacacacccatcgatcacgtgtctcaaactgtgaccttgagcatatcttggaaatgaacgcagcatagtatgttcatattatataaaagacgctcttacacaattagttttttatttcaattgattttaaacaagcattattaatttttag

SEQ ID NO: 9000 - DNA, 925 bp, Diabrotica virgifera
  SmartBlast Evalue=9E-52; Info="Aminoacyl-tRNA synthetase auxiliary protein, 43kD, putative n=2 Tax=Aedes aegypti RepID= Q16SR4_AEDAE"
gtcaaagtgaaagaatgtccggcaagggaacaatggaacgtataaaacaaaatgcccaacttgctaaacaaacaatagaggaattaaaaaatgaactgaatataataaacaacgaatataacaccctgttaagcaggcagttacaagaagaaaatgctaagcttttagcagctgtggaagatgcgaaaaaaaaagttaataaaattggaggtccagaatggagtgaaacaagtgccagttccaaatcaaactgtcaatgtatcagcagttgaagccccccaagctgacataaataaggatgaacctaaagccccagctgaagcacccaagcccaagaaagaaaagaaagcaccaaaagaacaaaaggttgctgaagaactaccgatagatgtgggaagattagatttgcgcattggtaaaatagaggacattaaaaggcatcgtgatgcagatactttgtatgtgctgcaaatcaatgttggtgaagaaaaacctaggactgtttgttcaggattagttaaacatattcctatggaagaacttagggataaaacagtggttgctctttgtaatttgaaaccagttaagatgaggggaataacttcagaggctatggtcatgtgtgcgagcagtgaagctggagtagaaaccctaatacccctgcaaacagtggaccaggagatttagttacttgtgaaggctacacaagacagcctgattcagtgatgaatcccaaaaagaagattttcgaaacagttgctccagatttacacaccaatgataatctagaagcttgttacaaaaatattcccttcaaggtagaaggcaaaggagtgtgttactcgaaaacattaaaaaatgtaccagttaaataaaagtctggatatattttaagtttatttaaagtgaaataaaattattaact

SEQ ID NO: 9001 - DNA, 923 bp, Diabrotica virgifera
cagaacatactgataacagaggccactcagattctggatatcggaaggttaaacagttgttccagctacggtcatggtcatggtcatcattcaggggaaagaatcagaagaaacggaagttaccagctatgggcatggtcatggtaatggacacatccactcagatgtagaacacggtcattatagtggtcactcagattctgaatttagggaggtagaaagaatagtttctagtcacggtcatcatcatgaccatgatcacggtcatcatcatgaccatgatcacggtcacgatcatcaccatggtcatcatgataatcacttacactccgaatttagagaggtagaaaccagctatggtcatggtcattttaatcctcacggacatggtcattcagattctgggtatagggaagttaaaacagtagtatccagccacggccatggtcatagaaagggtcatggtagttcagaagaagatttggagactatcgatagcaacgaacgctcaaattctggtgttaggagagttgaaaccgtagtgtccagttatggtcacaacaatggccatggacgtggactgggccattctaaacattcccaatcaggacatcgcaaagaaaaaacaacagttactacttatggtgaaagtggatcatcttcgagtttagaaaatctagatgtggaaaatgggcttgatcgtaccgatacaaataatgaatcattatatggaggtggatctaaaattattaaaacctcggttattaaaaaaactactaagcataagagtggtcataattcagatgaagaagaagaaaacggttcaaacgagtatattactgaagagtctaataatgaaaatcgtgatgtcagtgtatcaggtggatcgaaaactaccaaaacaacaatcacaaaaactgtac

SEQ ID NO: 9002 - DNA, 925 bp, Diabrotica virgifera
  SmartBlast Evalue=8E-36; Info=Peroxisomal targeting signal 1 receptor n=1 Tax=Camponotus floridanus RepID=E2A1S8_9HYME
ctagaggttgtgggatatccgacataggattttcttcactgaagtcatattcctttgttgtcatattataataattattgaattcatctatccatggttgagatgggtctacatctgtctctgacactttcttcatgtcttcttgtagtttatcccaaaacgcactgttaaattcccggtcatctacaaaaccttcttcgagttcctcagaccactcttgagcaactgtttcaactttggtggctggtttttcatctgtgtcaaaatattccttggtccactgagcagcttcttgttctgtcagttttccttcttcaatcttggagtcattgccttcttctttcataaatttcataaactttgaataaacatattttgaatcttctaaattatcttcctgtgaaaatagttctgaagcatctaatgggccctctaaaccttgacttgcccatgtgtcagctaatctttgaaactcatgttgtctctgttcctgtgacattatttccgcccagacattttcattattataaacttcattaaatcgttttccgtcttcaatatactgaagagcccaggcattgtcatgcagctgatctttgactgttgaagcaggaatgggaggtaaagctgacctttgagattcaatttcgtgcatttccctcatcaaatcgtccatcctataactttgaggaatggctctggtttcctggagaaattgttcaaccaattggtctgaactactttgaaaaacttgcccatgattatcagaaaatgtgtgatcacgggtaatgtgcgaagttaattttgttaaggggttcgcttggccacattctgcttcagttaggggtctaaatgccatctttgtaactacttgaactttgataactctcactctcacaaaattaatcaaaatattacatgtgga

SEQ ID NO: 9003 - DNA, 925 bp, Diabrotica virgifera
  SmartBlast Evalue=7E-50; Info=Serine protease P23 n=1 Tax= Tribolium castaneum RepID=D6WAH4_TRICA
tcagtatagtgggttacacgggataggtatgaacttttcaatgagggttactgtattaattgcttgtattgtgctgattgctaatcagtgtgagtcagcagttttaggtaataattaccgcattgttggaggtaacgataccactatcgagcagcatccatggatagtgtcaatccagttcttaagggtacacttttgtggcggagctcttgtagatgaagaaacagttataaccgctgcgcattgttttaatgatgtatctggtaggataaccatattagcgggaactgctgatttgactcaagaaggtacgtccattaaagttaaaagtattttgattcacgagaactacaatcctgatgttggttctttagatcatgacattgcaatattaaagctatccgagaagattacattttctgacaaaatacaacctataaatttaccggaagaggacattgatgtaccaaaagatacaaaagtttcaactgctggttggggagtaacggaggaaggaggtacgacatcttcggatatattgttggaaatcaacatcaaaattgtcgataggcaaacctgcaaaaaacttcttgaagaacaaagcgaagttacagagagaatgatatgcgctggggatcttaaaggaggagtagatacatgtcagaatgattcgggaggaccactagaactaaacacgacattaattggcattgtatcctggggatatggctgcggagaagccggttatcctggagtttatacccatgttgcacgtttcagatcatggataaaacaacatgctggtgtctagcgcttgtcgaagcattatccttggataaatttgttatttgtgtttgtagttctgctttaagttgtaatttcttaaatgattaaatgtaaataaagcttaaattataattggcac

SEQ ID NO: 9004 - DNA, 924 bp, Diabrotica virgifera
ttgtactcagaaattttgtaacagaaaaataatttttcagaactacagtacggaattgaaaataaaatgagacgctaataaaaataagtttggaataatttaattataaggagaacaaagaccaacaaaatctgatagacatctacattttttatcgaaaacaatcaagaatgtcgaaatatttgtacaattttaggttctttttacaacttgataccttcatttgataaaaaaatgcttaattagaatattagagctgttaaatagataaatatatgattacatactaaaaaacgaaataattataatgagaaatgtactttgcgttatagacctattattaatttccacctttatttttccaccaaacgaagatacctacaaaaatgtgccgcacacaaaaaagttcgaagagaaaaaatattaaaaaaaaacaaatgcttctttatattatccttcaagcattgagtatataattttatgcattaaaatacctaggtaatatttaacattgttttactttattccacggtttctttacaaagatcgaagatagaaagcatccaaaatgtccgttttcaaacgtaataaataccaggacttattaataaaataaattgagtcagttgagatacttttctgctacagctcctaattttgtatctattaatatagtggacggtttatattgaaaaatgttaattttccaatataaagcgctaaaaaatctgtgaatttacaaaagctaaacctttcacaattgatccactgtgattgtgtaggtagagaaacatactgcggtcggtcaaacgaaacgcagaacagtggttactaagagggtatcaaagttgctttcctacgaaggtaattaaatccatttactaaggttgaaaatcagtacacacattctaaattgaatataaa

SEQ ID NO: 9005 - DNA, 925 bp, Diabrotica virgifera
ccccttcaacatggtaccgtattagatatcttcagtacgtttgaagagctgtagtttttgggtacttctcgtttatcttatttcaacattaacaatctggcataaatcatctccaaagatactttcctactaggctacagctatttgaagatgataatatattattcaataactcaaaaacagttgacaaaccatttgactacatttggtatgtcccttcaacatggtaccgtatcaaatattttgagtacgtttgaagagctgtagtttttgggtacttccttcacattcatcttcttttaacattaacaatttggcataaatcatctccaaaaatgcttccatgttgggctacaccttttgaagatgatgatttttatccaataactccataacagttgacaaaccatttgactacatttggtatgtcgcttcaacatggtggtaccgtataagatatcttcagtacgtctgaagagctgtagtttttgggcacttcttttaatattaacaatttggcaatcacctcaaaaaatgtttcctatagagacaaaagctattcaaaagtgtcgccacagaattgtaccacagatattttttaatacttgtagaacccatttccacatcatgcttttattaagacttattaaattatctgtgagattgtaaattttaagtagacatgtgaaacaattgagaaaaagaactcgttaaattaataaatgaaagtactaaataggcatctgctttttgttaggacgtattgaagcttattcataaggtatcgttttagttaaaactacatagtatatattcttgtaagagaaaagggatgcgtatgaaagaatcaaattaatatatgttattttaaaaatattagcttccttttgtatacttttcaataatttcaataaatatttatact

SEQ ID NO: 9006 - DNA, 924 bp, Diabrotica virgifera
gagtaaacgacaaaatataatggtatgatatgtaagttgtcttagggccggtatttcaatagctacttaagcttttgcttagctaagcctgtgtcaaaagttaaggagaagcttaagctgggtgccgtatttccatcattctcttaactaaactgatgctcagctgtaaagttaattggtttggtacctctgaatacgtcaaagtgccagagctaactgttctgaggtaaaaaccactactgttgacatttaattttatcttgtcatctgtatcaatgttatttttacttcacttaattttgtgtacatggtacatgtgttgttagtttattgtctatattttctctggttatatttttattgttattttgcataagcaatagatccgtctttgtaattttgtttattggatatattccttaaaatgtcaaattggaatgtaagtttatttttgtaaaataaatatacctaccaagcattgtagaaataaacaattttcatgtgcctacaccttccaaaagtagtaagaattttaataatcgttattacgattaataaattaatagatagattattatttaataatccaataataacgttattacttaaaagttggctttcaaaacaactctataattaataatctatagaaataacctcaaaaaacagaaaacaaattttaagcaaaggcttaaaccaactcccgcgcgagcttaaaattatttggtttaagcctaggcttaagcctcaaattgaagtggaaatacaggcatctaagcttaagcaaaggcttaaagtaagctttggcttaagtgaggttggaaataccggccctaaggctacagttgggttttaatttaaatattttgtgtgcgctggagtgttccacaggttgttccgggctttgtggaagaaacacactgt

SEQ ID NO: 9007 - DNA, 922 bp, Diabrotica virgifera
  SmartBlast Evalue=7E-29; Info=Serine protease H1 n=1 Tax= Tribolium castaneum RepID=D6WBT1_TRICA
cgcaataatatgttgtggtcgccttcattttatctttacggtgattgtagaatatcaattataaaaaagttttgatttgtaatttcaaaatgtcgacgtacgctgtgttaagtgttttgttattgactagttttcttcttgtggaggttcaaggtgattttcgacgattaaaacgagacgatgatgtagataatagtatcctagagatttacagtaactgtaaatgtgtttattattaccagtgtgatgaaaataatacagtgattaccaatggagtaaatttaatcgaaatacgcatgactgaaaatgaggccaaacaagaaaacagtaatagaaaattatgcaaagggggaaagttcgaaggagagatggtctgctgcaaagttggccccactaacagcagtgctgagagcagaaatcccgtgatagaagatgataattccactccagccgcaatgcaccagtgtggagtccaaagaaccaaaattaacgtcagaataatgacggacgaggatagtgatgaagaggtcaatccactggatggagagttcccatggattacggctgtttacaagataaataaaaagggcagatgggtttttcattccagtggggcgctgatacatcccaaagttattttaacagctaatcactactttcataggaaaaatgcaaatgacttcaaaataatccttactggtgatgtggaactgagtaaagttggaaataatgtcgataacgaacgaaacgtcgtagaaatagtaaaccatccaaaatattatggaggtgccctttacaatgacggagctctattaatcctagatcgacctttcgaatctacaaaaacaaattcattaaataccctttgcttaccacctgacaatctcaacatgaattctggtagatgcctcgttgcaggatg

SEQ ID NO: 9008 - DNA, 920 bp, Diabrotica virgifera
gaaacgcttatgaatggtgcagaagcaataaattccataatgtttattattaagttaaaagaaatattgtaaatatttcaatgatctagctcaaattttataatgtttatacacattttgaagttattctattttagatatagcagtttcgaatgtagagttgagtccatggatatttacccgtgcgtcatcatttacagcatacgaaataagtcggaaatttacttaacgcaacagcaagtgacagaaagtggctactgctccgatgacggatattataaaatttgacattatcaaataaatagaatgtaaaatgttagttttgctttaaaattttggtgcagaattaacactacatttgaagtagcttaataaattattttaatatcattactgattaataaatacttaaataacaatttttaaaaaatttaatgaaatatatatttttgttatttctttcacttttgcggaaacttaaataaaaccattccttaactgtgtgaatgaggttaactttgtatgtaaattaatggcaaaataaaatacacttaccataaaatttcaaactccaatataaaattagttgtgaaagcaactgtttgtgtaatataaataacttctaaatgcaaaagcaggacaaaaataaaacaaaaaaaaatccaacaaactgacatccacaagttaacaaaccaggaacgtcacaaattgcacttaaaatcggaaaacgtccccaagcgtcttttgtgtatctatattttttcggtgtaatgagtctagagcgctcataaaaataacatttgtctttacttaataacaggcggtagcgggcttgtctctagtttcatgcgtggaagacaatgatggtagatacaaagtatgtgttttatctctccacttattaatgatgcacggtaaag

SEQ ID NO: 9009 - DNA, 920 bp, Diabrotica virgifera
tcatggcatagatactttgaaggaacacctattcgactcaacaacatgctcacgttagttatttacgtcactgaagcattctcaaatttagtttttgtaatatactacagctgcatccctttgaatcggatctatgtaactattaaacacacattttaacaattttagtaaaatacagttgattaataaattgtaagtgtttgtatttttgcgaaatagttattgtattcgtacgataataatatattttataatattttaactgtaatgtaatccggctcgagggaccaaagatcacgacgacatactcgtcgaccacctcaggataataaaaaatagatgttatttttttttcaaaactggtgatgactgacaacaattcaaaaactgattgaccaagctagaagcgttatctactctgaatccttattcctgaatcctaaaatattgtcgaaataatcaatcagtcccgccgttattttgttacgggatcttttttggcatatttgatcatcgccgaccattttaaagaggtacagagccactgtcgtgagaaattttgccaataatttggtacacacgtcaactattcccaagttattagttagagttgtcgaaacgcaagttttcggaattctaagactgccatctagttcgcacaggttaaaacgacgattttctttctgaagccacatttaatccatattacatttcgctgtcattttcaaagaatgcaaacaaaagcaatggaccggacatgtgataagaatggaagaggataggctatcaaaaagagcactgaatgctaagcactgagcaggcaaagaaaccggatggaaagccaagaaagcgctggaaagacacagtaaacagcgacgcacaagcccttttaggagtccgtgtatagagaagagcagcca

SEQ ID NO: 9010 - DNA, 923 bp, Diabrotica virgifera
  SmartBlast Evalue=7E-98; Info="CRSP complex subunit, putative n= 1 Tax=Pediculus humanus corporis RepID=E0VE60_PEDHC"
tcgttcgttactaactaatggcgtacaaagatgaaacgataaattattgtggtcccatcattcccattggcatgttgaccgcataaccaccttgaccaccttgtccggacatttgcatagccggcgactggatctgttgtactccaccagtgacagggcttggaacttgtggctcggaagggagagttagattaattaagagctctctgatagcggggaatatcgagcattcgttgatgttagattggaattgcgaatagtgcttgagtaactggctgacggccgtcattgttggattggcgcctggttcgcgcttttctgcaagacttgtcacgttgctgccgatgtcatagatgagaggaagtacgatggacggaggttccatacttaactggtactgaatgccgattcgggtaatttggagaaagaaaagcaccttggacctgaacaccaacactccagtcattcccagcggaaccaaattgggagcactcggtggtactctaagcacccattgaacggcccacttcatctgctgttgctgtaccaagcccggcaccagttccagcttcatgatctgtatgaaatctttgagtacattgaggggcagattcagtatgctgcagaaggtgaacatggaggttggtttgtatggaggagcagctgctcgggtgtcaaagaatttttcgagaacttgaagttcttcctgaagccacatatctttatgttcgggaagaggagtaatttttagatgtaagctctgcaaatgttgcgtgttcaacactatccggcattgcatagtttctgctactttgaaatgaattactcctggttccgtattttgtattgcagttagaaagttttccgtatgaatataacgatgcaactgcctgcgcatatacacgcaccccaagaatctctcc

SEQ ID NO: 9011 - DNA, 915 bp, Diabrotica virgifera
agtttgaaaattaaagattctaaacagatcaaaatgaccaactgaagcaggaaaaacactagtttattaactactctaaagtaagtatccactatgttcgcgctcctttgtgctccgcgctcctgcaactgctctacatagtacaacagtgtgcgctccggctcggcgcttcaatcggtggcggtttatagtagaggtgatgcagggagcgcgggcgcaagaggttcgcgaacatagtggatacgcgcctttaggttctatatatggtcgaactgcaccgatctgtttaatggacaaaaattatttgatatgtaattttttagtatgttaacaattacaaaaacagggggtgctcgatataattttgttctgactataattaattaacaataaaattaaaaaatgacttgttttattaattaaaaaaattcggctcggacaggtattatttcagattctttagatcatttgaagcaaaaaaggtcctttgtattttttctctcaagttgaccgtgatcgagttataaacaatttaaaattgagaaaacaacgaaagatgacgattttcgaggctcacaaacataagtaaaaatatcatctttgaaattacgaagtacctaagttcaagttcaaacattattctattgattctatcttgatcagtattttggactcatttcattttaatatattattttttagttgttaataccgtcttcccatccggccctgatcggccgtcttcccataaggaagcttcctcattaaaaagtaaaaaaaatatattttaaaatattatatggcaaaagctgttatcgggacctgatagaagaaggtttaaacttgaatttaagtacttgatgattacaaaaataatattttttacttttgtttttgagtccttgaaaatcgtca

SEQ ID NO: 9012 - DNA, 924 bp, Diabrotica virgifera
tattgcaaaaatgctgcgattcgcttttttcttgtgtgctcttatggtattctgcaatgctatgccagcccatgatatgccagaagaagaaatagaaaagatgaagaagtttcacgaggaatgtaaagcacagacaggcgtcgatatggaggaagtaaaaaaatcattaaaagaaggtacacccactgatgccatcaaagaacacacattgtgctttatacaaaaaactggtttggtaggagatgataacaaaatcgatatcgacctggcaaaatcgcattttgaatcagtgtttcctgaattagcagataccattatggcagactgcatatcagacgaggaaattacgaaagactctgcttacaatatggcaaaatgtgtagttggcaaaataggtcattagataaaattggaatttataattacgtaatggagaaaacaaattatatattttttgttagtttactaagctaaattttgatactggatataattctaaaattgtctttacaatttaattagcatcatttcattacttaatcatgcttgggaaattgtaaatgtatcattcgaaactttcaaatttatttaaaaatagttgaagttttattgttactatctagaaagataaattaatattatcatctaatgaacattaaatatttcatatttgttaatacaaaatttgctgaacgcaattgttactatccagtttcagaactgtagggaaaatgtagagtagaggaaaatttatattggttgtaataaaattttgttataaatatttaattttaatttaatttaactagtccagaaataaagaaaggaaaatcagtcgggccagatgatatcactggcgaagtatggagagcattaggacggacagaaacaagttagctaacatgtttatataatagaattata

SEQ ID NO: 9013 - DNA, 923 bp, Diabrotica virgifera
  SmartBlast Evalue=1E-23; Info=Nogo-B receptor n=1 Tax= Camponotus floridanus RepID=E2A8V9_9HYME
aattttcttaataataaagataaccaaaacaaaaacagttttttataaaacaattattttcccaccctctgttcacatttgctgtacttttccaatttttccacaaacactgggaatgtgatgttgttgactttgttgactttaaagaattctgtgagtcttaactgccaaggaggataattataaatgttcagtttctttccacaaataatagccatttctggatctggaaattcatactgccttaatagtaattcactaattttttctttactaatgtctttttctttatttagagctaattttttagtaacatttactatactttgctttccgtccgcgtgtgttaacacttttacgtggatttttggacccaaaaatccatttttatgcctttgttctgcatgggtgtgccaaattatgttgatattctctgattttctggattctacaatttgttgcaacttctcttcatgcttttttaaattacctttataatcatagaaactaacgtacggaatattaagacctaaacaccaatatacgaggttagccaaatctaccaatgaatattcttccacaccaataatgatagttaaatgttgaggcttttttgttagtctagacagtcttttctttaactggtcagcatcatcgaatgtagattcagggtttataacccttatacaattttgataaataaataaaagagtcctccaaatattttcaaaaattgtatataaactgtgtaataaaatgtaaagtactttataaccatcaatgaccggcattttgatgctattttgactgactaacacgttcacattttacgaaaaaaatctgtttttgttggaagttgcattagcacctgatgaaactcatgattctcattactccacacctcaccgtgaactcactgacag

SEQ ID NO: 9014 - DNA, 919 bp, Diabrotica virgifera
tgtctacagagtgtagaacgtaacaatcttcatattttaagtaacacatttattgcttttgtcagtgcagtttggtttgtcagtatattagacaattgtttgtcagcacattggacaattatgtcaaaacaaaccttttgttgggctttttaaacttgttttcgctgatgttggattatggataatttccaacgtctgtaacgatgactcaaaagatagagtatacttattcttcttgaaatttcctgggataagagtgtaagatagtaattccagtgatatgtcgagatttttgcccatctagtttcatgtaaaccaaaaatgtcacagttttatacgaaatcaatgtatttatattattttagatcaatttattatttgttagggtaggtagtaacacaagtatttcaaaggagctggtgatcttatatgttataattatgtaggaatatggtatacatatttgttacagttcgttatattttggtgcgccaatcaagcagatggtgtaacagagatcagaaatgtgagttgacaagtactttacaaagaagtaggaaacaatgtgagggaatgatttcctaattcattaacgtgttaaataaactttcagttttagacatttaatctccatattgtctagtttaaaacataaattctgtcactgctacattatctgaaccatacatgggattttgaagcttatgtagaaattttttatatcaagatatggcgaatatttagtaatttaatatttaatacacttacaattcttttaagccatgtaaaaaccatatttaaacaatttttaaataacaaagtaccaaaagtcatttcactgaatatttttatgaccaaagtggtgtttttaattccctgatcattaaataaatgtttgttcaaagattaataagtgtta

SEQ ID NO: 9015 - DNA, 924 bp, Diabrotica virgifera
gacatacaaagatggctagaccactcaaagtgaatattgaccaatgacgtccatgatattcgcgttacacctcaatgcacagagcggtccataccttgcctaatctatttagtattatatctatagctgttcttcatccatcttcggatgtagcctcccttaggtgtgtccattcatatctgtatgctgttttttgcatccattcgtggccagccattcgcttgatgtcaccagttcatctggtttgaggtctgtcagtaacatttatttctctttaattatgcaaaaagttattaatttaacttctacttttgtagtagaaaatatattttcaaaaacaatcaaaatattttggcctgtttttctgggctctatgaattttattgagatcggtttattattcggcaatggaccgtgatagttgtgacgtcaaatcaatgttggctactctggaaagatttccaaaaacaacaaacatctgtcaaaaattcacacgtggtgtttgccaatttttattttcgtttttataattggaatatatatggtttgtaggtaatttaatttttacaaattggtaatgtgtttggcacccgattgtaagcaatgcttatagaggagaacttgcaagttttttaagtttcggaaacatatcgacgtgcaaaaacaatgattatcatttgacattgtaagtactaaaatagctaaaaagataaatacttttaatgtactaaatactttataggtgttttcggtttcttactctcacatcaatttttttattttttatccttcatactaggaaaacctttcgcgctattgctttaaactcctcatcaaaagagaaactatgcacatggctagattctaaagcattttctacatgtttacctaagtgtttttgatgcatctttaaaacataatatg

SEQ ID NO: 9016 - DNA, 925 bp, Diabrotica virgifera
  SmartBlast Evalue=5E-61; Info=Calpain B n=1 Tax=Gecarcinus lateralis RepID=Q5IW12_GECLA
ggttatgcaatttagttaaaggttaaggataataattagtggaaaaaatgagttgcggttttgattcacaaagaatttatatgctaggtgaaaaatattcaggtctaaaagctagaggtgctctccaaaattatgaagaaattagaaagaaatatctgctgaacaatgcattattcgaagactcacaatttcaagtagaaaaagtagaactcggacaagagtgggacaatcataagaacaacattaagtggctccgaccccaggaaatggtttccgatccagtttttctagaagctcatgaagacaggttcgatattaaacaaggaactttgggcgattgctggtttttagcagctttggcaaacataacagacaataataaaataatgcagcgtattataccagacaatcaaagcttttctcaagattatgcaggagtatttcatttcaggttttggcaatatggtagatggatagacgtggttattgacgacaaattacctactatagatggtaaacttatctttactaagaccaaatttagcaacgtatttggacacctttattggaaaagcatatgcaaaactgtatggatcttataaaaatattgaggggggctttatttctgaagctctggaagatttcaccggtggactaaatgaaagataccttgatttagcaaacatttcaaaacatgaggaccttttcaaaatgatgctaatttcatttatgagaaaatcgtacatgggctgtggtatcctggattctggtgaagttgaaggagaaagaaaagatggactttattcaagtcatgcttacagtataaacaatgtagtggaggttacctcaaaagctgaaaaagtctataagttgcttaggcttaggaatccatggggcacgggtgagtggacaggcgactggagtg

SEQ ID NO: 9017 - DNA, 924 bp, Diabrotica virgifera
gttttggtaatatttggtattttgacaacggcgcccgatttgggcgtcgaaacgttgatgaaattgttttttcattttgattgtggcttgtttcccatataaatgattaatcattgtaagatgatattccatcatacatttacttctaaacaaaacttttacagttatctttcgcttctttctttcgattttactctccaacgcgataactgttcacagtgattacctcaatactcatttataaagatagtgccaaagggcctggatatttcccaattttatgttaaaaaatctttagaaatcctaaacaggacgaacagatattttaatttaaatatttaaactctttattaaaaacaatttttctcttgctgaagtttctgcattaatttgtggaaacttatgctttttgaaagaaaatatgcttgcttgacatgacaataaactgcacgtttgttttgtagaattaattatcttgtaaaatcattctgtttatggcaggatcacatgattactgtagttctgagttctattggtattaaaacttactatctattaatcttcgaagacctttagctgtatttaactagattattgattatatgtccgcatacacatagccatcttctatttcttcgagtgcttccctgaataattgattagtagtggcgacagagtagaacgttgaagcactccaattttttacggaaatctctctatatagagatggatattattctgttatactggattattaatccagtattttggtcatcaggctcattctataagtttttaatgcttgactgtatcgaatatctttatgaagtcaatgcaaatgtgtctcacgtcctttggatcaaaacctgaataccaacagtgcgtcttgcgtgccaagacgtttttataactaagttttgtttc

SEQ ID NO: 9018 - DNA, 922 bp, Diabrotica virgifera
  SmartBlast Evalue=6E-14; Info=High affinity copper transporter n=1 Tax=Culex quinquefasciatus RepID=B0WF61_CULQU
aattgctttatcagtttcctatatgtacattatttacattataataatatattacattttatatataaatataatctcagtggcattgggcacgaacttgaactgcttcaggtgcaggtgcattactgttgtgtgcacattcaaggctgttgtgggacgaagatggagttttagctgctggtgttgactctccctcaatctggttcaaggtatctgaaggctctccgcaaatttggccgcaataagcacttcgcattatatgacagttctgtaagttaagtttcataaacatttgtccaaaaacgaaataacctaatgctcctcctataactgccgagaccagaaaccatgcgttatataccattacagctaacatgataaaatatcctatattttgaagcagcaaccacagagatatctccataccgaacagaagagctctgtcaaagagggttatgtttaaggggttctgcggattagctacgctctgggtaattagtgctgaacactcagtagtacagattagcttcaactgtttcaccctcagtatgagctccttctgtttttgcttggtttggatataccttagaaactcgaacagaaaagccatacttccaacaaataaacattgtcctattagtcccccaacggaatgagatgcgaatcctttaaatagcaggtgatctactttgaccccccaataaaaatattctaacataattaaacagctttgaacaacttttaacaaatttagaggatatgtttactccaagaagcaattcgtgaaatatgttaataatttttaagttaatgtaataataattgacagattaagttgataacagctgatagttgaaaaataaacaaaaacacttcaagaataaagtgaccatagtggaccttataaataaatgggacagtg

SEQ ID NO: 9019 - DNA, 909 bp, Diabrotica virgifera
tgctgagattcctcaagaaaacactatcatattgttgtttccttgaggaatctcagcattgatcacatatttatttagcaataaagcacaaagatcaaccaccatagtttattttatattttatgcttaataacaaagagatatttgctaaaactgattatttataaggcaacaagttaaactactgtgaaacaaagtaaaaatagcatataagagtattaacaatgttacaaaatatttttaatactattcagaagctatttttgtaggcacttcacctttaaattgctttttgagttttgaaaatgaataaataagactagaaataggaaactgaaatagccttaacttgtgatgtgtattttgtagttgaagattgttgtactttaaccatagagaaataaaaataagaaagtggtcaaaagatagggcaaattgatcacatttgtttctgcgcagttaaactaaaatttttaccatagaaagaatttattgtaccgtgaaaagttacattgttgacattgactttttaggttgtgtttttatgcttcaatttgttgctctactgaattgtttcatttaaatatattgacttggtggaattgaatattggtaggtggaaatacaattttaatattatataatagtctagaaatattgattttttaaataacattcatatgccgtgtacaacaaagcgaaattgctttcattttaggagataacttctcaaacactgaaatgattaattactgcattctactaaaattaattccatgttttcgagtgatttatattattttgtttcaggcacctactagtactgttaactgttaagctgataatacagtacaaattggaattacacaactgataatagactaatagatgtagtgtacatagtgtata

SEQ ID NO: 9020 - DNA, 919 bp, Diabrotica virgifera
  SmartBlast Evalue=1E-132; Info=Probable cleavage and polyadenylation specificity factor subunit 2 n=2 Tax=Aculeata RepID=E1ZX64_9HYME
ccattgaaaggtaaaggttatggtttaacaattacacccttaccagctggtcatatgattggaggtacaatatggaaaataatgaaaatggaagaagatataatatattgtaatgatttcaatcataagaaagagcgacatttaaatggttgtgagctcgatagactgcaaaaaccttccttacttattactgatgcgtttaatgctacttatcaacaagccagaagaagggctagagatgaaaaactaatgaccaatattcttcaaactcttcggaacaatggtaacgtacttatagcagtagacacggcaggcagggttctggagttggctcacatgttggatcagctatggcgtaacaaagaatctggcctattggcctactctttagcgtttttaaacaacgtcagttataacgttatagaatttgccaaatcccagatagaatggatgagtgataagttaatgagaagttttgaaggcgccagaaataatccctttcaatttaaacacttgcagtggtgtcacagtttagcagaattaagtaaagttcctagtccaaaggttgttcttgcaagttcacccgatttggaaagtgggttctccagagagttgttcctgcagtggtgttctaattccaataacagtattatattaacaacaagaacatcccctggtactttagctagagacttaattgacaacggagcagaaagaaatatagatttaacggtagaaaggcgagtaaaactcgaaggcgtagagcttgaagaatatgaaaaacgacaacgagcgcgaggtcaaaatgtagaaaaggaagatgcagattcggactctgattctgacatagaaatgtctgttatcaccaaaggtagacatgacatagttattaaacaagagggaaaaataaatgccggtt

SEQ ID NO: 9021 - DNA, 919 bp, Diabrotica virgifera
  SmartBlast Evalue=1E-15; Info=Endonuclease-reverse transcriptase n=1 Tax=Bombyx mori RepID=D5LB38_BOMMO
ggatgaggtatctactacataatatttgtttcatattattcattgcacttctagcctttactattctaactctgatttctttggtataatcgtttgtttcattaatgtttgtccctaaataattaaaattctgaactcgttctatcgccttactatttacgtttagattgatgtttctaatatttttctttgatataatcgtggtgaattttgttttctttatgtttactgacagaccaaattcttcactcgctgcaacaaccttgtctaaaattcttttctgctattagtattgtatcatcagcatattatatctaatttcacatatgggtaggctatttatttttatgcctgctacttcatcttctaatgcttttttgaatatttcctctgagtatgcattaaacagtgatgtgtacaaggcacctgtcggtaacgccgtattttgatctttattttataagtttttaaattatttattatgacagcttcttgttcataatacagattaatattcttatatcccgtgtgtcgatattctttgttcttagtagttttattaacgcattgtgtttcaccgtatcgaatgcctacaactgttatttacggttaatatagatattgtttagatatgtacagatatctgagtacaaaaagattcgtgacgcaatactagaaaagtatacttgaaaattttaacctaagtttttagtcacgtcgttagattttatctaacaaaagtcaatgttactcatatttagttatgctttccggtacgcttggacatgcgcattactacactcttcctcgaggcacttacgagtggaaagctatgttgtcaaatttttcaagttatcacggaaaagaataaaattttagatttttttcaacagcgcgaccgattcgctttccacaaaaa

SEQ ID NO: 9022 - DNA, 912 bp, Diabrotica virgifera
tctttattaacaaaattgcctgattacaaaattaaactaaaacataagtaacattataataatacaatgaaaagatgttaatacattttaaaaattaaaccgaaaatataaaatagattgtttcaagaaacttgtgtggctactctcaaatatggcacaacgtttatcttagaactatgaattaaagaaacgattaaattattgaattataaaattgggagtaaaaagaagaaatcaatcctttagatagcaatgcttgcaaatctttccgtttgtttgtactcaatttttgtttttgtttataggcgggtttgagtgctatttccgttattgatcctattttttttcgtttgttccttacatctacctgtttataagtctcatccttgtatgatgtcttataaaaaaatatgtaggattatctttgttcacttgtattgctttgatttcgtttcagttaacattttctccctcagtattaatcgtaaagttataccccaattcttcttgcaaaccttttaaatcataaaatgattggtaattcatctcgtgcacaattagaggtgggtttgatgttctagcattccttgttaaagttacatattggtctggagtgtaaatagatccagatttcaagctctttttaacttctttctcagtaagactgtgcacactatcggcttcgttctgactctggccccttattaaaaatgtatgtgtaattctcttaatttttaacgtgtacacagcgaataaatacagcgacgttatatacttattcgtgttttggaccacagcaattgtctgaatagaatatgacttctttttcaccatcgccctcttcacttatattttttaaataggcccatatgcaagaaccgatttctatggagcctcgttttgcatcacatt

SEQ ID NO: 9023 - DNA, 920 bp, Diabrotica virgifera
ctatttctattcatttaatagttgtcgctgtaaaactgccctaaaaataattataaaacaaaattcttcctatgtttagcattgatccccaagaattgaggttctcatctgacgtcatgcgacagcggatgcatgcgcaagagcatacctagttccgtataattatagttggcccaagtgtatgcttttttatttctattcatttaggtgtgtcgtattactcgtatttatacaaaaaatatcattatagcgggcattagtcgaacatataaaaaaaatgaagaacatggggactcttataacaatgtgaacgcatttcggcattgagataattaaattttatatcaaattagtcgaattcgtccaatattgactggagattcgtccttcctagaactgtacgttatagagaaataatgtttgaagaaagggctggttaactcgggcggtaggatgtctgacttcaacgcagaagtccggggatcgaatcccagcactggcgaggagatgtatacatttttaaaaatatctataggccctaggtcgactcaatctgaataaaatgagtaccttcggtaaaaccaggggtaataataggcggtttaagcgtagccccagagatagcagactaccctactataatcccaaatataaaagggaggctattattattatgtttaaagcaaatgcattatttgagggtaggtgcaggttcttttgtgttaagtagttataagggagaatagcgacacaccttcacttgacgaagtcacgcaacataagcgtggccttaataatcatgacactttgcatttagaaatatgaaacaatataaacaatagtcctacatctttgtgtgatgctcaatcttgttattaacgcattgtctaggaaaacttaagtcgatgtattgaatctga

SEQ ID NO: 9024 - DNA, 921 bp, Diabrotica virgifera
  SmartBlast Evalue=5E-41; Info=Glypican n=1 Tax=Culex quinquefasciatus RepID=B0WIX1_CULQU
gttggatttcatttcaggcattcattcctctttcagtcgtgtttctgctttctcaaggaacaggatcggagtttagtcattgagttgccggtcgccgaagtcaataaaagccgtgttttagtgccttagaaatggatatttaaattgtagagaatgaaaaaggctttatattgaattaaattagtttgtcatggctgtgataagttggactggaataaatttcctcgcaaaaatgtatcagaagcagggtttcgcgttaattttgtttttcgtgctatgtagggttgcaacttcacacgactcaaggagttgtgaatcggcgagaaaagcgatagaggacaaattgaaagtacagtcaataaaaattcctgatgtgccacaaacaggggacctatgtggccaatcctgttgtacaaaagaagtagaaagagatgcgtacaaatttaatcaattgtttgtagataaatatattaaaaattctgtttcaaagatatcttcaattatagaaacgagagctagaaaatttgatgaccaatttcaaggaatgatgaaaacatcgaaaaaagaatttcacgacatgttcgaacgcacgtacggtaaaatctacctcaaaaattccgatgtcttcagtgacttcttcgacgaattagaaacatattacaaaaaaggctcagtcaggctctcggagaccatggatacatttttcggcatcctttaccagagaatgtttactgttatcaatgctcaatacactttcgatgaaggttacctcgactgcgtctctagccacatgcaggaaatgaagcctttcggagatgtcccccataaacttggagtgcaactcaggcgttcgtttgtggccaccaggacatttttaaatcattgatgaaggctgcggaagctgccgatagactcggggag

SEQ ID NO: 9025 - DNA, 918 bp, Diabrotica virgifera
  SmartBlast Evalue=1E-130; Info=FACT complex subunit spt16 n=2 Tax=Aculeata RepID=E2BWZ8_9HYME
cagattatggagattattgattcggaaaagaaagtcaagcatagcaaactagcagaaggagttgaatctgccataagtgataaaaaatatgtctcaggggttgatgttaatcaagttgatatgtgctaccctgccattatacagtctggaggcacttacaatttaaaattcagtgttattagtgataaaaattcactacattttggagccattgtttgttctctaggcgctcgctataagtcatactgttccaacatcgtccgaaccttgttagtaaaccccacagaggaaatccaaaacaactataattttcttttaacaattgaagaggagttaataaaagtgcttcagaatggagtaaaattgtcggaagtttatgacactggttacaatatggttaaaaaggaaaagccaaatttagctgaccatttgaccaaaaattttggattcgcaatggggatagaattcaaagaaaattccctgattattggaccaaaaactacagttgaagccaaaaaggggatggtgttcaatttaaatataggtttttctaatttggaaaataaggaagcttctgacaaggagggaaaaatatatgctttattcattggagatactgttttggttaatgaaggtcagccagcaagtgtcttaacaccatccaagaagaagattaagaacatcggtattttccttaaagatgattctgacgcagaagaaaatgatgaggaaaaagaaaacactccgaaaaagaccgaaattttgggaaggggtaaaagaactgctgttattgaatcaaaactgcgtactgaacacagcaccgaagaaaaaagaaaagagcaccagaaagaattggcagctcaactaaatgaaaaagcaaaagagcgtttggcaaaacaatctggatctaaagataaa

SEQ ID NO: 9026 - DNA, 920 bp, Diabrotica virgifera
  SmartBlast Evalue=6E-62; Info=Vacuolar protein sorting- associated protein 13B n=1 Tax=Harpegnathos saltator RepID= E2BJX3_9HYME
tagatgtttctcctgctgaagtcatactcagaaaggtcataacaataaatgacttgactttatgtctggataagaggaatgcgtctggcaaaattgaagtttaccaagaacccatgctatataagtgctcaatgacaatgcatttgctcaaaaaatatcattccgcaactgctagcattgcttctactactcgtcttgatatatactgcaatagcatggaatttagtatgacagaacaacaggtgccaatgtttatgcggctattgttgttattatatgccctacaacagaaacaactaaagcctgaaagagatagtactacagacgcttcagtctcttctcaagatggcagagatatacaagacagttctttgggttggaccggttgggcatggtcgtatgtttcttctgttttgccagccccgtgggatgaagattgggacgagaaatatcttcaggatcataaaggccacactttacatttcggaatttttgttgataatctttctattacttttaaggtttcagagacaacttcagaacgtacaagctattacaaccataaaaaattacgttacactccaatgttaagtctccaattgcaaggaatgtattgcgaaactgtaatacatggtttaaaatggttcaacgccatgggaggagttagtcaagcaatacttttaccaatgggaccatgcagttgttcactgattgaaattccagacgaagcaagtcaaatcaactatttaaaaatagggtctgaaactaacacacacaaaagtgattcattatttgatgttgaggctgtagaaaataaaggaaaaagaggcaatataacacctcgtgggattatcatatgtcgatgtatacagaatcagttctattagaacgtactccgcgtttgccttcgattacttata

SEQ ID NO: 9027 - DNA, 920 bp, Diabrotica virgifera
  SmartBlast Evalue=1E-122; Info=10-formyltetrahydrofolate dehydrogenase n=1 Tax=Culex quinquefasciatus RepID=B0WX46_CULQU
gccgatcaccctcacgtcagaaaattgggattcacgggaagcacagaaataggacaagtcataatgaaaagttgcgcagaatcaaatttgaaaaaagtatcactagaacttggaggcaagtctccattagttatattttcagactgtgatcttgacaaggcagtaagactgggaatgcaaagtgtctttttcaataaaggagagaactgcatagcagccggccgcatctttgtagaagacagtatccatgacgagtttataagacgagtagtccaagaaactaggaaaatacagataggtgatccactgaatagatccacgtcacatggaccacaaaaccacttagcacatatgaagaaattattagaatatgtagaaataggtgttaaagaaggagcaaaactcgaatacggtggaaagagagttaataggaaaggatatttctttgaaccgaccgttttaagtcacgttgaagatcatatgttcatagctaaagaagaatcatttggacctataatggttgtaagcagattcagcaatggtgatatggatggtgtcttgaaaagagccaatacgacggagtatggtctagcttcaggtgtattcaccaaagatatatccaaagctttaaggttcgctgagaaaattgaggccggaacagtcttcgtaaatacgtataacaaaacagatgtagcagcaccttttggaggattcaagcagtccggatttggtaaagatttaggaagagaagcattgaacgaatatctgaaaacaaaatgtgttaccatcgaatattaagataaaatttcctgtatcaacctacttaatatatattattttttatatgtattatataaaactttttatactttgtattataaaaataatttataagttatttaaggaataaaattgtgata

SEQ ID NO: 9028 - DNA, 920 bp, Diabrotica virgifera
  SmartBlast Evalue=2E-28; Info=CG3408 n=5 Tax=melanogaster subgroup RepID=Q9VT05_DROME
aaattttgcaaatattcctttgatgataaccaccaaataggagcatcatcataaagtttatgtaaatctttaataaaaacatccctagctgaatctaaaacatttttagaaccatatactttatagaatataaaacctacataaagtaccaacatgagaagtgcccagcccaatatgctagataaaattgagccaaaaatagaatcttcctctttgactttcttgcttttccccttgctgcttactttttgattctgcttagtaggttcaacaactttcacattggatttcttttctttttgtttctctttcttcttactattcttctcttcctgtttctttttttgattgaactctagttgtttctgccgatctttgtttctcatttccagatcagctgatacttggttctctaatttgttgaaaaaggctacaatattctttgcacagttctggcattcttttgtattaatacacaaacctgccaccttagcaacagcaggaactaaaggattatcttttaaatcaagccatttaagatttttaagcttgctaaaacttaatggcagatgctgcaattgatttctgtataaatctaaatgtctcaattttgttaaattaccaaaatcttctggtaactctttaagatcgtttttactcaaatccaatgttgttaaatgtgttaatgaagtaaaatttttaggtaacacagttaaagtattgttagataagtctaaactgtgaactggttttaagctcaaaatttcttttaccggaacttcacttaaatcggacatgctaagatccacttcaccatcattatatctttcttttacgtttacttttggtgccattttcacagaactttttgaagaatatgtttgaaatagtgagacacgtatgcaggttaaactaaatag

SEQ ID NO: 9029 - DNA, 919 bp, Diabrotica virgifera
  SmartBlast Evalue=1E-115; Info="Contactin-associated protein 1, putative n=1 Tax=Pediculus humanus corporis RepID=E0VKA9_PEDHC"
acccaccaagagaaaggaatgaactcattttcctgtgatggtgaattcattaaacgtgcacccttgcatgcgtattgtatgtgttgcctacacgtactgcttctgttgatcaacgcagctatctggtcgtcgtcagcttcgtaatgaatatcttgtatgaaacttccaggttcctggaatccatccacggaagtagtttcttggttactgtgatgtaatacagttcctacacggccatcagcatagaactcgcacgttaccgggaaaggagctagaggtccgctaccgtcgacgtcaatcttaatttccgcacgttggcccaccgcctgcacatttttgtaagccacacaagaaagcgaattaatggaactgtggcacactgctcctccataaccagtacccttacaacgacagaaaaattccattgaattttgtttacaaacacctccatgttgacaaggatttggattgcatctatctgtcatacgacaggagtcgaacactacttcttcgccacaacaatattcttcctgagtccaatctgtaggcaatttactgttaccatcaatccttatagtccgcatgcatccaacaaatcctgggaagatagtattggtatatcctaaagcagcactaactccacctgcaatgaaatagatgcctcccgtcacaatcttcaacacacgcgttgtcaccattggcctataatcgacactgaagataatcttgttggttgatatcgttagtacaactgtatgccatcttccgtcattgaattgctcttcgtagttgtcaaagatcacttttggattgttgggagacacaagctccacttttagtttgccaacttctaagtagatagcaacataaccgctagttgaaaatgcgtgataaagcataagtccgttatcttcgtaag

SEQ ID NO: 9030 - DNA, 917 bp, Diabrotica virgifera
  SmartBlast Evalue=1E-51; Info=Acyl-CoA oxidase n=1 Tax=Aedes aegypti RepID=Q17PF0_AEDAE
catcatagacccgtgtgtaacctatgagggagacaacaatgtactagtgcaacaaaccagcaattggttgttgagacaatggcaggcgattctctccggtgatagattgtctacgcctctagaaagttgcaaatttttccttgatcataagagaattatgagtacaaaatgtattgctaggagtatatctgaagtacaaaccaaagaatttgtaatgacttcctatcaatggcttatcatatacctagttaatgaaactcacaaaaaacaagaggaagttcttcgtagaggtctggacagattcacagcacgtaacgaatcgcaagtttacagagcggccttgctgtctaaagcttacggcgaatatacagctctcagctatttttgggaaaaagtttccaaggctgacaagactttgcaggctgtgttacataaccttggacttttatatggtttatcatgtttagacaaaaacctagtgtacttttatcaaggcgaatatactagaggacctgaattttctcagaacatcaaagaggcaatattagatctatgcaagcacttaaaacctgacgctttgactgttattgatggacttgctccaccagattatgtagtgcattctgttttagccacatctgatggaaaattataccaaaatctccaaaaactattaatgggtaatccacaatcactatccagaccatcttggtggcaagaaattgcttacgagcattctaatttatcgcaattccctagcaaattgtaaatatcaaatcgtgaataaagatgtcttcgttattgctgcacattgaaaccttatatttacaaaagcatttatttcatagatcgaaatatatacatatttttgtaattatattttgtattatgtacatgagaaaatattaataaaatag

SEQ ID NO: 9031 - DNA, 913 bp, Diabrotica virgifera
gctgagcgggaaaagaactaatctcaggggatgagttttgcttggagagtcttaggactttgcacctccttaaaccgtcctgagaccgctgggtactcccaacaatgattggggaatgtgtaatctttgattgcacccttctcgtggtggccctattgaaactaaatttagcggatatagactacataaatagtcgataaacaatccctgcggtaatatgcagatgataaggttatacctggagaataggatagtaatatcaactctaagttaaaacaaccattaaagcaagagtaggtggaggctgtccacaaggaggagttctgtcacctcttttgtctaggatacactgacgatatatcaatcgtcatcagggccagctggtgtctgggagaatgtaagcagccccaagtataccggttctgggaggaacagagatttcatttgccaaaaaaacaaaataccttggggtttatactgatcataggctgaaatggaatactcacatcctgaaaaccacacagggagccacaccactatgtccttgggcaaatgtagaagaatgtgcggtgagaattggggcttattggaccttttaaaaagggccagactaaagaatgtaatctagaattagaggaccacaatagatctgaaaaggtagcagtggaataggctaaacggccacctctttaaatccatctaaatctatctacttaattttgtttttgtaattttaatacttttttaaaactttagtttttttgttatttattaataaaccatcttttatttgacgcggtttatttaaagttttctgcatgtcaagaaaccttttaaatttttgcagtgaaaaaactattacgttttttagtccagtacctacataatatattgtattattttattggtataa

SEQ ID NO: 9032 - DNA, 918 bp, Diabrotica virgifera
cccgatgatggggttgattaagttgaaaacactatttaccagatatatttatttggaacactaaatacgccaataactagttggtgaacaaagtctatgatctaacaccgtcgatgtctgaataatgaatcaatccctcttttaatttctccgtatctataaataaatcgtaattgttttgttatggttgactacacccgaatgtgaccgtgaattactaataatattagaatcgctgacttcggagttttcaaaacgagtggcctacattgcaacatcaatgtcacccatttacgtaatgtaaacaatgcatgtagacaatgtttgtttaagacttttaaaaattaaatcgatatggagtactcttattttttgatgctaatataaatcctgtacatgttgaacagattggggcttattatgtctctgatagttctccatgagcccaaacttttgctgagatttctatgtagaggtttactagcaatgtcactaggtgttttgggagcactcacgtcctttaggtattttcacattttgtcctaactcgcacagtcgaatgccttactgtaattaatgttctacatgtgcttatatattgaattcctttgctttttcgatgatctgtgttaggttcataatatgctctatgatgctcctttctgccgtaaatcctgcttgttctgacacattcagatatccagatattctattacctgtttgtttgtctctctggttaatatgattgctcattttaagtacataattcagttcttattctgtagtaataagacccggtaatagggacacttttttctttcttttgtcctaagttcttggtcagtaagccagattttggcttatgcttgctttatatgtgtgttttatcatgtgtgttcagatattattcatacagct

SEQ ID NO: 9033 - DNA, 917 bp, Diabrotica virgifera
  SmartBlast Evalue=3E-12; Info=E1a binding protein P400 n=1 Tax= Aedes aegypti RepID=Q17L58_AEDAE
aaaataaaataacatacattgcatcttcacagaagacagatcattcttgctctggattggtaacttggggcgccgcattcgatgacgaagaagcagcttgctgttgaacattctgcacgttaactgccaccaacggcgccccggtggaggtttggatgcgcacggggctaccttgtcgcattccagctacgttctggttcaaagctgctgatacctgagataataaagcttgttgagtggttcccgaagctccttgtactttgatgcctgttaaagcgccggccagtgtcgatgtgcccgcttggggtcgaagggcggtgtttaatgcttgagacgatccggcagctactacctgtatggtctgctttgatccctgcgtgttcaccggtataactctagtaggtggtccttttgccaaaactaccggtccctgactaacattcaacggcgacctgattacttgttgaaactgctgaacggtcatcgctgtactgagtggcttagaaccgactatcaactgagcctgcatgttgtttttgcccacttgggcaatactaagtttctggccgcttagcttcttttgtgccagtagttgttgttgcagatgaaactgtcgcagttggttggcattggtcgttttcagactcggagctaggtttttaccttgggctgaaagtgagacaccagtgacgggaatcgtgacggtttgagtagctccaggtgtggacgatactgtcttcacgagagtagcaacagacgctccagacgtaccagcctgaatagcttgggctagtacttgtggtgatagactttgaatcgtaccaccacttgaggtgctcagtttctgctgctgcagttgatgctgcttcttcaacaactgcgctacttcactttctgttaccggtctagtgattcct

SEQ ID NO: 9034 - DNA, 918 bp, Diabrotica virgifera
  SmartBlast Evalue=6E-38; Info=Inter-alpha-trypsin inhibitor heavy chain H3 n=5 Tax=Murinae RepID=ITIH3_MOUSE
acttgctagcctaaatttgccatacgcagtatctgctaccacaggagcaatcaccaaaggaaaagcagtaataagcaagcttcaaggcaatggaatgaccaacatgttagccagtattgaaactggtttatatctagtgaaccaagaactaaagagggcatcaagaagacagcctttaattatctttttgacagacggggatccgaccatgggaatgaccaacacggaagagattataaagattgtgacaaatattaacgagaataaagattacataccaatatattctctgtcttttggagacaaagcagataaaaaattcttacgaaaattatccctgaagaacttaggattttccaggcatatttacgaaggacctgatgctcatattcaactccagaatttctacaacgatatctcatccccacttttatcagatatcgaatttgagtatactgatgacgttacggaagtatccaaactgaagttccctatttactttaaaggatcagaactggtggttgctggaaaatatcccatgaatgaagcttttgacacctctaagtggaaagttaagagtaaaggcaaacgcggtgaaatctcattacaaccagtaagggaagctgcagtgggcgaattggagcgcctgtgggcctatttaactataaaacacaaactggaacaacgagaattagtcaaaaataaaaaacaacagttaactaaagaagctctggatctggcgaaaaaatattccttcgttactgatgtaagttccttggtagttgtcaagcccaatgaaacctgtactgttaacaccgaagattcttcaaagccaaacgaaccaaaggttatattaccagatattctcagtgttaaaccaatggaagcacctgcagaacactatgcagataactcgtt

SEQ ID NO: 9035 - DNA, 919 bp, Diabrotica virgifera
  SmartBlast Evalue=2E-60; Info="Hsc70-interacting protein, putative n=1 Tax=Pediculus humanus corporis RepID=E0VDJ8_PEDHC"
taatacaatacctataactgtgttaattcgattattgtgaatccaaaaatgagttgccctataggtaaagacgccgttgacaaattaaaacaatttatatcactatgtaagtcaaatcctgatattcttcatttgccggatcttaaatttttcaaagactatttggaatccttgggtgcctcactccctgaaactagaaatatgccatcggatatcaaagtagaacccaaggaagctactgatactgaagagccagtgcaggaagatgtcctagaatctgatccggaatccgaattggaatttgacatgactggatgtgtagaaccagattttatagatgatatgaatcaaaaaatgggagatccctccaaagaattgtccgaagaggttacagatcaagctgatgagaaaagaatggaggctatgtcacagttatctgaaggtaatattgagaaagccatagaattattcacagaggccatagaactcaatccaactagtgctttattatttgcaaagaggggccaagcttatctaaagcttaccaagccaaatgcttgcatcagagactgtacaagagccttagaactgaattgtgattctgcccctgcatataaatttagaggaagagcttatagactgttgggagagtgggaattggctgctaaggatttaaggcaagcatgcaacatagatcttgatgaacagactgatgaatggttaaaggaagtcacaccaaatgctaaaagaattgaggaacatttgctgaagaaggagagaaagaagaaagataaagaagagagggaaagattggataggattagacaagcaagagaagcacatgctaaagctgcaactgcagctaaggaagaacccgaagatgatgctgatccaatgggaaatgcaggagatttctata

SEQ ID NO: 9036 - DNA, 911 bp, Diabrotica virgifera
aatttctttcaaatgtttcatgagccactagtctagctggcagctataaaagtgtatgtaaaatatagcaagaaattcgaagcacgaaaaatccttactaaaaagcttattttttgaataaattgaagccgtaaatatttttggataggtctatcatggaacggtatatggtccgggaaatatacagcgtgtacttgtcttcacgaagcctactagcaaagaaaataagaataaaaattgctttgacagaaataagtaaactgttcgtagctacaaataattacgaacaaaaattgcatagaaaaattaagggtgttcatattggaaaaatattctgtcctcccattcccttttttccttttctacctcatagagggcacgaaaatgtcttttttaatacaaaaatcgttcagtttctgcatcgaaatgtaacaatggatgaaatacgtatccaccacttctttaacctacagatttatttcgcatccacagcattattcagatctaaccctcggcaactgtttacagacctcacaagaatgctccagataaggaaatttggaaatacttgggacgtatttgacccaaccaaaaagttgacaaataaagcactaatatcaaccccagaagaagtttatgtggacgaataaaatccaattttacctaaaaattcttggtctattagctaggaccggaatgcctttcccttttaccttttctaagggcaatttttttgtttttgtttatgttgcacaaacgcaacatactcataaactccaaaagaatgttgtatgtagagatatttagagagagaaacgaaagagaagaacttagagggtggaatgtggaatacaaaagttgacaaataaaaccttggaatcaacccgagaaggagaatatgtgaaccaata

SEQ ID NO: 9037 - DNA, 915 bp, Diabrotica virgifera
  SmartBlast Evalue=1E-114; Info=Bt n=1 Tax=Drosophila grimshawi RepID=B4JZU2_DROGR
tgccaaaaatccttacgatattcctggtaaaccaggaactcctgaaattactgactgggatgctgatcgcgttgatttgaaatggactgctccaaaaagcagtggaggagcacctatcactggctatgtcattgagaaaaagagaagttctcaacatcttgggacgaaatcctttctacagactctccttcttgtgaagcccgagtacccggacttaaagaaggaaacacatatcagttccgggtacgagctgttaacaaggctggtccaggagaacctagcgatgcaactaatccacacattgctaaagctagacatttacgtccactcatcaatcgtgaaaaactacacactgttaaagttcgtgctggacaacttgtcaaatttgacgtagacgtcaaaggtgagcctccaccggtttgcacgtggagtttcgctcacaaaccacttgaaaatggtggtaatgtcaagatcgaaaacgaagattataatacaaaacttcaattaagtgagacaagaaggaaagatactggaacttacactctaaaagcagaaaatgattctggttttgatgaagccactgtagaggttattatcttggacaaaccaggaaaacctgaaggacctcttgatgtttccgatgttcataaagaaggctgcaaacttaaatgggacaaacccaaagacgacggtggtttgccaataactggttacgtcattgaaaaacaagatgttcaaactggacgttgggtaccagcaggatttgtagatgcggacaagacagaccatgaaataactggtcttgaacccaacaaaaagtacaactttagagtcaaagctgttaacgaggaaggtgaatccgaacccctcgaatcagacgcatctatacatgctaagaacccatatgacatcccc

SEQ ID NO: 9038 - DNA, 910 bp, Diabrotica virgifera
aaaaggaaactatcaatttggtgacttatattttcagttatgaaatcgtaatgttttaatgtttttcctatcacgttgtaaaaaccttttttacagtaaacgaacccattcaaaaataagaagaactaaaggtggcagaaatgccagtgttactagacaatttagttaagttccttaacaaaatattttgtatctgaccgattcataaataatctacgtactcttctgactggttaaaatatctatcaccagatttagagtttaagtgtttccctaaactgtttcataacaaagtatatagatatataaactttacacagataccctgtatataagtaacttattttggggtacatcctatataaaacttttaattgtataataaaatatttttattatgtacaaaaccctctttttactactattttaccaaaaaagtgtttaagtagtggtatagtctacaacgtacttaaaaattaaatacggataaatatgggacttcttaagtcatttcctccggatctaatttttacaaatgcaccatttatttttactatttacgattagtactattattttatacaaactgttccagatatattagttcaaactgttgcagcgtaccactatctgataggtgacagttatcgtgaaactgattcgactggcctgagccattaaacttttaaagagaacaggttggatgacacaatgtttattgtgagctatgcagagctaatagtaaggttggctagttgctacgttgtctcaacttagttttatggaatgaaagctacggccctgaatgcgacatcaatgaaaaaactggaatcattcgagcagtgggtgtacagaagaattctgaaaatatcgtggacaacacgtcacaaacaaagagggtctgagaaag

SEQ ID NO: 9039 - DNA, 917 bp, Diabrotica virgifera
  SmartBlast Evalue=4E-31; Info=Reverse transcriptase n=1 Tax= Schistosoma mansoni RepID=Q4QQD7_SCHMA
ctcatataataagtctaaatcccttctctccacactcaaatctatcaaaaataagatccaaaaccaccacctcatcttcagcaaagcagataagggtaactgccttgttattttagaccaacaattatacattgacaaagtcacctctttcctagacaacaataactttactttgcttcctgttgatccctctaaatcttttgtttcgaagatgaaaaccaacttaaagcaatttactgaattcttttctgaatttgaagcaccatatactaaaattccatcaaatccactcacccccaggttatacggtttaccaaagatacacaaagttgacattcctattcgtcccgttgtcagcttcattaacactccagtttctattttatctaaattcattcttaacaccattaaaaactttattaactttaccccacagtttactgttttgaattctcgccaattagttgaaaaacttcaacttgtcaatcttaatccaaatattgttatgctttcttttgatgttagcaatttatttacttcagtaccaaaaaatgaatcgattagtctggttaattcactcctcttaaataattctgtcacttccaccaccacttcgtctattataaacattctcaaaatttgtctatctcaagattactttgtttttaataacaacttttatcaacaacctgacggtttagcaatgggtagttgcttatcccctttcttagctgatgtttttatggatcacttagaatccaactatatcataaaaaatccagagatcttacactggttccgttatgttgatgacattttagtcctcatttctggtaactctgattcagctcacaacttacttcacaaaataaatcaaatccatcctaatatcacctttaccatggaactagaatctt

SEQ ID NO: 9040 - DNA, 909 bp, Diabrotica virgifera
  SmartBlast Evalue=1E-86; Info=Protein DDI1-like protein 2 n=1 Tax=Camponotus floridanus RepID=E1ZZT6_9HYME
ctaatatggaggcagcgatggaatacaatccggagtcttttggcaccgttgcgatgctatacattaactgtaaagtaaatggatatccagttaaggcatttatcgattcaggcgcacaaaccacgattatgtctagtcgttgtgcagaaaggtgcaatctaatgcgtttagttgatactcgatgggcaggtatagctaagggagtcggcgttcaaaaaattatgggcagaatccacatggtacaaatccaaatagaaaacgtatttttaacaactagcttctcggtgttgccagaccaacctatggacatgcttctcggtttggatatgctgaaaagacacacgtgttgtatagatctcaaaaccaatgtcttacgaattggtaccaccggtactgaaacaccgttcctacccgaaagtgaattgcctgactgtgcaagactgagtagtttatctgaagaagaggtggctttaagatcaaagaaagaatttgaagagaagcagttgcagaccgctgtaaaaaatagccaacaagattcttcgccttttggagcttctacaagcaatgccgccagtgctgccactactcctacacaaaatgaaactttttccaatttcacagaagctgatattagcgatctcgttagcatgggatttagtagagaacaagtgatatttgaactaaaacgattcaatggtgataaaactcaagctactgctgcgctttttgcaaaatctttaaaattttaatttctcggggatctttggtttgtgtatagtgatattaattttaagtactgtagacattacaatacatacttgacactcaaattgattttgagggaatctaagcgtttttataatatactagcagtaagtttaatatttaatattaaataaaataagtgtt

SEQ ID NO: 9041 - DNA, 911 bp, Diabrotica virgifera
  SmartBlast Evalue=5E-36; Info="Synaptic vesicular amine transporter, putative n=1 Tax=Pediculus humanus corporis RepID= E0VKZ2_PEDHC"
cgtgtttgattatctgcagttctgcgttagaaacctactgcatttttaatatttacaaaaacagtcatggaaattgcttcatgttttaagttctaatagaagtttacgtgcaaatttgttgaaatattcggacaaatattatattaacaactattttgcttatcttgcaacctgcagttttgataaactaagtgtggatttattgtttacgaacactatagtgcagtgacgattaggtatatcaaaaattatgttcaaaggaaagaagataacatggaagcaaaaatgctcattagtaatgttaatgacagcagattttatgtgttattgctcaatgtccattatggcaccattttatccacaagaagctgcaaatcgggggatgacccaatccatggcaggcttcgtatttggctatttcgctttagtcatttttatttcatctcctatattcggtaaaatttgtccaaaattggagttaaatttttatttattattggattatttacatcagggatttgtactgtgatatttggaactttacatcacgtagaagactacggtggttttacaacactttcgtttgtaataagaggctttgccgccttgggttccagtgcgtacgctactgctgcctatgtgatagtagtcaatgtgtttcctgataacgctggagcaatcaggggtattttagaaacatttgtaggattaggactgtgcgcaggtccaggaatcgggggcgtgctttttgatatcggaggctttggcctcccattctatgtagtaggaataattttggtgatacttgcacccttaaatcttttcattttggaaaagcctcaaaaaacgaagattgaatcaaagtctggttcattaactagtcttttgaaattgaccccgatcatgatgac

SEQ ID NO: 9042 - DNA, 916 bp, Diabrotica virgifera
  SmartBlast Evalue=1E-111; Info=Cleavage and polyadenylation specificity factor subunit 1 n=3 Tax=Aculeata RepID=E1ZVR7_9HYME
aactgcgatgtatcccttaagacccgaacgggtaccttcataagcaagagctacattcttcaaacagttaacatgttcccattcttccaaatccagtttcgtatttggaattatgtcccacgaaaccggagaaaatagacacaaactgaatatctcttgacatggatatggaaatctatcgcctttctcttcaatcgacagttctttatcttcaccattaaacttgtaatactgatttgatggttctgcaatacttgttaccaggcaataggttttagattccaagtgatacgttacaaagtgtggagtacatcttaacggtacttttcttacaggccaaggagcgtcgtacgtcaaatgtgttggtaacacaccgattctaagttctgactttttgttaaaatacagaaaaccttgaggacagttaatattattgaactgagcaaagctgaaaatttcaccatcaatcaccatcggatgagttcttagttctcctcgagacgtcaaaaagagccagtgaggatttgctccgcaaataaacactccgttatagccagcaatattatcaaaatatcttaaccgcataatcttctcttgtagagcaaaataatcggaattttcagtttcgacaccggtatctacgttaggactgtataaaatattatgcttcatcttcttgaacctcaattttaaatttcctctgggaaatctaaatacttcgtaaatatataaatctttctgaagacgtaccagcaacactggtcttgagccattgtttcctaagcctaccattaacagttcttttacttggtataagtcttggaactggttgtcgttaggagacggagttgtgagagcatttacagactctaaactatctactaataccttatatccaaaacaaagattggcaacg

SEQ ID NO: 9043 - DNA, 913 bp, Diabrotica virgifera
  SmartBlast Evalue=3E-47; Info=Zgc:171429 protein n=2 Tax=Danio rerio RepID=A8KB11_DANRE
gtgtcatcatgttgaggttaggggcccagttcaaattgaatttgaatatcatcataagtctcatgttaattttgtcggttttaccaaaattggtaacaaggataggtgctgtagaagtagttacctctagaaatttaaataaaataatgtgtgatgccggtgaacagagtataagccaaagggcatcaagattagcgcctccccttactcaggataaacataagggccaagctggccgaattggggtttttgggggcagtctcgaatatactggcgcaccatatttttcttcgttcagtgctttaaaaattggagctgacctggcttatgtctttagtaaaaaagaagctgcacaagtcataaaatcttatagcccggagttgattgttttacctttgctggacgggaacatagaagctattgaagaatggctgcccaggttacatgtggtactcattggtcctggcatgggaagaatgaatagtacttttactttaatagaacaagtgatacaagaatgtagaaataggaagaagccactggtaatagacgctgatggattattcttgatatccttaaaacctgaactactaaaagattaccctgcgcctctggttttaaccccaaacgtaatggagttttgtaaacttacaggggaaccatgtgattcaaattccgataaattagaacgatccaaggatatcctgaaactatttggaccaaacgccctaattttatgcaagggacacgatgacgaaatccttgcaaatggaaaagtcactaaagttgttggagggggttcaggaagacgatgtggaggtcaaggagatcttttgggtggagctttatctactttcttacattgggctctacttaaaggggaagaacctgccgtggcatgtttcgcagctgc

SEQ ID NO: 9044 - DNA, 916 bp, Diabrotica virgifera
  SmartBlast Evalue=1E-104; Info=Exocyst complex component 6 n=3 Tax=Aculeata RepID=E2BQM2_9HYME
atctgcttaatctcctcgttcataagcatgacgaacatggacttggctatgtgatcacacgctgacttacaggctatttgagcagcttcgagcggaatattcgtgaagctttggaatgtagtctgaaggaaagcgataatgtctgatatgtaactagaagcgtggcctttcggctcgactaacagccagtcgtaattttctaattctaagaattcgttcaatttctgcttcaacttttcgcaaatttgccgcacggcgtcttctctagatacagaaaatagagcagattggccgtgaaccataccggaactaactcctcgtgattcctcacctgtaatattcgatataaattcatctaaatatacattggcttcttctaggtaaccggtatccacaataatttgaatgatttcttttaagttgacatgaggactgcgaaacgtggaagacaaacaaccgttaaacgttctggtcagcagcaaattcatggattttctaatcatctcgtccacttcaacttgacttaaattaagatcttcagaaaatttaacgcaagcataaatgaattctttgacttctctgtaaattttcggtaccatgctggaaaagggaaagctataaggatagtccatgtcgtctggtaggtcaccttcccaaggaaaagacaataacagttcgtttagttcttctggattttcaacctgtacaggttgaaaatcttcctcagctaaaatctttctaaacacctgcacccatctttgcatcaaaacttccgtgtaatgatctctcagctctcttactaactcccacagcggctttactgagtatccgtagtttcttaatgttgtacagaacaacataatcaagtcttttattcttaatattaatgtagcgtccgtgcaatacgccgaattag

SEQ ID NO: 9045 - DNA, 915 bp, Diabrotica virgifera
gtttatgtatgcatatctacgttgaattaactggttacaataaccatcagtgcgttgcaatctgttttgaggaaatttccagattcctaaatctattatggcgactacgctttaactcattaatcaattagtgctaagatcgtcccacagtaaaaataataacgtgagaaaaccaaactttttgataaataaataaaaaactgaaaatgtagataagatataatatgcgaatattaggcagcttgcagacgaactgctttttgaagtcgaagtcggcaacaaaatgtcgagcgtttgtggttgtctgtcgctactcgaagtcgtcatttaacaacaatgcaaaactcatttccttttcacacgtctgttttcgcgactgcactacaacttctgtcatcggttgtcgcccctcccgtcggctgacttctcagtacagtggaaccccgataagtcggcccccgataacccggaagtccggctaacccggaccgatttttatcagacaaacatttctacaatgaaaatatatgtaatataatatttgagagataatgggtatttgtgtaatttgaactacatatacgatagtaaaaatgactcatggcacacgacgttcattgtcgtgttatcggaaaaaacaggcacctgtagtatcctttatttatttctaactgtcttagcattgtttaaaaaagactaaaagactattaaaacattcttcgttgcaattgagaccgtattgtgtgtagtacagtcgtattgttcgcttccgttctgtaatcgttcgtaaatctattcagattttgtgtttgcgtgtttttttgtctacgtaatggcaacaaaacgtaaaaatgttgtcgtgacaatggaaaagaaacaagaagcattaggtagaattgataaaggagaatcttt

SEQ ID NO: 9046 - DNA, 911 bp, Diabrotica virgifera
  SmartBlast Evalue=1E-34; Info=Juvenile hormone acid O- methyltransferase n=1 Tax=Tribolium castaneum RepID=B2DCQ0_TRICA
cagttagaatttagataactttaatagaaagacaaaattgacaaactgtcaaattagatttaccacctgtccacaatttacgttttagttgcaataacaactaacattttaacatataatgttggtattctttttccactttcctcgttgaacacgagaggataaccttgtctttctacttcattcaaataatctttgatatactcatctttgtcttcgtctggaatttttggcagcattttgtttacagatatgtataattttttatatgattcttcatcgtcgaatgtacatccgaccggctcttctgcgtgaataacataattcttaaaacctgctgccttaagatcactttcgtactcaagttttggatttgaattggtattataattcgataagaacgtgccatattttccccattttggatgtttttcaagcgcttcgaacgttttatgtaccggcatgcgctcaaaaaacgtcaaaaacgcttgtccacctggtttcagcatactttggatattttcgatggctgacctgggattttgcaccatgtgcatcacaaacaacccaaaaacatggtcaaatctgcttcgccagcaggtctctaaaggtttggtagagatgtcccgatgcaccgcttgtaacctaggaatattaacatgctgtttgtagtggtcaagcatttctttggaattatccatcgccacgtactctttgtaatcttttggaagaacgggcagcaaaagtttttccgaaacttgtccatctccgcatccgaattccaagatcgactcacttttcttccattgtaataaatgtttgtatttatctagatgtatcctcgtaagtcttacagtaacgatattgccgactagccataattctggtatcatatttatttggtaaatatt

SEQ ID NO: 9047 - DNA, 905 bp, Diabrotica virgifera
  SmartBlast Evalue=2E-50; Info=Endonuclease-reverse transcriptase n=1 Tax=Bombyx mori RepID=D7F170_BOMMO
agggaataatagaaatcttcttcttgactggctttacaactcggggtgagtcttcgtcgcatccactatggccctccatctgcgatcttgcgcttcgatttgccattgttgtaccccactcctagatagatcggtttcaacatcatccttccatctttttctgggacggcccactgatcttctaccgtctggtctctcgaagaacactgtctttagcactctgtcttcctctgatcttactacatgacctgcccatcttatccgattagcttttatatgtctgacgatgttttcagtaccatatagagtcaccaattcagcattgcggcgccttctccactctcctgtcaattcatctctttgaggaccaaatatcattctgaggactttcctttcaaatatcagcaatttatttatttctcgctgatgtagagtccatgtttcactcccatatgtaacaactgggcgaataattgacatgtacagtcttaatttagattgtcttttcagcagcttagatcttaataatgatgatagggagtataatgctctatttcccgcagctattcttgctgatacctctttttctatgtgattgtcctctgtgattactgctcccagatatttaaactcttttactacttcaaagttgtggtcattaatagttacgttctgcctaactcttggtcttggatttttggtcaccagcatatatttcgtcttctcttcatttattcgaaggcccagactacctgtttcttcctcgagttgtgaaaacacctctctcacgtctcttgtagaatgagcgactgcacctagatcatcagcaaaggccaacaatagttttgatcatcgattcgtaaatccctcagtcatctcagatgatattttacttattacatatt

SEQ ID NO: 9048 - DNA, 908 bp, Diabrotica virgifera
  SmartBlast Evalue=1E-111; Info=MAU2 chromatid cohesion factor homolog n=14 Tax=Euteleostomi RepID=SCC4_XENLA
tactatttagtgttacaggtctgtctttacttaatggctggacaagtgaaaagtgttaaaccttgtctaaaacaattacagcagagtattcaaactataatggctactgatgacgtatttatgggacctagcgcaggagacatgtttttgtggatgccgaaagaacatttatatgttcttgtttatttggttactgtgatgcacagcatgcaagcaggatacatggaaaaagcccagaaatacactgacaaagcgttaatgcagatcgaaaaactaaaaattgtagataacaagccaattctatcagtatttcaattgatgctcctggaacatataattatgtgcagattggtgatgggcaataaaacacaagccctacaagaaatatcgtccgcagcaactttgtgtaaacaatgtcccaaattattagaaactcacggcccacagttacacacattgttgggtctttattccatgagtatgaactgtatggaagcagccgaggctcaatttattgctgctttaaatacatctagagagagggaattatggacttttgccaacttaaatctcgctatcgtatacttgagaggtaaaagggaagcagatttcaacgcgttacacgaaagaatcaatccagaaagtttaccgtcccattcgcacagtctcagagcagctgcctattatgtacaaggcctgcaagcattctttcaaggacggtacaacgaagccaagagatatctgcgagaaaccctgaagatggccaatgctgaagacttaaatcggttaacatcgtgttcgcttgttcttctcggtcatatatttctgtctttaggcaacagcagagaaagtatgaatatggtaactccagcgatgcaacttgcaagtaaaataccggatgttcatgt

SEQ ID NO: 9049 - DNA, 915 bp, Diabrotica virgifera
aagacatattttaatattgtaaaacatttaatttttaagcaaatgcattatagggtggttccatatacttctctaatatctgctttatttgaggatactgtcttggttgttcaagcatttcaaatgttgtgttgatgttcatatatcgaagagaattgggctccgaaggtaaccagataaaattatttaacaaaggaacttctattggagtgggatttaaatatttaacgaaattagtccacataacgacgtattgatgtaacattaaacgatcttcttctggaaatttacttaggtcactgttactaccatcatcccacatatagtgaagatcttcagcatgaacaaccttctcacatcctggtggcagtaccatgtccatagctcctcctatatatcctttgtaagaaaactgatagaagtagtacggcactgacgtagatgctaattcgacttgcttgcaggttcctgtggtaaacatttggtcactagtataccttacgaaataccccatatttccagcaaagcttgtattgtgcgtataaacttcttttaacaattttccagcgactggtctgttttctggagaagtattgagatttttgtcgaccagattactaggattttgatctaattgctctaaagtttgttcactggtcgcaaaagctatgaaaccccattcttcggaattaaatccaattataacaggaacatttttgtagtttccgtccaaaaacgcttgaaaaccttggtaggaaaatggaccggaatcttcgacagcaactccaccaggtattccagaataaattatatctttggcatcagcgttttgaagtacttgaaggagttccttagtatcgttggaaacaaacgatggatctactcttctacctaattgcaaggcagttgctgttg

SEQ ID NO: 9050 - DNA, 915 bp, Diabrotica virgifera
  SmartBlast Evalue=4E-70; Info=3-oxoacyl-[acyl-carrier-protein] reductase n=1 Tax=Harpegnathos saltator RepID=E2B879_9HYME
agttattacaagactattaagattttcagtttttatttactaatataatttgaaatttttattttaaaaatgtctatttcttttaaaggaaaagttgtcctagtcagtggtggcagctctggcttgggtggagctacagccaaacgtttcggaagattgggagccaatgtcgccattgcccacaagaacatacctggagataccatcgaggaagtcgtagctgagatttccaaattttcgacgccactggtaatcgaatgtgatttgactgattccaaacagattgagcacgttgttaaccagaccgtaaagcattttggaaaaatagacgtactagtaaatgcagcaggtattttgcagaatggatccatcgaaaatacaactttggaaatgtttgataaagtgatgaatattaacgttagagctatgtttgaaatgattagagtttgtacacctcatctgatcaaaactcaaggagcaattgtaaatattagcagcgttactggtttgagggcttttccaggtgtgctagcttattgcatttccaaatcagcggtagaccaactgaccagatgcgttgctttggaattggcttcaaaacaagtaagatgcaacagcgtgaatccgggagtcatcgacaccattttgcacaaacgatcagggcttaatgacgagcagtacaaagccttcttggaaaaaagtagactgacacatgcccttggacgtgcaggtaccgctgaagaagttgcttccggtatcactttcttggcaagtactgatgctagtttcgtaactggaaataatttccgaattgatggaggacgtggtattatgtgtccaagataaaaaaataattcagtatggaacataaacaataattgtgaaccaatttgcataataaaaaagaaataccta

SEQ ID NO: 9051 - DNA, 915 bp, Diabrotica virgifera
  SmartBlast Evalue=2E-19; Info="Gamma-subunit,methylmalonyl-CoA decarboxylase, putative n=3 Tax=Aedes aegypti RepID=Q16KM4_ AEDAE"
caggattaaactgcccaattttaaattattgttaactacctatgcactttctcttgcgtgttttttattaatataaacaaaaattaagttctttatttcacgtaaatggtattctagacagtagtcacatgatagccaatacgtcacaggtcatacaatacaaattacaaatactatacatcaaatcaaaaatatcaaaagttctgcgaagttcctgttcctgagttgtcattgtgaagtgaattgtggagaaataacctgattttacataacattaaattatcagttacgtgttgacgtgtgagtaatactaataaacgtactaagaaaatgccacgaagaggaagagcagcaccagctcgtgcaccagcacgttcaaatcttcccattagaactccagctcctacacctccagcaccagtatatgcagccccaccagcaccagtaccagcaccctcacaaggtcccgggttgtttggccaaatggctgctacagctggaggtgtagctgtaggatctgctattggtcatactgtaggacatgcagtaacaggattgttcagtggtggtggatcaagtgaagcacctgtccaacagccaccacaacaagtagcaccccaacaacagtatgctgggacaggagcagctggagaacaaggcccatgttcttgggaaattaagcaatttttacaatgttcatctacacagtctgatttgtcattatgccaaggattcaatgaagctctacaacaatgcaaagttagaaacaatattgctgtttagacaagctcgtgatatattttaaattccggtgttactgagatgttaaaattattctaaacattacctcacagaatgcactatatatgtagataggaatgttacagaaatgttaaattaaatgtttttgccaat

SEQ ID NO: 9052 - DNA, 911 bp, Diabrotica virgifera
  SmartBlast Evalue=1E-64; Info=Probable ATP-dependent RNA helicase DHX35 n=1 Tax=Camponotus floridanus RepID=E2A8J9_9HYME
gtttagtgagtgtagtgtataggtactgccatttaattatatttatggatagcctttggcgtaactaaacagcaaggataaaattatcaattcaactccaaccatttcctctgtactcatgttcttgcccgcaccgtgatgagtgaatttaggcctaaattcttaaagccttcagataccactagttttctggatagggatgattcctacagcgtagagaccacagatttcgtttacaacagatatttgtctcagtccattcaaacgcaaagacagaggttgcccattttcaataacagaaaccatatactttatcttctggagaagtatcaaactttgattctaatcggagaaactggctgcggaaagagcactcaaattccacagtacatgatagaggcggaatggccgggacaaataggagtgtgcgaaccgagaagagtggcggctatttctttggctaatagggtagcggatgagacgggcactctcgtgcagcaagatactgttggatatgcagttcgattcgatgcttgctacaacaaaccaaaaattaagtatatgacagaaggaatactgctcagagaaatgatgtctgatccacttcttaaaggttattctgcaattatgttggacgaagctcacgaaagatcattatacacagacatcttgatgggtttgatgaagaaaatactaaagagacgtaaagatcttagacttatagtggcctcagcaactttagatgccaaagagttacaggactttttcaataataataccaccgatgataagaaaaacgatactgccgttatcatgtcagtagaaggacgacaatttcctgttgagatattttatgtagctgagccagtcccatgttacgtacaagcatcagtagacagtgttcttaaaat

SEQ ID NO: 9053 - DNA, 913 bp, Diabrotica virgifera
  SmartBlast Evalue=1E-63; Info="Peroxiredoxin 5, prdx5 n=2 Tax= Aedes aegypti RepID=Q173J1_AEDAE"
tgctctcgtaaatatatatgtccacttcagatttttatataattactaaaaacctgtaataattttaatttaaatttataaccaaaaacggaaaatacgaagctgataaaaccacaacgaaggtcacatttcaaagtctatcagtacaatctctatctttgtctaattttacagttttaatccgaacgttaaggaggaaagaggagagaagatactggtccggccggaaaagtttttataaaatgaatgtcacggtgaatgtattaaaaagattgccagttgggtctgccggaataaaatcacagtttttccaaaggttgttacatatttcttctgctaaaatggttaaagtaggtgacagtattcccagcgtagatctctttgaagattcacctaccaacaaagtaaatttggctcaactttcttctggaaagaaggtgatactatttgctgttcccggagcatttacaccaggatgttctaagactcatttacccggatatgtaaacaaggctgatgacttaaagagtcaaggagtaagcgagatagtctgtgtatcagtaaacgatcctttcgtaatggctgcatggggcaaagaacacaaaacttcaggaaaagtacgaatgcttgctgatccttctgctgccctagccaaagctttggatctttctgttgatattgcccctctaggcggaaccagaagtaagagatactctatggttgtcgaaaatggtaaaattacttctttacaagtagaacccgatggtactggattgtcttgctctctcgcagaagctattaagttgtaagctattatgttaggtagagttttaagtaatattggttcttcccggagattattatttaataaagaaattccatttttaagtatagaataaaacagattgaaaac

SEQ ID NO: 9054 - DNA, 913 bp, Diabrotica virgifera
  SmartBlast Evalue=9E-87; Info=Tyrosine-protein phosphatase non- receptor type 23 n=1 Tax=Harpegnathos saltator RepID=E2B5Z6_ 9HYME
tgttaaatctgtagctaaaatgctcggtggtcttttaccaatcgtttcttggtacttttgttcactttgttcttcagcctttaataaagaatcaatctcattcaaacttgcttcaacgtcttggtatatgttagatagctttcccatagcacttataagatcttgaatggcgttaggtttagcagatagagccgctgctctatcaatcaactcctgcggtattccagtagcctggtgcatcttggtcaatagatctagctgcattgacgacataaattcagccaatgtttgatctttattttcaataagttccccgatctgtcttaatctctgagctttcttctcgctgtacaaggaagctgcttcgtgtgcctccattgggaccaatcgggagaaaatatctggtcctgaaacttctatatcatttatactgaatggtattcctttgactaatgaagcacccttaacctctggcaattggtctttatcaggcactgattcatggtagatgaactcattttcatttttagctgcttttcttttaccttcaaccacatcagtagtgaatgctagtccctcatttatttcttgctggtggtgttggttttttaatgtagcagcaattttctttgcctcgtccagctgttcacatgcagcttgatagaatgcaaccctttctcccattttctgttgttcctcagcttgttgcccttggaataggaacgagatgcatttgtagtaggtcagcttgaattgaagatatttcatccactccttgtaggttttatccctaaagtaggcttcgtttactgattccaagacacgtaaagactgtctgtagtaactgtagacttggatagcgacttttgcaatgatggtaggtttcctattgtcaaacatgctcttctctaat

SEQ ID NO: 9055 - DNA, 914 bp, Diabrotica virgifera
  SmartBlast Evalue=1E-39; Info=Reverse transcriptase n=1 Tax= Schistosoma mansoni RepID=Q4QQD7_SCHMA
tgggtgggtttacgaaagataccaaagttgaattggttgttaagtctggtaatagataaatcaaggaaattaatggcctgagaagattctagttccatggtaaatttgatattagggtgaattgagttaattttaagaagtagttgttgagctgagtcatgatgtccagcgatgaagaccaaacagtcatctacgtaacgaaaccaatgtaaaatttctggatttttcataatgtgattggactctaaatgatccataaagacatcagctaggaatggggataagcaactgcccattgctaaaccatctggttgtttatagaatttgttgttgaattggaagaaatcttgagatagacataattcaaggatatctagtatcggtgaaatgacattgggctgaaaagacttgttgactaagagtgattttaccagacttaaagtttcgattttgggcactgaagtaaataggttgcttacatcaaaagaaagcatagttatgtctggattgagattgatgagttgaagtttatcaactaattggtatgaatttgatacagtaaaacggggtgtgaagttgattaaattttttaaggtgttgagtatgaattttgataaaatagaaactggagtgttaatgaaactgacgacaggacgtataggaattccaactttatgtatcttgggtaaaccgtacaacctcggaataagagggttgccaggcagtttgttgtaaggggcctcataattggataaaaattcagagtgttttttgatgttatctttcaatttacttatgaatctcttggaaggatcagttggtaaaataatgaagtggttgtcatctagaaaagatgaaactttattgttgtaagtatcacggtctagaataaccaaacaattacctttatcagc

SEQ ID NO: 9056 - DNA, 914 bp, Diabrotica virgifera
  SmartBlast Evalue=9E-21; Info=Chymotrypsin-like proteinase 6D n= 2 Tax=Tribolium castaneum RepID=D0R8R5_TRICA
cagcaacgtattggttttataccttgccagtatacaacatgttcgccttcatattcttgtgtttacttctacaaactttaacctttcctccaaccttgggtcgagacgctgatcaaaatgaatatccattgatcgtagcagtagaatcatgcaattttccagtatgttatccacaatgtgctggagtggttctttccaaaagttggatacttacactaggaagctgtgcctatgttgccactaacttcgatcattacaggataaatgcaggagtagtcaatgttaccagtgaaggcgcacaactccgagacatcgaaaaagcattacttcatccagaatttaactattttcagccattttccccaaacaacatcggtctactgaaattaaagacacctctaaatttgggcgactcggttcaaccaggagtactaccaacgcaaggatcagatgtaccactaggcaaagtaacgcaactgggatggtatgttaataaaggtgaacgtgacataccagtcagcgtggaaaacttggagacagcagacaccgctatgattgattatgatgtgtgcatggccgtagtagaaccatcgatggattacaaatttcctgattttgcccaaacattgttctgcactggagattttactggacgcgaagatttgtgttttgttagtaacggatctccaaccatccaagaaggagtcgtagtaggtatttattattctccaaccttagcgtgtggagtaatgggatcagctatgttaactctcaagactggaccttatgtctcgtggattcaagaaaatatcgacgaagatataagactagcctaagaatattgtacatttccaatattttattatcacttactctatcaacaataaaggtatagtaactattatatagaccag

SEQ ID NO: 9057 - DNA, 913 bp, Diabrotica virgifera
  SmartBlast Evalue=6E-71; Info=CG7974 n=5 Tax=melanogaster subgroup RepID=Q9W0A9_DROME
aaatccaaaatgtccgaggataataatatgtccaattctaaagaaaaaataatattcaaatctaaaattcgcaaacaatttagaaaacgtcttaaagaggaagacagtgatgaaaatgagactgaagtaattgcaaaactacaagaaatgaaagaagttcagaaacttagagaaagacctaatggtgttagtttagttggtttagcgctaggaacaaaagtactaacggacacagaaatcaaagattcttttaataaaaacattggtggtttggtaaacttgcaggccttaaatagtggcaattggaaagtagatgacgcctatgatactggaataggaactcagttttctgtggaaactaataaacgagatgaggatgaagaaatgatgaaatttatagaagttgagctatcaaaagaaaaggtaaagaaaagcaaagtgaaggtcaggatggtaatagcaaatatcatacaccagaagaaatagccctacagtcagtacccgaacatttaagggtatcttcaaagaaacaatctgaagaaatgttatcaaatcagatgttaagcggtatacctgaagttgatttaggtattgaggccaaaatcaaaaatatagaggctacagaagaagctaaacttaggttattgtgggaaaaacaaaataagaaggatgggccctcacagtttgttccatccaacatggctgtaaattttgtacagcataataggtttaatacaggagcgagtgaaattccgccaaagaaggctaaaatggaggaaaaaccgaagaaaaaggatgaaaaagctacggacgattattattatgaaagattcaaaaaacagtttaaaagataatattaaatgtttagtaaaaaactatagtttatcatagatatagtaataaactgtatttg

SEQ ID NO: 9058 - DNA, 910 bp, Diabrotica virgifera
  SmartBlast Evalue=2E-24; Info=Pleckstrin-like proteiny-like domain family B member 2 n=1 Tax=Camponotus floridanus RepID= E2AKJ9_9HYME
tccagaatatgaacaagtatttgaagactatttacaagctcaagagcagctagataacgaaagaaaaactttcgaagatttagaatttcatcatttggaagaagaggccgattggttagctactagagaggaactacaaagagaaattgtagacctgtccaaaaagatcgataatataaaaaatctcattgatgatttagaacaacaaaagatggacacatcgaactcgaacaacaacgaattcaaaggtctagaacgccacaaaatggaatacattatgagactggaagaagtacggaatagattaaaaagcattgagaatgaattactcctgtatacaaacgatgactctgatctagacctttccagtgatacggatagtgatcgctctaaagaacttgagaagcggttatcaaccaactcgtttagcaaaataacagacatgagctgctcagtgattattagtaattcaaaagttcctgatgatagcatgttcaacatgtcacattcctttaatgaaaaattattccaggaaaaatctgttctcgaaataggaattagtaaaagatttcctagtcaagatgacatagacagaataagtagagttacttcccatacacctattatcgaagaggggacggactctttgggaaggaaaaccattgaatctctaaaagaaattgaacggaacagacatattcatctatgtcagcaaggatctcatgttatcgaacaagaacggcaaagagtaaatgcattaaagcaaaaagtacaagaagaagtaaagactaagtgggcacaaagagttcaagactgcgattccctaaattcttcagaagaacttgaggatgcacgaattagggaattagatcaacaaattaacgattatcaacgaccgacatatgaacaa

SEQ ID NO: 9059 - DNA, 913 bp, Diabrotica virgifera
  SmartBlast Evalue=5E-56; Info=Calexcitin-2 n=2 Tax=Formicidae RepID=E2ADZ5_9HYME
atcgcacaaagtatcagaagtctttgctgaaagcgtattatacgtttttatagtgacagttacctttttcattgtactttttcattaaatttttatagaggcaagtgactggggacctttgcgcaacatgcctatctccgaatttagaaaaaggaaacttctttacgtatttcacgtattctttgatgtaaaccaaagcgggaccatcgataggaaggatttcgagcttgccattgacaaaatctgctccttacgaggatgggcaaacggcacaccacagtacaagaaaacattcgacgatatgattacaatttgggaaggacttaaatttaaagcagatgcaaacaaggatggacaggtgagcgtagaagaatgggccaccatgtgggacgaattttccaaaacaccagaaaacgcattagaatggcaaactcagtacatgcgttttatgtttgaaatggaagactccagcggggacggagctatagatgtagatgagtttaccggagtctgttcgtgttatggattggacccggcagagtgtaaactagcgtttcaaaaaatggcacagggtcagccaagtgtgagctatgagcagtttgaagtactatggaaacaattctttacttcagaaaatccatccgatcctggcaacttcatttttgggaaaacaaatttttaatctagactaagacacttctaatatcaatattaatacttagcatcttttgtattctgttccatattcctactactactattgataacctactttatattacattcttgaaaaaaattatacaaaacaatgcttgaggaagataaacttaggttggttatttgtaatattgatagaaatagacaaattgtattaccgagatatatctagactataatataaaaaagctatata

SEQ ID NO: 9060 - DNA, 912 bp, Diabrotica virgifera
  SmartBlast Evalue=5E-73; Info=Ras-related protein Rab-21 n=2 Tax=Formicidae RepID=E2BNQ7_9HYME
taagaagcaagcaaaggtttatgtatgttttggtgttgggaataaaaaaatattgaaatttagcattattgtttaatgaatgacggtaaaatatcacgtccgtttttttagacttaatcaaatagcatggcaaacagttcaaataacgttgattcgtttaatttcaaagttgtcttgttaggggaaggctgtgttggtaaaacaagtttggtcatacgatacattgaagataaatttaatcccaagcatatatccactattcaggcttcgtttttaacgaaaaaattgaatttagacggcaatcgcgtaaatctttccatatgggatacagcaggtcaagagaaattccatgccctaggtccgatttactatagatcatcgaatggagccgttctggtctacgacatcaccgacgaagactcctttcagaaggtgaaaagttgggttaaggagctccggaaaatgttagggactgatatttcgttagttatcgttggaaacaagagtgatttggagaaggatcggcatgtggatgtggaggaggctaaatcatatgctgaaaaggtgaaagcgatgcattttcaaacgtctgcaaagttgaacgaaggcgtcgaagaaatgttcctggcgctcactcaaaagatgttagaagaagcgaagttgaaagcagctcaagagattaatttaacgcgaaaaaattctcaaagggtcgtgcaagtggtggatgatgaacaggtaccaaatactaataagggttgttgttcaaatagttaggttcttaaaatttgctacagactatcgtattctgtatatataattattgttttattgctattttacatgtgatgttattttatttataaataaaatataagtataattactagatagattgttgtctccccaataaaa

SEQ ID NO: 9061 - DNA, 911 bp, Diabrotica virgifera
acattttataatgtttatttaaacctttagactttatttttatttaaaaaaatattcttagacaggaaatgaataataaaaacaactataaattttacataactttaccatggacaataaagaatttacaatcttttctgacttccaaaaatacacaagatttttatttttaatatttcacatgatttttacatacatacaaaactttttagagcagtgtatcaaaacaaagtttgacttatactgtcaaatgtcactgcccttttatctaatttacaaaaaactttccatgttgaaaacaaactagtaaaatatttaaaatctttaccaatatccacttggaatttaatcaaaaccaaaatatttcatacctttttaaatgtcacacttcgcacttaaccaaaaattttccttccaagacaggcggggagggcattcaaaacataacgacaggaaacagggcaaagttgagactaaacatctcatcgggaaatcgggacttcaatgcgggaacaggaccataacatcatgaaaacaggaacagctacacaatgcgacaggaaccgtgaacttctctaccggcataactgcgtcacaaaactgtatactcgattttcaccgtaaatatccaacataatggagtgaaaatttctaccagtattccctaatattcacaggacaagttgcaaatccttcacttagttaaacataacgacaacagcgaattttaagccggtaggtgcggtgctaggagttctacgggaatcgttgtttacatttcaaacatgcttttagaactgaactattctttttggcggggtacctaaccttccgaaaattttcctcgcccgttgagccgatcactttctcggctgaagatattgaccaatcggccgagacaaactaaagga

SEQ ID NO: 9062 - DNA, 911 bp, Diabrotica virgifera
  SmartBlast Evalue=6E-20; Info=Nuclear RNA export factor 1 n=1 Tax=Harpegnathos saltator RepID=E2BWH2_9HYME
gaacgtttatccactttaaatttgcattgcatcaaaatactttcctaattcgaatattctttgtttaaatattcacgtgtttttagtgtaatttttttaaatactttatcacacagtgaaaagtagtgtcctcttccagtcattaataaaaaccaatatatgatttggaaactgaagttgtaatttagttctggcactgtttgtaaattcgaattatttataataggatattatattggttatatattgggatttattatcccatcatgcacaacgcgaaagaattataccaacagcgaatggatcaaattgaacaaatgaattatattagatttaaaacaccagatccccagcatgttttgataacagataaatgtatatcagtcttacataaacatagaagtttgcttaatgatgttaactattggcatcaattcatggttagaaatgttgatcatgcaaaacgagaacaagttcttactgcaattttggatcatgtttttccattcgatctaattccagtgtcatattgggtagaggacgactttgtcttttttcttggtcgaaattgtggctcggctatagaaaaactatgcaatggaaatttagttgtgcccaatcctaaaagtacaacaccattcaggttaagtattatgctgagatttgcaacaacatcagaatataaaatagacgtacaaaggaatctaagattcgtattgaccaagagaagtagtctgtatagtagaactctggatttaacaaaattccacgaagatgaagatctcatagaatttactcctctatttcaaccgaagattctgtattttgtactacgcatagcaaaacagctgtctgtacctatggagtcatatatactgaggaaaaatagaatcaaagtactggatcctttg

SEQ ID NO: 9063 - DNA, 910 bp, Diabrotica virgifera
  SmartBlast Evalue=3E-58; Info="CG1702, isoform B n=7 Tax= melanogaster subgroup RepID=E1JJS1_DROME"
catgtttaaattttattataaacaattagtgagaaaaataataccatacaaattcataaaaatatacattaaacaacttcattctacagctttgactttggttcttcttctttttgggagattaagttaacgaattgatgggctctgtcataatgagggttgcattcctcccttacagcttctatccattccttgatttttggaaaacgatctctaacatcataaccagctaccctggtttgttctatttcgcatgcagcatggatgtctgcataggatatctgatctccattaatgaactttccatttgacaaaaaatagttctggaaatcctgtaaagacttctccatatactttttggcttttctcacttcttcctctgatggctgccgtccggttttcatcggattgagccaggtttttataaaatatgtagaacaatttactctaacatttaagtggtgccattccaaatattcatctactagtgcttgttttttgctgtcttttggatacaagttgtctgcaactggatactgcctggagatgtacctcactataccaacgctttcattcagtctgaagtctccatcatgtactacaggcacttttggaatccgtgaaacattttctagatattccttcttcaaatgttctccttttcccaagtttaccagacaggcttcaaaaggtacctgtgcttttttaaaaaatataaagagtgatctggatggctgtgacagcaggtcataatataatttcacactcatattttctgttctgcactatatgaaataaaaatgacttctcgtgtattcttaatttaaatattttatgaatactcgttcagatagtgtcagttcaaagttcaatagtacaataaaatgtacaagggaacttaaatctatta

SEQ ID NO: 9064 - DNA, 912 bp, Diabrotica virgifera
acatgttaaaaaacagtccaagaacttgtctaatttttgttgttttagggccttgcttatattatgatgtgcaatgacagtttttttatctttggatatctgtatatgcttggcataaatttatttacttaggtatacagggtgtttcattaataattggaaatattttaactgtagatttctgggctcaaatcacttggtccgaaaatgcttcctaggggagctggagttctttgaagatgccgtcttgtaattagtttttttaaatacctccagaacgcttctatttagaagaacgaaaactggtacacttatttatgttccagagataaataaattccataaatttccaatttctagtaccggtcataagcgtcccttttgtgtagagcaacggttattttatcgcataacttttatgtctttaactttttaagcattcttgacaaatgattattaaattgtgaggtactctggtactaaaagatactcttgcttcaagtcggtaggatccaccgttttctagaaaaatcgatttgaaaatttttcgtttttttgaatttgaaaaaaattttcaaaacaaaaaattaattacaagacaccatcttcaaagagctgtagttctgctagggagcattttcggactaggtgatttggatcaaacctcaatattttgagctcaataatctacagttaaaaactttttaattattaatgaaacaccgtgtatatatttttttaagagatctgccataatgactgcttagtttataaaatgaatatatgtattgctagtttttatgctattcttattaatttattgtttcttttaattattagtataatagtatatatttttatatcgactgtatattgtatattatttaataaaattgcgtttaaaatttaaaa

SEQ ID NO: 9065 - DNA, 911 bp, Diabrotica virgifera
  SmartBlast Evalue=6E-97; Info=Bystin n=1 Tax=Harpegnathos saltator RepID=E2B315_9HYME
gcagttaccactttccaataaaggcaacaaaatacctttcataaaagctcctggtttgaacaaagactttcgtagtgcttggtataggtgaaagttcaatcttttatattccattaaatcatcccttatccttggtaggagaactaggttgtaaaacctctgagccatattttctttcaaatttgatgcaaaaattctagtagcttggtacattgcagctgctgaccacgttggtgggtctgtaatgtacaatatttgctcccaatttttcaatttgggtattatcttaaatgcttttggtagttttccacttctatattttctgagaacatccctgacaccttcatacatctgtttaactttcacatccagatcttgaacctgcattgaaccagcatcactgaagtgagtgtctaattcagtttgtttttcagtaattttttccataataatgtcagctagagttctacgtggcaaaggatttttgctcatgaacatatcgattgctttttcatcatcttcattaatttcaatattttcgtaatatgcatcgtcaacagtgtcatcttctgcttcatcagattcgtctgaatccatggcatctaagcttacaaatttattttttgactgctggggtgtgttttcttctagttctctttgctgggaacgagcagctgatagaattttcctggataaatttgcatccacatattgttcttcttcatcttttctaagacgtattttatttctatttttacttttagcaaattttgtattttgaatatcttgttctaaaggtacatttttctgaggaggatttgatttttgctttactttgcccatattttaagctatgttctagatatttttttataattaactattaacctatgttatggtaaacacacgtg

SEQ ID NO: 9066 - DNA, 909 bp, Diabrotica virgifera
  SmartBlast Evalue=3E-49; Info=Sugar transporter ERD6-like 4 n=1 Tax=Camponotus floridanus RepID=E2ADD9_9HYME
tataagtatctttaatacatcatagaatgttatgccatctcttgcaatattttggtttcttcgcttattgaaacttttttctttccgaaatattcctcaatttcttgcaaacttttacctttggtctctggcaacaagaaaaacacgaaaatagttccaagaagtgcaattactccatagaagcaaaatactcctgatcttccaaggctttgaaccatgtcgggatagattttaacagctataaaattaaagaagtagcccatacctgaaataataccagctgcagttcctctgacttttgtaggaaagagttctgcagctaaagcgaaaggaagaggaagaaaaccaatagaatttgtaacaaaatacacaagtaaacaaattaatggcaaaaaggtcaggctatatccacttaatgaaccattgtccttaagtttaatataaagtgctagtggaagtaaacaggatgctataccaagtcctgagaataaagacaatggccttcttccgaaacgtttagctaagaaactgggtaaaatagcactgattaaacgtacgacaccaattacgacaatagtaatgtaaggatcgaatgttatgccagcattattaacgatatctatagcgtaaaagatgataacaaatataccactgaattgttggaagaagaagtaggttagaaccaaaatcatcggccttaaacaatgaggttgcattagatattccaacttgcttaaaattttcctatacattggcttttctgatttcatgttcgacactcctttgcattttattaaatggtccagctctgcttgtacatcaggagttagtccagtattgaaaattctgcacaaactagatcttgcttcctccgttcgatatcttcctaccagccacgttggtgattct

SEQ ID NO: 9067 - DNA, 912 bp, Diabrotica virgifera
  SmartBlast Evalue=3E-52; Info=Transmembrane protein 63A n=1 Tax= Culex quinquefasciatus RepID=B0WVM3_CULQU
ctcttcttgtattgaataataatcaagggcattgacagttttacaagggcaacaagctatacaccctttaggttgaatcttaatctcgtttttaggtgcattacttaaacagtacattcttgcttcatgaatttttctctttgcctctctaagattgtcagtttcttaactttgtaagctatttttacatcttctattccagggtatctaacactaaaataatttttgatatcttcgcagaatctatgttgttttgaaatatttgttaccattaatgtccttgatgacaatttcgatgcacttggttgttgtcctgaacattttctcataatgaaaatcattagtggcaccacagctatcgatccagtaatgtgaacccataaccatttggagtcagatggtaaattactaatagtagtgtgtccaaatgtagtcttatctccttgtaaagttccttgaaaattaacgggaagcaccactccaattgaaaatacagtgattactaacattagaataagtaactgcctttgaaaagataaataatgggaagcatctggtccacatcttgataaaatctggtctcgattgattttaaatatggaaggaaaccataaacagccagtatcaggtatcaacgacacctcatgatttgattcttctacagcaactgcatcatctgtattcttgtaaaataattgagtccatttttcagtatgtaccaatgccagtcttccataatcccaagctctattcctcaaaatggcaaatagcagaataagtagcagccatgacacaacattcagtactaaagtctctggaattccttcatacacattactaataattttattagattttttgttaattaaacaagtgtcattatctattattagaacggaaacatctataggg

SEQ ID NO: 9068 - DNA, 911 bp, Diabrotica virgifera
  SmartBlast Evalue=7E-85; Info=Proteasome subunit beta type-4 n= 1 Tax=Camponotus floridanus RepID=E2AWR1_9HYME
atcaaaaatttattcacacagacttccatgaatgtataatatagtttcaatacaaaataaacgaaattaagaaaaattatgtcatatgggcaatgctccagttctcttcgactgaaataggcccctcaatactaacaccatcatctttatcaataacaccaagctgatatttaggaaaacttctggcatctctatagaacaatacttccatgcatttgtgaatcagagttttggcatcggccaagttaagagctccatttttatctaaagagtctctcagaagaggcaaggctatgtgggctccataacctgtacatataactttgtctgtatatgcagttcccaatttatctacggttccaagaaaggggactccatcctggattcctcctataaccagattattccaaaaagggtctaatttactcctgcgttggtacattactctagtaagccagcagtacaatgattttggtttcatttttagtccatcatcaatgcattcttcatcaattattttttgctcaatgaaactcttgacgtattggaaatcagcatagtctcctccggctcccaagatgatattctgattgactttaataaccctcgggcaatttctgtacctagctaaagatccgtatgaagcaaccagatctccggctatcaatactcctttatcgtaagtaatagctaatacagaagttgatgttgtaacgggagactgtgtatgtgttatagggttggaatagctggtctgtttgccgggaaaattgtaaaattctccaggtacggggccgttatgccacaaaggaggagcagcagaattaaacattttctatttaatacaacaaactgtaatcaaagaatctctaacttcagaaaattcaacgatgacttgtttaagttttcag

SEQ ID NO: 9069 - DNA, 908 bp, Diabrotica virgifera
  SmartBlast Evalue=4E-22; Info=Endonuclease-reverse transcriptase n=1 Tax=Bombyx mori RepID=D5LB38_BOMMO
atataccagcggttctcaatctgtggtacatctaccactggtggtacatatcattatttacggtggtacaaaaaaattaaaattgtagtacttactaagtcttaataacacagtttccaaaaatataggtggtaccaaaaataataaagggcactgtaggtggtacatgcctcaaaaagattgagatccgctggtatatactaaacatttcgcagatatatcctgatgctcctatagcctaagcaatatttaaagtatttggtgcactccattattagagttttgtgatcactacatcaaaatcttccctattttgctccgctcttagtaattgttgaatgttcgtacccatacaagctctgatattgagaaaccatgttagtgttcatctgtctacttctcttcagaattatatcttcccttcaattattcatagcaggttatatttataatttctaattatatcgtttttatagattctaactctctgtttatagtttttaatactgtttgattcgttatgtgttatgtctctgtttatagtttttaatactgtttgattcgttatgtgttttgtccataatattctaagctttctactttaaagccacatttcaacaaaaggttctaaccatctcatggtatttaattttaatgtccaggcttcaactctatacagaaggactgaccaaatgtagcattcaataactctaattcggatgtctaagcttagttttcggttatagagaatttgcttccatttattatacatgttcctgttatattcatgtttttatttctatatcttgatccccttaccgtttagtactatccctaagtatctaaatttgtgaacttgttctaactgggtgttacttagattcaatacgacagtttccattggtatt

SEQ ID NO: 9070 - DNA, 910 bp, Diabrotica virgifera
gaaaatgataatgatgcggcaattctgtggaaacctcttgaaggaggaatgcttatattttcaaaatgtttaaaaaatcaataaaaagtcatgaagtaggatcatttttggcttctaaacagtttgaatagttttgttggtattgactgtagagtagatctactttgggatttcaaaagctggtatttttgcacgaattttcaaaagagaaactttttgcgtaggttaattgcggtcaaagttagccatttttattatttaatccacagttacttctgtgtacatacaattctcctgtaacagtgctagttaccatactcctccgaaacggcttgaccgatttttatgagattttacacatatatcctgtaggactaagaataggttttaacctatttttcatacccataagttgtaaggggggttgccccctgagattttttttttattttttggacaaaattgtctatcttaattttgtattatgtagcattaaaaaatacatgcaacccttaattttcactcttctatctccaaccagtattttttaatagccatctatatatttacatctataaaattttcctgtcgcagtgttagttgccatactcctccgagactgcttgaccgatttttatgaaattatatatgtatattcggtaggtcttagaatcggtcgtaatcgatttttcatatccccaagtgataagggggttccccctaacattttgtaatgtttggtaggggtatgtatacataacgtactctaaaggactacgagtacatgcaaattaaaaaattatgatcaaaatccatcaacaacctccggagatattaatcgcagtatatgtttgaagaatcaatttcattttttgagtgcacggattttaatatttcccctccaccgacc

SEQ ID NO: 9071 - DNA, 906 bp, Diabrotica virgifera
  SmartBlast Evalue=7E-82; Info=Ras-related protein M-Ras n=3 Tax= Aculeata RepID=E1ZYJ0_9HYME
ctcctatgttcatttcttaattttatttaatttcaagcacaagaaatcctgtaaacaaagttataatcattattttgattatgcacagacaatgcggatgatattttgtctttgttaaacattagctcacaataggtagcagaagtaggaagttcagttccagaggcgttatgacgagaccaccaaatgagaatttaccaaccgtcaaattggtagtagttggagatggaggtgttggtaaaagtgccatcaccattcaatttttccagaagctttttgttactgactatgatcctactatagaagacagttacctgcagcatgtcgaagttgatggacagtggtgcatgctggatgtgctcgatactgcaggacaagaggaattcagtgcaatgagagaacagtacatgagaaaaggagatggatttttattggtttattcagtgactgataaaaacagctatgaaaatatcacacattttcatacccaaattttacgtgtcaaagatagggacacctaccccatgttactagttgccaataaggtagatcttgtacatttaagaaaagtgactgaagaacaaggaagggatttagctcacaggctaggaatcccctacatcgagaccagtgctaaagatccacctcttaatatagacgctacttttcacgaggtagtaagaattatacgaaatcaaccccaaaatgaaaacgacaaacgaaaaaagaagaaactccagaagttgggcaagtgcatattattataagtatctgttgatttttgagagctttttatcttatttttaggatataaatatataagctttaatgttatacaaatgttcaatgttgaatgtattgtaacagaacgtttttttattaaccgcaactaaagtgttttttaga

SEQ ID NO: 9072 - DNA, 910 bp, Diabrotica virgifera
  SmartBlast Evalue=6E-60; Info=Gamma-secretase subunit Aph-1 n=5 Tax=melanogaster subgroup RepID=APH1_DROME
cggaaataaaatgtaataaatacattagtagtttaaatatttattaataacatatctttctaaacaatagccttaaaattaagcccgtttactaatgaagcaactgtcccaccagcaactttaaaagctgcacaccctgtaaacatgagtattacatacaaagttgtaattgatccccaatattcataatgactatttaacaacgttaaataggaggcgactaaatgtgaaattacgacataccccaaatgtaagtaattccgattatcacatgcataaaagaatatcacactccaaaacgtatgcagtaaaataaaacataaacctattaatgaactagttatgaagaacgtttctttgccagctttcaaacccattgtccctggtccaactgcatctgctagaacgttaactaatgaaaaggcaccactcataattccaaatcctaagccactgacatatgctaatatgtgtttgttttcaattaaagttgtgctattgtcagtgattttcttcaagccattttcagcttttctcaatattttgtaaattgcaaatctaaaaccttcttggaacaagacagtataaaatatagcaaattccagatgtgtttttaatggtattgcagaccaaataattgatgataacagtaaagacaccaaccagaagaatgctgcagctatgaggattattattcttattggatcatgggcgattgtaaaaataaacattgcaaaggggggcccgaaggccatgaatgtgcatccaaaaaattcggcaacggtcattttggtttctttaatgatttttgttacttcacaaatacattttcagtaaatcaatctattgtttaattttagacaattattataagaacaaaaataaagaagtgatatatcgattctacaac

SEQ ID NO: 9073 - DNA, 908 bp, Diabrotica virgifera
  SmartBlast Evalue=3E-76; Info=Zinc finger protein GLIS2-like protein (Fragment) n=1 Tax=Camponotus floridanus RepID=E2AEP4_ 9HYME
ctcgtcggagtaataacgttccttatatcatttttagtatagtgtttattcagtttagttaaaaatgtttttatcgcattacagaatggtagagggtcaacccctacaatattacaacccctacgttgtggaagataccgaccagtattcatattttcgaagatttagaacttacaccaccatgtcagagctttcggatgaaactttgccacctgcatcaccagctagcacacagagcgacagtgaaaactcagtgtcaagtgtagagattcctcacaaggaactacgtctgtccagccacataatcaaatcctcacaactatcaaccgatgtgcagtgccaatggaggtcttgcggaataatgttttcatctttggaccaactagcatctcacgtctcaaaagttcactctgccagtgggttgggaggattattctactgtggatgggaaggatgcgttagaaacaataaaggatttaatgcaagatataagatgctcgttcacgtccgcacccatacaaacgaaaagccccacaagtgtttccaatgtgacaaatccttctccagagcagaaaacctgaaaatccattcacggtcgcacagcggagaaaaaccatacgtatgtccagtaccaggatgtaacaaagcctactcgaattccagtgacagattcaagcacaccagaactcatcaggtggataagccatatcagtgcaaaatccccggctgtccgaaacgatatacggatccaagtagtttaagaaagcacgttaaaacatataaacattttgttaatgaaaaccaaaaaactgaaagtaaaaagactgtagaacaaatcgtaaatgaaaatagagtagaggacagactgcctagcctagatccaatgttccgagagaatgttatcaggc

SEQ ID NO: 9074 - DNA, 905 bp, Diabrotica virgifera
  SmartBlast Evalue=6E-56; Info=Conserved oligomeric Golgi complex subunit 5 n=1 Tax=Harpegnathos saltator RepID=E2BTS7_ 9HYME
tttaagtgagcagattggaaaaaatgtatcgaaatgcataaaaatgtttgctgttaagactgaacaacaactagagactggtccggaggcagcgcaagttataggaggtacacctaatatgggacaacagaaaaacgtaaatctcgctaactccttgtattattttcaacttcaaactcaacgaatgttatcaaacatgaaagacagcttaacggatccctgtaaaaatattatcactgacagtttgcaaagtttacataatttagtggctgccatcctacaacctcttgccgtgagcattaattccgtcatagaaacaataatagtaacactgcacttggaagcagattggaccaaagtacaaattccgcataaaatatctagtagctgctccctctacatgaaagagttgaatcaatttatatcaagagtttatcaaacctatctcgatggttttaaaaacaaagaagtgttagcttcgaaatgtaatgaaatcgctgtaaggactatcgaactgttcatcagacatgtatctttgctgcgacctttagccaaaggggggcgcgtacgccttcaagcagatttccagcatttagagaatgcgctaaaaataatttgtccccatttggccgatctaggtcggccgtatcgtctactgaagtcagttgcgtctgtgatagttttaagccccgaagaaattgtagcgggtcaaacgcctgatagttctatacctcacagcacaattctgttaatgttatttgcttttgctggtctcgacctagccagccctcatcagaatacaagttggtctctgccgaagatttcagcgtggctggatgaacatcaagacgaaggtgaaagacttgatttgatcgctggagctttgcaaaaatatgaaagtttag

SEQ ID NO: 9075 - DNA, 906 bp, Diabrotica virgifera
  SmartBlast Evalue=7E-88; Info=Meiotic recombination 11 n=1 Tax= Tribolium castaneum RepID=D6WQZ5_TRICA
gcctggttgagatataaaaacatcattaagtttcctctctggctctattctacaatcgtgttcatgtccccaaattactagatttaaaaaaatctggaagacaatcatcaggtataaaattctttgatcctcttgtggctcggttctgatgccaaaccagcaaatgaaaccaatcgtctttgtcctttggggacaacatttctactttttggtctataaacaatcttcctaatctttcatctctaatatgggaaagtccatacagagctaatttagattttcctttctggagtagaataggagttatgtctactttatctaagttttcccatctgccaaagtaattaacaagtccagaagttgatattatatctagagctgatatatgtttcttgcctgtaggatcatcatgattgccatgtatagaaaatacaggaagagaaacattcaaatttggatcttcataattaacggtctcatttgcatgttgggtaaaattttgcgaaggattcgataaaaattctatggatacaggcctatctcccaagcaatatttttcatgagctccaagcatttttggatgcaatatggactaggttgtgcgtggtgaaacaaatcaccacctaacagaataaaatctacttcatttttaacggcatgctgaagtatttcttcgaaagtatcgaatgtatcatgtcctcttaccgggttttcttctgcgtaacccaaatgtatatccgttgctactaatattttaaacacatcatcatcagatatgttattttgactactatcctgatcctgggtactcattacgtatgagcccatgggtttttcttaattaatctttttaatttccttgaataaaatcaaaacgcaaatataaaaaataaaaatacacaaatt

SEQ ID NO: 9076 - DNA, 910 bp, Diabrotica virgifera
  SmartBlast Evalue=9E-45; Info=Chymotrypsin-like proteinase 6A n= 1 Tax=Tribolium castaneum RepID=D0R8R1_TRICA
tataaatgacgttttttattatattttattaaaattaataaattattaaacttcatttggataggaagggcaataatcaccatgaaaaattccatgtttcttttgttactttttacattctatatagttgaaggttctccactttcatcttatagaatatttggaggacaagacgcaaaagaagggcagtttccataccaggtatcactgcaaagagatgattggccttttggctaccaacacttttgtggtggctctatcatttctgcaaactgggtggttactgcaggacattgttgctggtctatgtatcctaatcttcatatagtcgccggaatattaaaagtacatgaacaaagcaataacacacaagttagattagttaaggaacactacatacatgaaaattattcttatggtgtgcaaccaaacgatatctgcgtaattaaagtaaacgaatcctgggtttttaatgaccacgttaaaccagtagcacttcccatccaggatttcaatgttacaggaaaggcagtagcatctggttggggacaatcaggaggaaatttatttccacagttccctgatgtattacaatggcaagaatctgaaatacccgatgaagaaacttgtttggaattatgtaaaaaggttgaaagtattgctccatacaataccacatcaaacgtatgtactgcaaatcctgagaaaaatcatggtatatgtcaaggagactctggtggtcctttagtcctagatgaacaactggttggactatcttcttgggtattcctaccatgcggcaaagaaggagctccatcagtatttacaagggtgagtcattttgttgactggatcaagaaacacgacagtgaattgtaataccgatattaaataaaaataattccactcc

SEQ ID NO: 9077 - DNA, 909 bp, Diabrotica virgifera
ctttttcttatctgaaaaatacaatgtcattattgaccaaaaattttttagaaaaaggtcacacgcaaatggagtgtgattcagtgcacagctctattgagacagtcctaaaaatagggaaatttatcttcctaatgactatttaaggttaacaaaggaagctaggcataaaaatccatttacagtagtaaattttgattacaccttttccaaaattttggcgacgaaaatgttatgaaatataactctattagacctagtaaattagttggtggtaatacagttacagatattcgtgttttaagatatactattggaacaatattgtttaaaatcaattttgaagattcctttgaagaaatcccaactagaccaaaaaaatgttgatttttctattattaaatttcccccattgtttcaaaatagaccagcaatttcaaaacaaagtatgaacacctacaaataatcaactcagttattcctaaagactgttggtctttttatgatttgttgccgtataagtcttaatcttaattaatgttcataatattagtactagtgcatgatttgttcctcattgccataattttaggattttgttaccttgttttttagattttaacaatcagaataaactaatattaatttgctttttttccttttctgttttatgtagttttatttaggtaagtatgtatttatctatttattattaaataaatacaaattaaagaaatcaatattacctcgtatgtgacagacaaacacagacattacctcgtaagtgacttaatttttttttaaattttgcttcacacttttttttattttacttacaaaatcaggaagtttaaaatacaataaatctaaaagatttcaaaaagaaactacatcttatcaactcttaaa

SEQ ID NO: 9078 - DNA, 908 bp, Diabrotica virgifera
  SmartBlast Evalue=1E-157; Info="116 kDa U5 small nuclear ribonucleoprotein component, putative n=1 Tax=Pediculus humanus corporis RepID=E0VZ81_PEDHC"
gattgtacattttccaagttcttggaagggtcatgagtggtactttacatgcaggtacagacgttcgcatactgggagaaaactataccatacaagatgaagaagattctaggatattaacagtgggtcgtttatggatttatgaatcaaggtacaaagtggaattgaatcgagtgccagcgggtaattgggttctcatagagggaatagatcaatctatagtcaagacagccacaataacggacttatcagtagctgaagacctgtatatattcagacccttaaaattcaatacacaaagcattattaaaatcgccgtagaaccagtaaatccatcagagctaccaaagatgttagacggtctccgaaaagttaataaatcctatccacttttaacgacaagagtagaggaaagcggtgaacatgtggtattgggcacgggagagctatatctagattgtgtaatgcacgatttgagaaaaatgtattctgaaattgatatcaaagttgctgatcctgtagtagcgttttgcgagactgtagtagaaacctcaagtttaaaatgtttcgctgaaactccgaacaaaaagaacaagttgacgatgatagctgaacctttagagaagggtcttgcagaggatatagaaaatgaaaacgttcagataggctggaataaaaagaaacttggtgaattctttcaaacaaagtacgattgggatttgcttgctgctagaagtatttgggcatttggtcctgataacacaggacccaacattctcgttgatgatacacttccatctgaagtagacaaaggtctccttagttctgtcaaagattccatcgtgcaaggatttcagtggggaactagagaagggcctctttgtgaagaaccgatcagaaataccaaa

SEQ ID NO: 9079 - DNA, 909 bp, Diabrotica virgifera
  SmartBlast Evalue=2E-29; Info=Protein FAM175B n=1 Tax= Camponotus floridanus RepID=E2AB17_9HYME
ttgcattattagatgttagagaattatctaaatgatcacctgaacaagcgttagaagaatccaaggtttcactattcttctttttcacctttttataaatctcctgctggctaacctccttttccagttcataaagatatctttcagattcagctaaatcagtcaccaatgtatcgatatgcttctgcaatgcattctgtatcttattaataataaccagtccttgggtgtttctcttatcgatttttatatcacctaatatcttcttaaaagtctcggaagatgtttcagaacttttatacatattattggactcacttagatttggtatgactataggtatattatcacatcctaagctattacaacgaacgaatatttgtgaaaaaaggtgagtagccgcgttgtctgatggttctgtggttagcaaacaacaagtaaacatttctgcactaatatcgaataattctagaagttgcctgtgtattattttgtctctaagcgttagttttgtattggggcatttttgatacttataccaagccacgaccttgctgaattgatttcctaaaaactctctaactttgtctttgttgatttttccagtgccattataaatatagtggctttgaggaaatggcaccacagagttgattttgattattttgcttatattaacctgttgttgatcgctatctgttatcgttttggtctccttcttgatgatttctccaagtaaaaatccttcctgatgaaatcgcgatttggtattttcgtagagcaaaaatgaaaaggctgggcctgaaagtgatacagaggtaggtgtatacatcttttagcaaagtattaaaattccattaaacaaaaatactccaacatttacaagtgagtaaaaaacataagcaaaaa

SEQ ID NO: 9080 - DNA, 908 bp, Diabrotica virgifera
  SmartBlast Evalue=1E-111; Info=Mitochondrial oxodicarboxylate carrier n=3 Tax=Culicidae RepID=B0X2G4_CULQU
tgtataatgcaccccttagatttggtaaaaactaggcttcaaatacagtctagaactatggaccgcaatgaccccagatactataaaggcattatagactgcttcggaaaaatgtataagcacgaagggatgttttccttctggaaaggcatagtgccccccattttagccgaaaccccaaagagagcagttaaattttttacctttgaacaatacaaacagttctttatgtttggatctgctaccccaaccccacttaccttttccttggcaggattgggagccggagccactgaggccgttcttgtcaacccctttgaagtagtgaaggtgtctctacaatccaacaaagctaaatccagtgaagtccctagcacttgggctgtaacgagagtcattatacaggaaaatgggttcggtttgaggggtttaaacaaaggacttacggctactgttgcgagaaattccatatttaatatgttttatttcggattttatcattctgtgaaggggatggtgccagaatatgaaaatccttacacagaattcttcaagaagattggactcggcttcatttcgggcagtgtagcgtcgtgtttaaatattccattcgacgtggcaaaatccagaatccaaggacctcaaccagtggttggtgaaatcaaatacagaacaacgctcaactccatggccattgtgtatcgagaggaaggattggctgccctatacaaaggccttcttccaaaagttctcaggttgggaccaggcggtgctatcatgctcgttgtttacgagtactcacacaaatatctgaccgaagtgttcaagtaatcgccgattctcattaaccaaagagtgatttgcatttagtttacataacaaattgctttctttattttgccataacc

SEQ ID NO: 9081 - DNA, 909 bp, Diabrotica virgifera
ttttatcttctaaattatacataatttgccagataaagtaagataaaaaatattttttatttaaattttaaaaaaattaagtcatttattgttgaacgaagccctaacaatgacaatcaaaatttgggctagaagtgaagatggtactatagattatatctctctaacaaaagaatatgtaccaggagccctaaatgttcttagaaaatcgttttatcgcgaagaaagcgactgcctagcggcaggtgtggcaaacagcgaggatgctatgtgcgaagtggataattttatgactaatatggcaaaacatggagtttccattgtagcggtggagaggaaaacaaatactgtatgtggtgtcgcagtcaacgaaattcgagagatcaatacccatcccgtagtcacacattgtgtcgataaggcaaggcacacagctaccaaaagttttttgaaatatgtagaagaagcggacgatctcctcagcatttttgaaaattgcaaagtcgattgctacatagaattattttgcttatccatattaccagaatacagaagaagaggaattgctttgacattagcgaaagtaactgaagaactgactcgacaactatctcatgggaaacctgtgaaacagtcattagatgacagtgatctgcctttagaacccataccaaaaatgattgctgttatttttacaacccacggatccaagagactaggtgaaaaagttggatgggaaagtactcgtagtttaaaaatgagttttaccaaagacgatacagactgttttaatgttatgtttaaaaaaatgtctaacagtaaggtctaaacttatgctatcgttgtataaagagaaccacagcgaaattctacagttgtgttttaacgatattttttataataaacttc

SEQ ID NO: 9082 - DNA, 907 bp, Diabrotica virgifera
  SmartBlast Evalue=9E-95; Info=Rabconnectin (Fragment) n=1 Tax= Aedes aegypti RepID=Q176B5_AEDAE
tttaccagaagatggcctggtcaatttatctcaactagacccacaggcacaccatcccaagtttagaacacacaggcacaaacatcgatttatgcaacgactaaaacatatgaagacctgctttcacatacggcgtaacgcaaaagatcagggacatggtaaaggctatgcatctccacttataccaacgttaccctctacgtatagcgttcacgattttcattcctatggatatcatggaacgggtataactcctggtctacattttcatctggctgcatcggtgaacgcagaaacagacataccacttgttccaagcattaactactgcagtccaaaaccggcgtttgttcttcactggctggacaacaaagaaatgcaattcagtctgcaagcagaattgtttttagaagaattcgccagacctgtagtagataatccagattcagaagagtccgaagaacctgcgatggaatctggtggatcagacggtgttgatgtaagaatcgaaagtttccttagagattggcatcacagtcctgacttgttatttagtattcatccagttgatggaagctttctaatttgggtggtagaatggttggacgaatttcatcctggttcattcagacaagctcaagtatcattttctactcgcataccatctgctttcccactgggtgactctatgagcatgtcaacgactgtcagtctctataatactacacctctgcttaaacatctggtcaaggatgccattcataaagatgttatttatgataggaatctgtcgagtgtaaaggaagaagacgaaaataagtcgcaaaaagatgttttaatagcacctccagaagatcaaaacgaagccacccctgtagtttcattagtaacgaaacacgacaacggc

SEQ ID NO: 9083 - DNA, 908 bp, Diabrotica virgifera
  SmartBlast Evalue=1E-43; Info=HEAT repeat-containing protein 1 n=1 Tax=Camponotus floridanus RepID=E2AQS9_9HYME
aaagactttagacattacaaatatgtgttggtaaaatccactggtaatctcttaggttttccagagtttgtaaatcaagttgcttcccttagcgatgaagatgaacttaacctggaacctctgttcaaagagatgatcgtcaacacgcttcaatatatacaaagaatatcgaaagtttgcgacaaagcttcaaatacaccacaagcgcattactggaaagttttattgcatttgagttacgatattttggacagtgttaacgctcttctaacaccacagatgttcctactggttactaaaggcctgatgatacacacattgtcgactgttagaagaagagttttggaattgttaaataataaattacagcatagttcacaattttttgaagaatgtagtaaaaacgagttatattcgttaattcgacctatcatagcaataatacaaggtctagatgaagaagtcgacgccgagcaggaaataatcatacaaacagctttattgtctttaaaactactagttaaacttctcgcacggcaagaacctgaaaaatttgttcaaatcatagacttcatcacgggggtgttaaaatccggtaaagctcagaataacttgcttgcatcggtggttctttgtctggctgagctatgtattcatctcaaaggacacgctattgcaagcttgccagatttcatgcctatacttattaaaattttgaaacagcagaaacacgcagaaatatctagcgttttattaaagagtttgattacaaccattgaaaagattttggacagcatgcccttgtttttgagtccttatttagagaaactgttagttgaagtctcccagttgatgtcgaagtggaatataaataaagacgaacaaaaggtgcaacaactgtcaactaa

SEQ ID NO: 9084 - DNA, 905 bp, Diabrotica virgifera
tggtggtgtagttttatttatagtacctacctttattatagaaataagagaaatagtcttccatcgatcatagtaatggatatagaaagaacggcaagtcatgatctgaaatgcaccatatgcaagaattatcttaatatagcgcccgtactaacctcagacgatggcaaagtaaccaaatgtggcaggtgccaatacaccggaccaaatttaagcaacagaaacaccttgtacgagtcaataggatcaaagctacggtttccttgcatcaatgaagaatgtaaacacagactggcatggaacgacgtccagcgccacgaaagatcgtgccaataccgaaagatctcttgtccgttttggaactgcagagacaagaatatatcttttatcatatcaaacgacataagtcactttgagtcctgtcatccaggatcaatgcactatggaccaatcacacttaattataaagtcatcacccaccatcagtctttcataaaattactcattgtaaacgatattccctttttaatgtttattcattgtcttaaatttggcgaaactgccattcttgtaggcgttttttcctttgaccagaaacagcacgattatgaaataaaaattcgttctgattctgagtctagcagatacacagtatttagagaaaaagttcctctttacgatgaacagcaacattgcttgtattgtctgcagaatatttgtttccttgaaaaccacaagttttccaaaaagcatccagacaaccaaaatcaaaggtatgctttgtattcgaatattgatattctagcggccaagtccttacttcaggccgagaacttaatgttcgatattagtgtagtcgaacgtgaacatgaagaaaacgacagtattattataggaatagcgac

SEQ ID NO: 9085 - DNA, 910 bp, Diabrotica virgifera
  SmartBlast Evalue=7E-29; Info=Serine protease 13 n=1 Tax= Costelytra zealandica RepID=B0ZBP1_9SCAR
gttcatagttgttgattaaaaaaatttagaaggaaagtccaaaaatgaaggtttatgttttaatattatttttggttacattggttgcgttcggggtacaaggattgataggaggcaccctaatttatccacacagtttgccttatatggttttcctaaacgtttctggatcaacaaatacaactagatgttcgggagcccttatttccaaagattatatcttaacagcagctagatgtcttaaaaattcaaccgctgtacgggtagtacttggtgcagatgatataagtgtaaacgaagaaatgcaagtttcttttgatactacccaatctaattttataatacatgaaaattttgtcgacgaaaccctagaaaatgatattggattaataaagctaccaagttcagttgaaagtaatgagtatatacaagtaattcccatggctactgaggatcaagaagaggcacaattaggtgaactggttgtcgtatccggttggggtctcacatactatggttacccagaatctatggcaactgtaccaatggccgaatggttagtggtattaaacaatacaaacaaagaatgtcaacgctttggaaccttagttaaagatacgaacatctgctgcagtacgaccaactcttgggatggcccattgcaattgtgtgatggagattggggtgatccattggtaaatgatggcaaaaataaaacactgtatggtattgccagtttcacagcatatgaaagttgtgtaatgggaaaacctaatgtatttacgaatgtggccaaatacagtgaatggataagttctaatgcaaatatatgaaaatgttattttatataatctgattttgatttttgttaaaaataattaattttatttaaataaagtcttactctgtt

SEQ ID NO: 9086 - DNA, 907 bp, Diabrotica virgifera
  SmartBlast Evalue=2E-29; Info=ER lumen protein retaining receptor n=3 Tax=Aculeata RepID=E2AC11_9HYME
gttacttggaatttgaaacttcaaaacgaggtgttcagaacgtcaattgtgcggtagatgtgtatgattgctttcttgtgttatttattttgttccattccgatctaaaatgttgaactttgaaaaaataaatgtctttataagaattggtgattcgctgcacacttctgcaattctatatttattatgcagtatcataaaggaaaagtcatatgctggtatatctgccaagacgcagttcctctacgccgcagtatttatcaccagatatcttgactcattcatggtattcagatcatattacaacactttagtggaagtgactttggtgcttgtttcagtatgcacgtttttactatcgttcaaaatgaggagcacatacgaaagaaaatatgatttcttttggtccgaagttctggttgccggggcattgatattagcaatgttcgttaataacagtttagaagctattgaagtactcaggacattcagtcactacttagaggcagtagttttgattccgcagatgtacatgatgttccagagtaaaaaaattacccgccccatgattttgtatttattcttcttggttctgtacaaaataatgtacatttgcaacggtatctacctatacaacaagcacaaccagttcgatgctatatcagagatagctggttttgttaatgtcatgctattcttcattgctctggaaattatttggcgctgcagtaaaataacaagtcacgaatatgagcagaaggatgtgactaaatggaaaaatatattcttcatcagtggtggtcttacaaaacctgaaactgccaaaaaagatgctcctttgattactgaacaagtttaccagcctgtagtcgtataggacgttataaaatattaaagtgacttaagt

SEQ ID NO: 9087 - DNA, 906 bp, Diabrotica virgifera
  SmartBlast Evalue=1E-100; Info=Geranylgeranyl transferase type- 2 subunit beta n=1 Tax=Camponotus floridanus RepID=E2ARP0_9HYME
attttcaactttcaacaataaataaggaaagataagcaagcacacattagattcataatttagcaaagttattacaatatatatcaaaatggcaactttaacaaaagatgtaacactccaggaaaacattccaacacatatacttcttgacaagcacatagattttattaaagaatatggacaaaaagaaagtacatatgaatatggtatgaccgattatttgagaatatctggcatgtattggggacttacggctctagaacttatgaacgccactccagctcaaagtatagaagagatcacagaattcataaagaattgtcaggatccagaaagtggtggaattagtgcctgcctataccacgatccccatattttacatacacttagtgctgttcaaattctctgcatctacaataaattagaggcaataaacgtagagggtgttgttaaatatatcgcaagccttcagttacccgatggtagttttacaggagataaatggggtgaagttgatactaggttctcattttgtgcagttatgacattatcgttgcttaataaaatggatgcaattgatgtaaataaagccgtggactttgttttacaatgtaaaaactttgatgggggtttcggatctaggccactttctgaaagtcatgcagggttaatgtattgctgtgttggctttttatctatcacaaataggttagatgccattgatagagacacccttgcttggtggttatgtgaaagacaactaccatctggaggtttaaatggtagaccagaaaaattacctgatgtatgttactcatggtgggtgttatcatcattaaccatgttgggcaggcttcattggattgatgcgaatgtactttaaaaaactttattttggcttgtcaa

SEQ ID NO: 9088 - DNA, 903 bp, Diabrotica virgifera
  SmartBlast Evalue=1E-105; Info=Fmr protein (Fragment) n=1 Tax= Gryllus bimaculatus RepID=B5UB88_GRYBI
tcgacgcccacctctacctctaggtcctccgtaataacgtggcggtaggtcgtgaacgcgttcgtctgttgtgtccggcgtttgatgtctcgaaccagaattgtatctatcgccgcctcctcctctgccaccccttccgcggccgcctcgccctctcatcgaaccgcctctgccagatctactgttgccgtccatgtctgaattgtagcctcgatcgtttcggcgactcatagagaggctttgcattgaacctaagcttgaaccggtgatgctgcgcagttgctgatcgatttctaatttttcttgtctaagctgctctacttcctttaggtgtgctaaatgatactgcagaagtacttttgcattagatatactctctacagttcctacgaaaacaaaaggtacctgcccttcttcacgtggaatggtcggttgtggctcattgtcaccttcaattttaacccgtaccaccccgcttttgtcgacaatttcttggatgatcctgccattcttgcctataactttgccgaccaacgccctgggaacttggagagattcttcgctatattctaacatggatcgcgcctttttcacagcctcatcagtctcaccataaatttcaaacgtgcaagaattctcctctaattcaatattggtaattccatctacttttcgagcttgttgaatgttagcaccgtgcgctccgattgccaaacccattaaatcttctctaacgatgaactcatctgaataccctcctattgtcgccaatttggtactctccagttgacgggcagcttcttctgtacgttttaataagagcactttttgtgagaggcttctgaaatgcatgtcttgcagcatcgccgccaacttactgctttgctcacacctagacactac

SEQ ID NO: 9089 - DNA, 903 bp, Diabrotica virgifera
  SmartBlast Evalue=7E-34; Info=Endonuclease-reverse transcriptase n=1 Tax=Bombyx mori RepID=D7F170_BOMMO
gaaaacaacaaaaacagcatataaatttcaactgtctctctagttcaaccagaagatcgaaagaaatatttctctttttcgtaaccatacgatctaaaccgtgacaaggcatctcgtaacgcgacagttcgtaaccccataaatcgtaacggcgacagttcgtaactatacatattcgtaacggtacatttcgtaacggcaaaattggattgttttgtttatttttgttaacgtggaaattaaattttattacagttacaataattgaaattcttctttttctacggcgctacagtccaaattgagccttggcctcctttatattttgcctccacccttgtttgtctgtggttgctcttctccatacacggactcctaaaagggcttgtgcgtcgctgtttactgtgtcttcacaacgctttcttggctttccaatctttccctgcattctagcattcagtgctctttttggtagcctatcctctcccattcctatcacatgtccgtcccattgcaatctttgtattctaatgaagtctgacagggttgtttccttataaagttgataaagctcgttgttgtatcgacttctgaagatttcgttttccctcacaggtcctagtattctcctaagtactttcctttcgaatgtgtcgagtttgtttttggatatttctttcaagacccaggcttcactgccatagcatgttattggtcgaattaaagttttatagattctcatctttgtatttcggtggacacttttagaccgaaatatatgggagagggcaaataaggtctgtttgtctgcgttattctcttccgtatttctccatcttatagttatttacgaactgtcacccttacgaagtgtcgccgttacgaactgacgccgttacggat

SEQ ID NO: 9090 - DNA, 907 bp, Diabrotica virgifera
  SmartBlast Evalue=8E-14; Info=Peritrophic membrane protein 1 (Fragment) n=1 Tax=Holotrichia oblita RepID=C4N881_9SCAR
gtttaagtggtattatccggagtggataaatcacttacagttacaataaaacttatagattaactatagaaaaaatcagtgtgtaattgttcagcatataaataggtcgtttccatatagttttctcactttagttttgaaagtgaccaagtgatacacagtatgcattgttcaagtataatatttgtcgccgtcctgtttgttggcggtaccatcgcacaggatcctgattgtgaaaaacaacaatattggcctgatgtctacgactgtacaaaatactacgaatgtaatactcagggtgagaaggttgaaatgagttgtccatcaggtctttactggaaccccctgcttctgacttgtgatcgcccagaaaacgttgactgttcatggactgttggtcctacggagtccactgcacctccaacacctgctccaactactgcaaacccaactggaacaacaatacctccatggcttcgatgtgacgtaaacggcgaatattttccagatacaacgaattgtcaagcattttacgaatgtattaacaacgtaaaacagcatatgatctgccctgatcctcttttgtggaatgttcatttacctggatgtaccgagagctctgactgctcgcaaattgaaacatcaacaacacctgcttcctgcacaaacggtgatatgaaagctgatgttaatagctgtcattatttctatatttgtgaaagtaaccagtgggagggacctatccaatgtccagtagaactctactggagcgcatctaaaagagggtgtgtcaagattgaggattcggactgtcctggtcacacaacagttggttatcactagtgttgatattgtacgttccatgaataaataaaccttaataacataaaaaaaaatactgctagtc

SEQ ID NO: 9091 - DNA, 901 bp, Diabrotica virgifera
ttaatttgtcttgactaaattacggttctgttgatatccgagaacacttggtattcacacaatgttgccaaactgaattttgttacatcggtttaaattttctagtcgatttccgagcctactatacactccatggatatatcgcccatcgaaactctatgcagtgattcatgggcaattgtacttacctgtcttataaagatatgctcttagaattatccattactcattgcaaatgattaattttatcattaaatcgaaatctttaaagagactagccgatacgtgcatattaatacgttaaaactatttcacgataaaaaatatgcaaaagaaattgatatccgtttctatatctttttgtaagtacagctggttccaaaaaaaactgatacgactcttaagcgtattttgtagaaaattgagcagtgcactttcttcttcttcttctttttgtttttggtctcgctgcaaggcaattaccagcacgatttataggggatcttgatgtagtctggctctaagccatatcaaaatcgctgactatgttcttgtaaaaagctttggatgaggtgtgatataatgaatatgagtttaattatatttaatttattatattttgaaggataaatacttattatttacatactgtcactgtcactgccaaatcttaaaattggtcagataacttcaacctcaaaaaatggctgtttgtttgtttatttattatttgtctgtcataataaatataatataatgtcagaccaatcatacactgctcaaaatgatcaaatcttactaagagtcgtatcagtttttttaggaaccagctgtacagttacggtcattgaatagtttacaggcttacgtatctaggagccgttttttaaatttttacctc

SEQ ID NO: 9092 - DNA, 906 bp, Diabrotica virgifera
ttggattttgtgacatcccatttgaaaattgctgcaaatccttaattttttagaaagatgaaggcattaagaatgcccgatttataatagagtagttaatttatgaatagagttttggcaatttttgaatcggtctgagaagtcgtgtttgaaaattgcgactgagtttgtacgatagttattttactgctgagtcatttgaatgttcggggaggtaatattacttgaaaatgattaccaaaaactaaaagttggcataaatgacaattgagtacagaccaaaaaattagtaaaatcaacatttggtaagaaaatacatggaaaaaacattgtatattagttgtttgtatgtagttctcatttgttcgagaactataaagtaaagatattgttacgattccactcgataatggtaatgataatctcacattttgaaaacaaaaaacaactaatatatgataaattctatgtctattttcattttaaacatcaaggctaacttaagtaatgctgtgtgtagacaatgtacatattttatagaatctttttatttgaaacctttctgttgtattttgatgtcataataagcataaccactaaaaaactgtactaagaaactttttacaagcgataataatcataactaaaagcaacttttagttttgtgttaccaattttcacgatgatattacactgctcctaatttttgtttacaaaaaatttattgttacacgatacaaaaaaaggactgaactatgtgtaaagtagatatttttgatacagtatgttcctagtttgacaactaaaattgtattaaaaatatgtcttctgaacttatatctgtgttgggaaaatgcgcctgaatttaacaagtaattcgatgcaattggtactacacatctatga

SEQ ID NO: 9093 - DNA, 907 bp, Diabrotica virgifera
  SmartBlast Evalue=3E-65; Info=Retinol dehydrogenase 11 n=1 Tax= Camponotus floridanus RepID=E2AS80_9HYME
gtcaacgaggcgagagagttattgacgaatatcagcacagcagccgtatgaatgcagttttagtctactctgaaccaaaatgggaataatattcagtgcgaaatgtacatctaccaataggctcgatggaaaaacagctattataacaggagctaatactggaataggtaaagaaactgccaaggatttttacgagagaggtgccaaagtgatactagcatgtcgaaatttggaaaaagccaaagcagcagtagctgatatccaaaaacaatgtacagttaaatcaaatctaggcgaactcaaagttgtagaattagatttatgtagtttagaatctgttcgtaagtgtgcaaaggaattattagaatcagaagaacgaattaacttattaatcaataatgcgggggtgatgatgtgtccgtatagcaaaactaaggatggttttgagacgcaatttggtaccaaccatttggcacattttctttttactttactattattaccaaaaatatgcaaaagcatgccagctagaatagttaatgtatcgtctatagcacatacagcaccttttggacctatggacttcacggatttaaactttgagaaaagaaaatataaccctgttcatgcttatcaacaaagtaaactagcaaatattctttttaccaaggaattagccaggagactgacagaaaaggacataactgatgtccatgtctactccttacatcccggagttatacgtaccgaacttggccgacactatgattccatgtttccaggactaacctgggtgtacgacaatatcttcggactttttattaaaactccaactcagggtgcgcaacacaaatatactgcgcagtagacgacaattgcgcgagtgaaacaggactgtactatgcgg

SEQ ID NO: 9094 - DNA, 906 bp, Diabrotica virgifera
  SmartBlast Evalue=4E-28; Info=gamma-glutamyl cyclotransferase- like venom protein isoform 1 n=2 Tax=Nasonia vitripennis RepID= UPI0001A5CE84
ttcatattatatttcgctcatttaccagaacaacgtgacatttcaaaatatctgatttttgtattattcgttgaataaatccgccgtatttcattctatatactgaaaaaacgtggtatctttaccattaaagtaaactgagctttggagggacagagacagaaatgatgtgacaacccatcttgtagcgttgtttcttttggacacctcgttattttcgatagtgtgacatattagttgtgatctgtttggcgtagggtaaagtgctctctgttttcacaaacaacgtgacatcacgaccataccaccctgttattgcaaagtattggtagtctaatggcgacaaataaaagcctttactttggatatggaagcaatttgctggaaagacgaatgcaccggtctaatcctaatgctgttagatatggaaaaggtgtattgaaggattacacattagacatgggcacatatgggcacttttggaaaggctgtggtgcaaatatagtccaatcgcctggagacaaggtctggggagctctatggcagttgaaggatgaagattttgtgaatttagaccggcaagaaagcgtacataagaatgtttataaacgaataatagtacaaatagaaaccccagaaggccaaaaactaaatgctatagcatatcagaatgtaaaacaattcgaacggtttgatttgacgaacttaccgacagaaagacgacctagtccagcttacatggatgtcataatcaaaggagcccaagaaacaggcctgccaatagattacatcaactttttaaagactatttcgaccaatggcatcgatcatgttccaaacttagatccagaaaaataggataagtgtatattaactttaattgtaaagttgtttgtaaattgtaaa

SEQ ID NO: 9095 - DNA, 907 bp, Diabrotica virgifera
  SmartBlast Evalue=2E-96; Info=Protein ariadne-1 n=3 Tax= Aculeata RepID=E2B3Z6_9HYME
gtacaaaacaataattttggcatttattaatttacaaattcagacagtggagtggcataacttcaataatattttatccacatgatacaataaaacactatgaatatagacgatgacatgatttttgatgattcgggtaatgaaaccagtggagacgatgtagattttggtatcgacgctgattcaggttgcaacagcaaagaatttcaaagcttcgaggaagaatatcaatatgaggttctttctacagaagaaatagttaaacatatgattgattgcattaaggaggtcaatgtagtagttcaagtacctgcaacagttactagaattctcttaaattatttcaattgggacaaggagaagcttatggaaaagttctttgatggcaatcaggatgaattgtttaaggaagcacatgtcatcaacccctttaagaaggtcaatgtggttaagcgtagaattacaaaaaataacctaggttcagaagaatgtgatatatgttgtatgtttttatcacctggccagatgactggtttagagtgtggacatagattttgttacgagtgttggaatgagtatttaactactaagattatgggagaaggtatgggtaaaacaatagcatgtgctgcacacaattgtccaattttagttgatgatgaaacagttatgagattattaaaggactctagagtaaaactgaaataccagcatttgattactaatagttttgttgaatgcaatagactattaagatggtgtcccagtccggattgtagttatgctatcaaggtttcttacgtagattcaaaaccagtggcttgccgttgtggcaacgttttctgctttgcttgcggtgagagctggcacgatcccgtcaaatgtcttcttttgaggaaatggaaga

SEQ ID NO: 9096 - DNA, 905 bp, Diabrotica virgifera
tatgtagtgaggtagctatgaataactgttgtataatgtgttggtcactccgagaagtcaatacaggttcttacgaagcgcaacgatgccagttcgcagcctcagcatggaccgggttaaattcttgtatttaaaagccacctctggtgtccgtaccgattatgtcgccacgcggttcctttacttctcatttgaaaaacattgccatatacaagccgtactgacatctcagagtgataaacactatatgtagatgtttcaagattttacaaaatattgtaatggatcctgctttagtagattttttcctgtcaacagattcagcagaaaacacgggtactattatatgtgaaaactagaagtagtattatgtgatttatttcttcactatcctatgttttgttagtttaaatagttgagacaatctcaactgttcacacagtttcgtttcagtttcccaagttttttagacaagcgtattttttccgctcttaccatcaatgtttctgtctatagtaagagataatgtcagcttcatagccagatagtcagtcggttcattagactggcagattcacttcgaagtaattatcttaacaattgaagactacagaggaaaaacgctgtaagtcaatttttctcgattttttgatgaatacatttttcgatacttggatacacgtagtacaatccacaaatatcaaacaaaataaaagtgcaataagtcaaacgttagaaacgaataaaataatgctgtacaatggaagagcgctgcaagtcaaggttaaactaggcaacaatgctataagtcagagttaggtgctcaatgcgcctgtccgtagggacaatttacaacggaaatcacagtcagtgttcagcattcatacaattgtttatttagtatc

SEQ ID NO: 9097 - DNA, 903 bp, Diabrotica virgifera
  SmartBlast Evalue=6E-59; Info=Surfeit locus protein 1 n=1 Tax= Culex quinquefasciatus RepID=B0W849_CULQU
tagaaaaatggttgtcaaaatactgcaaatatttcctaaatattctaaaaacattcacaaatttggtattgtagccaattattcgatacaagcaaatacccttcatgtaaaaggaagccgtgacaaaaaaataggcccttttggttggtttcttctgattattcctgtttcaacattttcgttgggtgtttggcaagtacagaggaaaaagtggaaagaaggtcttctagctgagttacaagaaaaaacttccagtcaaccattgcaattacctgcaaatctggacgatttaagtgcacttgaatacaagccaatacacgtaaaaggacagtttcttcatgacaaagagttgtatatggggccccgttccgttttaaaaaagggggatgcttcaactaagagttcacttgtttctggaagtgcaggttctagccaagggtatttagtagtaacacctttgaagctggaaggtagagatgaaacaattcttgtgaatagaggatgggtgccaagtaaacaaaaagatcctaaaacgagagaaagaggtcaagtaaatggtgttgtagatgtcattggcgtagttaggacacatgagcctagacccaattttaccatgaaaaatatagagggaagcaatatttatttttatagggatttggatcacatggcagaagtgactggtgcctcgccaatatttttagatgccactaacgattttgatgtaccaaatggaccaatcggtgcacaaactagaatatctctgaggaatgagcacatgtcatatatattgacatggtttagtttgtgcggtgccactagttacatgtggattaagaagtttattaagtaaaatgtttttggttgttgatttgcagttagttgttaaaatataaatatgtatat

SEQ ID NO: 9098 - DNA, 905 bp, Diabrotica virgifera
  SmartBlast Evalue=2E-61; Info=Remodeling and spacing factor 1 n= 1 Tax=Camponotus floridanus RepID=E2AG14_9HYME
ctatacagtccctactttttaatgaaaaaatgtacatttaaaaatatatttacccagaatttctggtatttatttacctaaatagtgtctttataataatctaatagtgtaaaaagttaaaatatgtggtgttggattaacttaattattagttgtcgaaggtgaaccgctacaaatggcgtcggacattgaggcttcttgtgaaaatgatccgaattttgcagtgatttgtgcgtttttagagaaattcggtccgcaatgtggtctcccaaacttcgacttcctcgagttgcaagggatgctcgaaaacacagacgaagttcctcctcaactcattgatcttttgctgaagcttctgaaaagggtgaagaaagctgtgaagaatgacaagtgggagaaacacttagcagtagtatgtcatattttcaacaagcaggatgcatgggaaattgaaaggtttggatataagaaagcaaagctgacatcaaaagttcgcattctaaaggagttgctggagatgcagtttgactatcatgttaaatttaaaaacgacatcaacaaactctctgcagacgatttgagatcacaaccactgggcagagataaagctggacataactattggtttcaagctgatgataattaccaaatcagagtatacaaagaagacattgatgatgaaacttggagcctaatagcaaaagatagagagagtttggtgactcttatatcaaaattaggtgatggcgactataaagtcagttcagattctgcagtaaatgaagatagcaactcactatcagaaaaaccaacaatagatactggccagactgatgaggactctacaaaagtgaatagtaataaggaaagtatagaagaaaagaaagaagaaatcgctggggagc

SEQ ID NO: 9099 - DNA, 905 bp, Diabrotica virgifera
  SmartBlast Evalue=6E-43; Info=SAPK substrate protein 1 n=1 Tax= Harpegnathos saltator RepID=E2C0H7_9HYME
gggaaagcttagtaaatctctcagcggctggcttccagcggtgacgtctgacagctactgctggctcagctgtccagccgctgtggtcgtccgaacgcacccaacaaaatttttctatgtcgtcattcattgataaaaataattactggacaaaatctaattattggggttcccataaaacattatttttttattaaaaaattgctgcagaacttacagaaatgtctaacattgtggatagtttaacagaaatgggattcagtaggcaaagagcagaattagcagtaagtcaaactggtagcaataatcttgaacaagtaatggaatggctattgtctcacgaagaggatgaagccatgccagtaactacaaatcctccaaaagcaccagaagcagcttcagaagttgctagtgaaaatgataataatactcaatccaatgctgatactgctgtttctgaggaggttgaagctgtagctaaatcaattaaatgtgatgaatgtgggaaattgtttaaaaccaatgaagaagttgaatttcatgcttctaaatcaggtcatcaaagtttctctgaatctacagaagaaaaacgaccactaacagatgaagagaaaagggaacagcttgctaaaatagaggcaaaacttaagcagagaagattagagagggaagctaaagaaaaagaagaggccttactcagggagaaaaacagaataaagtctggaaaggatttgctagaagccaagagacggcatgaagaagtggaaatgaaaaagattattgatcaaaggaaaagagaaaaagaggaagaaagattggctaagcagagaattagggaacaaattgaacaggataaactagcacgcaaagccaaattctccaatcaaccagaacccgtgacacca

SEQ ID NO: 9100 - DNA, 899 bp, Diabrotica virgifera
gaatgtctgcgtctagctcgtgggaacagtgaagatgagtgcttttcatcagctggtgatctgtttaaggattcagcgcttacttggtacctcaataaccgaggtagttttacttcatggcaacagttagttgccaaactgaaatcagattttcttccttataactatgacgacaacttactggacgaaattaaatctcgtaaacaggctccccaggagaaagtcaccatctttatcaatgaagttgttagtttgtgtaaccgtctggaagttcctctttctgagtcccatatagtaagaattattaggaaaaatttgttgccgtcttatcatccgagtctggcactcactgacattctctcgattgctgatcttacagaaaaatgtaagaggttagaagaagttttgtcatggtcttctgaacctatatctagtgtcccaagtcggtcaaatttcagaaatcaggaatcaaccttttctgataggcaaaattattctcggtctggtaatatctctacttttaattcgaatattacctgttggaattgtcttcggtccaaacatcggtattttgaatgttctgaacctagaggtctgttttgttatgggtgtggatgtcaaggtgtacgcaagagtgaatgtgaattctgttcgggaaatgacaaaggggtgactcccactcctcatcaaaatacagggaacactctagaaaatcctcaagacctagaaatcagtttctcgagtcaggaggcccatgcctcaaccacccaaacatcccaacctccaccgaaagacaaaagaccacagaacggcagataccaaccgaaaagaggacgttagtcgaccatgtcctttgtgattcgtctgtagtttctccaagttaatcccttatcttccct

SEQ ID NO: 9101 - DNA, 903 bp, Diabrotica virgifera
attgtgttgggtttatgagtagcgtaagttttttttaatattaagaagctttgttaaaagtacaataattgagataataattgaaataaatataataaataataataaataataataataataaattaataatgaccccgtgtgcggtacgggctacgtagacgaatatatccacagaacctcctccttgtcgtaaaaggccgcttattggattaatatatataccggtacttaggcatcaacgcccttccggtaggaatctatgggagagtatcgctgagccgcaagctcttatttcttgccgtactgctccttcataggccgatcaaacgcccacatattccagtgtaagtttcagattcttattaattttatactgccgcgttagcctttttgtttttcgttcaccgggctggggatttaacgcgcattcatcacagtgaagtaatgtgcggccaatcactcgtcccgctgagctatccgatcgatacctttttgttataccctgtataagtggtcaaatatggtaaatattttaaaattgtattttaataattagtataattgtattttttaaaagtacatactcagcttgattctaacttaaatttgccaatttatgctctaatgtttcttatgctaacgttaaacaaaatacacttatcatgaaatctacgcttactatatgcctaagtgatgaactaaatggtgtgagttgtctgtacaacagtgtagtcgtgttgtctcggtcggctctttttgtgttcggcaattgtcctgccgagccttcatgtatatcttaatatgcgttctacaatgtacatataaattaaatacaatgataagacaaggttcacaacgtgccgtgtgtatgtgggataaaataatataatatggacattg

SEQ ID NO: 9102 - DNA, 896 bp, Diabrotica virgifera
cccacaattattagtgataattatacaacaattttttatatagagcccatgggacaggctacagatacatctttgttgtgttttgacacaattaaaaatgttcaatatcaatgccgtattaaatagtaatttaaataaatttaataattttccaaattgaatatctaaactttccattatattaaaagttgcaatgaaatattttttattttttacacaaataaaaattaaatatttataagagatcaagccacaattgcttgcaatcaaaaattatatttataataaataaatattgtttgacgtttctacttccacttctccaaaaatcgttttcaaaaatagtgatataacacctaattatttttttttaaataatcttttttgaaaactattttcagagtgtatgtcgaaatgtcaaacaataattataaaatgtaattctaactacaaacaattgtggctaatctcttataaacataacatttaacttaggtcatgccacaagaaaacaatttcagaaccattacaaatataaatgtcctacttttagataaaaaaacttattatataagatttatctttgaattttaattataatcctgaacacgataacgtctatttataatatgcattaaacaaatatctattagacaattgtagagaggataattcacaatgacagaaaaatatgagattatcattttgagattctacaaatgactaatacgtatggaatcattttccagagtcttaatttattccttcttcttcttgatgtgcctatccgtgatgaatgttggcgatcatcatggcaatcttcactttatctgcggcagcgcagaaaagttgcagatatgttgtgttaaaccaatttctgaggttctttaacctgg

SEQ ID NO: 9103 - DNA, 904 bp, Diabrotica virgifera
  SmartBlast Evalue=2E-69; Info=Carbonyl reductase [NADPH] 1 n=1 Tax=Harpegnathos saltator RepID=E2BU93_9HYME
ctgaccctgacataaccttatttttcaaccacttgttttgtttgattttgatggagtttgtttaatattttacacttttcttttgctttttaattaatgttttgaaaacttatattagtgtctatcagtcaaactaaagtaaagcttaaagtattatacctaccaataccatccctgggtataccaagagccaaaaatgagtttacaaaaagttgctgtggttacaggtggaaacaaaggcattggatacgctattgtcaaaggtctttgtgaaagattcaatggcactgtctatctcacttccagggatgtcaatagagggaaattagctgtagcccagctagacaaagaaaacaatctaaaacctgtgtttcatcagttggatatcaatgaccaaaacagtgttgactcgttcagggatttcataaaaaaggaacatggaggtttagatttgttgattaataatgcagctattgcttttaagtctgatgcaaccgaaccagtgggtgtgcaagcaagagaaactgtaagagtaaattattttggaacacttagagtttgtgaagctttgtttcctttgctgagaaacaatgcaaaagtggtaaatgtatctagttctgcaggacatttatttagaataccgtctgaagctcttagacaagaattttcaaaaagggatttgacagtacccgaacttactaagctgatggaaagatttgtgaaatcagctgaaaacgacaagacagtggaagaaggttggggaggttccacgtatgtagtgtcaaaagttggcgtatcggcattaacaaacattcaacagcgactattcgatgaagaaaagcctaatcgtaacatatccatcaattcagttcatcctggatatgtaaaaacagatatgacgtct

SEQ ID NO: 9104 - DNA, 905 bp, Diabrotica virgifera
tatatatcctgcacagtagttttaatcgaaaacagcctaaagttctttctaatattcttttataggaaattttgatttattacttatttaaaaagttgtgatacgtcatataagggacaatatgctgtgtggtttaatgcttggctatcaaaatggttataaatgttgtttattttttcgacgtggtcaaagaatgtcatgaaagaattctgcatcttttaattttaatccttcccaacaatcccaaatattgcttcccaatacaagatatcttactatccacacttcataacgtctttgtgtacaaacattaaagcatatgtatacgtatataatattctcctatccgctgtgagctcgtaggtagaggggatatttaaaagttcgtgagcgccagtagtgacaagtcagtgaacgtttgatggacatttgacataaaagtcaaagtgattgatttaaaacattgaaattaaaaacattaataggaaaaaatattagttggccaaaactgtggcatatacagtattgtccaaaataaacagtactgaacttgtaattattttagtgtttaaaaaaatacatattattaacatgctatataatatgtgctcctcctcgctcaagacagacttcataccgatggtctaagtttctcatcatgttatagaataagggttgtctcaggttcactaagagggctctgacggcacaaaaacggcaggtttagacatgtctcaaatgtatgcaactggagatgaggtctggagaatgtgtaggataagctaaattagtaaatcgtgaaatgaatctacttggaaaatctccctgaagaaattgacgaactgttcaaaagtatggcaagtgtcccgtcctgcaatattgatattatcggctgattccgtatg

SEQ ID NO: 9105 - DNA, 903 bp, Diabrotica virgifera
  misc_feature (23)..(23): n is a, c, g, or t
  SmartBlast Evalue=1E-102; Info="Talin-2, putative n=1 Tax= Pediculus humanus corporis RepID=E0W1B5_PEDHC"
ggtttactgttttaattctcatnatccccaaattgtatttggcattgaagcccggcaaattcgcaagccttgtcttgtgtaatcggatgagttccttgcaagatcgcatctctggcttgtacatacagcagatttaattgcacaggatctctcgagtcgatattctgatctgaatagaagaacttcctcctgagcaacaccgtttgcatttcatcgattccctgttcacgtaatgttttagagggatcgagccaattgacctcatcgtcagtgtgtagcttcttacgcaattgttccatttttgcgtctctttctctttcctctttctttcgttttaaagtgagggtaccgtagttgcggttgtcgatgttttcttgattttccaagtcttctaaaacgagggagtactcgtcgtggttcgttatccccagttttgtgcaaatgacgaccataaggtttgctattatttgtgaatcgtccaccatcattgtttttaccgcaccgtccaacattttaactctaagaggtcgcagtttttttctatactcaataaggtctccatttcttaaaatatagtactctaaattccgtgcaggctctaaccacacccccgttttattatcttcatcagtgaggaagagtccgtagtctttagattgttcaccctctgtacatttatctcgaatgattcggcaggcatcatggacagtcgtcgctggatcgaaaacgatagttttggtaacgttttcgtcgataatattaattctaagagataaggccatggttgttctatctttttcttttgtgctgatcttaattcgtaattagttaagttacatatctaataaaaacacttaacaattcacggatttgcaaaagtaacacgcccaacctcgattattt

SEQ ID NO: 9106 - DNA, 884 bp, Diabrotica virgifera
aaaaagtgttgatttatgttggtgactttatataacaaattttgcttacaagttgcccctctatcgatttctggtattttttttattaaaaaaaaaaattcacccccgagaaggggtggcatccacctccagggtagagcgcaagttggcatcatgtcacctttgttccttgaagtatcttctaactactcaccaatttccatgaaaatcgatgaaggttcaacgaaatcggaggtgaaaaccttcagtgactccactatatagaaaccaagccattccaatgttttattatcaatgataaactttattgtgttagtgatatagttcttcaattccaggcagggttgtgaaggtgagcgttttcgatgatttttgtttgtccgaacatttagttgttagagctcgtatatgatattactgtatttaggtttttctgtctctttttttcgtgtgtagtttagtcgagaattaatatatgtattccaccaagattgtagccctatcagtaagacgtgctgaatgttggtctgttaaataaggatcacacggtatttaccacagttaggtttaatactgcaataattaaccaagctactctatctcaattatccgtccaatgagcggtgatattatagcaactctccgtaattctgggttatggtgaaaaaattctctgattcgatttcatgcggatcgattaagatatgctatactttatttcacgttaagaacagaatgtttggcgtatgcagatcagtgttgccaaaactctcgggctggtgctattagactgtcgatatacgattcattctaataagacggttcggcatcggcgcgcttacatagccctatctatgcaacgttccgttcttgacgtgaaacgc

SEQ ID NO: 9107 - DNA, 902 bp, Diabrotica virgifera
  SmartBlast Evalue=1E-41; Info=Basic FGF-repressed Zic-binding protein n=1 Tax=Culex quinquefasciatus RepID=B0WJL4_CULQU
gcagtttgaaattaattgcacacatttatttttatcttcacattttgtgaagaaagaaaggcgtagaaattaaattaagtgatgaatattactagatttataggctataatgtaattttaaaacctgcaacggtcgcaaaactacaaaacaatgggttaaaaatatgttcaaattcaaaattactaagtaacaaagagacctcttacttaagacagagtcatgtcaagtttgtttctacatatgaggtaaaaaatgagcaaaaaggtgagagttttctcaagaaagctttgaagaagattccttttattaatgttgatcgagtgaaaattaaaggtagggggtacatcttgtatgaagaaatagcagataaaattgattatcttgaattttttaaagaatttgaattgttagatactttttactcatggttcacagtaactgagttacatatttggatgttgagtctaagggctatggcagaaggtgaaaatgggaaagatctaaggaatgctatcgtagaagctttgtggactgatgttgcacaaagggttaaaagattagggtcaggtagtccatctatgttaagaaaccaaatagtagaattatctgagcaaatgcaagctgcattcatatcctatgatgaaggtattcaatctgatgatatagtcttagccggagctatatggagaagattttataagatggaacatgcagacccctctaacctagataaacttgtgaaacacataagaaaacaggtttgtgttttggataatatgtcttctgaaaacttatttaaggagacaccaattcattggttaccagtcaaagaaagttaacgtcattatactaatttaatttgatatagaataattatattgtacatagttgttgtattgta

SEQ ID NO: 9108 - DNA, 904 bp, Diabrotica virgifera
  SmartBlast Evalue=8E-51; Info=Vitellogenin n=1 Tax=Tenebrio molitor RepID=Q64EZ1_TENMO
aaaactcgcaatgtcacaccccaacactgctcaagctgttttattcagagtttaccaaaaccctgcagaatctagggaagtaagaatggcagctgtattccaaatcatgcgcactgggcccagtcctcaaatgctccaagctatggctgaatataccaacattgatgatgacaactatgttaatgctgctgttgtgagcgccatcagaactgcttctgaattggaaggtgaagaatatgttgaaataagtaaagcggctgaagccgctttagaacttttggacgataccaaaactcacggtcttcgtcatggagctgactacctacgcacatacattgttaaagaattacaaaagatgtacaaggaatcaacccaaattttcggtagcgatgactcaatggtacctaaaggtatcagatactcactccagcaacacatgggacaaatcaaacgcagaattgtcaacattcaggctatgtgttccagcatggatgatctgttaaaggtagtaaatgaacaaactgctgacttccaacaacaagaaaaacaacaaaagcaaaaatcacaagaacaggaaaagaaccaatggtcaagttacaacattgcaaaactgcttaatattcagcctgataatagagaacagcttgaagcttttatctttatggaaatggctgatcagtaccttatgactggtttagacaacagaactcttgaaagacttcctgaagccattcgcgaatgggaagaagagcttaaaaaagagaatgaaatgaatatgtacaaactaacaacaagagaaatggctgttgctttccccacaggtcttggattaccattcttgtttacttacgacgtaccaatgcttgctaagctcgaaggaaaacttagagctacatctaaccct

SEQ ID NO: 9109 - DNA, 901 bp, Diabrotica virgifera
  SmartBlast Evalue=7E-66; Info=Caspase-1-like protein n=1 Tax= Heliconius melpomene RepID=C6YXH1_9NEOP
ctggaacgttgctttcacagtctaaggctacacgtttagagacgaaggtcagaatacttaagaggtccagctcaaaagcttttttcttcagctcgtcacaaagtgattggatgaaccaggaacctttaacgggattacgccatgaaaaataaccaatcgctgtagaatatactatgaggaagtcagcttcaactggaattttataagaagtctgctctccatcagtttcagtttttttcaatatgatcccactatcgaattgcctacctcgacaggcttgcaagaagaatattttcggttttcctgcaaggctgggacacttgtctgcagtaaaaggtgtccaaagtgtttcaggcttatacggtccatcttttgcatgtactattcccaagtcaccatgggacagaacagaaattaacagacaatcatatttgttatgatcgattttggcagtgtcatcaatatgttgttcaatatcccgattatctaaatccttgaaaacctgcacatcaaagcccaaagcaataaggcactctttgaggtttctgcagtcttcgttagtacctcttctagttagtaggtcttcatcgtcgaagaattcatgattgaaataagggccatacctcttttaggatggtccatgttgtaataagggaatttttgtgcactggcattcttgcagcttttcaccagacgtttttccatctgttccttgtgcatctccttcatcagattcagatttaccattcctggtgcgtccaaggcattgaccatccaaagcatcttcaaaagtttcttcgacctccaaactgtggaagtcattacaaactttatcgataccagtgtctcccatcttcactacagaattgaataaatttcaaaataattgaacgaagtattg

SEQ ID NO: 9110 - DNA, 897 bp, Diabrotica virgifera
  SmartBlast Evalue=2E-61; Info=Brahma n=2 Tax=Tribolium castaneum RepID=D6X4G8_TRICA
ttctcttcaaaaggccattgaaactatggaagagaagggcttacaagctgatcctagatattcacagttacttgcattgcgagctagcattcctggggcagaagaaaatggttctcccttctcaaacaaccaaatcaagcaattaagaaaccaaataatggcttacaggtgtttggcaagaaatcaacctgttccaaacaatttagtattaggtttgcatggaaaaactcctgaaaaagttccacatattgtacctccaccgcaacctcaagaagtacctaatgggggtgatccaggaccttcaacaagttctgctgctgctgtagctcctagaacaccacaaaagctgccggcaaaaccaattgaggctcagcttgtcaacagagaagccaagagtcactactctatctaaaccatcttccatagaccctgttgttctattacaagaacgagaaaacagggtagcagctcgtatagcagcgaggattgaacaagtcagcaatttgcctactgatatgtctgaggcattacgtattcgggcacaaatagaactcagagctttgagatgtcttaatctccagagacaacttcgcagtgaggttttgagctgtgttcgacgagacacaacattagaaacagcagtaaatgtaaaagcgtttaaacggaccaaacgtcaaggtcttcgagaagctagagcaacagaaaaacttgagaaacaacaaaagctggaagcagagagaaagaaacgccagaagaaccaagagttcttaaacaatgtgatggcacacgctaaagatttcaaagaattccacaggcagaaccaagcaaaactttctaaacttaataaagctattcttacttatcacgctaatgcggagagagagcaaaagaaggaac

SEQ ID NO: 9111 - DNA, 904 bp, Diabrotica virgifera
  SmartBlast Evalue=2E-59; Info=Translocon-associated complex TRAP beta subunit (Fragment) n=1 Tax=Aedes aegypti RepID=Q1HR42_ AEDAE
gaaacttgggatctttcactcaatttctggttctggttaggttggaatgatctaacagaaggaaacctactgttagtggaaataagtgatatttagtagttgtgataaattaaaccaacaaaatgaaatctggattgttattcttagttcttgctctattttcctttgcccattgcgaatcagaagatgatacaggtccaagactactagtatcaaagcaaatcttaaacagatatttagtagaaactaaagatattgaagttaaatacaccatcttcaatgtaggaacttcagcagctgttaatgtccaacttgtagataatggtttccatcatgaagcctttgaagttgttggaggtcacttgcagtccaaattcgaaagaattccacctcaatccaatgttacccatgttgttgttgtcaggcctttgaggtatggatatttcaacttcaccagtgcagaagtatcctacaaggcatctgatgatgcatctgtcaaaatcaaacgttctttgagcagtgaaccaggtgaaggaggaatcattgccttcagggaatacaacaagaaattctcatctcactattgggactggttggccttcgccctcatgacaacaccatcattggttattcccctagttctttggtacagcagtaagagcaaatatgaaaaattgggaaagcccagcaagaagatccattaaacagtgaaaagtggtgttttcatcaaacattcatgatttctatcatcctagttcattgtaaaaatctttttttataatttttctgttgttacattgtttcatgttttatatgaatacatgctgcgtaaaatgagacttagaataaattattttgtatttatgtacattaaagacagtgaaataaacatgttttcataatt

SEQ ID NO: 9112 - DNA, 894 bp, Diabrotica virgifera
  SmartBlast Evalue=1E-85; Info=Ras-related protein Ral-a n=7 Tax= Diptera RepID=RALA_DROME
gtaggtcctcaatagactcttttaggaaaaagggggagtctaatttaaacaaaaaacaagccagtgattaaattgttttcttaacagtacttattgtggtctactgcagaactattagacgtaaataaaaacatagacaaagacattctccgtcaaaataactgtattatatattaaaacataatttaatatagcccaaaatggccaaaaaggctacagtacaacctgccttacacaaggtgattatggtaggcagtggaggagtaggcaaatcagccctaacactccagttcatgtatgacgaattcgttgaagactatgagcctaccaaagcagactcttacagaaaaaagattctactcgatggggaagatgttcagattgatattcttgatactgctggacaagaagattatgctgctatcagggataattattttaggagtggtgaagggtttttgtgtatattttctattacagaagacgaaagtttccaggctactcaggagttcagagagcagatactcagggtaaaaaacgatgaaaccattccatttctgttagttggtaataagtgtgacctagaggataagaggaaagtgtcgatacaggaagctaccgaaagagccaagcagtggggtgtaccatacgtagaaacttctgcaaaaactagagagcatgtggacaaggtgttctacgacttgatgagggagatacgagctcgcaaaacggaggaaaacaaaacgaacaacggaagaggcagggacaaaaacaacaagaaaaagaaacgttgctgtcttgttttttctgctgacgttctgaagatcttggaaaactcaccaaatgagtttttaacacatcctgctgataatataactaaattgagatgcttac

SEQ ID NO: 9113 - DNA, 903 bp, Diabrotica virgifera
  SmartBlast Evalue=1E-110; Info=Chromodomain-helicase-DNA- binding protein 1 n=1 Tax=Harpegnathos saltator RepID=E2BBM7_ 9HYME
agaggataatagcaaagtacaataagcctgatgggggtaaagattattatattaaatggcaaagtcttccatatgctgaatcgacttgggaagattcagttctaattcaacgaaaatggcctgaccaaataaatgaattcgaagctagggagcaatcaagtatgaccccaacgagacactgtaaagtactcaaacatagacccaaattccacgaagtcaagacccagcctgaatatatgatgggcaaagaacagactttgatactgcgtgattaccaaatacatggtctcaactggatgatacattcctggtcaaaagaaaactctgttatattagcagacgagatggggctcggtaaaacgattcagacaatttgctttctatactatctcttcaatactcaccacctccacggaccatttttgtgtgttgtgcccctttctacaatgacgtcgtggcagagggaatgacacagtgggcacccgacttgaactttgtcacatacttgggagatgttcagtccagagatacgattcgccaatatgaatggtgctttgaagggtcaaaaaaggctaaagttcaatgcaattctcacaacgtatgaaattgttttgaaggataaagcatttttaggaagtctcagctgggctgtgttactagtagatgaagctcacaggttgaaaaacgatgattctttgttgtacaaagctttaatggaatttgacactaatcacaggcttcttattactggtactcctttacaaaatagtttaaaagaactttgggcgctgctacattttatcatgcccgctaagtttgaaacatgggacgaattcaaaagagaacacgaaaacaccacaaactccacaaactataaccaaactccacaaacaacttgaaccg

SEQ ID NO: 9114 - DNA, 893 bp, Diabrotica virgifera
tgtaaattaaattttaatacattaagcagtataaagttactgtcagatcttttctaccgccattgtttattgatataaattattttccggtagcttgggttatatattaaaaaaactttattttaatacataatattggaatgtttatacagtactctgtgctgcttccttcattgctgttgtggaattttattgacttctagaattgtatatttgactatgttagaaaccatcctgatatttaattttatctatcggtattttaactttacttttccgtttatttaaaagaaggtcttctgtgggttcaaattttgctgaacagactcaagctttaaatctcatggctgtcgctaccaaagcttttttcaaaaccaactattgtcaacttattttaaaaccaaccaattattatcatcaccaacaccgattagaaactataaaacaacaaaatttaggaaattttcaatattttctaagatattcagtaatgtgactacgttttgaaagtttcttccaagtggctgaagatacagatgattacaaaatagtatgaatttcaaaaaagaaataacagagctggtattatggcataagaaagatcgttctgtttatcgtcgtaacataccgtaaaataacgtattcctctgtacgataatgaagtcgggataaggaagtgaagtgatacgaaaatatttcaaaaatacagcatcagtaaaagcaattatcttattaagacgttttttgtgactaatatttttactcgtactcataatgacatattgagcatctgagcaaatgaacatgagaatttatagcgcagaaaaattccgatttacaaaaaacgtaggagatatctatcgtaacctaaattctattatttaaaaggaggc

SEQ ID NO: 9115 - DNA, 903 bp, Diabrotica virgifera
  SmartBlast Evalue=4E-70; Info=NADP-dependent leukotriene B4 12- hydroxydehydrogenase n=1 Tax=Culex quinquefasciatus RepID= B0X3D4_CULQU
tctctggctacgaacatggtaaaagcaaacgtttttcttttcgagaaacattttgaaggttttcccaaaccagaaaacgtgaaactagtggaagaagaattgggacaaattaagaatggagaattcttagcagaagcactttatatcagcgttgatccctttataagggcgcgagctccatttttacctctaggccaaactatgattggagtccaagtagccagaatcctagaaagcaaaaatccaaaatttccagttggaggaatcgttgtaggtttctttggttggagaacacatactatatctaacggaagtcaccctcaaaaagataaagtaccacaattgatcaaggaagatttaggagacatttccttatctgctttactaggggttttaggaagaccagggcattcagcatatttttgtctgctagatatttgcaaaccaaaagcaggcgatacgatcgtagtatctggcgcagctggtgctgtggggagtctggttggtcagattgctaaaatcaagggatgcaaagtaataggcattgctggctctgacgaaaagggaaaatggttggtggaagagttaggcttggatcatttcataaactataagactgagtctattgatgcagctatcaagaaatatgcaccaaatggggttgactcatactttgataatataggtggtgaaattagtagtacagttatatggaatctaaaaaagtttggacgcgtagggctctgtggatcaatatcacaatataatgaaactaataaagtaacgtcattccaccgtccaattataagcaacgaactgtttctacaaggattccagtgcgctacttgggtggatagatggtccgaggctgtcaaacagaacctggaatggatcaaagaaggc

SEQ ID NO: 9116 - DNA, 904 bp, Diabrotica virgifera
caatcaaatatgaggacagttgtgactttattttaactaacaccattggtacggcatttaataattgttgtattctattttcatctcggaaacgttataatggcggaaagtgcaattaacagaagaaaatcgcagttatttttaaataacatttcacccgtgacagatacgtataatgatctaatcaagaaaaaattgaaacgaggaaagtttctcgaaaccaaaactggaatcatcaaaatcgctggaatgttgatcttaatttttgctgtagtattttttgaagtccaaccattatgtgacgatacttccaattggtatccctatctatttccaattagtgctgcactaaatatcattgtgcaactgatttttctattcatattttctatggggttcacagttagcaaaccatcgatctggatctactcggacatggcggtaatatttgtttcatcagctactactgtcgtctcctcagtagttaccttaattagttgccaagggaccagtatagataaagtatctcagagttgcgggatggctggaggtgtgaccttaatcgttagttgtgcagcaatttttcttatgttccgatatgtagaagatgcagaccttcctgaaaacaagaaaaaacaagcaaatgaaagtacagacgtagatcctagaaaatcagtttttgcctaaatatttgtagtaaaacaaagtataggaaaaacaggccaaatgtttataaataaaagataaaagactgttttagttggcttgcaataattaaattgtcaagtatatttgagaatggtacttcacgccgaaaccagtcatactatttattcatgcccttttgcattgaatataaaatataatatacttatgttaattatatttaaaatataaaaaattg

SEQ ID NO: 9117 - DNA, 904 bp, Diabrotica virgifera
  misc_feature (756)..(758): n is a, c, g, or t
  SmartBlast Evalue=5E-29; Info=Chitinase n=1 Tax=Monochamus alternatus RepID=A4PID3_MONAT
ggccttagttcaagcggagagttggatctgaaggaaagtggactagatttacttcaaatgacgatggattttaaaaagaaaaataaagatttaaaagtgatgatcaacattggtgctgatgaatctggtaacttatttttcaataggctctctacaaataaccaaatcatagaacctttcctgtcaagtgtcgtaaaaattatgcgaacctacagttttgatggattggagattcactggtttacagagctcagtaaaaaggctatatatattaacctgttgaagcagattaaacaaaggttagaatatcacggatggctattgagtgttgatgtatttccttatttgaaagacattggatacgatcctaaagaaatggatagaatagtagattgggtaactattcgtccacgtgatttatatactggcgcgcgtggttacgttgatctgaacacctctcaacctactttccaccgttttcacgacggcgagaacggttatgatagcaaacatattgcggaaagctggcttgatgcaggtctatctaaagaaaaattgattattggagttgagttttacggggtcaagtatagacaaactgataccttaactacactagaaaaagaaccagttaaatacgctgagatctgctcaaattttaacacttctgatgtacttgtagttaaggatatgaaaacagaaaaagtatatctttttaacattaggaactcgtattggattggtttctacgacgannnttatattaggtcaacaggccgctacgttaaacaaaataaactgggtggtgttgctgcgttttctatagaatttgatgattataaaggaacttgtgggaaaacatctcctctaatactggctttgcttgttagtttgggactttggt

SEQ ID NO: 9118 - DNA, 899 bp, Diabrotica virgifera
  SmartBlast Evalue=5E-18; Info="Juvenile hormone-inducible protein, putative n=1 Tax=Aedes aegypti RepID=Q17LW7_AEDAE"
agatccgcacatgggcttccaaaagaagatatttgccagtctaaaatacgtaaaccttcaggttttgttttatcatttggatcctgatatttaaacatgaaattgttacaccaacaatctccatgggttatcacaagctttgtattctggttcttttagtttagacataagttcaggacctacaatttcttcatatttcttaagcttttctgtcaaaactggatcatccttcaacaccttgtacccattagacaaagtagtagtcagaaaacttttaaacttttcttctttatctttatctttcgtatatttttcctcaaacggattacctccattctcttctgccaattctttaaataatgccggatttttctgtttcattgcaaatgaaaccgcgtgaaacttagcatactcaatgagaactgctttaatatgacctggattcattgggactttcttatcccacagctcgtattgttgtgtttttaaattctccattactaaacattccagtccctcttccgtaaagcttgaataacatttcggtacactgtcaaagggatcttcaatgttgtgttcttcttggaactttttaaactctttaaaaacccgttcgtacaaaaagatttctctattataaatttctttaatgggtgcagcttctctaaaacccttattggtatgggaagacttcaaaatcaaatccaaacttttttccttgtctttgatggtaatcgcagtcagaactcccagaaagttgtctcccttgcttgatccagaactggttattatttcataatcggtgaatccattttcactagcaatacgatctattaatgccctatgttcttcaggaatattcatttcaacagataactttaatttgaactacgcagtct

SEQ ID NO: 9119 - DNA, 901 bp, Diabrotica virgifera
  SmartBlast Evalue=3E-53; Info=Protein jagunal n=1 Tax= Harpegnathos saltator RepID=E2BI53_9HYME
aaatgacttaatttatatgatactatttctaaacatgtacaaaagttccccacgctgaagtgaattttgacagtataagcagtctttcagaagacaaataaaggtccatttattcacatctatcgttctatattttctccacccaatcccatattaacaccaaacacattcccagtgaacaataatttaaatatctgaattagttaacaagactcaaactgtacaaggatttattcctgcttccttcctgaaatcctagccaaccaagcgtcgagaagtttctgggaaaaatgcaaagtgaataggtggatttgaagggccacgatcaagaatgcataccatagcataccatatggataaccctgccaccattcaatgttttctagatcttcttcaacttcatgcttgaggtaggtccaaacgtcgaagaaataataaactccagcataacagataggaaccaatgcaaataagagaacgccaagcctgtagtacctcattaaagatactctgttcttttttattgcttctaatcctaaaaatgatagtggaaaactgatgcaccaaatatattcccaccataatggcttaggaatatccaactcttctatttctaggataaatatatctaatctgtctagaatatcagcagacaatttagcaagcataacaaagaacagcaggtaatagaaaaaaatacagtatttcagtcttgacttattcaatgcgcttgcttgataatgggttgccaccctttgtctatgttcaaaatcggatccatctgtaccagctggagttatcgttcgtcctatagtagccattttttccaatttcatacaaaattcaaacttttccaatatttattcacactttcaaacatccaggtatacgatggtgtcac

SEQ ID NO: 9120 - DNA, 898 bp, Diabrotica virgifera
  SmartBlast Evalue=4E-78; Info="Paired AMPhipathic helix protein Sin3A, putative n=1 Tax=Pediculus humanus corporis RepID=E0VCL2_ PEDHC"
aagaaattgtccaaattctgttaagagatcgctttgattttcaaaaagtttagctacctgactatagacttcttgttctgtgagatgttttagactgctacctatgcttgatgattcctttaatgtgcgttgttctttttgatacgtatgtagtatttccaagaacttcttatatttttcgggttgaccttggaaacgtactttttaattttattcacataggtgatagcgtgattgaattccactggttggttttgtggagtatctgtacgtccttgaagagcatgggttactgcagcttgagcagccgatagtgttaatgacccataagacagaggtggagcagcattaccaccatatggtggggtgtgatgaacaataggtggttgttgttgtggttgttggggagcttgaggcgtaactggagtcatatgctgagtgatagatagtggttgtccagaagggggttgctgtccagacacattgatagttccagaacctttaagaatcattgcagaacgatgctcctgaggtcctgaatttatgctaccagttggactaggcatactcactgagacttgaaaagcatacccttgatcattacgctgcacttcaattttatatcccggcgggagaaacgtattaaaaccaacaatcaactctggaaatcctttaaataaattcgatactcttgtaataactccaggcgtatctatagtttgacttttaaattctttcataatgtctaaaaagtcattataaacttgaggcttagcaccaaacttgaactttactaaatccagataggataaggcatcttcgacttttaacctttgaaaattagtagtacccggtgattgctgctgtgctgactcctgcattccagcgcctgaggggg

SEQ ID NO: 9121 - DNA, 887 bp, Diabrotica virgifera
  SmartBlast Evalue=3E-30; Info=Zinc finger MYM-type protein 1 (Fragment) n=1 Tax=Camponotus floridanus RepID=E2AT34_9HYME
gtatctatatgtagaggaagtgaaaaatatatataagctagttcttctaagaaattaaagaatgcggtgctatgctaatgcatgataacactcagttgcagcttttgaaactaaatttagagagtgggcgacacaaggaatccacaactccaagatgttaaggtacgtatccatacgtgggtgctccgtgctcggtgtagcagctccacatagtagatacgttggtgatcgccaaccagtgatttaaccggtttgctgtttatatgtaggggagcgcatgccgtatccatttaagcagctacaccgagcacggagcacccacatatggatatgtaccttttgttctataatttcagcctgaacaccattgtattttccattgatatctgacgcattaacgtagaacggtctcgtgcagtttttcagatcgatatcatgttcttgcaaaaatgtcattagataattaaatatatcttctgctttatgacggcgatttggcaaaaatatggtaaacctttcaacaggagtgaaaccttctatgtaacgaaatgtcacagttaattgatttgtatgaaatgaataatattttgacttcttaatccttgaaactacttcatttaatacgttttgacccatcagatgtacaatttcctcacatatggtttatgaaagatagttgacatgtccgcttccaggatttgaatatttattaatatggtgcttcaaaaattgatcatattcagctaataactggagtatttccaaataattttcatttttgtgaactcgacaactcattttcgctgcgaaatgctaaatctcgttcacaaataaactttataacactaaaattagtcttttgagtattttccaataattctttattg

SEQ ID NO: 9122 - DNA, 902 bp, Diabrotica virgifera
tgtctactgttctgcaactgacttgttaaaggagtgtatacttcaaccactcctttggtcatgagacctgttagtacttacaaactacaatggtagttgttgaagttctttacagtagacaagtttcattcacttgcaagtggtatggcaaaatttaacaccctgacttccagtctctggtttaacattttattttattttacctaacgggtagtccttggtttctcctgttgcttaacacttagctttttattttactagatgtagtagtagttatttttggttttacccatcacctttctccctccctcaagattgacagcactccttcatcaatttttcatttggaggtaccagccagccctacaggtcaacccaaaaccactagtattttaaatctaaattgttttgagagaagtttcatagatgataccttactattaataattgttaatgattagtttccttttttgttttaaaatttgcttttgcgtttatactgtaaaacgctttttttaacattatattagatataaagtttttaagttcaatcaggcgtttatactgcaaagcgctttgtttattatgttattaatatttcaaacatttcggtttttgggacctaatgaagacatccaaaaggtaagaagggggagaatggagtagaaaccaaactgtttccagattcctattcatttgcctgttcttataaaagcactgaagatttgtcagtattagaatcatttttttctattacattacatagactaatttgactttaatatatgacactcttcatgaagttagtcactaatgaactattacttttaaatttgtgttggaaagcacttttggtttcttaacagagactgaggtctcggtgtttatttattctcccactt

SEQ ID NO: 9123 - DNA, 899 bp, Diabrotica virgifera
ggttgcgtgtgtgatcttattgaccacggaaacaattaaatgaaattaaaataaatgtaaaaacaacagtcaatattatatttatttattttggtaaaaaggcgtgctttgcttatatttcgtaagggtttgttattcttttttcgagcgagggttttatgactgaccggactgccagctgtgtatcgactgaactagaccacaaacactaatctgtcgttatgtggttctaccatatggccagacaggcgacaatttattagatctggtgtttttaaaactgcaaaggcattttacctgaaatagggatatatttcgtttcttaaaacttaacaggcccttctatgcatatggtttgtatattaggaacgaaacacatgtgaattttaaatgacccatattatttcgtttagaaaggaaagttaatatttaaaattagcaattaaaaaaaatagtaaaatagtaattgaagcgtgtcgccacacatactacatataattgacgatataaaacaaagcaactaagatggtttggccacgtacaacgtattggaagaagaaagagccaagcaagtactatggtgggcaccgaaaggacggcggaaaagaggaagacctaggaaaagttggatagaggtaattcatagggaaattagagaaatagtattgagcgaagacatgtgtaatgatagagaacaatggcaattgggaatcggaagacgtcgtagaacgttataaactgattttatgctgatatgttcagtgagcaatacaatgaattcccctcccaaaacaaaataatagatgtaataagcttgaagaaacattttgttgttttcgtttcagtctgcattcatttaatttcgttattccataaaaaataacaatttactgatttaa

SEQ ID NO: 9124 - DNA, 902 bp, Diabrotica virgifera
  SmartBlast Evalue=1E-104; Info=Proteasome subunit alpha type-5 n=3 Tax=Aculeata RepID=E2A1P1_9HYME
tttgttacttgcagttttgagtttggaagttttcattgctattacaagtttcttttgtataagttttataaatattgttaatcgttaacatagtcctgtttacaaaatgtttcttacaagaagtgaatacgataggggagtcaataccttttcacccgaaggaagattatttcaagtagaatatgccatagaagctattaagttaggatctaccgctattggaatatgcaccagtggtggagtagtgcttgctgtagaaaaacgcattacttccccttaatggaacctactacgattgagaaaattgtagaagttgacaaacatattggatgtgcggtttcaggacttatggcagattcaaggactatgatagatagagctcgtgtggaatgtcagaatcattggtttgtctacaatgaaaatataagtgtagaatcctgtgcacaaggtgtatcaaatttggctattcagttcggagattctgatgaagatggtgcagccatgtctagaccttttggagtagcaattttgtttgctggtatagatgaaaaaggacctcagttgtaccatatggatccatcaggaacatttgttcagtttgacgcaaaggcgataggatcaggatccgagggtgcacagcaaagtttacaggaggcatatcatcgcagtatgaccctggaagaagctaccacaactgctttaacaattctaaaacaagttatggaagaaaagttgaattcttcaaatgttgaggttatgactatgactccaaaagatatgttccacatgttcacaaaggaacaagtggaagaggtaattgctaaattgtcttaacttaggaagtaagctaaattttgaaaagggttaattttatataagtttttttctttataaatacgaat

SEQ ID NO: 9125 - DNA, 902 bp, Diabrotica virgifera
  SmartBlast Evalue=7E-10; Info=Reverse transcriptase n=1 Tax= Bombyx mori RepID=Q5KTM1_BOMMO
tttacgttacatccagaaattgacaattatataaaaaaaattgactcaatcggacgcaaccgagttagggtctcatttaaaaattatagtagcgcaaatgctttagttacttccaaattccttattcaaaaaaatctgaccgcatacattccaaaatttcaattgtttaaactaggtgtagtaagggatatagattcagatatatcggaagaatatcttaaaaatagaataaaggaatttgatcaccattgcaaattctcggttgagtatgtgaaacgaataacaagaaaaatagtagcagatgacaaagtaatatttaatccaacaaaatcagttattgtgtcttttaaatgccagaatataccaaagtatgtagtaattaatcatgtcttacacactgttgaaaaataccagcaaaaggtaattatctgttaccactgctataggtatgggcacatgagtaagcagtgtaaaagtaatcctcgctgttttaagtgtcatgaatctcacctttccgattcttgttctttatcatcgtttaacaaaaaatgtctatcctgtgaaggtgaacacttcactaatgaatgggagatatgcccagaatttgatcgccaaaagaaaataaaacattatatgtctgaaaacagcttatcttttaaggaaacaattaaactctttcctaagataacttatgcatctatagcagccaataattcctcaataaattctcatcaaactccaaatatgaatgcaccatcctcttcatattcctttactcaattgtccacgtctcaaacatcttccaatcagttcgctctaccttcagtttcaaatagatatacaataataaaaccaccaaaatacaaacgacctatctcttcctcaccagaccaagtaacaat

SEQ ID NO: 9126 - DNA, 899 bp, Diabrotica virgifera
ctttaataatcttaaggagtcttttttgatctggtgagattatgaattgaagacatatttacttggcttcactgtccatcattaaagcttctacctgtagaaagtctacctgatttcttcattttaatatgtatggaagtttccttcgtagaactggattgtgcttcggtggagatgactttagtctttactagaacacttttacgaactaccatcaaaactttggttcttatattttacagattccttattttctccttcaggtatctcctaaattaatttgtactacgttctaatcaaaagaagtctatttctttatcggatcttaggaaattaaagacatatcaacggaatactataagggaatcagttaatctatgaacagtaattctggtagtagtcacaaaatattcgagataaaatcgtcttgtaaaaaacaaggaatccattttttcgatgaaaaatatgttaattttaaaatcaggaactctgatgaaacttctacaggtacaaatcgagtatacatctttaacttttggacttactgcacatcaaaactagcagtatcacaagaaggtcactgtcaaatatcaaatcaaactgatttgagaaggacgggtgctttgacattaatttaacttccagtagtggcgttgcatgattaccgcatgtgtcattcgatacatgacgtctgtcaaaattttaagcaaaaacaacaactagttttgtttaagtcgaaatatcaagataacgctcgtgttcacaaggtggccgttacacaggtaaaattaaaccaattgggacacaaatagatagaccagccagtgtattcgatagatttgacaaaacggatcggagacatcattttgcaaggaacagtgaagttacatatgagactt

SEQ ID NO: 9127 - DNA, 900 bp, Diabrotica virgifera
  SmartBlast Evalue=3E-17; Info=Protein FAM38B (Fragment) n=1 Tax= Harpegnathos saltator RepID=E2C9W9_9HYME
caaaagacagactatacacaatacttcgtggcagtaggtcgctatgtaacattgataatgttatgcttagcaggaattttaagaccgtcagtagaaggaggagtatattatttgctatttttagcaatggcgacgtggtgggcgtgctataaacaattgaaacgaggatttgccattgttttacgatgtcttattccgttcgttcttctgcatctgtgtgctttatacataattaatttcaagtatattcaaacttatcttccagaagatggtccgtatgcgagatatttcgacttggcgccttttgttacaacaacattaacatcaggaacactacctagtaacgttaccgatactcttaatgtcaatataaccatgccaattattagtcataatagcacatctaccattcataagagtacaaacctcaccatggacagtgacgatagaagtttattgtacttttttcatagagaagttactttttatgtctaccctgtaattctttacttattattttcttattagtacttgagagtaacgaactcttaaaaccagagatggctttaaagaaagaacttgctgaagccacagaatcgacgccattattacgaggtccaaccagacgatcaaaacgcagtcctggaagagttttccaggactccactggaagtgtaaccgtaaccggtgagaacgaggatatacctatggatgtttttgaagaagaagaagaagaatatgattatactctatttcacaacattatttttgcactggatgccattatgcaatatgtagttcgatcatcgtacatagcaaccaatataattatgatggcatggagtataacatacttaagttggataacatttgtgcttctcctttgggccaacttgatct

SEQ ID NO: 9128 - DNA, 900 bp, Diabrotica virgifera
  SmartBlast Evalue=2E-87; Info=Tripeptidyl-peptidase 2 n=1 Tax= Harpegnathos saltator RepID=E2BR93_9HYME
tttattataaccaaaaatttgtcttaacttgtggcgctgagtatgtcagttatcctactcacctagatttatcaaacgtcgcgagaatgttcgccataaaagttgacacttctggcctacgtgaaggcttgcattgtactgagctaagtggatatgatgtgaaatgtatagagaaaggtcctctttttaaaatacctataaccataatccaaccaattgaagttaagccgcctaagtatcaattcggtgttaataatgttcgctttgaaccaaatacgatcaaacggcactacattacggtgccaaagacagctacctgggcagtattgaaactcctatcagatgaagatacaggaagatttgttattcatgcttcacagcttgtccctaaacaatactgtaaagcattggaaatcaacaaaacgatagcagttacttccaaatgtgaaacaatattaaatttccctgtgcgagaagatctcattcttgaattagttatagcgaaatactgggccaacgtaggggaagctcatttagactattcgatctctttctggggcgtcaaaccaaatcagcctgcagtgacaatgcattcagctgatggaattcatactgtggaagtgaagactctccaaggggaagatattgcaccttcgatcaatataaaagctgccgtccagattgtcaaacctacagaaggaaaaataatgccattgactctaagggatgtaattcctccatctagacaaatatatgagctggttttggtctataatttcaatttatcaaaacagtgtgaaatatctccaaatttatcgttattgagtcaaatgttgtatgaatccgagtttgaatcccagttttggatgctgtatgactccaataagcaactacttggct

SEQ ID NO: 9129 - DNA, 902 bp, Diabrotica virgifera
  SmartBlast Evalue=1E-31; Info=Ras-associated and pleckstrin- like proteiny domains-containing protein 1 n=1 Tax=Camponotus floridanus RepID=E2AHK6_9HYME
caaacaggtgtattcaacctggagtgtgtaggggtcaaatctggtgacattccctgggtaggagtcctctccggacttagtacattaacaggtgtgatgcttccgttccttttcttatcgtaccggtatcttcgccgggtggaggaggtaatgacataagagatagttggctacctgttagttctgcgcctgtcattggaggtaggtcattgggatttggagggggaggaagactgtcgagggaaaggttcgaattatacacttcagggggaggaggcggaagcgaatagttgggagaattgtttaatataacgtcgccattcgtttcgggtggtggtggtagagaagtaatggagtccgtcatacaagaaggcagattgctggttggtgaaactgaaccccgcaaataaccgctggttggagaatagtctaccagatttccatttctctcattaaacggcgaaacaccattcctttcagaaaacggagacacccgatctcgaactggtgttccacaaagtggagtcgaatttccgcttctacttcccatagactcaaccgatcctctctgtttgtaagaatgctgtctttttagagtaccagtattggaggagtcgtcagattggttggattttcgtctgctgtgcgtacgagttaaggtaccagaatttgtgtaagttataggactagaaggaagaggagttgcgtctgtttcatcgcgagtttcaccgacctctttaagctggcgggtaatgtttgtcagaggaagactgggtttcattgaaggtttgcgttttattgtgcctgttggaaattcagagtcaaatgcgttttcacaactggacggtgcaccatccgacatgcatccgctggaactggaactactagctctactatgtcgt

SEQ ID NO: 9130 - DNA, 896 bp, Diabrotica virgifera
ccatttctatgatattccctctggaaatatgtgaattaatttctctgcttagagaatttctgattgttttctgttcccatatatgtcgagggattcacacgttcgatggtatagttgtctttttgtgttttggtgtttgtgttttgtgatgtttgtgatggtgttttttgatggtcatgtacttggtttttgttttgctcattttaagccctcttttcatgcctcaggatcaatttacttagtcgttgcttgctcatactaatgatagctacatcatctgcatatcgtcggtgatgtgacgtgcctcctatctgccttttcatgaattttgtaagagagacttcaaactttttttagggtcacctcctgttttcatatgtgagttttgtcttgttttgtagcaaataactagttgaattgactacaaaacgggtaaaaaaatatatgaaaacatgaggtgaccctaaaaaggactcttacaaaattcatgaaaaagcggatgggaggtgttgtcacatcaccgacgatatgcagtaatttgtgctgatttgttatttatatagccggttaaattggtttttctgatgactgtctgaagaactagcttaaacagcatagtagatagagcgcatcacagtattactcccacattgatgtcaaataggggagtcagttctccaattactctaactgggcttttgaaccctacgtcattttatgaggctgatatatatttctggtacacctagattacgaaggttatccagaattttgtctcttcaaactatcaaaagcttgtttaaaatctatatacatacatattatatagttatattttgtaatcataagctgtttcttgaatcgttcttagtatgaagatattctctaataggggc

SEQ ID NO: 9131 - DNA, 892 bp, Diabrotica virgifera
  SmartBlast Evalue=3E-55; Info=Endonuclease-reverse transcriptase n=1 Tax=Bombyx mori RepID=D5LB38_BOMMO
ttctacttcttctttcaatatgtctggcccagttgcattgattatctgagttaagttgtttctatcgtcttcaaataattcattcaggtattctgtccatcttttttattttattctctagatctacaataaggtttccatctttgtctttaagtttacctatttggcatttctttatgcttcctgttatctcttttacttttttgtgcatattgaacgcatcgtactttttctcataggtttccatttcttcacactgttctttaatccacgcctctttggtttcttttattctcttttttatgtgtttgtttatttctttgtatttgtctaggtaattcttcatatttcttctttgttccatcaagtctagtatgtcctgtgtcatccaccccttgttctttgttgtcgtttttgtcagatgtttctttcctgctgtttgtatagctgtatttatgtactttaatttttggttaacgttatctgtatcgttaatttgttgttgcactgaactgaggttttcatttatttcttctcctgtttcttgttgtatatttttgtttctaagtttaactaaatctagtgtctttctttgtggtctcctcatcttttttggtctcgcctctatcacagtaactaccggattatgatctgagcctatatcagctcctgggtacgtcttagtacatttaacagcattacgatacctccttgctatcagaatgtagtctatttgatttctcactattttttgtttggtatgttgtggagatgtccatgtatataatcgccgaggaggtaatttaaaaagggtgtttgttattacgaagtcttcgctctggcaaaattgaatcaatcgatctcctctgtcgtttctgtttccaagtccata

SEQ ID NO: 9132 - DNA, 902 bp, Diabrotica virgifera
  SmartBlast Evalue=1E-112; Info=Abnormal X segregation n=2 Tax= Tribolium castaneum RepID=D6WMZ4_TRICA
gtatgcgctgcatgatcgagaggttcttaaaaaaacttggaaggagctggtatatgagtatatttgggaaacagccttatgatgaaataaaaaattacttcggagaagctgtaaccttatattttcattttctgggcttttatactaatgccttggtcgtaccagtcgtgcttggcattcttcagttattgttttccagagaaacagtgccattcttctgtatttttaatgtagtatggttaacacttgttttagagatatggagaagaaaaagcaatgaatatgcttacaaatggggaacgatcggtatgaccagtatggatgaacccaggcctaattttcgaggagctatgggtatagactcgataaccggtaaagtgcaacctcaagccccccgatatttaacgtatgtcaagatgtatgctgtatcaatacctgtcgtatttgtctgtttaacggtagcttttgttataatgttggcatctctgtgggcggaggcctacgcaaaagaatcagaagaatggcaagcttacgtatcacttcctagtacgatttataccattgtagtattaattatgaatgcttattacaggaggttagccacattccttacagaatgggaaaaccaccgtactcagtcccaatttgaacgacaccgtgtaacaaaattagttttatttgaatttgttaataattttatgtcactgttttatattgcatttattactaaagatatggaaaatctcaagagccagttacaaacaatgctcatcataacacaaactgtcaatcacttccaagagacagttcaaccgttagcgatcaaatactatatgatgaaagtacacaacctaaaattcaatttctttcccaaaaaactggatccgaaaagtccaaaattg

SEQ ID NO: 9133 - DNA, 899 bp, Diabrotica virgifera
gataaatctaatacatgcatcatatacgataacataatggttaaaattcttcagttgagcttcgcagttttccttatttatttaaattttgtactggcatgtaacgattgctcaacaaattgcgaaacagattgtacgtcatcgaactgccaacaagactgtagttcaacgatctgccaacaagattgtagatcaagctgccaacaaaattgcagatcaacgaattgctgtcagactgcctgctcatcaagaaattgcgtgcgtagatgtaataatccatgtccatcaccagtgaccaacccaccacgcgtaatcatcagtacaccttcagttgaaatagtcactcctgtatatatcagggacaccaaccgtaaagaggatagtcattctaatagtataacgaacattaacaacgaaacattggttgctaattttaatataacgagtcaaattaatctagtaaataatattagtataccaataactgtttcaagtaataacaaagtagaagtaaatatcgtcccctcgagttcaaattcaacctcaacttcagatgataaaatcgtatacattaacaatagcacttgtccagatacacctaatccagataaaccatgccgaactattactgtcacagaacgtgtaccagtactcatccccattccttcaaaaccaatatacattccagttccatatccagttgccataccaagaggtcctcaacagccaggctgctgtggaacaataacgccatgttatgataatacctgtagaccttttcaacaaacttgtggtagttcttgtacctatccttatcaattccagccaacgaatccatgtggagacatgggttgttacaaacgaccatatgcgccttcgtggtcctgttctggctcaag

SEQ ID NO: 9134 - DNA, 900 bp, Diabrotica virgifera
acgtcctagatctaaataatttatcgcctttctggccagatggtagaaacacaaacatattagcgttggtggtttttttcagccacggcagtcgattcacaacctcccgtcgggagtcacaccccagcggccgtcgggataggtcaacaacacacccttgcgagatataagcaaaatacgtctttttaccgactaaaataaatatattattgaaagtttatgtttacatttattttaattttagttaatcgttctcaaaccattcggaacagacgtatcggaggagtttgacaggataactttataaacttttcctgtgacagtttgactccgatacgtctaaaagtgggaaattatcaatatactgtaaattttataggtttatgttgataatttcccacctctactactttaatctcctgttatttcacaacttattatgttttccgtcttttccgttgttttgccggttattagcgcactcatttactataagatgcccctctatttaagtccattaagcataaaaatcaataaaaaagtatagaaaagcagtagttgattaaaaaagctgtagaaaccataaaaattgtttttctacatctccagcagctttgtaagaaaacatgaaacatctgtaacttaatttatagatctcattaccttaatagactatttttgttaaaagacatagctactttaagccaccacgaattggaatcggttagctttgaattgaaaaaaacgagcagcttaaactttttggtactaggccgttctggcacatgtcaaaagctaactgatgagaatatcatccggaacacatttgtaatagaatctaagcatatttgtaacgtacttatactttttcttctccagaaagtaaataattttgagatg

SEQ ID NO: 9135 - DNA, 886 bp, Diabrotica virgifera
cattttgcatacaagagtttaataattttctcaaattgttttcagtctcatagtaatcttgtaatctaagtcatcaattttatcagccacgtgatcacttatagaattaagctctttaaaaaattgaaaccaagcagctttgacattgcctagccggttacatagtttggaattgactaaagcgtatgatgagaagagattttttttatgttggatgaccatagaacgccaccatgccaatggtagtacattagatgtttagaaaatatatatggattaaagggtacacactttgcctggtaattaataataattggcaatgcttctggatgtgaagtgaagtttctacatattccatgccagtttttatttgctcttgactaaatttatgtccactaaagcgattagcaagcaaacttgtcaagaaatgagccaggatcaaagccattttcataagcttcttgactttattcgtactatttaccaaaaattcgccatttgcgtgttcagtctcgaatgcttccagaagttctagccatatctctgtagcctctcctttagtgcaagtatttgtttggactttgtccctgcactacaatatactttaattttataaatacctagtcttaggcatttgtctttaactttgtataatttacaagctttattatatctttatcaatacttattctattgtttagagcaaatgtgaaataatattggccagtttttcaactaactttctaagcattccgataaagtattccaacgaacatcctaatgcaatacaagagcagaatcaccagcttctcggaattttgcgctagcaaaatgtacatttctaaaatatttgcaattttttgacactgttctttattcctggcac

SEQ ID NO: 9136 - DNA, 902 bp, Diabrotica virgifera
tcaagtagttagaatatagactttgcccaccaactcgttactggtatatttagggttggcaaataaatacatgtttgacaaacagtgttttacaaatcaaccccctcgtcgggggtaaacaaccccaaccaccataccagttaccgcctgttattaggtaaacacacatgctatttttatgaacgctctaaactcagtacattgaaaagagatagttacaaaaagacgcttggaaacgttttcagattttaagtacaatttgtgacgtttctggtttggttacttgtggctgtcagtgtgttggatttcttgctgtttttttttttgcatttagaagttatttatattttacaaacagtagttgttttcacaactaattttattattggtgtttatggtaagtgtattttattttgccattaatttacatacaaagttaaccccattcacacagttcaggaatagttttaagtttccacaaaagtgaaagaaatgagaacaagaaaacattttactgaattcttttagattatgtctggaaaaaaatcttacctcaaaagcacaagaactcgttttaaatttattcgagtactttgaattagaaaaataaagtaaaactaacattttacatattaatttgataacgtcaaattttataatataatccgtgatcggatagtagccactttctgtcacttgctattgcgtcgagtaaatttccgacttatttcgtatgctttaaatgatgacgcacggttaaagaaccctggactcacctgtagtcacgtttaccaaaaaaaaataaattggtaaagaaaagacataaataaatgtcgccttcaaaatgtttatttaatgtacaattaaatgatacacatgattatagaggcgaatagcttata

SEQ ID NO: 9137 - DNA, 900 bp, Diabrotica virgifera
  SmartBlast Evalue=2E-84; Info=Ubiquitin-fold modifier- conjugating enzyme 1 n=2 Tax=Culicini RepID=UFC1_AEDAE
tttcttcttaaatgaaaataaaatggtagacgaaggcactaggaaaacattaagtaatatcccattattaaaaacaaaagccggcccaagagataaagaactatggatacaaaggttaaaggaagaataccaatctctgattaaatatgtccaaaataacaaagcagcagataatgattggtttaggctagaatctaacaaagagggaacaaagtggttcggaaagtgttggttcatccacgaactgttaaaatatgagtttgatgtggaatttgatattcccatcggataccccacaactgccccagaaatagcccttccagaacttgacggcaagactgctaaaatgtatagaggtggtaaaatttgtcttagtgatcatttcaaaccattatgggctaggaatgtacctaaatttggaatcggtcatgccatggctttggggcttggtccatggttagctgtggaaattccagatttaatagcaaaaggagtgatatcttacaaagaaaagacaagtcaatgatccatataaataaatttatagttaagaataagagcaaaataaatattttccattttatgttgttgtggttttcgtgggtgtgtacaaagtttagtttgtaattatcttgaggttggtaatagaaaatatgccaaacaggttaaaactaaaaaaaactactcagtcagtgtttcatgttgaagaatatactaattttttttatagcaactatacttaaccctcccattctatttagaaatgatttcgtaccactcatattaaaaagtaaatgattacttacatgttaaaataaccttggcatatgatgttacttaattgataatacagttgaacccacttattggaataaccttcatgccaagcaaaagtattcc

SEQ ID NO: 9138 - DNA, 890 bp, Diabrotica virgifera
gattgaattattaccgaggaccgaaagtcccttagaataaacaaactgtttattttgaatgagatatttgaattaaaaatcacactaaatttcttttttttcacacctgcaacttattaaaataaacattatagaagtgtttagtgactttcggccctcgataatattgtaatatttcattctgcgtttgaatttttcagaaatatttattggttttctcaggattcgaaaaggtgaatgtatttaaatagcattggagccgaaattttgcgcttatccccttaatgtctcttttttagtacaaaactcaaatttttagtgaatttgtgcaacaaattatgaataacatgatttttatacatatttttttttatggcatagacttgggtgtcatttagccagtcacaactttttttgttttctgttcatacataaggaaggcaatgaggtccttagagttccatagcaaactcttctacagctctctactcagttcaaaagctggccgctatggactgtccaagttgctcaccacattttccattatgtatcttcttcttcttcttcttcttcttttttcatatgtacataatataccaaattatcaggattaacaagtttagaggttaattttagtttcacagataaatttcattaaacaatcatatatgttcttgctgttcagagacaatagataggatacattgaaaggtggaaaaacattacattttattaaatcttcgattaaattatatgtgcatggaatatattttgcgcactcaaagaaagtatgatttaagtcaccaaccttctgacattctgtacaaagatttgaatcaaaaactttaattcttgctagatgtagagggaaacatgcatgtccaaacttc

SEQ ID NO: 9139 - DNA, 899 bp, Diabrotica virgifera
  SmartBlast Evalue=5E-22; Info=p19 protein n=1 Tax=Culex quinquefasciatus RepID=B0WDB1_CULQU
aatctagcggcttatggtcaaagatttccgtggagagtcttggtttctggtttgaaaacagacgatatcgaacaattaaaaagattcgcctcaggtggatactgtgacgattccactatagtgtatatggtacatccttgtgtgatattaacagctcttgaagtcttaggatatagagtagtcgcttcatcttctactagtgtaaaacaggactacaatgagtatatgtggactatgagaaaagacttttccgagccagaaccaattagtgaagaaaaattacctgaatttaaaatagatcataagttagagaataagctctcaccttccgaagaaatttgaggttgatggatacaaaaaaaatggagataccagcaggtgtactcatgtctactggaacttacgcatatgtggccattaagggatccttatatgctaacgacagtgctgtttttggccttaacgaggtagagactaaggcgttggtgaaaaaattttcaaattcccagagagaggttataaatggaatattactatctgcgtcgccgatgcaggtagttaacgctttgggtcaattaggctatagggttgtctgtacaacaggagaaactgaagtagtatggacaatgcagagggaagtgtaatttccgaatatgttcagtttgatttgtgccagaatgttctattctagataagtagttaaaattaaatcaaaaagaacaacatgctttccatctctttttcgtagaacagttttccaatagtaagtacaacagtaaaagataataacacattataagataataattaattctcaattaatttaaatggttcgtagagtattagtaaatattttgatgttgtcaaaaaggtttatttttcgtttcaaatgattttct

SEQ ID NO: 9140 - DNA, 897 bp, Diabrotica virgifera
  SmartBlast Evalue=5E-78; Info=Peptidyl-prolyl cis-trans isomerase n=1 Tax=Glossina morsitans morsitans RepID=D3TMH8_ GLOMM
gaaagagaaatccaaatgggtatttctaatttttactagtttatttcagtcccgttgtgtaaatttcaagagtttcaagaggttcaagtcaagtcaagtcaagttgactgtccaagtgaagtgtccagcaatattttatgagctttctgttacttcaccggctcataagggataagattggttacaaagcagcgatgaaagttttattagttactttggcttttgcagccgttttagcctatgtaagaagcgatgattcgtcgaagaaaggcccaaaagtcaccgataaggtttggtttgacatcaccatcggtggagagcccttaggtcgtattgaaattggattgtttggaaaaacagtgccaaggacagtaaagaatttcagagaattagcaactaaaccagccggtgaaggatacaaaggcagtaaattccacagggttattagagatttcatgattcaaggtggtgacttcactaaaggagatggtactggaggtcgcagtatttacggagaacgcttcgccgacgaaaacttcaaactgaaacatttcggtgctggttggctgtcaatggctaatgctggaaaggacactaacggttcacaatttttcatcaccacgaaacaaacctcatggctcgacggacgtcacgtcgtgttcggtaaaattttgaagggaatggatgtcattaagaagatcgaagcgacggaaactgatagtcgtgataaaccaaaacaagatgttgttatcgctgattgcggtgctgtagacgtagatgaaccttttagtgtggagaaggccgatgctagagattaaatcttgtaaataattccagtaattttagctttgtatgtacctaatgtcctttttttaaataaattaggtaattttgaaa

SEQ ID NO: 9141 - DNA, 890 bp, Diabrotica virgifera
taacactagaactaatttctataattgacttactgtcttctaaagaatcagttgtattcgtattagataatgcattagaactgatttctatagcagacttattctggtcggtcgaagaatttattgatacgatgctaatatctttattttcatctacagtatcttcttccatggatttcctatttacggaatgagctatcacatcttgtttctggttattaaataacttatttttgtttagttccatatttattgagctaataatttcctttttgggggaatacctcttacacttacaggttgccacgtcttagtctttttcggtgtatgtgagctatgctgggtatcttcattaatatcactaatatctatactcttattaatactacttggaatggatgtaaaagttgatagaggcactgtttttctatttacatcagccttaatatcagtaacgtcattttcaaacaatcgtctacgagtcttaactagagaagaatcctcaaaagattcatctttggtaacaacattttgagattcttgatcaaaacttaaagtatcttttaagccactatgtacaatgtcttttttaggaaaaccactgtcatcttgtgtgctattgacagaatcgactttactattttgagtcctgtttatggtatctatttgtgcactaattaccgaatcaccgatatctttagcaggggggtaaacttttgggcaaatcgggaggttcttggtctttatcgtccgtaccggaatcactagattcgctagccttaatctgactcttaaagaaatctgatcttaccgagttaaactctctacctagcgtctgttattttttctatgtcagcgttttctaatgcagattcgaataccgcactaaa

SEQ ID NO: 9142 - DNA, 897 bp, Diabrotica virgifera
  SmartBlast Evalue=5E-47; Info=AN1-type zinc finger protein 5 n= 3 Tax=Aculeata RepID=E2A5P7_9HYME
accagttctgactaatgatttttcagaaaaaaatgtccgtatctcatttgatcactcatcacgcaaattttttctaggaaactttgtggtgaggttcagatcttctggatcttttcacttaagacgacaggattgttgcgtttaatttcttgggcacccatttctctgtagttgaaactacaatcatgtttgtcactgtatcgatgtgtggcacaaaatagttctccgcagcggcattcaaaacctgttaggccaaccttcttgcgacaagtggcgcatcgattcttctttttctttacatctttatcgccgtccttgtcttcgctactggtgccggcgttcatttcgccagaggacgtggagacggttgccacagcctccggttcagcggtagtagagttgcttgcggcagctgaggctgtatttgaacattcttcagaagcatctgtgggaagatctgtgactactggtgatgaaatatgactaatggtaggctgtgctgttgttgtatcttttagagcactcagacttgtgggggtgttgggtaactgttgtttctttttcaaattttccttgaaacatagtgaacatagtccttcagtggcagggttgccataaaatccacaaccagaaccacacaaagcttgcatggggttaaattcacgctccattgtagaggaaaaacttttaacacctcaccaagttgtacaccaactattacctattggctccccaagtccaaagctcaccaaatctgaaagaggacttgtctttgtctttggtaatcttgttgagttgaaacaattgaaccctattaggacaatagcatctataagaaagtcctgtcaggaattaattctttgagatactaatttatttgaaaaatcattgcctaat

SEQ ID NO: 9143 - DNA, 896 bp, Diabrotica virgifera
  SmartBlast Evalue=3E-85; Info=Heparan-sulfate-2- sulfotransferase n=1 Tax=Tribolium castaneum RepID=D6WJV8_TRICA
tttaaattgggctggaatgtatattatattgtaatattcactttaaaattagttttaaaacatcgacaaacacaattaaaaacgttgattaacatcgatagaccatgttatagtaccattgaactgaaaattatgtttaaacctttaaagttaggttatgttttgatattactgctcttccttggctctattgctattttataccaagtacaactaacaaaattaagtgataaattacaagaactagaagaaaaccagaaacaaaatgaagcatttactcatagagaaaacctcttttggaggaaaaagacttaattttattatacaatcgtgtcccaaagactggatctacaagtttcgtaggagtagcttatgatttatgcaagaaaaataaatttaatgttctccacgtaaatatcagctccaacagccataccataactttggagaaccaactgaagttcatacacaatgtaacaaattggaaaagtcgaaaacctgcgctatatcatggacattttgctttttttgacttttctaaatatggggctccaaaacctctttttatcaacttaatacgtaaaccactggacaggttcatatcatattactattttgtaagatatggggacaatttcagaccatatttagttagaaaaaagcatggtaatacgatgacatttgatgagtgtgttgcaaagcaattgtcagaatgtgatcctaataatatgtggctgcagatccctttcttctgtggccattctgcaaactgttggaaacccggtaacaaatgggctctcaacgaagccaaaaagaacttagcaaacaactacttcctggtaggtgttacggaagaactggaagacttcatccaaatactcgaagtatcccttcca

SEQ ID NO: 9144 - DNA, 899 bp, Diabrotica virgifera
  SmartBlast Evalue=1E-107; Info=Proteasome subunit alpha type-6 n=3 Tax=Apocrita RepID=E2AJ67_9HYME
gtgacaacagaaaaatatagaaaatcatcctctgtgtttccgttttgaacttaacttgtatttagtttaaaaaataatcatgtctagaggaagcagtgcaggttttgaccgacacataacaattttctcgcccgaaggccgactctatcaagtagagtatgcttttaaagccattaaccaagccggccccacttcggtagcagtccgaggagtagatgctgcggcgtgtgtgacccagagaaagatcccggataagctgattgatcccaacacaattacacatctgttccagttaacagaacacactggatgtgtgatgactggcatgattgctgacagcaagtcccaggtgcagagagctagatatgaggctgccgagttcaaatataagtttggatatgagatgccaatcgatgccttgtgtaggagagtatcggatatttcccaggtttatacgcagaatgctgagatgagacctttgggttgctccatgcttctgataggatatgaccaagaaatgggaccatgtgtctacaaagctgaccctgctggctattactgtggctacagagcagtaagtgtaggatccaaacaaactgaagccaacagctacctagagaagaagctaaagaagaaaactgatctgtccaaagatgaagtcatccaattggcaatcagttgtctttcaagtgttttatctgtagattttaaaccaacagaagtcgaagttggggttgttactaaggatgagcccaagtttaggaaattgacggaacaagaaatagatttccatctgacagctattgctgagagggattagatagattttttatattcactctttgtaatgttaagaaatggtcaaattttgagttaagtaagaaataaatttttctctt

SEQ ID NO: 9145 - DNA, 896 bp, Diabrotica virgifera
  SmartBlast Evalue=6E-33; Info=Painless n=1 Tax=Tribolium castaneum RepID=D2A388_TRICA
aaacatacagtagtccaactgcggaagccgtcgactaagcatttcaattcgccaactcgtccaagtctgcaggaaaatatgttaaatgtgcatctgaaagtgctgaagtgacaagtgtcttcacatgtgcgacaacaaatgtgctaaattctgaagattttggattacaaaaaaaaatatctcttgaaggtctaccatgtattcgaagataaacaatggtgataaaagtaccatatttacaagaactaacagtatttgtcctcctcccgaaggagtacttctggatcgtgttctaacaaacgaaacagaccaattggagacgatagtcaacgagaaacttctaaaatatctatatcccgaccacagcaaacccatcctgttgatagcatgtacagcgaaggaagtagaggcaaggacagtcaagttgttaatagacttaggagcagatgtacggtaccaagacgaaaatcaatgggaggcgcttcattatgccgctgaaagagctgactactttgtcctaaaagtcattatagacaaactaaaggaaagaaagttccacttaaatgaagttttagcacaaggtagtaatgctttacatatacttattagacatggtaataaaaactccaaagattttgtcaaatgtgctaagcttttaatagacgaaggaataaatgtaaatttggcagataacaaaatgatgactcctatcctttgggcagctaagaaagacttaaacgatatcatcaaagtgattctagattatagccgtgtttcagttgatattgattcacataatcaagaggccgaactgctagagatctgataacagctggaaacttatacgatggatcattaccagataaaggggataacaacaacttaaatggaatccc

SEQ ID NO: 9146 - DNA, 896 bp, Diabrotica virgifera
  SmartBlast Evalue=2E-69; Info=Putative alcohol dehydrogenase n= 1 Tax=Gryllotalpa orientalis RepID=Q6RUR3_GRYOR
atttgttattgatagagcaaagagcaaagatggtattcgacgttcaaggaagaagtgccgttatcactggaggagctcaaggtatcggtcttagtatagcagtggagttacttaaaagtggattaaagggagttgttttagcagacatagaaagccagcttggaaatgaagcaatcactaaattgtcgaatcaatttggaagtaacaaagcagtattcctaaaaacagatgtaacaaaagccgatcaactagaagctgcctttaaactagcagtatcgacatttggagcagttgatatagtagtcaacaatgccggtatgctcaaagattctcaatgggagctagaaattgcagttaattgtaacgccgttgtccaaggatcattactgggaatcaaatatatgggaaaaaataatggacacaaaggaggagtcatagtaaatgttgcatcgatttatggttttcaagaagtggaagctgctccggtatacggtgccaccaaacactttgttgttggtttgaacaaatgctttggtgcaaaatactattacgatctgacaggtattaaatttctaactatgtgtcctggaataactgatacaacactagtgaacgaatcagcaggatttactttccaaggatttcccaatttgggaaaaatgttaagcgaaggtttagcatcaatgccccaacaaacgccagaatatgttggacaggggacggtgactgccattaccaatggagagcatggtagcatttgggtctcagaaggaaaggaacctgcctacgaactcgacgttcctgatcggaggacaatgagaaagcattaattgatatttaggacatacatatactaccaaaaacgtgattctacatttattctattgttgtaaata

SEQ ID NO: 9147 - DNA, 898 bp, Diabrotica virgifera
tagatatttattgaagctgaaaataattggggatttagatccatacgcaattcagtcagaattggattttacagtaaagtgcagtccatcaagttactattatagatatttatacatatctggtggagtctcacagttgctactctaagcagcagatgaaagcatacaaaagccttcaggcacataaatattttacagctggatttgttttgaatggagtaaaaattgttaatgatttcctgatttccatattattgttggaaaggtgaagcatttccaaaaatctaatgctaaacgactaaatgcttgggtggggtgatagccagttctgatgacatagcaaatgcacattgtatgcgtatggccggtaatagtgaagtctgcagccatattgcagcaatcctatttttagctgagtatgcccagggcaagacagacgaagaagaacccaatgcatgtacatatgttacagctacatggtttggagatagcaacatatgcattctctgatgaaaaactaatgagttttgaaactgttcggtcagagtgcttgttgcgctcactaaacgaactgaaatataagatggctttggcattgtgttgcagcgatatgaaaatggttattcatttttaattataatgtacttcttcatcatgagtaattatgtattggtcttttaaatgtgtatttatttttgtaattagtatcaacttgtaatgataatatacatttatcgtttaaggtatgactatgttttgactctaaaataaatgatttaaaaatcgaatcctgcctctttctgttagtaactacccatggatatcacaaatagtgattactgataggtttgttcgtagaatgatcagcaactcttgccaaccatcagacacatgcgca

SEQ ID NO: 9148 - DNA, 896 bp, Diabrotica virgifera
ttgaccatttctatattgtaggaaatttaattacgcaacttttatgtcagtacaacttttctcagaaatgaatagttttaaagttataatcaaaaaaccaataaaaaaatcgaatttttccttcatattttgacattttgattgtttaaacaatgttccggaccattttgagtgggaggatagctcaaatattattatttgagttgttttcaagcaatttctgcaaaaaaattgagtcacctctcaacgtccatctcaaaacagatgctccctggactataaaggaacttgttcaaaataacaccatgtcgacatagtgtagtttacctccgagatccagaactgtagagctataatctcatagtcattgtctgagttagtaagtatttataataatcgttcttctaactatttgatctccttcagatgcaaattgtagttttagaaactgcaacatgaaaaagttctgcctatgagctgccaaaccacttcctcgagtccttgaaccatgaattttggcatattcctactgaccttataccctctattatggtcgaagtattatcattcacttcttaatacttgtcttagatactacatttttctttcttttacagtgttgtaacacattcgatgcccattttgaacaagcgccacttggctggtaccacatacttaaatcgttaagttagtaacacagtataactgaagacacttatgcgccatcgatacctttgataaaatcttcgtggcgctacacgtgcatcatggacaccgaacgtgttaatagttctttttgtttgctcatgcgtggagaacttcattgttgatgatcttttgtattcatgaaattagcaatatccttgcgtatacctaaatttcactagtatccacat

SEQ ID NO: 9149 - DNA, 897 bp, Diabrotica virgifera
  SmartBlast Evalue=1E-119; Info=Translation initiation factor 3 subunit f n=1 Tax=Glossina morsitans morsitans RepID=D3TMC1_ GLOMM
ttcgtcatcaagatggcactaaacttgcaagtaaaagtccatccggtggttttatttcaagttgtagatgcttacgaacggagaaatgctgactcccatcgagtcattggtaccttattgggtacggcagacaaaggagtcgtagaagttacaaactgcttttgcgtgccccataaagagactgacgatcaggttgaagcagaactatcctatgccatggatgtatatgatttaaatcgaagagttaattcgagcgagtcaattgttggatggtgggctacaggccatgaagtgactaaccacagtgcagttatccatgagtattattcaagggaatgtaataaccctgttcatatcacagttgacacaagtcttcaaaatggtagaatgggtctcaaagcatatgtatgtgttcccttaggagttccaaacggtaaacaaggctgtatgttcacatcaatacctgttgatgtagtctgttatgatccagaagtatttgctcttcagttatgccaaaaaacaatggtagcaggagcttccagatcaagaaatgtcaatcccatgcttgacttaaaccaagtatcagaagctggaagtaaaatgagtgtgctgctagaacaggttcttcagtatgtggaagatgtattggctaacagaatagcaccaaacaatgctgtaggcagatctcttttagatttagtcaattccgtaccacatatgaacaatgaacagttctcagaaatgtttaacagtaatgttaaagatctcctgatggtcattactttatcacagctcattaagactcaattgcaattgaatgaaaaattaacattgttaacatctttttaaataaaatgttactcatccgtttttcttaaataaaatattcttccaacc

SEQ ID NO: 9150 - DNA, 896 bp, Diabrotica virgifera
  SmartBlast Evalue=2E-25; Info=Endonuclease-reverse transcriptase n=1 Tax=Bombyx mori RepID=D7F170_BOMMO
ctatccttccctgactagactctctcatcctggccgcattaaattcacttcttgcccattccatccgtgttgacaattcattggactataccgaacagtgatccagcccacagttatttacggaagcgaaacatgggccatgaacaaaaattaagaaaagatgttgaatatctggaagcggagtgtcctaaggaagatattcgggggagtaaaagacaatgaagacgtttggaggagacgaacaaatgcggagattagagagctgtaccggaaaccagaaataagtcagatcgtctgaacaaagagacttagttggttaggtcatcttgcgagaatggctgacggaaggtgggcaaaggactcgctgataagaggggaaggaaagacgagaagaggaccaccaagaaaaaagtggctagaagcgtctaaggaagacctggaaataatcgggataacaaattggagaactgcggccatggacaggagaaaattgaggaaaaccgtggagaaattccaagccgtgggcctataaggcctgttgagctacaaatatatattttgttccaatttctattgaatatattaatttcttaattttgtgttttgttttgctatttttttcttcaaaaaatagttggccttctccctctttcatcttcaataatctatctttatatttttaataattatcttctatcctttcttctttctatatcgtcgacgatgggtaaccaccacgtagaatgaaccaaattaaggcggcagctgtcttcgagaccatgcagcttcttgaagacaaaatggcaaacatctaagacctacccacatcatctggagccaacaacgtccaactacatcctgcacagcaagcaaaataatccaagtaccattttatt

SEQ ID NO: 9151 - DNA, 892 bp, Diabrotica virgifera
  SmartBlast Evalue=7E-34; Info="WD-repeat protein, putative n=1 Tax=Pediculus humanus corporis RepID=E0VVJ3_PEDHC"
gtgcttcatttaaatgatcaacttttggttttatagatggatttaacacgattcagttgtttcgctgggacttctagaggctttttacttactctaggtgagaaaccaaaagatataaaacatgtgaaaccagaggcttcatctgaagtaactgcccttgcctttagcaaagatcagaacacaatatttgttggttttaagaatggtgccatacagtcttatgatcctttactaaatgaattcaaagagacaatattggatctgtctggaaaagggagtgttgtaggtttaggatttacggaaaaaggtctacttgctggaaaagcagatggtactgtaaatatttggagtgggaagaaaaatgaacattttaatctcagtattggtaatgagggaacacttgattgtcttgtactaaatgaaaatagaaattgttttggaactggaggtgaaaagaatgatttgaaactctgggatgtagagacacagcaatgtatttttaaagccaaatcgatgggccacgataaacttaatttaccaatacctacatccataagaggtatcacatttttcccggaagatccccatttaagttgctgttgtacaaaagagggtcatgtattgctatatgacgataggaagcaaaggcgaccagttgtaaagtttcttgagccaaaagcaagctacactactattgcttgtgcctatagggataggcaatgtttggtgggtacaacgaaaggatatatgcaactattagatatgaaagctggcaaatgtatgaaaacattcacatcatttacaggaagtgttagtagtattgtatgcgatccattggaaccttatgtcttctctgcaagtttagatagatatttgcgagtgcataatttaa

SEQ ID NO: 9152 - DNA, 896 bp, Diabrotica virgifera
  SmartBlast Evalue=1E-172; Info=Pre-mRNA-processing-splicing factor 8 n=1 Tax=Culex quinquefasciatus RepID=B0XAY2_CULQU
ggaatcactcacttcagatctggtataagtcacgatgaagatcagttgattcctaatttgtacagatatatccaaccgtgggaatctgagtttatagattcgcagagagtgtgggctgagtatgctctgaaaaggcaagaagcgaacgctcagaatagaaggctgactttggaagacttggaagattcttgggatagaggtatacctaggatcaatacgcttttccagaaagataggcatactttggcgtacgacaagggatggagaattaggacagaattcaaacagtaccaagtactaaaacaaaatccgttctggtggacgcatcaaagacacgacggcaaattatggaacttgaacaactaccgaactgacatgatccaagctcttggaggtgtagaaggtattctcgagcacacattattcaaaggaacttatttcccaacatgggaaggtctcttctgggaaaaagcttctggttttgaggagtcaatgaaatataagaaactaaccaatgcccaaagatctggtttgaaccagattccaaatcgtcgttttaccttatggtggtcacctacaataaacagagctaacgtatatgttggtttccaagtacaattggatttaactggtattttcatgcatggtaaatacccaccttgaaaatttccctcattcagattttcagagctcacttgtggcaaaaagtccatgaatcgatagttatggatttgtgtcaggtatttgatcaagaattggacgcattagaaattgaaactgtccaaaaagaaactatccatcctagaaaatcatacaagatgaactcatcttgtgcggacattttactgttttcggcatataaatggaatgtatcccgaccgtcattattagcagac

SEQ ID NO: 9153 - DNA, 896 bp, Diabrotica virgifera
ctgttggtgcaaccagacattaatcctgtacttgaagatttggtgtaatgttctttgccatacagttttatttgttttccatatagataggtagatacagtgcatagacgccatccccccaccggcacctttagaatatgtgcactgtatttagatagattcaatgaggtggattttggcctattccactgcgactttttcagatctgttgtggtcctctatctgctctacccgtaatattctctctctctcttgaccctttttaaaaggtctaataatttactaagcattgcatgtagatctttgccggaggcttttcttcgtctaacattacaaagaatcgcacatttgctaggctgtcacatagaaaatcccaagttattgttgacaacaacatcaatccgaatgatctataaaaatagttatctagatggacaattccagggttgatgacatgttttccgacacatgcaaggtgaaattagtagaagtagtctacgaagtttatggaaaactcattcaacttaaacatggggatgtccaactggatgtagctaacacttctgccgaagaagccgatgaaggttcagaaaatatcaaagattgcatgaaaaaaaaactagttgcaaaattggaagagaaagcacttgatcaactacacattttcacatctaacatgaacaaagtaataaacaattactacagaaaaaactcgaggaatatttaacggtcacatgtcttatagtcatcatcttcttctatttgtacgtattatactacgtgtgatggtaagaagcagcttttggcctctggaaaacaagacatgctacggaacgctctttgaacaacgctacggaaccatgccgttatacagaaacgtactaacacaacagccc

SEQ ID NO: 9154 - DNA, 897 bp, Diabrotica virgifera
  SmartBlast Evalue=3E-61; Info=Glucosyl/glucuronosyl transferases n=1 Tax=Aedes aegypti RepID=Q17HG0_AEDAE
gtattggtatagtggcatgtccactgctgtggttctcatgaatggagctcccttattgttgaccacataattgatccaatataaagctgtatccgttggggataagggtcgatctttgaatgtttttgatagcagttgtgcttttccggcaaattcggcactcaacagtttcttaagagactccgtgacaacttcctctgtgatttcacttaacataaataatactcctccttcgcgtttttgtactgctgcagcattagtaaactgatctccaaattggggtaacattaacataggttttccataataaacactttccatgacacctaacaaacctccgtggctaatgaatacttttacgtttggatgacatagaatatccttttgaggagcccatctgacattatatacattatccggcttgtttttcatctcaccttcccatttccaaataaccttttgcggtaacttcgaaaaagccttaaaaaatgcttgcttctttgattccggaaaactgtctccttgaatagtagatcccatgctcatgtaaatgactccatgtggtgctgacttaagaatatcgtcaatgtccttgggcagtttgttggcctgctgttgatccacatgtattcctccaacttctatgacgttaggcactaagggaatcggcagattaagtgaataatgcgaatttattaaaaataaactaatcgacttcataagatcaccgtgatccaacacgtctacgcctgtatattgttttgatagagcgttacccctggaagctatgttgatgcgatacatgaggttgcaatagacatgcgaaattgtgttttctactcttccaaaaaagctcatttcgtcagtgtttcccaatagatgatttggaaggtatgc

SEQ ID NO: 9155 - DNA, 894 bp, Diabrotica virgifera
  SmartBlast Evalue=1E-119; Info=Dynamin n=4 Tax=Apocrita RepID= E2AA61_9HYME
gtcgtcgatcaagaagcatcgttcgcgcgattcaaatcaaaatcaaaagtgataaaagtgccttgaactttcaaaaagtgatagtgatggcggggaattcaggcatggaacagctgatcccggtggtaaacaaactccaagatgcgtttactcaactgggagtgcacttaagcctcgatttaccacagatcgcggtggtggggggacaatcagctgggaagagttccgttttggagaattttgtaggaagagactttttaccgagaggagctggtattgttaccaggcggccgttaattctacaactgatcaactcaaaatttgagtatggggaatttttgcacaagaagggcaacaaatatagcgattttgatgagatcagaaaggaaattgaagcggagacagatcgagttactggtagtaacaagggcatctccaccatacccatcaatctcaaaatatattcacctcatgttcttaacctgactctgatagatctgccgggtatgaccaaggtgcccataggagaccaacccgttgacatcgaacagcagataaggaacatgattatgcagttcatcaatagagattcctgccttatcttggcggtcacgccagcaaacacagatctggccaactcggatgctttacagatcgccagagaagtggatcctcaaggatatcgcaccataggtgtcataaccaaattagatataatggacgaagggacggatgctaagtatattcttgagaacaaactgttgcccttaagaagaggttatgtaggtgtcataaaccgttcacaaagagatattgatggacaaaaggatataaaattagcgctggaagctagaaaagaaaatatttcttgggcatccgtcctatacacatata

SEQ ID NO: 9156 - DNA, 888 bp, Diabrotica virgifera
acgttctatcggtacgcgtcggctaatctaataatcctacctattcttttctcagaagggtttgaatataataatgaaagacaactttctaggcaaaatgtttattgcttaatactaatcaatatttcattatacaataaactttatgcaagtttagtttgtttactattatacaaattacacctttatcttcctgggtggcgaaatccttcaggtagatgacaccctcgatccctcgaggtattaattagtcttaattactactcctgagtgaatatacgtgttaaacctaattatattacttgaatgtgctgaagttttaaaaaaactaattcaactccacaagaagttatttccaacggaattagctttcttctctcaacgtaggagcgcctaaaaaaactacgtgcttagataagtttcgatatgcatgtttctttaaaaatactcgaaataaaaaacaagtgcaagtatctttctcctaacctcagcggctgctcatcaacatctttttcgggtatattaccaagttcaagtgtggcttggttatcagctacatccaaaagactggggatggaaattagtcgacagttcattagaaccaattcaagctttactcccacctgcgccggaaaaactcctgaacacaattttttgcaactgtaaaaagggatgtaatgctaaatgtggttgcaaaaaagttggactgttttgttcggtagcatgcactaattgtcaaaaccggtcgtgctccaatgttgaatcaccaacaattgaaggattcatttgattactatcgaggagccatgcgatgtgtcattattgggacaatttacttcacccaggatgaacaagaagaagaagaactaagaagaagaagaagaagaa

SEQ ID NO: 9157 - DNA, 895 bp, Diabrotica virgifera
  SmartBlast Evalue=4E-26; Info=Epsin-2 n=1 Tax=Camponotus floridanus RepID=E2AIR0_9HYME
tgagaaaggattcgccaccagtgttgggttggcgggtttacttgttacaagattatctaaattcactaatgccgaattttctccgagaaaacttaggggcgtctttttggtggtacccgtcgatgtgttgccttcactgtctgtcgttgtattagtaggtagactgtcgcctaacaagtttaactcgaaaggatcagggccgcttccgttcgttttcggggacgtagatactttatttctatttgaaattatatcaaactcgtccaagtccgttgagctctggctggcgggggaccagggatcttgcttgggggtgggcgggaccggcgaagtgctgatgtttgggggggacaaccggtaccccccatgggtctgttttttgtgtagtagtgccagtggccccggtccaaggactcgctaaaggtacttcaggtggcgatgatagtgaagaagggtgccaaggcgatgtttgctgtggccgtggaggttgcggcataccccaaggatcgactggtgcttgatctccgcccaaattaacatctaataagtccactaaatggctgtcttcgtgctttctcttatcttgggttgttttgaaatcttgctggctctgacttaatgctaactggagccgaacatcatccgatttcctcttttgttcttcctggtctgcttcttctcgagacatcgccaaggctaactgtaactggagttcttcctcgcctgcggtttgaggccttgcgatttctatatctctgggtaaatcgactgcatctctagatccccagtcacctctgaaagccggatatttcggactgctaggtgtttccattccatcactgccgaatgcgctagcactttgcgcgaatcgctctttggcttttaatgctcgcgc

SEQ ID NO: 9158 - DNA, 896 bp, Diabrotica virgifera
  SmartBlast Evalue=6E-83; Info=Glycoside hydrolase family 31 n=1 Tax=Chrysomela tremulae RepID=D3YHE2_9CUCU
gttagaaaaggttggagagcgattttaattgcaattctactggttggagtgaatcaagttttagttcaatgttctacagtaaatgaaataattctcaaaccaagttcaaatggattggccattgaagtaaatcagaaagaagaaaaaaaaactgaaaggaacaatcggagttggcatagacttcaccaatattaattgttacggacaagaatcctgtcaagttggagatgctgatttttcagtaaaacaatctgaagacggatttcacatcaaatgggaaacaaataatttgacgagtgtttttcaagactgcttcgattttgaagagggtgtccactggtatggaggcccggagagaaagaaacaaagctggcccatagagaaattggaaattgaaagttatcaggcgtatgtactacatcagttggataattttgctgtagctgaacgttactggttgaactcaaaaggattgtatatctatctaaattctaaagtacctttgtatgttgaccaaaatatttcgaataaaaatagagtttgcctcatggccaaaatagaaggcccttatattaatagacataagaattttttggaatatgatattgtaataaaagatgatccaagagaagcgcacgtacacgctgtcaagacgtttttgggaaaaccatcaggatatccagatgagcgaatgataactgaacccatctggacaacatgggcaaaatacaaaacgaaaatcagcgacgaaatcgtacttgactttgcgaaagatattagagataacgggtatgaaaagggacaaatagaaattgatgattattgggagaaatgctacggagctcaagaatttacaccaacaacttttccagacataaccaatactataaaaactc

SEQ ID NO: 9159 - DNA, 878 bp, Diabrotica virgifera
cattcgaaacatttctagaactgttgatagatggcgctataatcgcaaaaatacgatttattagcaccatctatcaacaattctaaaaattgtttcgaaaaaatgttacttactctttcatgaggaattcaaaactgcaataaaaaatgggggttcctatttaatattttagagtaagatttagagtgggggtcgtctttggtgtcattatacaggtttttgaaaaatattaaacacatgttttttggtttttcatttcgaagtgtatttgtcgagatattagaccgtttctataatttacctatagtatcacgataaatcgttttttacaattatagcgccatctatccacaattacaaaaaagtctcgaataaaggttgcttacttttatgtaaggaatccaaatctgtaataaaaactggggtttctatttaagattttaaagctaaccccctccccccacccccagggagtggagtagggggtcttgtttggtgtcattcgatagattttgaaaattaccgaacacgcacttttcagatctttcgatctgatattcatttcgcgaaacattcgaccgttccgccacttttgggataccctatataattagcaaaaattaattatagctaaagcttataaaatttttggatgaatcgttgtctttgccgtcaagcgcagtttatattaatgtgcccttagtgtagaaatatagtgaagcgtcgcacatcaccacaaattgcatactcggcatggtagaacatatcgcatcgatatgttcgcggcgaggtgtctgaagatatgcgtggcgatgtgtgatgcttcactatatttctacccttatatgtagttgaaaattaaactcatacgatcagcc

SEQ ID NO: 9160 - DNA, 892 bp, Diabrotica virgifera
  SmartBlast Evalue=2E-64; Info="Acyl-coenzyme A oxidase 3, peroxisomal, putative n=1 Tax=Pediculus humanus corporis RepID= E0VMW2_PEDHC"
agctgctaaagcgtcaacgatagttgcaacggttactcttcctgctgatagagatcctaaggcagctccgtgtcttctattgggatctttgattggagttatgtaacgcccatcttcagaaacgtctgctattttgttgagtaagttgattctgggtatttcgtagtttgtaaattggacaacaccgttatcagctccattcaatccgatttttcttcccatatcccatatctccaatcctgggtatggaatcagcgtcttgggatcacgaagtggtactagaaaggcatgtaaaccataattaacaccatctaaaattaactgcgcgaagacagttccatacatagcagtctgacctaacccaccagcccagcatttagctgactcgaaatctggtgaatttattataaaaactttcttgtgtttgtcataggtagctatcgttcgcatgctttttgtgttacttccatgtgcaatctcagttaaacaatagcaacctagaatctttccagttttagcatcatcgatgatcttgtgatgtctctctgttcccatacttaatatagaattaacaaaaaaacctattagcaactaaatattttgcgtacgaggatggtattgctgtcgttagtattctaacaagggccgaagggcgtcgtaagttttgcatcaaataatcaaaggaaaatgcgtactgttgactctgatctcgagatccaagaaaggcaattctgcgttgattgtctctagacagaccagcgacattttgttgattgtataaaggattgttttccagaattttgtatatttcattctgaaatttaattccatcttctgtttcaaggaacaattttaattttttacaatcaaaagacgtttttttgcgatacac

SEQ ID NO: 9161 - DNA, 895 bp, Diabrotica virgifera
  SmartBlast Evalue=1E-12; Info=Svil protein (Fragment) n=1 Tax= Mus musculus RepID=Q99KQ8_MOUSE
atagtaggtggtgggtactgtgggtaggtaaaaataccgaaatccaacatgaatacttgtgatattattcaactgttaaataagcaatatgaagagccttcctttgtggtcaattcccttaacatcgattcaactaacgtcgggcgaggatttacaaaggaccccaaagataaaaaaatacttaactacatagtacagacccattctttgtctgtttcacaaattgttgacgataaattggtaccagtagaatctattggcgctttcgataatactaatacgtatctagttcattgggcctttaccatggtctatgaacaaatggaattgatattagagaatgtgttcttttattggaagggatccaaagcgcccaaagggctttctccattgcctccagatgttgataacgagactgctattgtcaatagaatcgtccaatggagtgaacctccagtatttttccatttgttggaagaaaaacgtatggtcgtcttcgaagacaattttgatccttcaagtccacatttatttattgtacttggtgaactttccaaggagttgcatttatatgaagtatcatttatgaagaaaaacttaagaagtaggggagtgtttgttatagcagtaccacaaaagaagattatatatatttggaaaggttcacagattacaaatgagctagatgcagtagtcaaaggagcatgtttgggtaatacagtcagaaattatgtagattcctggaaaaattttgaaatattagagatgaaagaaactgaagaggatattttgtttgaaggagatactagtgaatattggcacgttaaggaagtgtgtaattattcaccgaaattgttctttctaaatacaattattggggatttctcagctacag

SEQ ID NO: 9162 - DNA, 893 bp, Diabrotica virgifera
  SmartBlast Evalue=3E-22; Info=UPF0389 protein CG9231 n=4 Tax= melanogaster subgroup RepID=U389_DROME
tttttaattcgcatttatatacaattgaatacacactacataattcttagggccggtttttcgaacgctaatcaaaaatggaatcaactgatcattatcaaatatttaattactgtcaccaactgtcaatgtcaactttgtttgggttgctgaaaacataattgattacaattatgagatttattaatcaattatgttaataattgttaagttaattaataattcattaatcaaccaattatgttaattatcataatgataattaacataattgattacaattaactgattgacgtacgaatgaggggtgttgttatttgatggttgttaaggggacttaattataataaacttcttgattagcgttcgaacaaccggcccttaatgtgttatatacattttatgctctaaaataatttaacttatgcattatcttttttggcctcatgctcagctttaattttcgcatgccaatctttattttcctgacttaaagtttttcccttcttggcatcttgttttcccaaataaaccatagcaagacagcctacagctgtagcagccatcatataatttgcaattttaattctcattctgtttctacacctctccattgtactttgagtaacataaggtggtacttctgcaacatttttatatttgcctgtccataccaaaaatttcttttctaagttgttaactttatgtgatgattccagactatgtgtaaacctaactaaagtagtaggtttcagacgctgtgtttttgcaaaaaaatttgaaatgtagttcataattatttattctttttgcctacaaggaatataaaaaatatatacgtcaaggttatttaatcgaagtttggaatttggaagtttttctgtctgtatcct

SEQ ID NO: 9163 - DNA, 896 bp, Diabrotica virgifera
gtacaattccctccatatttgaacaacattccaccttcagcagagaatacagcctctccatcctcatgatttctcacctctaagacagccatattgaagtgaactccactgagatcgaaagtgtggctctggccaggcaaagagttactagatgacgtggtccaaggtgtaccatcctttcaacatgagtaacctctgcttcgattttaacagttccattatttgtaacttggaattgatcttttgtttctcccgctccctgtttaggaggttgagtcatgacgagcactgaagaatgaccagccaaatggaagttttcaactttttgtagaacctggacttcattatcgagtttttgtacattctgttcgaagtcttttagtacattaccaccttcagcggaaaatacagcttgtccttcttcatgatttgtaactttgagaagagcattgcggaagtggacaccactaagatcgaatgtgtggctctggccaggtagaatagttacaagatgacttggtccaagatgtaccatcatttccatatgtataacctctgcatcaagttttacatctccatgattggaaacaaggaagtagtccttctctccaccttgcttgggaggctgactcataacaagcatcgatgagtgaccaggcagatgtacattttcgactttgctaagtacctcgctggcgtgctggctggtgagtaccacggtactattcatgtttgcgccagtctggttgttgactatctgggtggtagttacggtggtgacgtggacttcactcgtacgttgaagcgtcattcctactgtggtgcctccgagttgaatcatggttgtttggtgagattgttcggcagacataatgaatagtttgtttgcagcgggt

SEQ ID NO: 9164 - DNA, 894 bp, Diabrotica virgifera
  SmartBlast Evalue=1E-75; Info=Serine/threonine-protein kinase mig-15 n=2 Tax=Formicidae RepID=E1ZV73_9HYME
cttgcgacgaaaatcccgatgccacatatgacaatcgcagtgatctttggtctctcggtattactgccctggaaatggcagaatctcagcctccgttatgtgagctgcatcccatgcgggctctcttcctaattccaagaaaccctccaccacgactgaaaagtaaaaaataggaacaaaaaattccacggctttatcgagactgtgctagtaaaagactaccacgaacggccttacacagagcagctgctcaaacactctttcattagggaccaaccaacagagaggcaggtaaggattcagttgaaagatcacatcgatagatgtaaaaagagaaagcaggagaaagagagagaagactacagatactcgggatctgagaacgaagaggaagagcctcaggtcgccggagaacctagtagtattattcaagcaccaggtggtgatactttacgaaggaacttccagcaaattcaagaagggcgcacccttagccaagttgaacctcctccaaggggtggtaaaaataaagatagggaagaaattccagagccaggaccacccgctagacctccaattcctcaacgaatgatagttgttccagatccagctcctccccgaaggcctttaccgccacctcctgacaacaactttggcgcaccgaagtctcaaaatcaacaacagcaaagaaactcgcagcaccaattcaagccgatgcagggtcctgcacgtaagcctgaggaactggatgctctggctgctcatttgaacgaactcggcgtacaacgaacgaaccaaccggaggcgccaccccggaacagaaactacaagcaatcacaatcggcatctaataacaatgttacaactccaagctcagcggtgaatcacacaccg

SEQ ID NO: 9165 - DNA, 896 bp, Diabrotica virgifera
attattctactcaccgaattgattgagatagttagttatatagcccgagaagtttggttgataagccagtcttctctcgactcttgttttggtcgtgacagttaagtgaactctgactcttcaacaatttgtcaattattttactttcccaataaaacaatgtcaatcacgaactatatcgtcatacttgcttctatccttattgcgtctacagccgcacagaggggattttatgctggcagcagtccgaaaggcatccccggtgtagcagcacgatttagacccggaggcagcttgtataatcctcctcaagacgtcggtaccagcagtagatttggagatagtagatttggcgctggtcttaatagaggaaaccaaggacctgtttcttttacgggaaaccaaggagttgcaagcagtttcggagcgggtaacagtatatcaggacctgtagttactggaaggttttttaacattatcattcataaccaatggagaacatatgtttacgacccattcgcagacgcttggtatcccaaaagatattaatttcgtgtattaaaatgtatgaaacgactgtgatacaatgtataatataatataaaagatttatatagtaatagacaatatttatcaatataattatcaagaattgtaaaggcagataagtatatacttattctgttcaggaattgacaaaacagaacggtcaaaaaaggatgtatgcttatgactcaaaatttatactttatatccacgctaattctaaattaatacatggattgtagtacagtagactcgcgattatccgagtctgggttatccgagcccctcggttaaccgaggcaaaagtcataactggtgagttacaactttcaactttggcgcaacatcgt

SEQ ID NO: 9166 - DNA, 896 bp, Diabrotica virgifera
tgaacaaaacgccggcattttaatgacattcttaaagtaaacaatggttttctgcactaaacgtactttgtttacgaatgtttgcccctcatacgctgtcaaatgaggtcgctctggaatggtctataaaataacttaagctccaaataaacttaaaacgtaacctccaaatttgatttcccttagtcaaaaacgactcgatccaaacaaaaattatcaattgctagacggaacttactcacgttcgagtcttttcacagactggtctaaaatagtctcaatagaaatagttagtcgtctattgacgtggtggcatgaaaccgtgctgcggcgagggctgggtgaatcccttcgagtaggggttgccttgggctgaagcggggtacactactggtgggtgtccgtactgttgctgctgtggataggaaaggcttccttgcggtgggttcgagtaagcgttggaactcggaacttgggagctatccatcacttgggggacgtaacgtcctgttgattggaagttatactgttgaggatagggtaatgaactgtactgcattcctgggaagttagtagcactagatgaacgaccaaaatagtccgttataccatgaggattagctgccgatgtcaccacggactgttgaccaggagtggtcgccatagatactgactgcggtctactaccagcgccttcattgttaatctgtggagtggatggcttggaagagtcttttgcgtcttcggtgccgttcttctggcctttatcttgcaatggatcaaactcgctcgagttgaccttatttaaagaagaactagattgattcagatctaagtttgatgtatctccagtttcttgaagaccactgttaagtgtcttattttcatgtacatct

SEQ ID NO: 9167 - DNA, 892 bp, Diabrotica virgifera
cccatgacaaactaatatgtgtcttgcaacaagtgagaattgatgaccaagatcgtattatcaaaatttgtattggcatcaatgtgcaaacatacgaattggtcagaatgcgacggaagtagtggaaatacgacgcggagtgaggcaaggatgtattttatcgcctctactttttaatatctactccgaatttattgggtgatattataatatcgcccaatgaatacttagatctaatagcacagtttgtcacaataaaaaaattggtgagcacttagatttcctcacctggaaagcagtagctgaccaaattatcatcatcatggcattttggccttaaatcttgtaaaaaagtataccccgcaaaaataaaacatcggtgttgctacaaggtgaaaacacctacagggctaaaagtaaacttgtgtaaaaagtccattaataaaaaggcaaaaactttataattctttcaatttcgaacttattataattcctaaatcaaactgagtaaagtacgaaaaaaagacaatgtggaaacactactaaaaacattatgaaaatgtctggagaggtattagagaactgcagttttatcttcatattatcgacaatggaaatgaagacaatgataataaggaggataatgaagtatgtgatccctcagaagaagttgacccatttagaacttaatatacctatgcactttttataactaaattaaggttttcgtgtttgtaaaccgaaaattgaagagagctagttttgattctacactcctcatatacagggtgtcaataaactaaatcacaaacagttcttgtacagtgatgccaaattagttaattttatgaaaataaaagttcgcttatatggcgaacaatgtatttttttt

SEQ ID NO: 9168 - DNA, 894 bp, Diabrotica virgifera
  SmartBlast Evalue=1E-120; Info=Receptor tyrosine phosphatase type r2a n=2 Tax=Culicini RepID=Q17AI9_AEDAE
aaacaatatgtacccggagcaccaccgaccaacgtaatcggagaagcggtaagtcccacgtcgatcaatgtcacgtgggaccccccacctgcgaaccgtaccaatggcaatatcatttactacaagctgcagttcgtggaatctgacaggtccgatagcgaggcaaacattgtcaaattgaatgccacatcgtttacactagatgaattaaaacgctggaccacctacaggatctgggtcctggctggtacgtccgtcggagatggtcccagctcgtatcccattacggtgcgaacccacgaagatgtgcctggagatccacaagatgtcaaagtgacacctatagattcaaccactattaaagttaattggaaaccaccacaaactagggataggaatgggatcatcttgggttatcatgtgcacgtccaggaaacaaaggaagagggaaagagttttttcaatgaacccatgaaatatgacgttttcggtgattcccttttggaattgaatatatctggacttcagcccgataccatgtactccatccaagtggcagctctgacaagaaaaggagatggtgatcgtagtactccagtgaatgtccgtactccaggtggagtaccaaatagacctgctttaacactcaaaattattgaacgggagccgacagttacaattgaattggaatggtctagaccttctcagacatacggagaattgaaaggctacagattgagatacggagtgaaagagcaacttttgaaggatgtccctttaaaaggaactcacacaagttataggataaacgatttggaaagaggtgtggattatgaattccgtgtagcaggtcaaaaccacatcggcatcggacaagaagctataaaatacatg

SEQ ID NO: 9169 - DNA, 894 bp, Diabrotica virgifera
catttcgaatatgaatatcagacttttgacactcctcctagttaccgtaggttcctcctatggaggcctcctcttcggaaaaaacagcatcttgcagaaagtaggcgacgccgtcggtattggcaatctcgtaagcgttagcgctgacgctgaagctaaccttcttggaaacaaagtaggtgttgacggagctgtaggcgttggttcagaaggtattggtgctcacctcgcaggagatgctgatgttttgggacagaaggttaatgtccatggtgatattctcgatggacacgctatcgaccaacaccaacacgaagtttacagagacagcagaggccgtcaatacacccttcaacgtcaatacatcggctccaactcggtcttggtcagaaaatacctagacgacggacagatctacgtcgaaggcaaagacgacgacaacgagatccaacacagacaatcagacgcaggtaactactgggatgacagaactggacaagttgtactcatcgatccctctaaactcgcacaaaacaacaacatcaatgttggtggacaaaatcttgtctgggacccagccagcaatggttacatcgtcatcggtggcaacagtaacgtcgtctatgatagagacagcaacggacagctcgtaattagacaaccaagcaacaaccaggttgtttacgaaagagatgctaatggcaatattgtcgtcagacaaatttctggcggaaatcccggaaatattatcatcagagatgacggagctcccgcgtcaagtgctcaagaccaacagtacctacagtggctgttacaacaacaacaacaacaacaacaacaacaacaacaacaacaatattatccacaacaacaacagcaactacagcagcaatg

SEQ ID NO: 9170 - DNA, 895 bp, Diabrotica virgifera
  SmartBlast Evalue=4E-26; Info="Liprin-beta1, putative (Fragment) n=1 Tax=Aedes aegypti RepID=Q17AZ4_AEDAE"
acttattcgatataggttataatgttaaacggtgataatattcgtgactaaatttatattaatactaattacgaatgtaattagcgattgtttggaattaaaagggatatgggaaaagcagaagaaatgggtgataaagttccagcaatgtcagcacaaaacgaagcaagcaaattattagagcaagcccttttggagatggatggtattatttctggaaatagcggtgctctcaaaaatcattccccagagtttaactactcgaaatccccattagatgttaatgatgttgccaacactctggctcagttgttacagaaatccacatgtcctccaccagaaccacacattgaaaaggttctgttacagtggctgcaaaagcctgccgaaacggacgaaaagttcagaaaacttcagtatgaaaaagataaccttcagctacaagttcaagtattatcggaccaaatcgaggctcaatcagacaagatatcagacctagaaaaaatgctgtacgaacgaaaacaacagttatctgagactgaagacaaattgcaaagggaaatcttgtctaggtcctctttagaaactcaaaaactggaattgatgtcgatagtgagcgagctaaagctacagcaagccgccctagagcgcgaaaacttggaattgcgtaacacacactacaataacaacacggacccgaagaaaccaccaattataccaagaatgtcttctcaaccggctcttacgtcgacgccggtacaacatggtgctaaccagcgactgaatagagtatcaccatctcctagtccggtgacgatagcagctaatagttcagggaggatagacatgtcggcgtcttatccagatgcccatcaaagaccaaagactcctcccg

SEQ ID NO: 9171 - DNA, 893 bp, Diabrotica virgifera
gaactgtaaacaaatccctcaatcattcgagaagtaactattggattacaggtatgacgtaaagtaaagcaatctcttccatctgttataaatcgatgcacacattccttccacacgtaactcatgttatcatggcccaagtaacgacttttgattgtatctattttcaatgtatgtacttgatcatcaatttttacttttactaacaaagttccaaactgctcgtaatgtgtagctttagatctttttaaattaagaaagtggtctctattccatttttcgtaggccaggcattttgcaaaatttaatgcatctgcatcttcaaaatggaagacgggtatatcagttatccatataccttgaacttcaactttatgggtcttactaatattatgatcacagtcagccatttctcctctgtaagtcactctccacgctttcagcggttcaattatgtttagtttaagatcgtcagtagaaaaggtttctccataatcttcatttttatctacatacgggtctaaactgatggaagctttaaatttgctttcaccaattttcaagaacatatatcctgtttgtttactgtttctcctagtaacttttaaaatcacagagtctccgtatttatctgatccttccaatgagattacatcaatattcttttgtgagaaagataatgtttgtgtcttttctaaagggcaacattttttccttaaattgctcagtcttcgtttaaaccctatgatcgttaatataacataaaaaaatataactttcaaaaaataccttccatcttttctttcataaattccaaaccttggtgcaggatttttatccatgcatttcacaaacacaataaataaacatgatattagaaggcaagtgatgtc

SEQ ID NO: 9172 - DNA, 894 bp, Diabrotica virgifera
  SmartBlast Evalue=5E-55; Info=Diapause-associated transcript-2 n=1 Tax=Leptinotarsa decemlineata RepID=Q8IT92_LEPDE
tttttaactataaaaatattttattaattttttggagcattttgtcataaatgatttaggctttgttaagggcatcacagtcgtctttaagggcagcatcgatagcatcgtggaatttcaaggcagcttgtctggtgactgtgttttggcaggaagcttcaatgtgagctttggcgcagttcctgatcttggggagagttgagcagatgagtgatttcgatggaagtttgtttctgtgttcgtcgataacggttttgatttctctgcaagctgggaaagaagcgaagtccttttcaagggcacatgggttcaacaattccaaaatttcttcaacagtggaactgcatgcttgttttactacggcaacaatgattttctgggccaatacaggaaggtctttggattcctctggtaaacaggaggcaattagatcgatggctggtttggaacatctagccaagttgttcttgacgagagagcagaaagtttctgatccaagttcgatttcgtcaacgcatttttcaatttttccggaaatatcgtcaagtttttcttccaagtctggacattttgctttagctttttcggccattttgataacatcaagaagaagggtggtgttgaatttcttgttcaataattctgctacttctctgacattttcttcagatgagctgctggagtcttcttttttgccctgaacgaggacagcgcctaccaggaggacagctaaaatcatatacttgttcattttgtattcgtttgtatctgtctactttgaagaccgaacttggtatatttttgtcctcagttgtcaactcttatatactaaataaagtcttgattaggtattataaacaacacgaattgtcgcatctcctagttaacccggag

SEQ ID NO: 9173 - DNA, 894 bp, Diabrotica virgifera
  SmartBlast Evalue=1E-49; Info=Myosin light chain n=1 Tax= Gryllotalpa orientalis RepID=Q49M29_GRYOR
atgaaacaaaaaataatatattatttcttttgagtcgcgtgatggtaaagcaactgaataaaaataaacttaaaaacaaatacataataaaatacacatataagtacaccttttcttatgtgttcattggaattatataagaaacacaccacacttagatgtatccgaattgatgttttcgtcttagtggaaccacacggtagccgtgaagatttacattgactttctgttgtaagttatgatggtgtttatgctgcttcgccttcttcaccttcttccttctcggctgctgttaagagggtgataagtgcctgggtgtcgatcctgttgttgtcgtcgatgtccatggcatcgaaagcgtcgtcgcattctttgccggtgaatttttctccccaggtcatgagggcatggcggaatctgtctccgtcaatggtgccgttttcgtcaaaggatctgaaagccttgacgacaacttcatcatcgtcagtaccgccggaatcagccatacgggtaccgaacaatcccaacaattgagtgaagttgattggtccgggtgcttcgttgatcatctcgtcgagctctttctcactggcgagtttaccaacagcatcgaaggtggccctcaaatcgctcttagagatgatgccatctttgtcgtggtccataagttggaaagcttctttgaattcagctacttgagattgcgaaaacatggagaagacattggaaccagaccttttggctttcttggaggaactctttgaggaggacctggtttcggcgggggcaggagcggcagctggtgcttcgccctcttccttcttcttcttcttgaccttcttttctttatccgccatggttgtcaacgatgttagtttctccaagtaacacccg

SEQ ID NO: 9174 - DNA, 889 bp, Diabrotica virgifera
  SmartBlast Evalue=3E-14; Info=Endonuclease-reverse transcriptase n=1 Tax=Bombyx mori RepID=D5LB38_BOMMO
cacaaaactgagaaaggcattctactaaacgggtaccggctaaacaacacgagatatgcagacgacaccatagtatttacggacgatattataatcatcaatatcacgtattgtaatcatcaatatggactcaatatagacgtaaagaagacaaagctcggaataattagcaagaaaaagataacagaaggtcaactatacgtcagcaaaaccaaaaatagaaagagtgacgcactacaactgcctcggaaccataataaatgaagaatggaccaacaaccaggagataagagcacgcatcagaaaagctagagccagcttgaaacggctgggggcctttttcaagagccacaacctctctcttggcataaaagtaaggatgccgaggtgctacgtcttctctgtccatttttatggtgttgaatcgtggaccttgaacgaagatatatacagaaaagtggaaggcatttgacatgtggctatatcgaaaaatacttagattgaaaataacaaagggtgtagtaattttgcactttttacaattttcataactaaataccaatcttttgtgaaatattgtagtatatttagacattataagaagattctgtttcatatgtatacaaggcattttacagatatctacgacacgtacaacgatagaaacttatatctagtaaattacatacttaaattgatgtatactaatgttaatgtagtatgaaattttaatctgttattaaggtcatagacgcaaaatttcgcgccaatgtgttccaaatgcatcaatcctttcgaatcctgagaaaactaataagtataatttaaaaaatttaaacgaccaagaaatgaaagattgcattattaccgaggccgaaatccctaaaca

SEQ ID NO: 9175 - DNA, 892 bp, Diabrotica virgifera
  SmartBlast Evalue=6E-46; Info=Serine protease 13 n=1 Tax= Costelytra zealandica RepID=B0ZBP1_9SCAR
aaaaacatcaaactaactatacatataacaaaactattcacatttaggctagttccactattgcgttttgtagatgttatccatgaggcgaattttggaactctggtaaaaacagaaggaaacccacgcatgcaattctcgggtccaaatgaaactaaacctatttgaactccatctactataagaggtccaccagaatcaccgctgcaacttcctctaataccctgtccggatgtacaaagatgagtagagactattatctcattaaattctttgcgaactgctttgcacgcttggttagtcataacgtccacatctactttctttagatacttagatatttgaccatcctctgtgcttccccatcccaacactgtagcaacacgcccagcataatcaatattgtccccgatttttatcaaattgacgtagttatttaacgttgcatttctaggtaatttaattaaagctatgtcattttgtagtgtcttttcgttccatttcgaatgcttatagtaacttttagcttcataaatttgtactgtagattcttgagtggcatatacgtcatggagtcccaattttacaactatcctaacaggatcattatctacacagtgagcagctgtcaaaatccattccttatctattaaacttccaccacaaaggttagtttttgatttataatatataaaaagggctgcttggaatggatatgagttcggtgtcacattgtctcctccgatgattcgtaatgttgattttttaatagcgttttctggataggcaaatattgtgtgattgaatgattccgttacttctatctgacagcaggcgatataaacaagtgttattacaattacaatcgcgttcatgtttaccttcgctgtac

SEQ ID NO: 9176 - DNA, 887 bp, Diabrotica virgifera
atatcgtgatattacagttctacaaaaactcaaaccctggacttattcccgtttctgtattttataattatcgttagaaacatgaatattaaaaaatgataattatattttcatattaacttaaggttctatttacattgaaatccaacatcagttcactggcgaagcgtccatgtaaccactgttaccattggtaacagttaaaaatcttgcaaataaatatattttatgacgatgaataattctatttaccaatatttttaccaatagaaatatattattatattatgtggtaatagtacctaactcagttcataaatagccaactactcgtagacacgaaaatattggcgagtttatgtgactcagttgcactttattatactctgttaccagactcatttctggttacaatggttatatacgcacgctggcgctcgggaccggctagtgactgaaaattttgaagaagcgacggcataagcgcgctgtgtatcagtagcgctgttaccagatttaaaattggtgacagtacctataaaaagtgtgcgtgcagttaaccatggatgagtgtcgcttcttaatcgatcaactacttgaaaagtaattctccttgtataattttgaagaaaaaaatgagattaaaaatgaaagacctattttaaacaatttaaaaaaggaatcaacaaaagtagttcgatattttaaatttggttggtacagtgaaaatccttggttatattatggttgcaagaaaaatatactgtattgttggccatgtcttctggtttctaaagaaaaatgggtggaccaggttcacgatttaaatagtgttctcttaaccaagcttttaaagcaaatattgctaaacataatgagtttgttaa

SEQ ID NO: 9177 - DNA, 889 bp, Diabrotica virgifera
aattatactgttaggaataattacagttaagtatagccgttacgaattggcggcgttacggattatccgttacgaattgtggggttacgaacggtcggattacgaaatgtcaaggaatcaaaaattgttgggaatatcagtggtattatcacgataaattattggtattaatataataatatcactatattaaaagtcactttgatagagtagctagggtaaagtatataatttttacaatttacagacgtagttttttaaatatatccgctctaaaaaagtcaacaatattacatttaaaatatgatctcaagttgttcaactaggaaaaatgcacctctttccttagcttctcctttcttggggaattatacagttatacccgtagaatatagaaatagtcggtcagataatcaagcgggctagacgtgaaagtgcatgatcttctctatgaataatctagcggatgatggtttgggcgctggtcagatagtggatacagaaataaaaagctaatagaaattaacattcctatataagcaaataatatcttcgatctacaataacaaaaacaagagacagacattgcttaatttatggacaaaagtaataaaaacaatactgatgaaaatgcatataaataaaattttaacaatatacatgtatcatagtcgtttctgcatcgactatcagtatatctatgtataccattgaactaatctcttgaagactatgccatctacattaccacgaaggtatttcgtcatttttttcagtattaaaaagtgatattctttaaccttccgatgaccaacctttttttgttacacggatgaccaacggggggaaaaatgaccccaggtcaaaaatgtcaaaaatggcaattaac

SEQ ID NO: 9178 - DNA, 884 bp, Diabrotica virgifera
  SmartBlast Evalue=1E-116; Info=Protein pellino n=2 Tax= Formicidae RepID=E2BW57_9HYME
ttttagatgccacccaacattcgatttcctacacattatcgagaaatcatgccgttattgtagaatataccaatgatgaagataccgatatgtttcagattggtagatcatcagaagcccccatagatttcgtcgtaatggataccatagccggcgataagacgggagatacgagagttaaccaaagtacgatatcgaggtttgcctgtaggatattatgtgatagaaataatccaaaaatagctaggatatacgccgccggcttcgatacttctagaaatatatttttaggggaaaaatctttaaagtggcaagaaaacggtagagaaatagatggatgtacaacaaatggtgttttaataatgcatcccggaggaagcttttatggcggagaagccaaatacggatgctggttagaaacatctgttggaggcggtatcttttccttgagagaatctaggtctgcacagcaaagagggcaagtggtggaagaagtcacgaacgtgctgcaagatggaactttaatagatttatgtggtgccactttactatggcgatcagccgaaggtttaagcaaaacgccgaataaacgagatttagaacgagaagtagacgaaattaatgcaggtcgaccgcaatgtccggttggtctcaacacattggtgattcctagaagagtatcacctaatgaaaatcaacaacagccttatgtttatttaaattgtggacacgtccaaggcttacacgattgggccaagatagagatacaggatcaagaaaatgtccaatttgtttagtaggtcggacctgttgttaaagtattcatgggttagaaccagctttttatgtcgattcaggatcaccgtcatttgcttttaatcctt

SEQ ID NO: 9179 - DNA, 893 bp, Diabrotica virgifera
  SmartBlast Evalue=1E-104; Info="COP9 signalosome complex subunit, putative n=1 Tax=Pediculus humanus corporis RepID= E0VC87_PEDHC"
gttttatttctgattttcgtttgctgctttgttgtttatacatattgtaaaaatacagctaaaaacttttaaaaatgagcgaagccaaggaagcaatggaagttgaagtggaaacagccccggtggctgaaaattcaaaatcttccatggaggtaaccacagatacaggcaaaaatgtaatggccccgggagctgttggatcaatcacttgttcccttcatcctcttgtaataatgaatgtatcagaacattggactagggaaagggcccaagaaggagctgtgcaacaagtcattggagctttgatcggcaaacaaaagggtagaaatattgaagtaatgaactcatttgagctagtatttacacttataggaggtgatatagttattgataaggattattacaacatgaaagaagagcaatttaaacaagtcttcagtgatttagatttcattggctggtacacaacaggtgacgccccaagtgaaatggatatcaaggtccacaagcaaatttgtgaaatcaatgagtctcccattttattgaagctcaacccttatgataaaaatattgaacatttaccagtaaacttatacgaatctgtgatagacttagtaaatggtgaagccacaatgctgtttgtctctcttacatacactctagcaactgaagaagcagaacgaattggtgttgaccatgtggccagaatgtcagcaacggattctggtgagagttccttagttgcagaacatcttactgctcagcatagtgccattaaaatgcttcattctagagttagattggtcctggaatacatgaaagctgtgcagagcggacaattgccgaggaatcatgaagtacttagagatgccttttctttatgccacagattg

SEQ ID NO: 9180 - DNA, 893 bp, Diabrotica virgifera
  SmartBlast Evalue=3E-33; Info=Translocon-associated protein complex delta subunit n=2 Tax=Phlebotomus RepID=C6FX27_9DIPT
cgacatcagatgatgtgacttattcctctggtaactctattaaattagaatttatcttcgtcttacatatgtaactctaagcgcattgatccttttcttaggctaacgtgtattttgtaaacgttttataaatataaccaactggcaacctggccatttactttcacatacatgcacgtttacgtggccgtttgttatttaacctgtgtagtattttatattaaaaattatctagtctaaattaaacgtaaaagagaaaagacataataagaacacacgatgtcaaaggctaccttagttgcatttttcaccataatttcagctagcttctgcttgggctgcacaaatccagaagttagttcaaaatcattcaccactttagatgccacaattgtaacaaatatcgcctatatttctgaattttcaattaaatgtggatcaggaaaactaggaaacttgtatgctgccttgaatggacacattagccccgtttctctagttggaaatgacaaattccaagtaagttggactgaagacataaaaaccgccaaatcaggtgaccgtctgatcaaattatatgacgaagaaggttacgttgcctataagaaggctagccgtgccaacgaggatgtatcatccgtaccttcctttgcagatgttgtcgttacccactcaggagcttacaatggaccatggttgaaatcagaatttattgctaccatcttatctttaattgttgcctacgtagcactcgcttcaagggcgaaagtttctagttagagatacaatattcaaattgttaattattttgtttaatttatgtaaacactatgtgatataaatgtaatttttatatcaggctgaaattttttaataaaaacaaatgcctaaaa

SEQ ID NO: 9181 - DNA, 893 bp, Diabrotica virgifera
aaaagtaatatattttttattctcctaaaaatctataaaatacattatcacagcttaaagttaagaaccatatgagtaactgctttgggaagcagctgaacccgagtggcctgaacttacttgggattcgtacgcagctttattttgactatacgcatttttcagatctccaactctagcgatttctcctttctgaacaatttttcctacagggtaatcaaacttatagaagaatccctttgggggcccagtggagccttcttcttcatcgtattttttatcatattggccctcgttgtcccagcttttatcgtaatcaccggaattatcaacttggtttgattttgagttatcggagggctggtactgtccagattggtggtattgaccaccctgttggtatgatcctggttgttgatttgctccactctgctggtatgcaccttgttggtatgatcctggttgctgatttgttccactttgttgatatgcaccttgttggtgttgtccaggctgttgatatcctccttgttggctgtactggttggagcttgaagcaactggcgtgtattgaccagatggtttgttttgagttgggtttgcgtaggagttttggctttcactgtatgctccagtgtaatcgatttgattcggattggttaattgctgaacagaaccttgttgacctggttgttggtattgaccagtttgttggtattgaccagttggttggtattgaccaggttgttggtgctgaccagaagattgcgatttagatgattgataatattgaccttgttgaaggggtcctggttgttgaacttgtttaatttgaccagattgatgatactgtccaggttgttggtactgtccagtttgttggtattcccaac

SEQ ID NO: 9182 - DNA, 893 bp, Diabrotica virgifera
ctatcaagaaagtatataccggataagatttaatactaacctttttagtgataataaacgtatttttctgacaaaaatttttgtttcaattattaaggctgctcgttatatcgtatctaaaagtcaaccaagcacactgttcagcaaaacggcctaacagagacttgacggggtaatgtcaatccccactgctgaagaaccacgccaatggagggtaaaaacagtggaacggccagtcaagagtctaactgcgattcattaaatcagccattggatgggagggttttccgaaatatagtgaaagaagtctttaacgacaccgaattccaggtactagtctgttgcaatccgcacggttactatggttacttgtgaggagccaaaaccgtcccttgacatacagagttgtaaaagaggatccagttgtcgataccagcatccaattcgagtcccgacaagcttccaggaggaaccatctcttaaggagggggcaatgttacgatttttcacagcacgcaggccggccctgtcagtttagacttttcataactcctaaacggtttgagattttgtagaaatttaattttttctatgtcgtttaccaacttacaattcccacctatattagttcactgctccactatacgcaggtgaagggccgctggcatctttgatcgaaaaaacgcgcagttaaactcgccgcttctcttttttttaccctaaggccgttgcagaatggcttcagcggattcacgctttaactctgcttactttgagtcatttacttacaatgaaaaacaattcctcttgaaggagctgcatataattctcgaaatgtagagattggtcaacaaactgatagttcaattaatatatacagtttaaacctggaa

SEQ ID NO: 9183 - DNA, 891 bp, Diabrotica virgifera
  SmartBlast Evalue=3E-38; Info="Enzymatic polyprotein, putative n=2 Tax=Pediculus humanus corporis RepID=E0VZF7_PEDHC"
gacgccagatcgattgtagaaaaaatttagaggtattgagaaggtcgaaaatatcgctaatattcgggataggaaatctatcgtcaaccgtgataagatttaattttctaaaatcaattactatcctccatttttgaacattattttcgtcaggttttttggggacaataaaaaatggcgaattccaaggactgacagaatcgcgaattattccctgctctaataattttgttatttgtttattgacctcttttttatgaacgtgagggtgccgataatttctagtataaatcggactggcattttcaggattagtacggatattatgttttattcgactgctaaaagttagatgttcgttaggtaacgagaatatattttggaacttcacatgaatatcttttatctttgtttgtaatctttcatcaagatggtctaattttagtttacttataatagtatcaatttttcagttgagtcgataacattacttcggacttgattttcgtgtatattatttagactaaatatattatgttcccgatcagacgaaaacaatgggatttcctcatgattagcaaataaagtattcaaaccaaagtcaataacacatttattcttttctaaaaaatcataaccaagtattccatcaaaaggtgaatttatgtctactatatagaatttttcaacactcgaaaataatttaaagtttacgctctttgtaacttgaattggttcgttactaataccaaatattttaaaattttcatgattaaactgataagagtctaaaattttacttggtttcaatattgatatagctgcccctgaatcgattaataactttaaatttaaatttttaatatgcgcgtaaagaagcggtttatttgc

SEQ ID NO: 9184 - DNA, 890 bp, Diabrotica virgifera
  SmartBlast Evalue=3E-89; Info=Conserved oligomeric Golgi complex subunit 4 n=1 Tax=Harpegnathos saltator RepID=E2BV79_ 9HYME
tttgcagcacgttatacgcttgtgtcagatctaaatatcccgaaggatacccttgcctcaatctgcttcttaaaatttcaccataatcgctttcaagagttctacaggcattgttaataatgacgcatatgccatctagtgaacctgtagatatggatcttcttatgcattttcttataataaagaatgcatcgtctaccatactagaagtctgctgtcctggttctagattatccattgttactgcctttgccagagattcatccatatagtattgttctaacctcaagtaatggcttaaaagatcatgtttagactgagttagaccactgttctttattaagttttccaaagtctgaagaactttgtctcgatcttcttgattggggataccaacttctgcatcgtttataacttttctttgaataaatctaaaataaagctcaattctgaaatgcatcaaagtgatctctccaataagtatatccagatccttgggatctatcttttccaatttattgaaactcgaactggacgacattctggataagtcatttataacttgaatctttttttggagctgtcgtgttttcccccattccaacaatactcgtttagtttggatatcacactctttttgtaaaattgaaattgccgatattaaacgtccagggccgtaatacgtttccaataaaggctgatgggtatctgttatccttgctagaccttcataaagtaaggttaacgtatcagcgtaaattactgtatgtcttttgtcagatggcggtgtattgatggcagatttcagatttttttctgcagttaaagaaactttggtccttaaatagttacaaaactcttttattccttcttcgtgtaatcccagcaaa

SEQ ID NO: 9185 - DNA, 890 bp, Diabrotica virgifera
  SmartBlast Evalue=5E-51; Info=Protein KRI1-like protein n=1 Tax= Harpegnathos saltator RepID=E2BWS7_9HYME
aaattcttgatcagggttcttcatatctaaaattatacttatgttcaaattcatcttgtttttcaatattttcttcatcattagacaaatccttatctgaatcatgaatgatttcatcataggtgggtacgtagttatcatcatctgtctgtaaatacttttttatttaatatgtaatcccttaaaaacttctctccatcttctaggtcaggtttattccagtactctttaagtggtttcaagtctttctccattttttcatcatccaaactctttttctgtccaactagccattgcttataatcttcctcctcttgtgttacctccgctttagatttttccctttgtttaaacaaacctccccaatgttcctcattttcgttgtcactgtcttccattacattttaaaactctctttaatgtggttttgctcttcattgtaagtaggggttctgggtctatcattttcatcttcttcgtcacttagtactccccccttttctagaattagatttctttcatagtcctttaaaaacataggtttatctttttcctttttcttgactttaacatcagtctctttcttactaaaaaacgttacatcctttttatatatactgggatccttatttttcagacaagccagtgtcttgaagaaatccctttcaacattctttgttatttcaatgccttcttcatcatcagatgaactagaagattcttcttcttcgtccaaaacatcttcaccatattttgttttaagtctgtttaattcttctttctttctccagacatcgtacttttttgcatattcattgtctaatttaaatttgtcgttttcatcagaactggagtcttcagccccaaaaatatgtgacatgatggtctgt

SEQ ID NO: 9186 - DNA, 892 bp, Diabrotica virgifera
  SmartBlast Evalue=2E-64; Info="Adenylate kinase 3, putative n=1 Tax=Aedes aegypti RepID=Q17NS5_AEDAE"
ggtgtatgtacatagggatagggattaaagtgtattctgctttttgaactcaaaaaatatctttttatttttataatgtatgcttgaactgtggactgaatgataaagatcttaattagaccgaattaaaatttcaagtgtaagcaatacaattagttagttttatacatatatgtaactaagctcaacattaaaaaaaaatgacttccaaaatatttaaatctgtgatattaggtgccccaggttctggaaaaggtacaatttccagtcgaattttaaatgcatttaatttaggatacttgtccagtggggatcaactgagacaacatattcagaagaaatctgctattggtttagaagctgaaaaatgcattaacaatggaaaacttgttggtgatgacattatgattaaatttatattgtctgaacttcatggtttgtcaagtaatacctggctacttgatggttttccaaggacattatctcaagccaaagcattctgggaagtcgaaaagttagacctagctataaatttagttgtaccacctgaagtgatagtcagcagggtgacaggaagatgggtacatttaccaagtggtcgagtttataatgatacatttaataaacctaaagttcctggtaaagatgatatcactggcgaacctttaacaaaaaggggcgacgacacaccggaaatagttaagaagagattagaattatacgatgaattaactagacctgtaatagaattctataaagagaagggaattttaagagacttcgctggaaaaacttctgatgaaatttctccaaaagtgattagctacttaagcgagtttttagaaacagcacaaaagaaacaaaaatttaaaatagtttataaaccagtcac

SEQ ID NO: 9187 - DNA, 891 bp, Diabrotica virgifera
  SmartBlast Evalue=7E-81; Info=Ras-like protein 1 n=3 Tax= Endopterygota RepID=E2A1F7_9HYME
agtcactcctctgggtgatctcataaaattactaaaaactatatttttcttgatttgagtgacattctcatcgtttttgttggtgttgtctgtaaattcttaattacagtcaattaaaataactcattgactgagtgaatgatcttaattacttcaagttcagtgtgttgtttttattttttattatgctttgacagcggctaaagaatatccagaagaccagaagaaagtttttagatactcaacaagtctgccacccaagaggaatttgtttgtacataagaccaaaatgactgaatacaagctagttgtagtaggtgctggtggtgtgggcaaatcggctttaaccatacagttgatacagaaccatttcgtagacgaatacgaccctacaatagaagattcttacagaaaacaagtagtgatagacggagacacttgtcttttggatatcttggacacggctggccaggaagagtacagtgcgatgagagaccagtacatgagaactggtgaagggtttcttttagtttttgcagttaattctgcaaagagttttgaagacatagggacatatcgagagcagatcaaacgagtgaaagatgcagaggaagttccaatggtacttgttggaaacaaatgtgacttatctgcttgggcagtagatatgagccaagccagagaggttgcgaagcaatacggtatacccttcgtagagacctcggcaaagacaagaatgggagtcgacgatgccttctacacattagttcgagaaatccgcaaggacaaatcaaataggaaaaaatggtctcatggccacggacacgggcgtgggccctttaagctccggtgctcaatactgtaggtagactggacttgttactagtgatc

SEQ ID NO: 9188 - DNA, 890 bp, Diabrotica virgifera
taaataatataattcatatgtgtgacaatgagaatgtaaatcttaaaaatacattcaatgaaattattaacattattaaaagtgttgaaacaccaattgttcgaattaattttaaagcgtttcttcttaaacactaagtggatgcatttttatccagcactggttaggatttaaccctttcgttcacaaattaaatttctttaagcaaaaaatttgaaatttgcaacatagcgataatgatttttttgggaatttttgatattagttttacattttcaaaatgcacagtttggtcattgtgatgtcatcatttgacgacatcaatggagtaaaaatattagatatttttttaaatactgacaaaaaacaaaaactgaagtattttattcaataagtatgctatcttacaaaacaatttgtatctttacttatacccgtataatatttcaatcaacgcttatacagagataaacaactcgaaataattggcgctgtatacaccagtcataagtaactatagaaacctatattttaacaaattaaatatttggttcaaaagctcttagatggcaccgcaagtactcattggacggaatgggatgtccataatcggggacaacgtgttacaaggataaaaacacatggagctacataaaaaaattatagaattggttgtcctcaattgagaacatgctgaacgaaagggttaaaacgtttgtgtcattaaatatttttcaaattaactttttttatatgtattatagtattatttttaatagttgacattttcacagattaggtattagtcgcgaaaaagacacaatcagagccgacactcttagaatcacgtatactctagattctagatgaatagaagtatttatcacaat

SEQ ID NO: 9189 - DNA, 886 bp, Diabrotica virgifera
  SmartBlast Evalue=2E-27; Info=Survivin n=1 Tax=Culex quinquefasciatus RepID=B0W6D8_CULQU
gcttgatggcctgtcgacaaatttggaaccaacactccgattttttccagcaaaatggagaagaactctggcattatgtaacataacgagcataacagtgagtctaacgaatatttaaggcttatgttcgattctgtttgtgtttttagcgtgtagatggagttaaataagtccagtgatatgagcgatttcagatcgtattcaacttgggattgtttggctgcccataatatcgaagctatactggaaaagtatgcggcattgcaattgtgggtgttctgcgttgcaatggcttcgtttgtcgttgtttctagccactctaatattattattactcggtaagaagtatgtggatcctgatgctcacaaatttggaacagcaattcacaagcggattgatatccagatacgttgatcagtctttcttgccaaatggtgtctgccaacatcaacggttctatatccgaacggctatccagcagcacccttatggtatgaaagccgttctcgggactatacagtgctaattccctaagaactttttctaaacaaggcaaataattcggaagtatatgtgatggtaccaagagtagaccgcaacaggttggaagaagatttggaacgtcggaggcgcattcgatgatctgccgtttcaagtctgcgtttgatcccatggtaaagcaatgatgaagtactctaagccagcctagactgtgtttacagtgtgattcatcttcagcatcggaaccttgagttaagcttccaccaaatgcgtagttgccgagcaatctaatctgtataaggcctatactattcgagtcatggggtttatacaatcgtattagaacacagttcactacttttggcactggtaaatgtaaacgga

SEQ ID NO: 9190 - DNA, 888 bp, Diabrotica virgifera
  misc_feature (66)..(66): n is a, c, g, or t
aaaattgcacgaatcattccgacgttgtttagggcatgctatggggtgcaacgtggatgccctttntaaaatagtaggaatattataggtgtctatattttttagaaattgcttagatcaagaaggtggcgggacaatttaaaaaaattggtagattgtatgactacaattgtttcttatgatcggtcatacaacattttccatcgatgtgctttcaaatatgctttatatgccaattagcgaacctcaagtcaccttattactcgatattttttattaactacaaagttttataacttcaaaattatatgaatgttcttctacactatctatccagcaaatatttttcatgggattcacagatacagctacttcattagccgctatagtggcattctttttatgtgattttctatcttccttgatcttcgctatcagcatgggatttctataaactatcatcaaccagtatcagatcgaaatcagttcgaaatcatcaacaccgtttctagatctgatttatcatcaccaggggcacataatctcgccgcctattgggccaaggaaactacttgtcaaatttataatatttttcaaatcgtcgtgtaatcttccatcctacaaatcgtcttcttttggtctgttaagacccctttgcttagtttcgacgatgcttatttttaataccatattaggagatattttcagtagaactggtaactctaacctgatcatagatgaagtaataaaaaaaggaagcactacaaaaggacacaaaatggcagaaaaactacttaaaataatttgctatgcaaccgaggcaatactaatctctcaaaatgaagatgatttacaacgtattttgtacataaaccgccagaaaattaa

SEQ ID NO: 9191 - DNA, 889 bp, Diabrotica virgifera
  SmartBlast Evalue=3E-69; Info=PTB domain-containing engulfment adapter protein 1 n=2 Tax=Formicidae RepID=E2BQ59_9HYME
cttacaatcacttaatctcatatgtaatatcgataatgtcggtttatgcattccgttactcataatgatagaagttctgtttaccttctctatatttacgtactttttcataattttaggtatagaagtagtcaaggaaggtatacgtaagttgcgatttaaccagcaattaaagaagagtgaaagtggtgccaaaactagaaaagtcgaactaactataagtatcgatggcgtcgccattcaagaacctaggagtcacaatatcatgcaccagttcccgttgcacaggatatcgtattgtgcggacgataaaggcgagaagagattcttttcattcatagcaaagcaaccgaatcaagtggataacgaagcagaagaaacccacgaatgttttgttttcatctcggataaattagcagaagaaataacgttaacaatcggccaagcttttgaattagcctacaaaagatttctggagacgtccggaaaagacttagaatctcagcggcaagcgatgatccaccaacaaagaatcaaacgattagaacaggaaagtaacatatacaaacaacgattgctagacatttcacacttcgccagtattaagttagagttagatcaatatttgcgcaaccatgacattaaaaatattctggaaatcatcggacagaacgataaaacgagcaacaacagaactccgtcgctgaccaacggtagcacgaaatcacttttggatctgagtgagtctaccaatggaaacctgcctccagttccaccaggaattttgataacatgccagcagtaggaactaaacttgaaggtttactcttcaacgagttggatcccgataacgatttcgatcccagatccttcgaaaccaactcacatc

SEQ ID NO: 9192 - DNA, 888 bp, Diabrotica virgifera
catgaatgcaattaatagtaatcatctaagaattctgtacttgtgtaaatgctctcgcgggacgcaaacatatgcctcgcgggccgcctgttgtaaacccctgttctagatgatggttgtattttattatgtgtcgctttactagacattctattaaatgagtttgtcttttgacttaagtgtggattagatgaccatgaacgaaatactgttgatgtgtatgtcccagcttgtggcgtactgtttccagcttttacagaatttcttattgctgcagatggttcgttattgtttttattgctaaagcttgcagtattccctgctggttgggtagtatttcttattttagatgcaggtgttaaaatatttctatattctccagggagaattttaataggagaaaaacccctatttaccctaacatctaagcagttggatgaatcaatatctaactcgttagactgactatgtagacttttcgttggagatgttatatttgtggttttaaatcttgtattggtggaaacagtggcacttgattttctagtctgcttatatcgtttgtaaggtaaattcggacctattaactcaacctccaaaactttattttgaaaataaaaaccatttagtctgttcacaactctccttgcatcatcgccatattcaaatgtaacatacgcaaaaactatttgtagctcattttctataccgataaaaacgttattaatggcacctaacactaatgtcgatgataacagaaattccttcaaagaatattcagtagtaaggtcatccaagtgaattatacgcactacacttgtctcggagctcatttttctttacttataacactaaaacaaacaataattcaggtgtgtctgatctcac

SEQ ID NO: 9193 - DNA, 890 bp, Diabrotica virgifera
  SmartBlast Evalue=4E-55; Info=CG5027 n=7 Tax=Sophophora RepID= Q961B9_DROME
tctgtagtccagcatgtcaggattttccctcaattttttctcatttacgacaactaatactacgaaccgatttaattgtataagatcattgaaatttccatgagttactttttgaaaagttccaaatcgttcttcgttaacccactgacttaatgagtaatttaattcgttgctgaggttgtcaactttaaagaaatgtgctttactgtctttatatacataaattgagggtgtattagtggcatctccagcattttcattgaaggcaaaaaattgcgaatgggctctgaatcgtttagatacatcataaaatatattccacaactcccctttcagggctccattatacatgaaaaatacatcaccggaactcttaaccttagacagatcattcgaggaacttataatatgaacaggtggtcctgccatcctaagagcaaactgaacaatatcatctttgtttctatctccactaaatgttacatcactctttggagaaataaacttgattgttggatatccacggataccaaattcggtagcaatggctggataatgactgcaatctactcggccaactcgaatatttgagtcatcaagtgcttcactcacttcagcccatacaggctccaatctttggcaatgtccacaccaaggagcataaaatttgatcaaccaatcaccaccattgttccgtaattcagaaaaattgttacctaattccagaatgaatgaggaacagcatgttgcacataatcctatcaataaaagattaaatgtgttaaaaaacatttttcagaattattcaaaggacacgtcacataatattattaggtataacaatcgatttacaaaatttaatttacaaattagagccacatttgtttatt

SEQ ID NO: 9194 - DNA, 886 bp, Diabrotica virgifera
cggacatacgtttgtagagcgaactgccattgttttttcatgtggaattatcccttaaagtttttcatgcttatttgctaacaccctgtataggttgtttaacatatttcctacaatgataccttgaccaaagtaccaaataccagcatctgaatttgcagtatttctcgttcttcttctttttcattgccatattaggaccgcctaatgttagaaactacattggcgagttgttcacagtcttcagctaattggaatagttgttcggcactgcgtattcctgtcaattgcgaatgttctttgatcatgccatttcacacaactttgttggtctgcatcgctgtccagtgtccagggtattcgtctaagcagccacatttcgaacacctctaggttattgatcgtatcagtcttcagagtccaggtctcaatgccatataacaacaccgaccaatttgggcttcgaaacgttaataaaattatttttcaatttaattgtggcttatttcccatctaaatagttaatcaatattggtgacatatcacaaccctcttggtgacatatcgccacgtttaactttatttggatatttttgaattttctgtcaaaataagccttctgtcattttcacacaaacactgcacggggtattcacataactcaggtacgctctgtaccatagacataataagaatagacaaggcgtactgagcaaaatagagtaacgcgcgggcagtcgatcgatggtctatatatctctttttaccaagcgatcccgcgaatgtgacagacaaagatggctagacggtcctcgacacggttcttagacatttactatggttgcctactccgactaaccaatgaacattaagccagcgaatacgt

SEQ ID NO: 9195 - DNA, 877 bp, Diabrotica virgifera
  SmartBlast Evalue=4E-15; Info=Transposase n=5 Tax=Bombyx RepID= B1Q3L5_BOMMA
aaatacaacattttaacaaataacacctttatgaaaacagtttaatagttttaaaacttagactaaaatattatgaatgtggccaccattattgtttaccacttcttaaagtcgtctgcgccataaattgatagccccatttattacaccctgttcaaaattgttcctaacaaatgcatctttgtttgagctgttcgattgtttcaaattattatcccataaaaattttgttcgaaaattccccaaattgaatagtcaaccggatataattctggtctgttaggtggccacatctctcaatatagtccgggcaatgtttactcaagaatatccttttattgtgggaagtgtgcgaatgagcaccatcctgctggaaagtgtaatgataacatacttcttcaatttcaggtaataggtgctgcaagatttgttcttgatatgtttctgaattaagttttacgccggcatcaacaaaaattagacgagatttttccaacatggatactgcaacagagaccattacacctttggaaaaatgacttttttcaattaaaagatgctctagaggaatttctctcttaaattgtacgtcagaatacaccctattattttgggtatttttaggaggccgtaaataaaacattttttcatctgaaaaccatatttttctaatgtcttcacgagagcgcaatcttcttatgagcttcgcttctttccttttccacttttatgttcaagagacccgtgggtttcacttagatgttttaagaacttttctatcgttccaatatgcccattttcctcataaaatgcatttacaatctttcttacaccataattatatttttcacgctaatttatattctgtcctctttgc

SEQ ID NO: 9196 - DNA, 889 bp, Diabrotica virgifera
gcgaaaacgttttgtttctatgtttgtagccttataggggctttttaaactaatataccttttaccaggacaaaacagtttttattaaattttacttgtagttaatgatattaagcgaaagttagtcttagctcaagatataattcttgaaagaatgctttttgtatctaattatagtaaaacacgttatatgtacctaccctcactcgtagtgccacttgttgtaaaaggtttattttgtatagaattgctgggtaaatgtgctggataagatcactttttgtaaactataatatcctttcatttcatgttaatcatatcatgttataatattttgaacatcattttattacgttaattcctattgaacgtagttttcgatttaaataatttaagtataattttagtattattattttgaagcattattcagtcttttctttttggactgagtagcatgtaccgattggagtgtatgtttttataattttttaaataaatatgaagaatttatgcaccaatcgatatgtgtagcatagagtagtaactttactttagtgcctctttacgatagaataatttctacatttgccttaatgagaattatatgtatttacctctgcggtcaaaaatatattgggattctctatttctagcatagaaatcgagtttctattttggaatatggctaaatgtatgaataatatataaaaaaacataaaaaaatctatttgttttcagctagagtacttgcttcacatgaaaaaagtttatataaagtgtacactaaagtaacagtttattcatatctagttattagtacatgtttgtagcgtgaacttcttatttataatatattcatcagtaaacatagggaaaataaagacaa

SEQ ID NO: 9197 - DNA, 889 bp, Diabrotica virgifera
  SmartBlast Evalue=5E-69; Info=Histone H3.3 n=184 Tax= Fungi/Metazoa group RepID=E2BMC4_9HYME
ctttcacaccgaggttgtaggtatcgataaattttgtgaacgttttatttgaggaaatttaatttcataagccatggctcgtacgaagcagactgcacgtaaatcaacaggaggaaaagctccccgtaaacagcttgccaccaaagctgcaagaaaatcagcaccctcaaccggaggtgtgaagaagccacatcgttaccgtcctggtacagtagctctgagagaaatcagaagataccaaaaatccactgagttgttgatcagaaagttgcctttccaacgattagtaagagaaattgcccaggacttcaaaactgatctccgtttccagtctgccgctattggtgctttacaggaagccagcgaagcctacttagtaggtctctttgaagacacaaacttgtgcgccattcacgcaaagagggtaaccattatgcccaaagatatccagttggctcgccgaatcagaggagaaagagcttaaattctttctttctgtttccttcaagcaactctgttgcttcatattcattgtagattttttcagttctttcatacattgataaatatatattccagctgtgtgtgtcaagtgaaaaacttatttatgttttcttgtcgtttcatgttgagacagagcatggttttatataaaagatatcaattccacttcttctgtttcctttgtttgagtaggtttttcattttcatttaatgaataaaaatgtgttcatgttttttgacattttttacttaatattactttcttttattataatacaactatcagaatagataagattttagtattacgttttactttaagtgttagataataatttttttaatagcatctgtaacctgatttagaataaatttatgtggatgt

SEQ ID NO: 9198 - DNA, 888 bp, Diabrotica virgifera
  SmartBlast Evalue=3E-65; Info=Calmodulin n=1 Tax=Aedes aegypti RepID=Q174F0_AEDAE
ccagcaacttgtgaatgacgtctccagagtgaagtttaacgttgtaaaagctgtttcgtatgtaattatccaactatttctagcccagtgagaagaaattcaagaaagtggcgaggttcgagggaaaatttttttctgccgtcaataatttttttttctagttcacccttggtgaaccaaattaaggacttagttactaaacaagtaagttcgtcagataccgaaatgtcacagaaagaaagtgaatctgtggatgctacatcacctcctccaatgctaattgaaaccactgagaaatctgatggagtcccttccagatcaccatctgatgaacttagtaaactaagaccagaggaccgctcaagaaatcagagcttttctatcagaaatatgcaggtgtccagaagccaaatgaaggaatacagagaagcctttagactgttcgacaaagacggtgatggcagtataacaaaagaagaattaggcaaggtgatgaggtcgttaggacaattcgctcgcactgaagagcttaaacaaatgcttcaagaaatagatatcgacggtgatggtaatgttagttttgaagaattcgtagatatagcttggtcagcaagctcagggcgtgatcccgatcacactatgtctttggaggaagaagaaaaagagctaagagatgccttccgtgtatttgataaacacaacagaggatatattgtctcgtcagatctccgagccgttttgcattgtctaggagaagacttgtctgatgaagaaattgaagaaatgattaaagaagttgatgtagatggagacggacgaatagacttttatgaattcgttaacgctttgggtgaaccaggcaatgaggatagctacgataatgacgac

SEQ ID NO: 9199 - DNA, 889 bp, Diabrotica virgifera
  SmartBlast Evalue=1E-76; Info=NADH-plastoquinone oxidoreductase n=2 Tax=Culicini RepID=Q16ZS6_AEDAE
ctactataaagatttattcaattagagaagtatacaagtaaatcatgtttgaatactttaatgtaaaataaattacaacaaattaaaattcacaagaaacggttatttacagggaagtattttcttataaattgatcttaatttcctaattacatttaaactatttattttctataccacatttgcaaagtattcattcttttaactttcttttgtaactgtagaattccgtacaagagggcttcagctgtaggcggacatcctggtacatatatatccacaggaataattctatcacaaccccttacaactgagtatgaataatggtaatatccaccaccattagcacagcttcccatagaaatgacccatcttgggtcaggcatctggtcatatacttttctcaaagccggtgccattttgtttgtcaaagtcccagctacaattatcacatcagcttgacgtggagaggctctgaatactacaccatacctgtccatatcatatctaggagcagccatgtgcatcatctccacagcacaacatgcaagaccgaaggtgaggggccacatagaacccttccttccccagtttagaagatcgtccaaacgggcaaatgcatattctcctaaattgttcttgtctggtttgaatggagagtagggtctctgggctggtacaggttgtgtagattgacctcttttttgtagctgcacaacgccaaaactaccggttagattccttaatatatttggattcgtgagggcatctttgcaaggaacgagcgcactgcgtagcatctttgttattaattgttaccaagatacaagtaaaattggtagttttaaaaggctttaggaatatttacgtaattctatcttaacatttt

SEQ ID NO: 9200 - DNA, 888 bp, Diabrotica virgifera
  SmartBlast Evalue=3E-31; Info=Protein-L-isoaspartate(D- aspartate) O-methyltransferase n=19 Tax=Eutheria RepID=PIMT_ HUMAN
tgttggtgggagatggaagacagggctatgctgagctaggaccttatgatgccatccatgtaggagctgcagcctctacactaccacaacagttagtagatcaattaaaggttggtggccgactcatagtacctgtaggtccagccggcggtgaccaacaactagaacaaatagacaaattatcagatggcagtattcaaagaaaaatactcatgggagtcgtatatgtacctttgaccgacaaagaacgccaatggcctcgacatcgttgactacgtttagctgtttttattttcatcgctatttttcttgtttgctgtgtttttcgtgtatcttcaaacaagtttcattttctgaaaacgaactagtcatgtttattctaagaaaaacttagcaattgaagaaaagtgtgggtcagcaagaaggatgtgattataccatacgtttagttttcgattagagataggcgactgaaagaaacgctaaaatcggcaacattgcttatgagaatgaggtgcattaccactgtagcatcgacgaataactgaataaatcgacgcgactcgggcagttgggagtcgagtcgaagcagtgttgccgtgtattgggtgtactcctatatctaatttaaaagtaaacacacggtgtcttgttgactatagtccagcaaatatataacgaaatgagtcatttactatcacgcagttgaaatgtgtaatctgcccataatcacgttttattcccgcaagggctactctataggaaaagatacaattagtcaggggcggtgaatgagaatatttgcttgcagttagattcatcaaatctgtaataaattatatcatattttgcttatattaatacactcacaggcacaattaagcgccc

SEQ ID NO: 9201 - DNA, 887 bp, Diabrotica virgifera
attaagtggatgagataccagattattttcgttttcttcttaattctggaatttctgatattatttttacttcggaataagtttaagtgatatttttttttaacatgtacagtaaaacgtctgtaggatacagcttattgggcctagtcgtcaagatgttgtacagttttgtgggtatttggtgaactgtgatacaacgttctttgaacacttctaaagtgattttgtggtgtatatttgtcattaaaaacttatgattgttacataattacgcttgagataaataaaaatcatgtattcccattttaatgattaacaatatttagataataattactgaaaattttagtaggcttaacgattgacaagtattgttatggaactacccaatcagggaacggtctgacagcggcactaagcaaaatatgatctggggaaagggaaatctcgtgcatagtaattctatcaaaatatttgctttaaagtgttaatctaattgatagtcaatttaatcccagtgataatgtatgactattgctcaaaaattcataaatacgatacaaaatcttgatctgctttagtgatttagaggcgtctaagtataatcagatctccacgtcatcctcatttttcttgagacattctagacttttttaaatcacaatagcttcttgaataatttctggttttacaatgaatcgtatataaatgaaaggcactggtttttgacttcctcgttaagtaaaagtaaacaatttcgtattgatagcctttctagcctcgcccatttcaaattgtcgtatgaggcgtcgcaagtcatctgtcaaactgtcgtttcttattcacaataaactttcaaatagtttgatcaatcttctattaaaaac

SEQ ID NO: 9202 - DNA, 886 bp, Diabrotica virgifera
  SmartBlast Evalue=6E-16; Info=Proteasome subunit alpha type-4 n= 1 Tax=Camponotus floridanus RepID=E2A3M2_9HYME
gtgcgaattaaggtttcgtgacaaacagaccaactttcaatttgctttttttaattttttattaaaaaaagaaaagttgttgtgaaagtgcagacaagacagaatttaggaccgagttcaagttcagtctcagtcactaactcaactcactactcccacgagtgactacccagacttaataaaagttttgattaaatttataaaggggataacaatggagcattatctcgaccccgaagaacaaatacaatgtccttacaacagtgctcatctaatacgtagaaaagtatttaatacgcatctggtaaagtgcagaaaggctaatccagatattaagttggtcccatgtgacttcaatgtcacccattgggtagaagaaccatgcttacagcatcatcacgaaaattgtcctgatcgaaagaaaattgagacaaaattttatgtagatgacaaaactgatcttaacaagtatccagttcgtaatacatatataccttctgatgaaaattgggatgatgaaaatgtcccaacatataatcctcagaaaacttgcctaagcaaggaagtgattagacacctggatgttgcctctgccggcaaaaagaagaattttaggatggaggagcgtcagagaatgtctcaatttactaataatactaacagacccccaaaatccgattttccatcttctcagaaagtggaattaccggaaactcgtcaattttctgatgctataaatgaaaatgaaaatactccaaattcagtggaacaagttcttatgaaaaccgcaagggctgttgtaccaaagaagaataaaaattttaagcgataactctatggtgattttgtaaaaaatatttttatagcttcgaataatgttacaatt

SEQ ID NO: 9203 - DNA, 881 bp, Diabrotica virgifera
  SmartBlast Evalue=2E-43; Info="LINE-1 retrotransposon-like element, putative (Fragment) n=1 Tax=Aspergillus flavus NRRL3357 RepID=B8NZ53_ASPFN"
tgagagcctggaatgaggaacaaatctcggaagagtggtgtattggaatcgtttgcccactacacaaaaagggtgatcaattggaatgtagaaactataggggaataaccctccttaatacagcctacaaaatattttcgagtatcttatattatagtcgcctaagtgcacattcagaggagcttcttggcggatatcaaagtggttttaggcctggtcgatcaacaacagaccagatctttgtgctaaacaaatactggaaaaaccaatgaattcaatatcgacacataccatcttttcgtagattttaaatcggcctatgatagtgttctaagaaataaattgtatgaagccatggatgaattccacatccctgataaactgataagattggttaaggctacaatgcgtaaagtgtttgcaaagtcgaaatacagggcgaacaatcacaggcgtttgaaacgcatgttgggctgcgacagggagatgcgctggcgtgtcttcctcttcaacatagctctggaaaaggcggtcagagatgcccgaatagacaacagaggaaatatttttaataaatcatcccaaattttggcatatgccgatgacgtggacctagttgcccgcacaacacgcaaactagaagaaatgtataccaccttctcaaatgctcaaaaaatatgggcctgaaagtaaacgaggagaaaactaagatgatggcatcaacacccaacaatagagccagaaacatcggtcaccaattctctgttgataactctacctttgaagtggtggacaaattcacatacttaggctccctgatcaccaaggagaacgtcatgacggaagaaatcaagcgaaggataatcctagcgaacaaatgc

SEQ ID NO: 9204 - DNA, 886 bp, Diabrotica virgifera
  SmartBlast Evalue=1E-103; Info="FERM, RhoGEF and pleckstrin domain-containing protein 2 n=1 Tax=Harpegnathos saltator RepID= E2BXI1_9HYME"
aaacttgatgcggtaaaagaatgactgtaaaagttgggtgtgtgtacgttaaataataaacaaaaaacttcagtgctagttttcgggatatttttatggatccataatatgaatgatttcgtcaagcggtaataggtgtggaccaagggctggccgatcgcgttcggaatggaaacgaacagcagcaatcgaggttcgacgggggccttgtcgagtaccgggggcagcgcttcagtcggcatgcaccactctctctcgacgccggcaggcgtagattgcggcggcagccgaacgccgcctgcgacgcccaaaaagggtggcaagatgttggctatcagagtgcagatgctggacgataccgtgaccatttttcaagtgcaggcgaaagcagttggacgagtattattcgaacaagtctgtaagcagttacacttattagaagctgattactttggtctagaatactcagatgatcatggaacgaagtattggctggacctccagaaacccatctcccggcaactgggcctgtcgctggtcgaccccctcctctacttctgcgtcaagttctacacccccgaccccgcacaactggaagaagagtacacccggtacctgttctgtcttcaagtgaaaagggacctgtctcagggaagcatgcagtgtaacgagaacacggcagctcttatggccagctacatcgttcaggccgaatgcggagactacgttgctgaagattaccccgaccacacgtacctttccagttacaagttcgtgccccaacaggaccacgagatggagaggaagatcatggagaatcacaaaaaacatgcgggccagtcgcctgcagaagcggacctaaacctattagaaacagcgcgccgat

SEQ ID NO: 9205 - DNA, 888 bp, Diabrotica virgifera
  SmartBlast Evalue=1E-123; Info="Titin, putative n=1 Tax= Pediculus humanus corporis RepID=E0VID6_PEDHC"
agctgaaactctaaatttatattcttggccaggttctaagttattaagttcaattttaggatctttggttctacctgccggtacccatcgtccggtagctgtatcaagtttttcaacttgataatattcaataggaacaccaccgtcatcttgaggaggattccatttaagagtacagccttctttgtgtacatcactgattttaagtggaccctcaggtttagaaggtttatccaaaactttaatttcgatactggcttcatctcttccagaatcattttcagcttttagagttagggtaccagtatgttctctctttaatacacctattaccaatttggttctgtaatcttcgagatccacagtaatatcatctctgttctcaatacgagctttgttgaggaaccaagtcttggtcggtggtggttcaccactaactttgacatctaacctgatatgctgaccagcacgaacggtaaaatctttaaggtttgtgcgatcaatcttgggtggaacgaatctgtctttagcagtaattgtttctgatggaggagatggtttgctgtcgcctcccttgttaacagctttgactctgaattgatatttttgtccttcttgtaaatcaggaaccttagcttctgttttattaccaggaacttcaacggctttttgccactttccggtaacaggatctttcttttcgatgatgtatttctcaactggtgcaccaccatcatttttaggtggagtccatttaaggtcagcatgtttcttactccagtcttttatttccggtttgccaggagcatcaggttcggtgtatggattcttagctgtggttggaacatcagttactaaaggttctgattctccttcagaattcacagc

SEQ ID NO: 9206 - DNA, 888 bp, Diabrotica virgifera
  SmartBlast Evalue=2E-22; Info=SCAN domain-containing protein 3 (Fragment) n=1 Tax=Camponotus floridanus RepID=E2A2L6_9HYME
gaataaatcagttgattgtgtggtaacataaattaaatatttgttcaaaaggaataattttgtaatgaaggttaattttttaaatctatggttcgctttaccaaacttttaattcatagtcaaatttgatttttttatataaaaaattaagtaatcgtgtgaggaaaaaaatgaatatgtcattttaattgtttatttgtctaatttgtagaattaatgttggagttttcaaaggcgtatactgggtgaaatttttttggagacccaaaccaactagttttttaaagccggacctgatttttttctagtttgagtaaatcagttgattgggtggtaatagtgtaacgcagtggttcccaacctttttcggcctaccgcccatttttccaaaaacaaaatacttaatgccccccttaaaaaactcttcgattcttaaaattagtaacgcactttcattcacaattgttttacctttttcgggtcaaaggttttggttttaccttaaatatgattcgacggccccttaactaatccaagcaacaacaaattaaaaaaaaaatgttttattcaaaaatacagtattcatgtattgatcaaactttaacttaaatacatatcataaaaaacaatataataatataacattttttaatgagaaggctgagcttgatgtaatgatagtagtctgtcaatatttggttccatacttgtcatcagcaatcttaaatcacctcgctccactatggacagtctatttctcttctttgttaataaattgctgactatgctaaatcctctttcggctaaatacgatgaaggaaaggcaatgaaaaacttctttgatgcagcccataaagctggatataatactgaaatttgacattgcag

SEQ ID NO: 9207 - DNA, 884 bp, Diabrotica virgifera
gttgagagaggtagaggaaaatggagaagatggagtaactatgtggtagagcagcgtttcccaaccggtgggtcgcgacccactagtgggtcgcggcggatttcaggtgggtcgcggcgcggctcttacagtagctgagtagcgtatcatagtagccatcatgggtgagggataagtcgcgaatatgaaaacacatcaaaaaggtgggtcgccagacataaaaggttgggaaccactgtggtagaggacttgagagagaaaggtttagatgaagacacgatggacagaaatgagcgacgaccaagaataagaaacagcgactcctgaaatgggaaaagctgaggaagaagaagaagtttactgtacacagtgtaattttgtaaaaaaaaggctgttatgaatcaaatacgttgtaactctaccaataggtgttgtgtgaatggttcattattgaaataaggcaaggcaactacaatgtagacttatcacacgcaacctgtatccatcccctaaggtggacaacaaaatccgggagaaccgtaagcgtagtttttatgagttcaatcttgtgaaagaacctagagtcatgccaagtttggtaattttacttcactcatgatgcagtgtaacttatgctcccaaacacgcattccaaatttcatattattaatctttaaaataacttttatcaaattcttacatctacagcacgatatatgctactaaaataaaggactatatttttcttttaatttaaatttcgttcagtaacttttctgataatgagtgtaaaaatagtgttaggcctttaaattatttaactcggctttattagatactgtaagaaattcaaaaaagagatttcaatatagcactagaataat

SEQ ID NO: 9208 - DNA, 879 bp, Diabrotica virgifera
  SmartBlast Evalue=1E-14; Info=Endonuclease-reverse transcriptase n=1 Tax=Bombyx mori RepID=D7F165_BOMMO
tggtaatatttttagaaataagcgataattttttataatatcccgtcgtcaagcattacgtcagatgttcttcgttattacgcgaaaatgaacattccgtgacattgccctcgtgacactttggcataatttcactccccttcgggtcgtgaaatcaaaactgtcaaagtgtcactcgggaacaaatcgataattttagagctctcgtgcaattaccactgatacaatacgcactgcgcatacacttttctcttcaaacatatgtgcatataatttttacatatttccagtagcttaccaaatctagccccgcctaaacctattccgcgctgtatcttgtgcgtttagctattctttccaatttgtatctcatatccaaggcatttatacacatgtgtttctgttatgtcggcatcatctattaatctattctgatgttttgtgcaagcactaattttgtcattatttgagttttgcttacgtttattcggagacctactgcagatccagcttatgtcatttcttcaagcatatacttggcctcgccgatgttattcgtgatcagaacgatgccatctacgaatctaaggtgcatcaatctttctccatcaatattaatgcctgttggtcgatataatggcctaaaaaggctacttgaatgcttttccttattagcaacgcactcagccggattttgctaatgtaaagtgcaatattattgtattagccattgtatagttgcctgaaactaagaggtaccaacttaaagtacgaatattttatttaagatattaataaagaaaattaagttatgtattaaaacgaagttagattaaactaaacaaaagtttgtaataattgtttaaaaaacattttgcc

SEQ ID NO: 9209 - DNA, 885 bp, Diabrotica virgifera
gttgtatcttcattgattgcataccagagttttgtgtatcaaatatacaacaacgtgaaaattatattttatattgatgaccatgaaagttttactattgttagcaatttttgtaccatttgtggtaggccacgatgtgaagattacagaactactctctcaagaaatcttgagagatgttgatgttgaattattactaaaggaaatggagacaatttatttatttgaaaaaaagagttctggaaatataacggcagtgttgaatgagttcatagacaaagttttggaaaatgctggaaattacctcatagatcatggatatgatccatgccatataccagacacagttttacatcttccaataacagggaccgtctcgttaaagaaaggatggttacgagatttggccatgattaaaagatacaaagatactgatgtagtttacagttccgaagaaagaaaacttaaaatgatattttcacttcaatttgaagagttgcagtttgtttaccactacattacacactatcttctgtttaatatagagggcgaggtagaaggaacaattgaggacgtgatagcacaagcagcattaagttttgattttaacacttataatgcaactcttgacaattttgatattatgaatacaggatctatcgacattcactttactggacatgaatggattgattggttaaccaatgccatgacagcagtagtaactacgtttttacatccacttattttatcaataattcaaaatattttcaaaggtactttgtgtggtattgtcgatgctgtaaatgaaatcattcacaaaatattacatgtttaagcttaagccgtcgttttatttttttttctgtaatatataattcatgt

SEQ ID NO: 9210 - DNA, 886 bp, Diabrotica virgifera
gaatagtaggattgttctcaataagtgcctcaaaggtttctttgaaatttgtccaagtttcgtatgtgccagaatatatgggcaaaggaatgggcggtaaatatgaattaagacgatgagagttgagcattggcgaagttgacatggatgaagatgacccatgaatgggtggctgctcctttgatgcgggattgagaagtaatgttgctttagctactaaggcataatatttgatttcgaattctcctcgttcatcatcttgattgccgaggttagaggttgtatcaaataaacaaatacgttcaatgccacactgtaccttttcaaactcaacaactcactcctttaaggcatccagacgcgcttgtaattcaagacggactgtgtcagataaaggagttacacatttttcaaggaaagtgttaaatcgagtcactgtggatttaatagtgccacgacgagctacaaaatgtttaaggtcttcagcattagacattttttatcaattaatttacgctaataggtttgagaaaaggttataagtttactgtgttttgtggaatatactaattaataagaatattgctagcttagtagcagtatcaagttaaaataagtggataaggtaagtaagcaataaaaaataaaatgttgaaggtgtggattaggtataaggatgatacggctatgttgggccaaatattaataatgcttaggatgtctttattataagtaaattgattttaaatgcgttgattatattataaataaacgatactcccttcgatgggtgctgctatggaggctggttgttgtatattatgtattatttaatatgattaatattgtagattgtgtgtgtgtgtgtgtcatcgaatttcctgac

SEQ ID NO: 9211 - DNA, 885 bp, Diabrotica virgifera
  SmartBlast Evalue=5E-51; Info=Cytochrome P450 6BQ7 n=2 Tax= Tribolium castaneum RepID=D2A099_TRICA
ctggaaatacaccaaacagtatgaaagcaaatgtggatcttagtgttggcgtgaagactctattaccgtactttctaaagtctgagtcggggttttctaaactctttatgtccaaaccaaacgctactgacccgatgacgtcagttgtaaagcagcccaaagcgtatttgatgtctatcggttctttttttgcagcagatttgtttagcaactgctggagtccaccagtgcactctaccatcgtctggaacatcatcttcatcttacctgaagtaaaggttggggtcaactttgctctcatatccttccatttatcatcttctaagttaaacagatgcgccgaaattggatcagtcttttcattaaagacttgtccgtggtttggaaagttccaaaaatccttaatcagtatactctttataaggtccaaatccaccggaacgaactgtggtgcaaaaaacgcatagacaccgccatatttcttcccttttgacttaactttttggtagagatcgtccatcacctcggtcaagtgaacgtttctcttcatcacttcttttaaattcccgaagaagaaaactggttcgagatagtcgacgttcctgtctttccagtaggaaaactttttctgaactagtaagtacaataggaatactatggtcgataacaagaatattatcgtggtaacttccatgatgaagtatttttgagctgaagctaaatataataaaataaataaagcttgtttctttgctctccaacttcgttgtcacttttttgtaattaaacacaaataagttgttatgaagtacatgtatgttctacgcacaactaacagattccaggataataacagctattatctagaaatgttgtctatttaac

SEQ ID NO: 9212 - DNA, 886 bp, Diabrotica virgifera
  SmartBlast Evalue=1E-145; Info=Ribosomal protein S4 n=2 Tax= Polyphaga RepID=D1M809_9CUCU
aaaattttgttgtggttcgcctgatctgtctttcatatttttaaagtcaagatggctcgaggacctaaaaagcatttgaagcgtttaaacgcacccaaagcatggatgttggacaaattgggaggtgtatttgccccccgtccatccaccggtcctcacaagttgagagaatctttaccattagtaattttcttaagaaacagactaaagtatgccctcaccaacagtgaagtcacaaaaattgttatgcaaagattaattaaagtcgatggaaaagtcagaacagacagtaactatcctgcaggatttatggatgttattactattgagaagactggtgaattcttccgtcttatctatgatgttaaaggtagatttgccattcaccgtattaccgctgaagaagcaaaatacaaactctgcaaagtacgaagagtccaaactggaccaaaaggaattccattcttggtgacacatgatggccgtaccatcagataccctgacccaaacatcaaagtcaatgacaccatccaattggaaattgccacatctaaaattctagactacattaagttcgaatctggaaacttatgtatgatcactggaggaagaaatttgggtcgtgtaggtacagttatcaatagggaacgtcatcctggatcctttgatattgtgcatgttaaagatgctaatggtcatgtatttgctactaggttaaataacgttttcattattggtaagggagctaaggccttcgtttccctcccaagaggaaagggagtcaaattgtctattgctgaagagagagacaagaggttagcagccaaaacacattaaatgtaatggttgattacattattttcaataaaacttaaaaaaatctgaa

SEQ ID NO: 9213 - DNA, 882 bp, Diabrotica virgifera
  SmartBlast Evalue=8E-72; Info=Peptidyl-prolyl cis-trans isomerase NIMA-interacting 1 n=3 Tax=Aculeata RepID=E1ZX16_9HYME
gcggacgaacaattacctgccgggtgggaaaaacgtcttagtagatcaaccggtcaacattattatttgaacatatatacgaaagaatctcaatgggatgctcctgataagccagcggaaccagtgtcctccagtggtccagaacaagtccaatgttcacatttgttggtcaaacataaagattctagaagaccctcttcatggagggaagagaacattacccgcacaaaagatgaagctctagatattgttaaatcatatagagaacaaattgctcaaggtaagaattcatttgctgagctagcctcaaaatactcagactgttcctcagccaaaaggggtggtgatttgggtccgttcggtaaaggagctatgcagaaacctttcgaagatgctgcttttgcacttaaggttggagagctctcagagcctgtgtttacagattcaggagtacatattatattgcgcactgtctaatttatcagtagtccaggcttgaattttgaaaccattgttgaacaaagatattgctagtaagaaatttgtgtacagattcagtgttgttcttagggtctttggaatgaagatatattaaatgaaaacgttatacaatgtagcaaaatgcaaacgcatgtggcagaaatcttatttttatccttcataatgtcattgggtcaactatggaaagattgaagtgaaactagggcacctagtcatgtctgaggctctttgctgcaaaatttaaagatacggttacagtcgtaacaatgctttataaaaaaatgtaaaatttaactacaggtttattggtattagaaaataagtggaaatcgaaacatcaaatatattttaaagtaaaattgtggcttcttcccaataaaa

SEQ ID NO: 9214 - DNA, 884 bp, Diabrotica virgifera
  SmartBlast Evalue=3E-34; Info=ATP-dependent DNA helicase 2 subunit 2 n=1 Tax=Harpegnathos saltator RepID=E2BNL0_9HYME
gcgaatccgcgagtgtgagtgtgaggtttcttcgccttccgttattaacatcttcattcttcttcagtacaaagaatgcacaggttgtgaacgaaagtgtcgcatcattcgctgtaaatattacaattttaagttaccattaatagcagtaaaatgaaaacttccctgataatatttttatgttgcatgatagtgtctgtactatcagcaaaggatatgatgcggaaaagcatcgtttttgacaaaaatacaccagatgtgttctattgtcctattcacaaacccacaggttttgacaaaatgatcgttaaggcaaaaccgttgaaaaaattgtgcgaatttgaaggaaaacctctaccagaagattacaagagtgactgttaccaagatgttgatgaatcagattatgcgtgtaaagaaaaatacaggataatgaaacgactcaaaaaagattcagctgaagactaatatcgggatggagataaaataatcttaggattaggttaaccacagcttaaacactggcttatctcttacatactgtagaatttgaatgctttttaacttataatttattaaaaactactaaataacatgtgtacattatgctttactaacacagtaaagaagttacctagttaaccctattatttatgactatggtattcgcagatttatgtaaaacactttcataaatttttgtttaaaactaaaacaaattttttcttttctgtttgtactcgtatttcgtcagatttaatacatagacaaagtggcaacactgcaattaaaaaagcattttaaacaaatgaaaggagtatttcaaacagttgctgaatggacaagagaatctggtagtaaacttagatatcgagaaagtacac

SEQ ID NO: 9215 - DNA, 885 bp, Diabrotica virgifera
  SmartBlast Evalue=3E-16; Info="Protein tyrosine phosphatase, non-receptor type nt6 (Fragment) n=1 Tax=Aedes aegypti RepID= Q16TI3_AEDAE"
tttcttcttcttctcccttcctaaagtagcgctttttaccttttctcccgacttactccttcccatcaaaattccccatcttttctttttcgatttagtggaactcgcattcgatactgaattagtgtcgttatagctttcgctcgctatactgttactcgtatcaatgaaagatgagccactattatttaaacttgatgaggctttgacgtaagacttgtcgagaggtttaggcgaatcggtaacgttttgaatgtttgacatctgcgtgttgtcaagaccatggacggaacgagaagtttcatttaggttatgtgaacttgaattatgggcacttaagtcggttttggaaggcgatttgaatcggtcgatatttacataaaggttttctcggctaccttgttgattgttgatggttaatttttgtaattgtgattgaactgcgttgactacagaatgattaaccacttggctaatttcaggagcggaatgaatactctgcgttcttcccctcatctctccttcgttttgccacggcaacggtatattctcatatatgggttctgtggaattattcagatggtgatcatgggctaccatagcattttgattccgtgtcacaacaaatcctgtacttggtaattgattttcttgcagtatctgtttcatattcgcaggcatacaataaataatatttccatgttcgtcgtaaactttttttatgtgcttggttatgttaggattctctacaataactgcttggggtctgcccaacatattattgttaaagatcgaggctagattttcgtaggtaccatgttgaggaggcagataactatgcgattacatagtattcacagttcacagaaataacatttactttag

SEQ ID NO: 9216 - DNA, 883 bp, Diabrotica virgifera
  SmartBlast Evalue=8E-86; Info=Proteasome-associated protein ECM29-like protein n=1 Tax=Harpegnathos saltator RepID=E2BPU0_ 9HYME
ttaccagttcatgcatttagcaaaccacaacgccatctggaattccaagaaaggagctgccttcggtttctcaaccattgctgaaaaatgcggcgaagatctgaaagctttcttgccgactataatcccaaaattgtacaggtatcagtacgatcctacgcccaatatccaagcatctatgcacaacatttggagagttttggtgccagaaccaggaaaaataatagatgaatactaccatgaaatattggtggatctgctagcaaatatcaactctcatcaatacagagtgcgacaatcttgttgtttggcactacaggatttcttgaagggatcatccaatcgatccatacatgatgctgtagatcacatggacgatttatggtctaaattgttcagagtcatggatgaccatcacgaacaaacgagaataactgccaataggactgctagaattttgagtaagctttgtatacgtggctgtgatattagtcaaggaaaggctggtgtaaagatggtagaggctattttacctgttttgctcaataacggaataactaatagtgttgctgagattcgtcttgtgagtttgcagaccgtgtccgaacttgtcaagtctgctgggaaacaacttaaacagttcttacccaaactaattcccgcacttcttcaagctaccggagaattggagtccagcaagttgtcgtatttgagtacccgtttgggtgcccagtctgaagcgcaagaggcagtggatgaggctagggcttctatcgctaaatcacattttacaacggaaacggtttcaaagagcttacaatttgccgatgcctctattttagaagagttgataccgaaaatagtggacttggtcaaaagctct

SEQ ID NO: 9217 - DNA, 884 bp, Diabrotica virgifera
  SmartBlast Evalue=6E-65; Info=T-complex protein 11-like protein 1 (Fragment) n=1 Tax=Camponotus floridanus RepID=E2AJX7_9HYME
ataatgtctggtcgagccatttgaagggtaaaattagccatatccaactgcataaggtctaacgtctcgagtataccttggaaagtctctatgacatccactgtcattgataactcaagtattttattatcacgtacaggtgcacacaattttgacattacagagaccacatattgagcatagttcttaaaatccaaagtacccttctccgcttgttgtttgatcaaatcagaatccaaaacttccgaaatttgctgcttgatccttgtatgttgtggtaataatacagcaaataatccttctttaatttcttctagaagattcaacgcctgagtgtaaactggagggttttcatttaactgttgttttaaaatatcccaaaatgctttgtgcattgtgttcttgattattccctggacactattaggttctggttctgccctttttaacctaaaatccttgtcaaccactatttgatgcaccaaagccatatctctcataccattagctgcttgcatgatctcttccagtgaaacaaactttggtggagatgcagcagtcaatccactagcaaccatgaactgatgagaagtggtgcgctgacgtctccctgtaaatccagaagatccatcatcacttgtataagagcactcactggtggttctaattctagatgagccttgttcatcattgttgccttttggaatatctttattttcactcatagcaccaattctctttaacaatttaagagaacgtttcacaaaaaatttgaatttctttatccaaaatatttctgtcaatttcagatatttctttaatctcagctgtttattgtttaccaacaaaatccttctcaaaagttgtttgcattgaaaaccaag

SEQ ID NO: 9218 - DNA, 883 bp, Diabrotica virgifera
  SmartBlast Evalue=4E-27; Info=Zgc:103534 n=1 Tax=Danio rerio RepID=Q5XJ88_DANRE
tgtttttgaacgagaaatgacgtatggcgtgttatttgtttttggtttcaatttaaagggatttgaagtttaatttcattaggtttctttgtttaaaatagtgtaaactttttaataaataaaaaaatgtcacagatggagttaacctcaagtagtgaaaccaacatacaagaaatcgaattaagaagagagttagaacgcgaattgaagaataaaagacaatgtacatatcaaccttacgagtgtagccagttgtgtttggataattatcaatactgcatgaaacacattcttaatgataaaaatgctccctataaacaatgttcctttacatacaatactaatggtaaaaaatgcaatttacctgctccacgaagtgataaaaaggattttgggtactgtagcgaacatgccttgaaggttactctgacgaggaatagacaaaactcaaagcatcctctgccatgtactgctgaggtattgttaagttctttgtcacattatgtttacaaaccaagaaatagaaacagttcatccagtacccagcattctgatgatgatagagttactcctgattctgaattgaagtctgctaaatgtttagatccatttgttgatattgatgctagcgtggtccagggtgaaaaatgtagccgcatattggatgtctgcagtgaatcagaaagtgatatagagccttccacattgtcttctgtatggccagacatccaggctgatagttctgatgacgagagcattgattctgaaaatgaagatcttttaaagcatgccaatgtatatacagccgaagaaattactttactagctagagataaactaataaagttgcagtcattgtatattgaacagtatagatatctac

SEQ ID NO: 9219 - DNA, 882 bp, Diabrotica virgifera
  SmartBlast Evalue=4E-76; Info=Disulfide oxidoreductase n=2 Tax= Aedes aegypti RepID=Q16QW1_AEDAE
ttcgtgtccgagagcgacgaatttgttaaatgttaaatatttcaaatcgaaaatgggttgctcaacttcaaaagtagttcaaataagcgaaacagcaccggctcaagaccaaccggaggaatatgtggaaggtgtcgtatgcagtgttgatgatttacaagaaaatgaactgaagaccgtcgaattggatgaagggaaggttcttctggtcaaacagaaaggtgtcattagtgcgctaggtccaaaatgtactcactacggagctcccctagtatccagcgctttgggcgatggaagaattcgttgtcaatggcacggtgcttgtttcaacattcttaccggtgacatagaagattttccaggtttagattcgttaccttgttataaagtgacaatagaagatgataaagtgaaggttcgagcgaaaaagtcggagctgcgtacgaataaacgggttaagcgaatggtaaaaaggatttgaaagaagaccagcatatcgttgttattggaggcgggccatcaggagctacttgcgttgagacgctgcgacaggaaggatatactgggcgtctttcgtttgtgtgtaaagaaaatcttctgccgtatgatagggtaaaagttagtaaatccatggatttcgatgttgaacacgcttctcttagagatgaagacttttataaacagtacgatatcgacgtttttaaaggagtcaaagctactgctgtagattcaagtaatcatagcgttactctaagtaatggaaatacattaaattatgataaactgttcattgccactggcagtcttgcaagaaaattgaacgtacctggtagtgatttgaagaacgttgtaacccttagagaatataccgatgctcagtac

SEQ ID NO: 9220 - DNA, 884 bp, Diabrotica virgifera
atatatatataaattgtaaatcctaaatcatgatttacaatgtttatacattgtaaattatgattttagagtgtcctggtaacgttcaacgtgtcttggtttgtttatttctagtgtatctttattgtgattttagtatagttgactttttgttatttaagtcagtctcttagaatttcttaatccatttcattcattctggcacctctagaacatattttttttttaaatatcaacgagttattctaaaaaaaaattttcttggtacttcaaataaccacaaagtataaattgacataaccaatagagtaaaactgtcatttaaagataaatatagagctttggtaatgttgcctgacagatcttttttgtgcgcctgacatctaaagcctgctatccatataggagaaatatttgtggcctgatcaagtgttcaaaagatctattctaagaattatggcattggagaacaattcctggtttctattttgtactagatgatgtctgttagcagtgtcaaatcagaatacctgtaatactctgagtgcagtcttttgaagctccaagactatttttgtatagcgagcagaacgttattagcatttttgtttgcatctgaaacggaatattttcctagtaagctacacaaggtcttttattttcagaaatccttcattatgagggtttttggtacaccgcaaaatggcaatagtctagtccaataaaaggagtattagtggcttcttttacaaggctgttagcaatttcattaccaacagtttccatgtactcttccacaatgaggttaatttgttctaccctatcagttgtttaaatgactattgtgtttccaaactattactaactcatataaagtcgcatac

SEQ ID NO: 9221 - DNA, 884 bp, Diabrotica virgifera
  SmartBlast Evalue=3E-74; Info=Transmembrane emp24 domain- containing protein bai n=2 Tax=Drosophila RepID=TMEDA_DROGR
gtcgagatggccacctcatcctaacgtctaaacagactggttgcaataataatttagaattgttagtataccgtgaaattcatttgaataatttgataagatggatttcagtcattgcttccttgttttcattagtctcatagtttgtacgaactgtattatgtggaatttaaagccaaatagtcgaaaatgtttacgggaggaactccaacaaaatatacctgtagtcggggaatttgatgtctcagaagcccctggacaaacagtcaattacgttgtaacagattcgaagggtcatatattggcgaaaagagaagcaatttccaaaggcaaattttcttttaacacggagagttttgatacctacgaaatctgcttcatatcacaagttgctccacatatagctggtgtaactcaagaagtttccttaattaccaaacatggtatagaaacgaaaaattatgacacttatggcgaagctgcccaacttaaaccaattgagaaagaattgaaaagattggaagatctatctgatgccattgtccaagatttcgccattatgagaaaacgggaagaagaaatgagagatacaaacgaatctacaaacagtcgtgtactatacttctcgatattttctttgtgctgtctgatgggattggccacatggcaagttctgtacttaaggacttacttcaaggcgaagaagctcatcgaataacgagaaggaagtggtatctactacctagatttatttttgtaaaaagaactgtcacaattactgtaaaaacattgcgaagattttgtgttatttatttgtacatcttggtctgttttgtactaaataagttgttaataaaagttcaaaacctcaaaggttttattca

SEQ ID NO: 9222 - DNA, 880 bp, Diabrotica virgifera
  SmartBlast Evalue=2E-67; Info=Collagen alpha-1(IV) chain n=1 Tax=Harpegnathos saltator RepID=E2BTW9_9HYME
ccccccgtaagcctgggaatccatctacacctttaggaccagctagcccaggataacctcttggtccagggggaccaggtggacctggatatccttttcctcctcccggttttccttgcggacctggaagacctatttggcctgtaggtccgtcccttcccggttctccctttggtccatgttgtcctggtaaacctgaaagacccgtcaatcctctatctcctttttgacctggaggacctggtggaccagcaaatccgtcacgtcctcttggacctggagcacctggcaagcccttttctcccttcataccaatagttccaggtagaccatagtctccttcaggacccggttctcctttttgtcctgagactccataatctcctcggtccccttgcatacccttttcacctcttggtccaattaaagcagtttggttaagttcgtgatgtccatccgcaggttctcctttttgacctcgaggtcccacgatacctttgtctcctttaggaccgtagaatccaagaccgggtgttcctttctgacctttagtaccaggtggacctctaggaccacttgatccatgatctccttgtggcccgggaagaccagtttgacctggaggcccaggattaccagcaggacctgtaactccatctcgtccaggttcccctttctgtcctttcaatgtaatttcacaatgagctgcttctcccttttctcctttaataccagagatacctggtaaaccacgtggtccgggctccccaggatgaccatctataccggaaagaccatcagttccgttacaaccatcagtaccaggtataccgggggatccaggtggtcccattactccaggaattccgtgtagaccagg

SEQ ID NO: 9223 - DNA, 882 bp, Diabrotica virgifera
  SmartBlast Evalue=2E-82; Info=Putative neutral sphingomyelinase n=1 Tax=Camponotus floridanus RepID=E2AEJ5_9HYME
attcaacattttatttattttctgtatatcattcaaaattttcagtgtcagtgtcagctctagactttttaaacatgagtctagaattcaaagtttttacattaaattgctgggcaattcctatacccactctgtctaaaaacagaaaacggcgattaaaagcgattgcagaacatatatcaaatagtcattatgatgttgtatgccttcaagaaatatggagtgatcaggactattattcaataaaggatgaggtggctggagttctcccatattctcattatttttacagtggtgtcactggttctggagtttgtatatattccaaacatgtaattgaagataccttctttcatcagtattcattaaatggttatattcacaagttacaacatggtgactggtttggtggaaagggaattggactgtgtaaactatcagttagtggttttagtgtaaatatttattctgctcatttacatgctgaatataatcgcaataatgatgaatatgaagctcatagaattttacaggcatatgatgttgctcagtttattaagctcacttcccaaggtgttgatttaacagtattagcaggtgatttgaacaccctacctggtgatattgcctataggttaatattaatcatacctggtctagtagactccttcgagtatgcaaatgtaccgaaagatcacatagcaacatgtgaaagtctaagaaatacttatacgcctagcagttatgtaaagcagaagattccgggacagcggatagactttattatgtaccatccaggctcaaaacttcaggtagaaatgagaaactatagactgcccctgccagaccgtgttcctcaatgtacttttagttattcggacc

SEQ ID NO: 9224 - DNA, 878 bp, Diabrotica virgifera
  misc_feature (821)..(823): n is a, c, g, or t
  misc_feature (840)..(840): n is a, c, g, or t
  misc_feature (857)..(858): n is a, c, g, or t
tggtgattcgactggtttgtgcattgttggtaaatggcgccttcgactacaggagaaataagacccaacctcacaatgcatcttccaatggatcttggaactgggcagaggactcatctaccacgaccccacatgatactatatccgacctgagaaagcaaatacatgttctagaaaatgaaaaatccgaattgttgggtcaactggatcaactcgatgctgacaatcaagagaatttggccaacatcatggagatgaaggaaaaactacaattccaactgagcgacgtcaaagaaaatcttctcaaagtaaaaaagataacaaagtactagctgctaaagaagaagctttgaaaaaggaggtagaaagtcttcaacgtacagaaaaaggtgaacatgtcgaaggggataacgagaaagttgatcaaaaatccagagagcttgaggaagcgaaccgtaagctaattagtgagctcgaggatctaaaaaaggaaaaggtagaaaggcttcaacatacagaaaaagctgaacatgttgaagggcacaaagaggaagttgatcaaaaattcatagagcttgaagaagcgaaccgtaagttaattagtgaaatcgaagagctaaaaaaggagatgagtattttacagacttcttaccaaactgttgagaaagctttagaagatactaaaacatcaggcgaatccaacaaaaatgaacacctcaaaaaactgaaagtgaaaacaagctcatttactctgaattaaagaaagcgtccgaaaaaatatcagcatttgagaaaaagagtatagaagatgaagaaaacgnnnaaaaactagctattatncttgagacttacgaagnncaagtccgttttttgaaaga

SEQ ID NO: 9225 - DNA, 883 bp, Diabrotica virgifera
  SmartBlast Evalue=8E-59; Info=Glyoxylate reductase/hydroxypyruvate reductase n=1 Tax=Harpegnathos saltator RepID=E2BAZ5_9HYME
ctaatcctgcagcaaatatgtcaccacttttaagtgcctgtattaacgctggctgatcaaccaaccctgatctggaaacatttacaaaaacggctttcttcttcattttagaaaagaactcagcattacacattccatttgtttcattattcaatggacatcccatgattacaaaatcgctctcttccaatagggtattcaatgaaacgaattcggcacaaagttcttttccttctttcttttctttaggacccgtgtataaaaatcttttaacatcaaaatgtattagcctctttagtattgcttgaccaatattgcccaatccaataattcccacagttgctttttgtaaaccataccccatcatccactgccgattttctcgttcccatgcattttgttctatggctaatcgacattcatggtatcttcttgaagcagccaaaagcaacattatagcagaattagcgactgcggtagcattttcatcgtgtaaatgggtcaatttaatgtttcttctctttaattcatcggtatcacatgaatcaattccacgagacacaagacttactacttttaactgtgaccctgctgcatctaatacttctttatctattattacaggtttcttaacaaaaatagcatctactcccttaactttcgataaaatggcatctctagttggagtttcatttacaacgacatcacagtatttccttaataagtctatggcttcttcacacacgccggtatttgttattaatacctttggtcgttgcttttgatcatccatattaaccactgaattaaatgcgtgatctgttaatgtatttgcaaatatttagcacttaaccaacacacaagtaactcacggttattagac

SEQ ID NO: 9226 - DNA, 877 bp, Diabrotica virgifera
gtgattaccgcccagatatttagaactcttttactacttcaagttgtggtcattactagttatgttctgcctaactcttggtcttgaatttttgggtagtagcatgtaatccgtcttctattgatctattcgaagacccagaccacctgcttcctcctcgagttgtaaagactgctctctcagtctcttgtagaattgaatagaaaaagactgaaagattcttgtagaattagcgactgcatctagattctagatagatcttgagcaaaggccaacaatagttttggtatgaatttggtttcccaaaacagggtatgcatcagtggcgtttatcgaccaagtaactttcccactgccgtcgattggaaagagatgccctgtttatacttttctttgtggcactgggggagcagttttttattgcagcgcgcattctaggtattgtatgactatggttaaaactgttgttatttaaatctaacctaacataacctcacttttttcgtcaacgttccatgatcacatgacgaggctgctattgcggataatgtaaagtattttataaatcatgtgaatgtctaacacataattttgacaattttttgtttcaatatttgtttaaatgtaattatgggtatttttttgataaattttgcacaatggtactctcggaaagtgacctctttatagtgggctatttttgagccttgataaaagtatttataagtgttgtcaaattaatccaaacatattcggtttgacattacttgttttattttcagttttaatgtgttttaacatctgtacgtaatttaaaagtaaaaaagtgtaattttattctaccaaagcttgcttataaatactataagcaaggtca

SEQ ID NO: 9227 - DNA, 880 bp, Diabrotica virgifera
  SmartBlast Evalue=5E-15; Info="Polyprotein, putative n=1 Tax= Solanum demissum RepID=Q6L4B3_SOLDE"
tatctgaccagttcagaacaactgaaggtgtaagacaagggggaagcttgaatccgttactgtttattacgtttatggacgaaataataaaagaaaaaaaaacaaaaagtcagaccactacacatagggtatggaaatctgaaaagcaccgagatatcagattgtacatttgccgacgatgtaatatttttagcagcgaatgaagacgcagttttaaaaaggtatggtatgactatgaacaaagaaaaatctaaggttatggcattagccaaagaaagagaggatgtacatgttcagatagatgatacagagattagacaggtacaacaatttgaatacttgggagtaaccattgaagaaacaggtagacagggagccgagatcaataaaagaattgataaagtgaataaactgtaccacgcaataggacaaacatttattaacaagaaagaagtatcgaaacatacaaaataaaggtatttaaggctatatacagaccagtacttacatacggatgtgaatcctgggtactaaatagacaacagcaaaagtaagatacaggcagcagaaatgaggtatctacgcagagttcaaggagtcactagaagggatagggtaagaaataactacataagagaagaactgaaaatcgagacaatgatggagtatgttgaaaaaagacaattaagttggtgggggcatctacaacgactacagaaagaagtaccagttaaaaagatatgggaaacgaaggtgcagggaaaagaagtagaggaagaccgagagagacatggaacgaagtgatggcaaggattcttgacaaaaaaggatagcatggaacgaagcaaaggcgatggcacaggacaggaaagcaatggaa

SEQ ID NO: 9228 - DNA, 884 bp, Diabrotica virgifera
tacaaacatttatttatctaaatttaaactaatgtttttttccaaatataatgtcgattctaaagaattagctagaaacacactaccgagtttgattagtttaaaatttaactgagaattcaattgaatgctatgtattcaataaaacactaacaccctatgtattctctaaaatcgcagtcccctagtccttccggacaatttgaaaactttcactcaatactttcaacgtttagttctcaatagggctattcatcgtcaatatgtcattgacatatgacgtataatatatacaagtcatatgtcaagtgttcgaaacaaatgaatagccctataagaagattaatttcaattttagtgatccgtttgatttagtattaataaaactcaataattaataaaacgaaccttaaaaatgttttaagagcagcaatagtattaagcagatttattcagattgtgagtatgtacggaaccaactttgtaacgatcccaatgcatgtttttatcgtcgtataaatctatcaggtccgaccctgtgtgacgaataaattagacgtatggtattgcgtaattctttttcccatattacgatgtatttttcgttgcccgttcaagtatcaattagagaatttgtttatcttcggcgaattatcaaaaagatttaatgatttttcgagactaaagtctgagtttttgttaataagagttactcgttaagatcagattactgcatctggtgatgtgcgatgattgcaattctgtagggaatcagaagagccttagctgatgtggctctatgatttggattcgtcaaaagaagatttatgagtttagtgggctgtgacttagtaacatatcctggctattttattggtagaaga

SEQ ID NO: 9229 - DNA, 880 bp, Diabrotica virgifera
gatcgaaaattgtaggaaacagtaagtttttgataaacaagtaaatacagataacaatgtgtcataacatttctacaattgttcaatgattaaaaagaattttacattctacgataaaactgattgattactaaaccatatatcgttggcctggtatcaaaaatgcataagtccaaaatattcaattttagacttttgatcgtatctgttagcattatccaaaagctatgtactactttgttttcttccaatatttatagtttactgttaaaattgtgaaaataagtttgcataactcttttcattgtaaacgggcgagtacctacaaggtacaggcaaaaattacacatattgtatcactaaaaacgtgaatttaaattgtttagggacttgtgcaattttcacattatatttatttagttgtagacaagtggagttatgcatagttagtttttgtctctcctgtaaaatcagatattttggacttacgcatttttcacattaggccgatgatatgcatcctcgaacgcatagcccaatagcctcactaattaaatgctattgaatgatgccagaattaacaaataacagtgccatactgatgaagaataattatttaaaatagttttcacacaattgcctcattaatagatttagtaaaccttatttatttatgtattgtaaatagatagtggcatggtttctaaacgagcttacttggagcagtatccgcgatgtaaaccaactataggggtcgctttgacagaaaagctcttagctcagcggagctgagaatgtaggaaaaaaaacaattcttcattacctttttttctatgtttttcctttaggaaggcgttgagagggaacaacacctttcttt

SEQ ID NO: 9230 - DNA, 881 bp, Diabrotica virgifera
  SmartBlast Evalue=0.000000007; Info="E1b-55kD-associated protein, putative n=1 Tax=Pediculus humanus corporis RepID= E0VFP4_PEDHC"
gcgcgtggtttgcgtgtgtagagaaatcaatttgatgaagtgtatatcgttgaaagtgttaacataatttaaattaaaaatgagttcgtcaatagaagagctatcgaaactaaaagtggtggatttgcgaaatgaactggctaacagaggtcttgaccaaaaaggagtcaaagcggtcttggtcaaacgtttgaaagatgcgatggataatgaagaagcgggatcagcagatacacccaaagaaaatgaaactgttgaggattcaaaaccagctgagccagtcaggaaatcacgaagattatctagtagtgatgatagggcaaatacacctgaaccagccagaaaatctagaagattgtcctctgatgaaaaggcaaatactacacttgaagatgctaaatctggtgaaccagttaggaaatcattgagaagagtatctggagatgaaagagaggaagcaagatcaagaagaagcactgctgtttcagaaaagacaaaattacctgttataactgaaaaagttgaaacaccatcaaaacggaaagctgccgaagcaccaaagcctgcaacaacttcaccaaaaaaacctgcagatgagaagtcagaaacgcctgttacaccagaaaaaggtaacacagatataaaaccaccagtttctgtgcctgctgaaaataaagtaccagtatcacctacaactcgggctaaaacaccagaaaaccagcacctgtaaacaaaacatctgtatcacctacaactcaggctaaaacaccagaaaaaccagcacctgtaaacaaaacatctgtatcacctacaactcaggctaaaacaccagaaaagccagcacctgtaaacaaagcagctgtattacctacaactcaggc

SEQ ID NO: 9231 - DNA, 882 bp, Diabrotica virgifera
cctacctatcaaaaaagttgataaatgctctgtaataaaataaaaagatacaaaaaggttaataacagtttgaacaatttactttataataaacagtggtttgcacacattatattaaaatatgtagttaataatgataatgaaattatatctgttctgatatatcagggcgcactataaaactatcaaacacattaaaaattctaaaaacataatgaaacaaaattaaaacaggcatttaacaaaaatatatttgtacaaatttagagagaatatcatggtgataataggtaaaggtatgctctgaaaggactacacaccgaaattgtcttagtaacagatataatgccatttcgacacaaggtagctcaacataatatccgtttttatgaaagcagtgaactatgacaaagtttatgtattaaatagactagactacttcagacaaaccatcgtttgaatatatacaatacatacatataagttggtatatgaaacaatagtagtttctgtaagttaaaaaaaatagcaccagttttacacatacaaaaaagattcgatgtcgattggtctatttattcaataaaaattggcggttagtttgttgtcataaagcgtccttttcgaatagtgaaaaaatgactcacaaaaaattgcttaaaattgtaatacaaatattgctgtaagtctttaaaggacttcctatttatattaagtggaaaatgaaatatttaacacatattttatgactatctgaaaatagcttacagggtcctccgttagatataatctgagctatatttgtctaatgcagtgaaacttgagtaacctggaacctgtttaatataaaatcctgtttattgcggaaaatttatttttcca

SEQ ID NO: 9232 - DNA, 882 bp, Diabrotica virgifera
  SmartBlast Evalue=2E-28; Info=Vitellogenin n=1 Tax=Anthonomus grandis RepID=VIT_ANTGR
acacccccaagctcagcatttaattaaatgtcaacttggaaaagcaagaagttaaagctgaggttgaactcaaacccgaaggcaaagaaggcaaagttaaattcttgcatttccgttcttggccatacactgctaaatctgatgtgactgacttagaacctctttccgctcaaaagagcactagagaaattgtgcctgataacatgcacgctttcaaaactactgtaggacaaaaatcagttggacttgcactagaagtagaagttaaacatgaaagaaaattcattcattctgaactaattaatcgtttgttttcacaaaatggagttattgatggagcgaaggcattatgggatgtaaatattctccaaagcagtgaaattaacgttaacttggatgctgagcaatcatcagtacgcaaaatcattcttcggtctcgttacgatcaagattaccaacaaaaaggtgagtcgcctaaatctgaatacagattaacgaaaaaatagagtcaatcgcagagacaacaagaaattatggatgcagttgcatctggaattaatagtgtatcagttaattctttggacacaatcattgaacttaaaggtgaaaaaaccattcagtacctcttgactggagcagtagcaaagagtaatgttgatcctaaatctaatgtaaggatatgtttcaagagatcttcacaagacaaagaattgaaggactacgaagctcatttcgtatccgaaagtatgattcccaacacaaatgcccttgatctccaatactcactgtccaaaaatgaacctaaaattgacaccaagatgcaacttgtttttggaccttctaaagaaagcaaaaaatctaaaatcgtggctgaaattaaac

SEQ ID NO: 9233 - DNA, 882 bp, Diabrotica virgifera
tatagtaattaacagtatattacaaaattcacactgtcaaccgaagtatacacagtacattttctgttactattttgaattagtttgatgatatctatatttagttctgatttttctattggcagctttctccatctgctgaacatgctcaaatgaactggatttcttcctgaaaagccaatcttatctacattggagattatcgtatgctcagttgtatttttaatatctatttcaataatatattcattaaatgtttcttctccgaatctgcttgttatgtttttggacatttctcctccacagtttgatgtaccacagggtttaatagtaccatcatggttaccatggttaccataataatcttcgtcatcgtcatatccgtcgtcatcagaaccagaaccatagtcaccagaaccagaaccatcttctagagtttggaaggatggtgtactattatggtcttcgtcgtcaatcgtgactatatctttgttaccataatggttatcttcactgaacctgtttgtaatgtttttggatatttctcctccacagttcggtccgccacagggtttaatggtaccatcatagtcttcgtcgtcaatagtaatctcatctttgttaccattataatcttcgtcatcgtcgtattcaccgtcaccagaaccagaaccctcttccggagtttggatggatagacttgcagaatccacagtactcttttgaattattaccaagatagcaatgaaataccaaagcttcattcttgttacccaataaatgcagaaaaaaacataaaaaaattattagtgttttgtgttcgagcctaatacttattatatttcaatagacttgtacatgcatcctacgattttaacgttg

SEQ ID NO: 9234 - DNA, 881 bp, Diabrotica virgifera
aacatgcttgttgatataatgcaagagaacgggtaactaataatttttcgtcctcgtgtaagtagctgtcgttttgaagtgattctaaatcttttaagttttcgtctgtaaacttaaaatagttactaccacgacctgcagaaattattaccattagctcaaacatacatttaatgctaagctggcttttaacctttattaacgtgctaaaaaacggattcagaaaaaagggtatagtgcgtctactgatgttaaatagttgtcctaaaagagttactatcgtaatttctaatgttttgtcgtagccgtgcacagtaccgccagtttttggttgattgaagacttcgtagaaattattttgtaagagttccaataactgtttatagacttcagaagaatcttgccaactactataaacgcacaacttaactcctactgcttcgtataaaaaccaaggatcattacaacttctttgaaaaattatatccgcacaaatttcactatcctctttatcaaactctgccaatacagaggcaatattttttaataactccggtttggtttccggtttcaacatattgataagatattttattgtcacataaacttcaccattcttcttcttatttgtaaggtatgcttgattttcaaacactgactgcaatttattcataagtgtttcatttttctgcaaaacgcctccaatatattcttgtgcaagatggagttcttctcgttgttcttttaactgttccactgcttctttaaatgagtcactcattttttaaatatatctccaacaactaactcgagggaaaactttaaatataccgtatacttaaggcaataatttcaaaaataccaaaataaaaacaatatta

SEQ ID NO: 9235 - DNA, 880 bp, Diabrotica virgifera
  SmartBlast Evalue=2E-16; Info=Isoform B of Facilitated trehalose transporter Tret1-1 n=1 Tax=Drosophila melanogaster RepID=A1Z8N1-2
caaattttgggaaagtatgggaataaacgctaacatcaaacctactctaccttcttttgtcccaaaaagttgaataaaattcaatctgttctcttcacttccctttatacttttgtttatttcaagattatgataatcattttcaatttctttttttgttttgtttcttcttaatttttgtaaactttctatacattcttttccatgcctttcgatagtaagtgaactggactttcaggggcaaaaaagaatagtactagaaaaggaaccataggtgctgataataacagcgtaaaaacttttaaatcaaatagtggtccaagaataagtgcgtatacttggcctattggtgaaaacgctgtcattaaacatccgtgcttagctctattatgatcttcgcatatttctgttaaataaattggtaaaatacctgttacacctgcacaaaatatttgtataaagcaactcaatatggtcatgaggtttattgtgttacaaaaagctaaaccaattgtactaaggaatgttcctaaacccatcagttgcatgcttttttttcttccgagtatatcagccaatttgggtaaaaaagctgaccctactaatgaagctagtcctggtacacctagcaaaatagaagtttcccaagttgttattggtctgcccaaaatattttcatctgtgttatttgattgcattttgacaatagctggagaagtccagaccgataatgcagcattcaccaacatcagtaacgtggcagttacaactgcaaaatacagaaatagggtatccggcttttttctaccaacattttgatcatcttcgtacttcatatttttttaggtgtagatgtttctgtgtcaataatgtctttgtc

SEQ ID NO: 9236 - DNA, 883 bp, Diabrotica virgifera
gtacaatattgtaaccttcattcaattcattaacctcgtttctcctgattctccatgtgccagctttcgcttacacagtgccatatacttttcttagtatttttctctcgaatgtccctctaattcaaaagtacatattcatcgtttggtattgtttataattttattaaatatataaatataattacatatcctcggcctaatgtgaaaaatgcataagttaaaaataactgattttacaggagagacaaataactacctgcataagtccacttatatacaactaaatataatgtgaaaattgcacaagtccctaaataatttatattcacgtttttagtaatcaatctgttgtgttattttaatatgcaccctgtaggtactcgcccgtttacagtaaaaagactttttattgtataaacatcagaaaaacaccgaaacgtttttaatggtttggtcactaacaagagcggacttgtgcagatttcatatggtgttcaacattaatggacttatgcatatttcattttcgcaattttagcaaaatctagtaaaatatattagaagaaaacagagccgtacatagcttttggataatgctaccagatgccatcaaaagtctaaaatttaatattttggacttatgcattttttttctggctcaactttacagtaacttaatcttattacaagtgacaagctagataatttttctaatggaaataatctaaaacagttttttcttcgccatctttcgtagaatacttagtaccgtttactgaaagatactgatagaaaaaataaaaaagatacaatagttttgttagtaaggacaatataagtttcattacttctagtgttagacgttttaggttaatctcca

SEQ ID NO: 9237 - DNA, 879 bp, Diabrotica virgifera
  SmartBlast Evalue=8E-46; Info="CG9107, isoform A n=5 Tax= melanogaster subgroup RepID=Q9VMJ1_DROME"
agtatgtacaaatataaatttatttatcccaaaatacacagtcaatgtaataaaattttaataaggcttaaactttctcccttgtttcatgagtgcaactttttccttgtccttttcaaaactctttctcatgagtgcaatctgctctttcttcgattcccttatttggaaggtgtagaaattctttagctcctttttcttcgcacctttttgcaccttttcattcaatttgttggctaaactctccttcctggatagtcccggttttctaccaccttttgtaacaaccgtccatccttcatcatccacattttcttctgttttgtctttcttctcttggctgtcaaaatcggccataaattgttccacttttttccttaaaacgtcccggtcacagatagaattattataatttttaacccacaaattaagtccagtctctattggttcattatcagttgacatgggcttcaacgatttcaattgcagggctctaactaagtggtctcttttgttaaaaactatatacgctcttttaaaaccatctccttcttcctttgtgttcttttcgaaaattattcgtcttatgttgcccacactggaaaaagcgttccttaaacctacttctgttgctgtgggaggaacatttaacataaagagagtctgaccaggaggtttgtcttcgctaacagctctaacggagtgttcttttatgtatacatcatgactgcttgtgcactccgtagacaataccaatggtaaaactgtaaaagtatttatatctgaagacattgtactatatactgttgacaagtttttagaaaattagatttagatatataattttaatagatttcaacaaatttggttatgttcatt

SEQ ID NO: 9238 - DNA, 882 bp, Diabrotica virgifera
aaccatttctttggtaaccttatgaaaaccattgtctgcagcagcatcatcaatcttcttcttatactttttgtgaagtttattgtcacattcgttcatcgtacattttttgcaatgtcggctttctatataaacttcgacaggatttttataaaataagctacaagttgaggcgtcactattaatggagagttcataatagcaattttctactggagtcaacgaaaaaactttgatccaaatattgtcagacgtaacaattcggaaaaccaaaaacggcttctctttatgaactaataacattatggttatcttattcttctctgtagtttcttctacagtagcaactatttgattttgggatacattttttccgtgatacctcatgcagtggtttgttaaatcctttatgctaacttgatcgttacatttccatgacacagggcatcttaaagttttgtacaaacacactttttcatgggcctctacttctccccacttgagggtttctttacaatcagggaacgtgcatggaaacgtcgacaactgggcaagattttcgtacagtgtgtttctgactgacatatcggaaggaatcaattggcaacgtccacatttatgcctctgagcgtccctgctaatggtcattattgggggtactgataaataattgttgcaaagagcacactttaatgtttggaggttactctctggtattaggttggacataatggattataatctggatattgctgtaaaatatattgttggtgccacactaataatacgagtaacactgaaaactattgattggaattgcgtaatgtatcgtcgaaaatgtgtctccgcattaatctataaaataaaatcatgcttatctct

SEQ ID NO: 9239 - DNA, 882 bp, Diabrotica virgifera
  SmartBlast Evalue=1E-14; Info="Perlucin, putative n=1 Tax= Pediculus humanus corporis RepID=E0VL51_PEDHC"
gtcaaataagatgactaataaaatttcagtaattttatttttgtgcgtattaatatggaaggaaaatgccgttgaaggaaaattcaagtttagcttaaaatgggaaagttcccatgaacctaaggaggaagtccctgtcaagaatttgccaagtattcaaatattacaaaatacagatcttgcagcacgaaatctgccaaagtttcgtaacagtgtgtacgatctgggatttgattttcagggaaattggtatgatgcagcggtattttgtaaatctcgtaacatgagcctcgtcagtattgaatcagaggaagaaaatgcctttctttacgaactgatgaaacaacgttatggtgagagcatggaatattggttttggacttcaggaatccaacggaacaatagatgggtatggacgagtacagggcgcccgatcgagtacttcaactggatgacctaccaaccagacaaccaaagaagccaggaaaactgtatagaaatgagatataactggtacacaggtatgcgatggaatgataggaatggacttgattgcggcgtacatgctctgtgtgaagcagaaattgaacctgttacacccgttacccgttacaactggttttcccgttataccacacctgctgttatgcggtataccacacctgttatactgactaccacagctgttagacgggataccacacctgatgtaagtgacgccacacctgttacacggcataccacacctgatatatgggataccgcaactgatacgtgggacatcacaactgaaaaaaattctaattacacggattattactagggattattaatccctatatattgtaatactttgaaaaaaaaataaacgtctttattttc

SEQ ID NO: 9240 - DNA, 878 bp, Diabrotica virgifera
atcgctcgtattatacgctttgtcttgaattacagatctttctgttcctgtacgatgactacttgatcgtgcgcgaaatgaagcgtatatacagttgtttcgtcgtttaatagtatacacattccagacgatgatctcctgtattgcttcgttgccacattcaggtagattttgaagaatattcgagataaacggtagccatgtctctcatttaccctaaaattgtcttagaactggttgttaatcttcatttttgatcgaagatcgttatagaatcgtattattgcttttacaagtactatattaatagataagctttccagtacttggcaagtctacagaggggtattgtcaagtcaacaaataatagatgagtcctagctattctttttcatttaattggagtaaaatgtagatgtggtcgattaaagaccgtcaaactctaaatcctgcttgctgttccagctcaattgattcatattcgttttcggctatgtttttcataacttttccgtacaatctacagagtgctggtatctgagatgcagcagtagttcttctagtctgccttatccccttctttgcggatctgtgtaattcatccttctgtccagctttcaggtatattattcccgtttaggtaggtatctatgaaaacttctgtcagcatgttaattaacgttaatgttacatttttcaaaagttcagcagggattccttcttgttcacagggtcttttatgtttcgtggtttttataagtttggtagattttatcacatatattccttttgcaattgaggtactggtgagtttacatttgctgtaccatatggtagaagtacaagggtaacttgtttcaatacagtctcaagctgtt

SEQ ID NO: 9241 - DNA, 878 bp, Diabrotica virgifera
tgcaaattctttttgatagggtcggcatcgccgcgctaaaggctctcatgggagctgcattgcctatgttccctatactgtaaagtcaaggtggaacggactatagcagaggtgggaaataatcaatacaaatctataaatttacattgtattgatagtctctcacctttagacgtatcggaggagtttgacaactcccactctggcaggagaattttataaaattctcctgtgacagtttgattccgatacatttaaaggtgggaaactgtcagtacggtgtaaatttgtaggttgctattgataatttcccacctctactagtttcatctctttatatcacaacgtattatgatttacgccttttccatgtgattttgccggttattagtgcactcatcactgtatacacaaaaaatgccggtctcaaacaataattaaaaaaatcagaaaggcaacataatgttttctccttttagtttttatcccaaatatacacgtaacttttttaggaagtttcattttcaatacacaataagccttttcatcatgtgacaagcgcatgctcaacggccatgtttttcgtgcagtttttatcaacaattgagaggttaggcatcactatttgttcactatacaaataacatctataattttttattctaattaatggtatcaatcgattttcattacttgccgaaatatattaattaacaaaattattattataatctattgtagcgtgcttacggttaaaataatactctcggttcgtttatgcgaatttatttatacaagttacagacaaatttattttacagactaactactcctaaaaattgcattcttatttatattgaatacaaaaatacaaggcc

SEQ ID NO: 9242 - DNA, 861 bp, Diabrotica virgifera
  SmartBlast Evalue=4E-19; Info="LINE-1 retrotransposon-like element, putative (Fragment) n=1 Tax=Aspergillus flavus NRRL3357 RepID=B8NZ53_ASPFN"
taaaaataaaagaaaacaatagaacattcaaaggtaaattaaaaggaataaaaaagaaacaaggtaaaattgtcgaggaagagaaagagtataaagaaatatggacaagtcactttaaagaattactaattgaaccagttataaatgatgaaatagaagacgtggacgaagaagaaacgaacacacaggaaccagcattagaagaagtaaaaacattataacgaaagggaataatggaaagtcacctgggaaggacggaataaatctagaactaataaaatacggaggagacatattgcatgaaaaaatacatgaattgattaagaaaatatggaaaagaggagacaatgccgaacgagtgggaaattggacagattataacgatccataaaaaaaggcgaccagcatgagtgtaggaactacagaggtattacactattaaacgttgcctataaaatattatcgtcaataatacaaaaaaaggttaacagatgaaacaaaaaatatcataggacaataccaatgcggtttcgtaaaaggcagatcaacaacagatgcaatacataccattaaacaaatcatggaaaaagcacacgaacatcaacatgaaatagaaatattatttatagactttgaacaagcctttgactcaataaagagaaaggaaataatgaaagccctaaaatatcaaggagtaagtaaaaaactaagaaacctaataaaaatgtctatgaataaatcaaaaataagtatcctaacacaaaaggggaaacagaagaattcgaaataaataaaggagtgagacaaggtgactcactgtcagcaacactatttaacctgacagtagattttgtgttaaga

SEQ ID NO: 9243 - DNA, 879 bp, Diabrotica virgifera
  SmartBlast Evalue=6E-45; Info=Sodium-dependent phosphate transporter n=1 Tax=Culex quinquefasciatus RepID=B0WB17_CULQU
acgtcaaatggctttccattggagtggggtttctaccttttcctctttgtcgcgtggttccgtattttgttcgatgtactgtacttcctcctctgatatagacttgtgtttagaaggagagtctgatcctataataaaccacactactgaccaaactatacccaaggctccaaacaagtgaaaactgctggccagcccaagtgtgagttcgatatgaagccagctatcggcatggaaatgacgtttcccaacggaccacctgcataaacaaaagtgccaaatttagctctatcttgcaacggtgtccacgagctcaataggcaatggatgcttggaaagaggaaaccttgagtcaaaccggtgacgattctacaaaatatgacaccaccatagcccatccgagctccgagtagaggaattaggcaacaaaacagacatcctataaaaatggcccctcctaggaaccatttgggaccatatcgtttgattagtatgccggcaacaatttgcaaacagatgtatccccagaagaatgaagataacattatgttcttgtaagggacccattctggatacgtcggtatacttttatccggaggatcttctgctgtcatggcaaaaatcgctatactcagtattgatctgacagcgtaacatatattaacaactacgaatagcattacatattgaatgtgtcgaacgccaagccacctacttggttttttaacactgtcaataacaaccgcggcacacattttaaaaaaactccaaacgcacaattcacttctattccaataaatatgcagaaagcggcttatttactttctaaagtcaatggaaaaaatatgtatattggtattccgcacgtgtctgatcgac

SEQ ID NO: 9244 - DNA, 880 bp, Diabrotica virgifera
  SmartBlast Evalue=2E-32; Info="Histidine triad nucleotide binding protein, putative n=1 Tax=Pediculus humanus corporis RepID=E0VYX3_PEDHC"
tatttcatattatttaaatgtttaatattgtacaaaagctgcttaatattaagttattttgatttttgatcatcgtaaatgtatttctaagttttaatttctattacaaatttaaacaacaaatcttgtgtggttccttaaaattcgcaaacatttatttctatataacactttgttattttttattaacaatgacaacagatcctaactgcattttttgcaagatcatagcaggagatgctccagcggatatattgtttcaaaatgaagagttagttgtatttagagatattaaaccagagtctaaacatcacttcctagttgtgccaaagaaccatattctgaatgtaaatagtttacaaacaaatgaggacaggcttttagttgaaaggatgttggaaattggtaagaagattttagcggaacacaatggtgatttagacgatgtaagaataggtttccattgcccaccttttaattccataaaccatttacatttacatgtgatctccccagcatctgaaatgggcttcattaagagacaggtgtttagaccaaatacctggtggtttcaatctgttgatgacactttactaaggttaagcaagttatagtggaattaatattatatttattatattatcgctatacaagaaaattggtgattattggcaattagatattaattaatttggaccagttgaagaaaagttcgttattattttataatctaatttagaatgtaatatgtaaagaggcacttagaagtcaagataaaaacagaattttatgcattacttcgattttaatagagtgtattgtctttgtgatattttgttaaatgtctgtgtgggaattaagttaataaaaaaattgttac

SEQ ID NO: 9245 - DNA, 879 bp, Diabrotica virgifera
gtccccacagttatacagtcttataaagattaggtttatttcttcaacagttaaacgatttgatacacgtatttacagtaataaaatgtacgctgcaaaatgtgtaaataaaaaaggatattaagcctttcgtccaccgtgtcctcagtcgagggcaacctattctataatttcttgtacgtagctccatgtgtttttacccttgtaacacattgtccccgattatggacatcctattatgtccaatgagtacttgtgctgacatcttacagcttctgaacaaaatatttaatttgttgaatataagtttctgtatttacttatgactggtgtagataatgtatatacaatgcaatgttcatcgctgtataagtaaagaaaaaattgttttgtaagatacttattgaaaattacttattgaataaattattgttttttgtcagtacatattaaaaaaaatgtatctaatatttttactccattggctcacgatatccccaaataaggacatcttgtagtgaccaaactgtgcattttgaaaatgtaatcaaaaatttgcaaatattctcgcgctgttgcacatttcagatttttagcttaaagaaatttaattcgtgaacgaaagggttaacgaagtaaaaaatgaaattagtttggtttggacactcgatacctttagtacattaaatgtacttaaacaaaatgtgtaaataaaaaagaacattaaagaattaaaaaatgaaattagtttggtttggaaatctagtgattataaagcatcgtcaaggctatagcgggataagatgataaaatctgcactggtttcttatttgggatggggcactcgaaagtgcatatttaaaaaattcacgtgaccag

SEQ ID NO: 9246 - DNA, 878 bp, Diabrotica virgifera
  SmartBlast Evalue=4E-23; Info=BEL12_AG transposon polyprotein n= 1 Tax=Anopheles gambiae RepID=Q4JS97_ANOGA
tgttccgcacaatcggttgaatcgttggcaattattaaataagttgcaccaacagatttgggaacggtggtctaaggagtacctccaaactcttcatcaaagggctaaatggaattctccgtctccaaacgtccaactaggtaccttagtggtaatccgtcaaaacaatattcccccgctacaatggcctttgggccgtataattgaggttcatcctggatctgatggtatagttagagtggccacagtgaaaactaatagtggtatatataaacgctctatagtaaaattatgtcctttgccttttgagccgtaacaatactgcgtattgtggtgggcggttgtggttcgtccacataagtaggaataacaatttttaattttcttgtttttgtaaagaatattttaattcattttcttttcaatattatgggacaccccgtatatacgagtaggccaatacctaattcagtgagtatgtattaatttttatcattattttcaagtaaaaaccttaaagttttttgtatgtaattacctgcctactcgcctcattttaaaaagacaattcgccaaccaactctcttggttaacagtcacttacaatcattccgaaaagtgtatagaaactcaatatagtcctcgcgagtgatttatactttatactactcagcaatagcagtacgaaaaatagcaggcctgctccagcttgtgcaacgagaaatgacaaggtaggaaatatttttattacaatttactttaaggtctggtttttttactgttatttttttttattctattttaaattcaccctatgctaaacagtccactaataaagctcactgagttagtaatctcctccaagatgatttaaatac

SEQ ID NO: 9247 - DNA, 876 bp, Diabrotica virgifera
  misc_feature (592)..(593): n is a, c, g, or t
atatgcatcgttgagtgctgtattttgaatatgatctacccagttttcctgggatttctatctacctcatttcgatttagctcgatatccactttattgctccattatttaattgttaattgcatttttcatgccatttaggatcaatttaactctactctaaacagtttaataaaaccattttaaaaatattggttttaaattgtgtcggtggttcccatagaaaaagatttagccttctttaaatatcggtttatttactacgtgaaatctacttaaaatgacatctggcgttagacacattcctgaggaagtgggttttacgaaaacatagcctaacataacccccaaaaattttaaaatacgaattttatacatttggacacatttgacatgttttttaagattccaaaacaaatacttgatgtattctagaccaactcaactgttttaaaaatgttttgaatgattgtaaaagattttctcgttgtttggataaaaaacgtcagatattttcgtggagacactctcacattattaaattgtgactataattgccttttagcgtgaatatattatatcaaacttggtnnattttatatgtaagggaaaaattttggaccacccagatgtatacacgtattcgaaaaaagccagtccaaaaattttcttcaagtgcaacatattcttgttcgtaaaaatatctgtgacttggaaatcatggtttattataaaagttagatgtttgaactaagattgctttgtgggaaattggtattttcagaaaatattttaaaaccaccaaaaataccaaaaaaaccatacacattggatatttataatggaattctaaagtataccagtatttattatact

SEQ ID NO: 9248 - DNA, 859 bp, Diabrotica virgifera
taaaaaaaagtccacaattccacaccctctccattttacaagaatggggaaataagggttggttcctcattgaaagtgctgtatttcggaaaataaggcaataataacaaaaaattttatttaaaaatcatcaaggtacttttatcctaacattttgactaaaaactttgtttgcatcttgattcgtttctaacctatagccctttttaaagtacttaacaggggcgcttatttgaattgcgtgcgcaacaaaaatgtcacattttaaaattaactaacttttaaatcgataatttggggcatttatcaaacattaaaatgtacgaaaaaaaacacaatacctttagaaaaatatcaattttaacgtgaatatatttttattgtgaattacaaattatttaatttagaaaaatatgttttaaaatatactaatacaaattttgagagcaacacatatttttgtcacaaaaatttacataatcatttaaattaaaattccttttagatttacattttaggatggctaattaacatttggatttaaaattgcacaacgttactttaaaggataaaaatttgtatggcgataaaaaattgatatttttttgattttattttaagtcaattttcaagatttcaatcaataatatctttgttgaaaattcataaaaaactttaaaaatatgcttgtaggtacttggaaatgtactctttcgaaagcggtatctatttttcttatccatagaatactctttaaataaggctcacgttattaaaaaacacctacaaaaaaaatgtcatgttttaataaaatcgatgccattcttttctgaaagcctttatttaaatgaaaatatgg

SEQ ID NO: 9249 - DNA, 863 bp, Diabrotica virgifera
aaatggtgacgcttttaacgattttgacagtgtacttttgacgaaaaaagtttaaatcctgtcaaaatgtaaaaaatcaacaaatgctacccgttttttcgtcggtttccatgtttgtcatttcttccaatattttttttactattctgaagtttttaagagtcataaaattcacaaaagcgtgaaatttcgaggctttttggcatttttccgtttttccttgaattccctcctatattcgttattgaacaaaaaatgtttcttttaagatctgcttttgaaagtttttgatctcaatagaacatcctctactttgaaacaacttttcgagatattactcaaaatatactcgtctcaaaaaactaacaactgttaagaacattacttgaacattgttataagttatagaaatatcttccaaccaaatacacacttcttacacatttataaccttaagatttgtgtatttgtctatttcgtttgggtagaatgttcttaacatatctttaacaactacgacattccttaatattacgtttctcaaccgatttatgtatattttattctgttttaacttgtacagatcatcgattttaaagaagaatcatttagttagttgaaatgacctttttctcggcgaaaatttggtatttgtacagatttatttcaattgtttgaactctgtgtctaagaaattatgatgaaaattgtacgatatgttttaattgtccttccttttcttcctcgtcctctcttttcctcgatcttcctttcactataagttgagcatattggtatggtttgttcgacagttggttgagttcaattagtgcggtcgtaaattttattaaatttatctgacc

SEQ ID NO: 9250 - DNA, 879 bp, Diabrotica virgifera
  SmartBlast Evalue=1E-118; Info="THO complex subunit, putative n= 1 Tax=Pediculus humanus corporis RepID=E0VGG0_PEDHC"
tggatatttaatctctcccttatgtttacccgtcggaagaggtttatgatttacaaaaacccaccaacaagatcttaaaaatgggccatacggcaaagaaataccaaactaaaattgaagaatttcagtcctattttaaaagccataataaatataaagaacacgttggtcactcgtctaaagttcattctgtaggttggagttgtgatggcaagaggttagcatcaggatcctttgataggtctgtttgtgtatatacgttggacagggatagactgaacaaagaatatgtcttcaaaggtcatggtggatcagttgaccagctttgttggcaccagtctcatccagatcttcttagtaccgccagtggtgatagatctgtacgaatctgggatacgagagttcaaaaatgtgtcaatactattatgacaaaaggcgaaaatatcaacataacttggtctcctaacggcaattctatagctgtaggcaacaaagaagatctagttacttttattgatgctagaaacttcactatacaggccgaggaacagtttcattttgaagtaaatgagatatcttggaataataccagcgacttatttttcttgactaatggtcaaggctgtgttcatattttaagttaccccgacctaaaacgtcagcatattttgaaggcccatccaggaacttgtatttgcatcgaatttgatccaacgggaaagtattttgctactggaagtgctgacgctttggtatctttatgggatataaatgaattagcatgtaaacgagtctttacaaggatggattggccagtgaggacaatttcattcagccatgatggacaacttttagcttcagcatcagaagacctaataa

SEQ ID NO: 9251 - DNA, 879 bp, Diabrotica virgifera
  SmartBlast Evalue=1E-115; Info=Protein MON2-like protein n=2 Tax=Aculeata RepID=E2BVY3_9HYME
gggcctccaaagtacttctattctcgacatattcactagacctgtttccagtagcttggctactgcaaataaggaaggttctcggttggagtatgccagctccattgcttcttgagacagtttacacaacgcacttataagatggtgcaatgctacatcatctaaatattgactagattcgaacaatttacttaacatagtagacaaaactggcagattatccataacagaactagtaataccagtattagtatctgtagcaggtcgcactgcctttaaacttcctccagtcgatggctttagtcccaaaatccaaaccaaatgctgcaacgtggttaagactaaatgccaagacgatcctaaaattccaccatggcagtgggctaaactaagcaaagctcgcattgactgcaaatttttggccgttagcatcacaggtccttgttgagttccagctggtatagatgacgttggtagaggagtaccaactgctactacctgttggcggtattctgtttcaccatagggcacaataagaggaatgttcatatcttgactgtctctatgaacttgtctaagattcactccagaggttacagtatttaaaactgtaagagcataatgtggtggcaaggaagatttgcaaatagctgttatgaacgcatctcttggagtgttcaaatccaacatgccacacaatgaagtataagtctgaatagctttcaagatattttcagttatagactcttcggtactggcatccactagcgggctcagtgcagctaacaagccacaccaacttgaattgatcagttggcagttcagttcttgctgttttcttcttgggttgaacagggttcgtctggttgctgttgtggg

SEQ ID NO: 9252 - DNA, 879 bp, Diabrotica virgifera
catacgaggtattaacagatacattattgtattcttcaacatcaagtttggtatctactttctccaacatttctgacttatcaatgacctgatcggcttcaacagttggtttaggagttcttgatcgtttcctagattttctaggtttcttttcaacttccaaatgatctactactgccacattaaccgatgtatctttttctgtaactacaggttgttcaattttttctacaacttttgtagtttctgaagatgtggtttgaattattgtaacttcaggtttagcacttggttttgtgtgatgacttgataaaattttagcataggatgagacagtgttatcagtagaacttatttgagactgttctacaggttcagtaggcttaatatcttcttgtactacttctggactttgaggcttgtcttcttgaacttcaatattatgctttggagtttttgatcgttttctagactttctagatgtcttttcaactgttaaatgcttatcaatatcggacttgtcttcttctgcttgaattggttctattttcttaactacttcagttgttgtagtaactcttttaggagatgtttcaaccaatttaacttctggtttagtaggtagtttttcatgttggctggataatattttggcatatgatattgtactgttagtggtaacttgatcagtcgtatcaaaagatgtttcttttgtttctacttcttttaattttacctgatctacctttttcggtacatccatttcagtatatctttctgcttctataaaagcattaatctgagctgaaggggattcctgtcgctgcttctttggtattacttcagtgaaaataatggtctcttcaggttctttttcgt

SEQ ID NO: 9253 - DNA, 880 bp, Diabrotica virgifera
  SmartBlast Evalue=5E-68; Info=L-asparaginase n=1 Tax=Aedes aegypti RepID=Q16RI9_AEDAE
gttcggttgcttcttgagcggattttccattttctatatcctttattatggcaatagctaaacaatatttaatgatagtgtctccatgaccagtggtagaaactgctccaaaatcatcatcagcgtaagtgccactacctattaggctagtatcactacatcgtccaaccattttgccattaattcctcctgtagaagtggctgccgccaaattgcccttacagtctaatgctactgcaccaacggtacctacatctcctggattcttatgtccaatttcagtgagatctcctcccttacgtataaattctgctagagcttttttcgcatctggactaattaaacttactgggtcagttgttggaaagccatgatctttcgcaaatttagaagctccgtctgctgctagtagaacatggggtgttttttccatcaccaagcgagctaagcttattggatgtttgatatctttcacaactgttacagcccctgcactaagagtagatcctaccataatactagcgtccatttctacttctccgtctaaatttaatactgatccgtatcctgcgttgaaattttcatcgttctccatatatcttacagcctgctcaacagcgtccaaagcactaccaccctctttcaagattttaaatccaatttccatagactttctaagcccttggattttgccttcatttctagaatcgggaatatctccagcaccgccatgaattaacagtattggctccattttaatagaaactgactttaaaatttctttacacgattatttggtcaattaaatgaactgattgaaccacaaaccacagcttctaacttctaatatatcgctatcgcaccggcttaccggcaccgg

SEQ ID NO: 9254 - DNA, 871 bp, Diabrotica virgifera
  SmartBlast Evalue=2E-49; Info=Transposable element Tc3 transposase (Fragment) n=1 Tax=Camponotus floridanus RepID= E2AGQ7_9HYME
ggacgatggccatggagattgaagtaagccaaactagtatacgcagaattgttaaaaattataaatatcacctataccatattcaaatgcatcagcatttgtatggaactgattttgaacgtaggttagaggtttgtttaaggtttctagacaaaacggtagcacatcaacattttttttgataaaattttgttcactgatgagtctactttccataataatgaagtcgtgaatcaacataactttcactattataatacggaaaatcaacatgaatatagatgtattgatcgacaaaaccgatggtcccttaatgtatatggtggaataataggagaacatgtgataggaccgtatttttttaatggccatttaaatggacaaaagtttttaagatttctacgaagagacttttatatacttttgcaaaatatccctttaaatattagaagaacaatgtttctgcagctagacggtgctccagcacattacacgcgtaatgttagagaatatttagacagaaaatttcccggaaagtggataggtaggggtggtgctgtcaattggccccctagatcacctgggttaacatcaatggactttttttttgggatatattaaaagtttggtttatcaaactccacctacaaccgctgaagacatgaaaacgcgtattcgtaatgcgtttgcaacagttactccagaaatgttaagaaaagtaaaacaaaatttgaacacagagtgaagttatgtattgaagaaaatggacaccattttgaacatttaatgtaaattaattttttccagtgtgttttgtttaactttatggtataataaagataggtatacagactgtttaataaagcaacat

SEQ ID NO: 9255 - DNA, 877 bp, Diabrotica virgifera
  SmartBlast Evalue=4E-45; Info=Rab3 GTPase-activating protein regulatory subunit n=1 Tax=Culex quinquefasciatus RepID=B0W297_ CULQU
aggaaccagtttggatgatatggatatggaagttctgtcccaagaaaatgttgcatggtctttgctgataggtaaacttgaagacatttctcttttgaacataattatgtcgaccaaacctccggctgttgagaattctctgccaaaattgaaaccagaagaggttcatattagcctcaaatacgttctgcaaaagggtaaaggatccgtaagcgaactagttgcccagtggctcacgtcagttggagtggatccccaatatatattgtccaatgaggagcaagatagaaacaatgaaagtgataaagagataactgaagtcaatgctggatcctgtagcagaagtgaaactatttcaacatctgagcttactgcgaagacaatttccgtacagtgtcgaagccaactgcattttgacaaacatgtcttgggaatatgctacagcttggcagaaggatatgcagaatctgaattttttgcaagctgccataagttgtttgaattgtgttacgaatattcacatgaagcaaggtctttatcaacttctttggaacacgcacttaaaaattgtaagtgaaagtgcctgcaaattaataaacaaagttggaaaacttcctaaagaacgtctttgccgacaagatactggtttaactgactaccaaatgtctgtatttctaagcttatcaacagaatttcttgattctttcatggaaactgttaaagatactgacaatattccaaaacccgttctgaactacgaaaatatatgggataacggaggaaaacctctggtggaactagcggtacaacagaaaattgtaaacttcgagttgctacatttgcactaccaattaagtttgatcttgttaatgatcac

SEQ ID NO: 9256 - DNA, 879 bp, Diabrotica virgifera
  misc_feature (835)..(835): n is a, c, g, or t
  misc_feature (861)..(861): n is a, c, g, or t
  SmartBlast Evalue=1E-134; Info="Exportin, putative n=1 Tax= Ixodes scapularis RepID=B7PJG1_IXOSC"
gattagtatgtatgcgggcaagggtgaatcgcagaggatagcacaagaagttttaacaacactaaaggaacatcctgatgcatggacaagagttgacacgattctagaatattcaacaaaccaagaaacgaagtactatgccttgcaaattttggaacaggttatcaaaacacgttggaaagtactaccaagaaatcagtgcgaaggcattaaaaaatatatcgtttctttaatcataaaaactagttctgacccggaagtttttgaaagcaacagaacatacctaaataagttgaatatgatattagtacaagtgttgaagagagaatggcctaaaaattgggagagtttcataccagatattgtgggtgcgagcaaaacaaacgagagtctctgtcaaaacaacatgattattttgaagctgctaagtgaggaactgtttgacttcgcttccggtcaaattacgcagactaaagcaaagcatttgaaagatacaatgtgttcagagttttctgctatatttcatttatgccaattcgttcttgagaattcgcaaaatccaccactcgtcaatgcaactttggaaactttactaagattcctaaactggattcccctcggttacatttttgaaactagtcttataaatactatgatcttcaaattcttacctgtccctatgtttcgcaacgtcactctcaaatgtctcactgaaatagctggagtcactgttagcaattacgatgatatgtttggggcgttgtttacccaaactatggcgcagctagagatgatgctaccgctgcagacagatattaaaggtgcttacgcttgnggacaagactcagagcaaaatttttntcagaatttggccctgtt

SEQ ID NO: 9257 - DNA, 879 bp, Diabrotica virgifera
ctattgcaattgccgaatattatacttattcaaaatatatttggaaaatagaaacaaaaacagagggtttatatttctgtttattgtttttaacagatagttcccggtgaagaccctcatcatataaaactagtatttcacagtatgtgtcacgaacacatcactaaaaatttcaattacatatctttcctatttgaagaacgtttgggcagttttgaatgtaaaatcatcggagaaatttataataggagctataattttgagctttaccgcctttatagtgaatccgatattacgaggtccatcaaataaacaggctgcggtggctaggctaaatagagaaaatgaacgaaatggagccgccgtaacacattaataatcagaggatggagtgagaagaaaaggcaggtccaaagcacgatttaaggactaggtggtagagatgttgaaaaagtatgtattcgttacaaagtactcgttacttacgaataccgaaagtaacgattactatacagaagggcaaatcgttgctttgattactctgattacttcgttacttcgtactaatcgtatcagagcgagtaacgactattgtatctacttatgggcatagcatatataacgactattgtatctacttatgggcatagcatatataacgactattgtatctacttatgggcatagcatatataacgactattgtatctacttatgggcacttgattactttctaccaatcgtataccagcgagtaacggacgggaccggtattttacgagtgttatcgaatatcgttgtcggtatgaagcgttttaagggtgtgagggtgaggactgagaaatacgatcctagatatgattaccggtactcaaatac

SEQ ID NO: 9258 - DNA, 875 bp, Diabrotica virgifera
  SmartBlast Evalue=1E-104; Info=Pro-phenol oxidase subunit 2 n=3 Tax=Tribolium castaneum RepID=Q49I38_TRICA
ggtcgtgtgatcttaagtagtatactaaatttccattccaaaaatgagtaaaaagcagaatttacttttgctctttgatcgacctacagaaccaatgatcctaccaaaagggtctgaaggcgtcaactttaaagttcctaaccagtatttgaaagatgaataccaagatttgggaccccaattagtaactacattcgcaaacagagttggaggtgatgataacgatgttaccgtcaaagatatctctttgccttcattaggagaaataactgatttagggagggacgaaaatttctctttatttattcctaaacacagaagacttgctggaaaactaattaatatattcatgggaatgaaagatcctgatgacctaatggctgtggcaatatacgctcgagagcgtgtcaatcctgttcttttcaactatgcattctcagtggctttgatgcatcggcatgatactagagatttagaattaccatctgtactgttttccttccccgacagatatatggatagtaaagtgttttcaagaatgagagaagttgctaacgttgttccagagcctcaaaggactccggttttgatacccagggattatacagcatccgatttggaagacgagcatcgcttagcatacttcagagaagatatcggaataaatcttcatcactggcactggcatttagtctatccattcgagggtccaatggaagttgtcaataagaatcgcagaggggaactattttactacatgcatcaacaaattgtggcaaggtacaattttgaacgcctttccaacggaatgaaacgggtggaaaggtttaccaattttaatgaccccatgcccgagggatattttccgaagctgg

SEQ ID NO: 9259 - DNA, 874 bp, Diabrotica virgifera
gtcaacaggttactgtccctgatcggagtcattagtatctggtaaagtatcactttgactccgatcggggtcatgtgcagcgaatgtgttaataaaaatcctaattgtttttgataattgctctctcaacttccaaagaaaagtagaatatcattgatctttaagtatttctttggcagttctccaccttgtttaatttttaatttgagtcaagatcgatctattaaaagatttaaagttaatacctgagtgttaagcgattgtttttagattaaattttatcaaaaatatttcactttacatttataaaaatgaatgttgctattttaaaaagagagctataattttggtacattcttttgatttgctaacaataatttccctttttttttctttacgcatgccattggtagggtggaaatctttaactatagatgaaaatgactggacttcgggaaaaaaattgttaggtgactaattattgttaacagctaatacagcgacggcagctttagagatatatttttcatcttgaactagttcagtccaaactttgaaatgtgttgaagtgtcaaaaaacagctaagcaatttgttttctatattatctgggtttagaaagaaattttgtttttataatatttctgtggtctcagggtaaaagttcttaagtcaagttttggtcattttgagttaagtggacaaacggatagatggcgatctatatttgtgggtaaaaaatcctaaatcatatacaacgattaaagcatacagaatatacagcggaaataataatacaagtcaaatcttgcgatttctcgaattgaaactcaatacgatgatttctgacttaataacttttaccctgagagcac

SEQ ID NO: 9260 - DNA, 878 bp, Diabrotica virgifera
agcacctcctagtgaacacgtcgccaatgtgaatcgcgtaacggtaggcatgtgatcgtgtcctcgcgactatgagccccgcgtccgcaggcaatttggaagtagaacgctacatcggggcctgtttgatttcgcaaaaccgcgctaaaagcaaaccgcaaagacaagaacactattcctcagcgcatagagatgtagtgccggatatctaccatcagaaacacgttaactttcgcttgcagagatgtcactcgggcgacggatgggccggtgggatgcccttgatatcgttcgcccagcaccagcggaagatccaccaccaagaagattcttcttcgttggctaagttggcggtgcacacccaaggcgcgcccttgattcttaccaagagttacaaccacagaaagaataaggtgcacagacacaatggagcgacgaagatcttcgaaaactctaataataagaagaatgttaagtgtcagaatagtgtggacactgtgagcgttaccagtgatgagagttccgggtccgctaattctgaaacgtgtttaccgcggattattaagccgagaaagagacggaaaaaggataggaaacctcctctactcggcaggccgctgagccaggatggtttttcgacagatagcgccagtccggacatagacaacactcaacctaactatttatcaataagcccatttaatttatttaattttaatccatatggtgcgttaatcttcccagaaacttcaaaactagtagatcacctccacatattaaacgatattagtgagactcccaaactccaccacgcgttcgaagatatagtagaaccggaagatatcaaagacatcaatggtaaccaaccaaccaatatc

SEQ ID NO: 9261 - DNA, 871 bp, Diabrotica virgifera
  SmartBlast Evalue=3E-34; Info=Probable RNA-directed DNA polymerase from transposon X-element n=1 Tax=Drosophila melanogaster RepID=RTXE_DROME
gacgggctccattcgtagatccttgtggatatcgtcattacggatgtaccagggtgcgttaactatgccccttaatactttgttttgaaaagtttgtattgttttcaagtttgtcttttttgtacatccccatagctgcataccatacgtcctactggttttataacttatttgtagattagaatcttgttatacgttgacaaccctgagtatcttcccagtagccagtacaattttttatatttgatatttaattctttcttctttttctttacatgggctttccggcgaaacttcgtgtatagggttaagcccaggtatttggctgtgttggcataaggaatgtcttgtccattaatttttattggtgcgtacagaatttttttattagtgaaatcaatatgtactgatttgctttcattcaatgtaatcttccacgtcttagtccatttttggaatttgctcatcgcgttttgtagtttattggctgtttctacgttatctttacctactgctaatatggcggtgtcgtcggcaaaggtagcaaaacagtagttatcgaattctggtagatcacatttataaagtagttataggacctggcccaatacggtaccctggggggactccggcttttatttctttaagttcagaataagcattatcttgcttgattctgaaatatctatcagttaagtacgatttaattatgtctgcgtatgattttggaagaatagtctctaatttatgaaatagttcttcatgccaaactctgtcaaatgcctggcaacatctaagaataaagctgaaaaaacttttctttcctctagtgcattttctataatatcggtgactctgtggagttgatcta

SEQ ID NO: 9262 - DNA, 878 bp, Diabrotica virgifera
aggatcacatcaatcacttattttgtatttgctgtatttttctataacaaacgtttgttatttatagaaaagacagcaaatacggaataagttattgatgtgatcgttcatgagtaatctttcatttttccgactatatataccgttaaacaggatatatcgtatgtgctaaaattaattttgaccattatttatctacatttcagcttacagggtacaagctaccctctttccgcatgcttggattgataactgatgtagaatagcagttgactattctttggctttccataactgcttgacgcttatttattgttgtaaatttaatcccattttctttatccaattttgaagagttttcacacagcagttcatattccaaccggttttttcaaattaatttcttattgtaggtatttcattgcttctgtacaatcgtatattgtggttttcaatagttcaatagcttcaatataagtgaagcatctgtaggtcttgaaaatttgtagtcacatcgtttcttgcgattatacggttcatttttagcaattttgtatacagttgaaagttgaatttctgttaaatcagaagttgcttgtaccaacagttgttgttcattgaagccgaatttattgaaacatatttactgtgtttcagcatttaagtgcattcgaatcttctttggcactgtcactttctaaaaaattagtgttgttattttacacaacattttcaaccacattgtccccctgatgtcacatcactattaaaaataattaaattacggccaacaacactttacactttaccaaggaactacagtaggaaaaatgaaggagtgcccgtgagcgagcatataaagcgcgctgtattttcct

SEQ ID NO: 9263 - DNA, 873 bp, Diabrotica virgifera
agcccttttagttttttctggatctcttcttaactctcgttttttcacaatatcgtttttattttgaggtgtttttatttcaacaggcttctctttctgcgtcttattagtcaatctggattcatgcatctttttacttttttcttcatcccaatcatcatcatctactatatccaatccagccataaaatcctcttttaaaaaatcatcgaaaaaatcgccggggacatcatcatcgtcatcatcatcggcaactaataattttaacttatttatatcctctttagttttcttaggggaaggtttgggaacagcattgttctcattaggtttatttttatcggattcatttacttttttaacaggaggttcagtcccctcggctgtattactagtaagttcacttttcttttcgtccttttctgaatttggtactttagtagaaattattttatcagatttctcaccggtatcttcattcaatttcttttcgacttccatgtttttacttcctataagatacgttaatatacactatacaaaccgtaccactcttttattttaattatacttagaaatgtaaatgttttacacatttatgtgaataattaaattattattaatttaacaaaatctatacacaagtatcgccatatttattacgtttagtttctgaaatcaccgcagtgacatggcgacacattcttttcaattgtcttttgttttatttatacggtttttctaacaatatttagaacatttaggtgaatttatgtaaataaaacaatagaataaactaagatattcataaaatgtttacacaagtattgccatttgccattatttattacaacttcgattaaagtagtttat

SEQ ID NO: 9264 - DNA, 876 bp, Diabrotica virgifera
aagaagtaggtagtgctttcatatttgtactgcacccactcctccattactgggatcagagtccttattcatgcagcccgccactcgtttaaccactcttcctgtgactttgtgatggtttctctcctttcttcggtcttctcttgaatactcttgctgtatgttttggttctctcttttacctgcaggtatattgctggtacccatctataacttgtatggctaccgtcgaggtcgttctataggggcatacggtacaattgtttgtacttttgactattagttacttgattccccaccggtgcagcatatagaattgtggagtgtaccacgtctatcagaatccttctttttcccgtacttgggcttcctatatttggcataattatttccatagctgttgctctctgttaagccttgtttgccgcacatttgacgggttagccaattatctgcttactgtcaccaccttctgctacacatgtgactgagtgcgtctattacagatttccctttcgtaaacccatattggcgttcagacaaacgccctttctctatgacttctttttctaatcttctagtctctactttgtaataagtctacaagctccgggtagtcggaaacatatgacatttgttaggtgctgtgttcactgttgccaaattttatggtttcggcttggaggaaaagaaggccatgcggagttagaaatgataaaagactggttataatttgacaaccaaaaatgtcattgatgacaagtgcagcagatttaaacgaaaatggtatatttctctgtgtatttatttgttgcgtcatacgagctgatggttaactccaatacaattgttttatgtcttccaaacgatctggat

SEQ ID NO: 9265 - DNA, 872 bp, Diabrotica virgifera
cagtttgttgttaatgattggttgtaactgcagccagttcacttattctacatcttctggttctggctcaggttttagtggtactgactattttatgtgccctccgaagcatggtgctggctcagttaaattggaaattgaaaaatttctggtgtctcctggacatccatccttaattaattttctttctatcaaagcatgggtggaatcaacttccggttatatgtgacttgctattggttaacacaacaatgatgttttaatatctacctacgttaatccaaataaataagcactgccctttctatgcaaggcaaaacattttagatgcttcaataatatcgataagtagtgaatattgatgacatacatttaacctaacttgtttattctataaataatttacacagtgctatttacttgttgtaaataaaatatatgtgtaattgtaatttgcttttgaaatcaatatggtagcattaagttaacttttaaatgtcagtactggtaactgctatgatttttgtcataatttcctgggtattatccaataacaaagccaattttatcgcagtagtctattatagcagtagtagggtctaaatctaaaccatttgtaataaaggaaagaaacagatccaggatggaaacaaaagtaattttgatttgatctggagccattattgtgtgaaaatgataaaagattaaaatgttatttctaatacatagtgtattttcatataaatataagttaagtgtgttttcttctattgttatttcattatttgatgataaattgctttgaaattgctgattacttttacgcacttacctcttacaaaggaatgaattaggaaaaaattcgaatggcg

SEQ ID NO: 9266 - DNA, 876 bp, Diabrotica virgifera
  SmartBlast Evalue=2E-79; Info=Oligomycin sensitivity-conferring protein n=1 Tax=Tribolium castaneum RepID=D6WA56_TRICA
cacacgtcacgtcacagaccgaattttctgtcattggtgtgggttaaggcgaccgaattataaaattaaactttaaaatagaaaaataattccaaatggcttcacaaaacctttgtatggctgtccgcaacttcagcaccagtaacgctgcttcacaattagttaaagccccactccaaatctttggaattgaaggtaggtatgcttcagccctatactctgcagccagcaagcaaaaatcattggaaggtgtggagaaggaccttttgaagcttcaggctgctttaaaaactgatgccaaacttcgaggatttgtagataacccaacaatcaaaagaagtcttaaatcagaggctcttaaagcagttgctcaaaagatttccctcaaaccagaatctgctaatcttttggcattactggctgacaatggtcgtcttaataaactagaaacagtcattaatgcattcaagcaaattatggcagcacatagaggagaggtctcttgtgaagtaaccactgctagagacttagacgctgaccaaaaacaaaaactcatgggtgtattgaaatccttcgtcaagtcaaaccaaagcattcaattggctacaaaagtcgaccccagcatcattggtgggatgatcgtaagcattggtgacagatacgtagacatgtctgtagcaagcaaaatcaagaagtacacagaagttattagtgcaaccgtttaattatactagtttatttaattttgtgtagttattgaaataggatcttcattttatacatcttgtttttaagacgatatattacagtagtactgtaactccattaagaaaattgatgtccgaaaactaccaataaagtttttcaaaatgtaaa

SEQ ID NO: 9267 - DNA, 873 bp, Diabrotica virgifera
gccggtgagtgtatcattgtgatttttattttcaaacataattattagaacgactaattgttgctctcttaatttgattacttccagtaagtatttatttttacgctaatgagacaactaatattttctaaactacaaattgtcattacatatcaatgatactacatatcgacgtacgtttcatttaatgttttgatttaacttgtttgcatatgaatcatgacgtttgtgcaaagatataatagaacaactataatttgtctggcctgttgacaaatataacgaattttcaatataagttcgttcaaaatcggttattctatatatgtcatggctacttgcaattcgataacctattttacaaacaataaactgtacagggtctaaacgcttgtgaggatatcggcaacatttctattcttacgtttacgtacttttgaaaacaaataaaataaagagaatcgtttaacacttgataaaactgaaattgtcggaatcaggaacaacttcaagatatacttagttataataagaaaactatacaatggtaaaattaatcaatataaaattcgtaacataggaggatagattgatataaaactagcctttggtagatggcgttacttgatatagaattcctctcggttttgacatttgccattcatgacatgacgtctgtcaaaattttaagccacaaaactattagattggtttttaaagcagtcagaagcaaacaacttttgtgttttcggaagaatggaaaaatcgagtatcgtatggtgataagtttcacaaaaaggggagaacgattgtgcaaatcagagccgaccagaacgaagttaacgaggctgcatcttcgttaacaacagtaaa

SEQ ID NO: 9268 - DNA, 876 bp, Diabrotica virgifera
  SmartBlast Evalue=7E-76; Info="Mitochondrial import inner membrane translocase subunit Tim17-B, putative n=1 Tax= Pediculus humanus corporis RepID=E0V9Q7_PEDHC"
ataatttttattgtaatgtttaattaatttacaactatataacagactaataaaaatggttctattgaaaagaataactacccgggttgttcgactgttgttctcctaaaactgagggatcttccataggggggagttgaggctgaaactgttcagcagaaagtctggtaaatagtataccgacaccttctattaaagctaaaagcacgcccccaataaaggcgctacctgccatggctggaagaccatttcttgctgctaatatacctcctgttgctgctccactgatgatggaattccaaggatcttccttctttcttatgtggattagggcacagtctatggttgaaaacattcctccccatactgcaaaattaccagctattataggagatctctgtttaatcgcagttacactaccaataagtcttcggttaattcctgaaggggcgtttcggaatccttttatgctttggaaaactcctcctccaattaaccccattgtgaaagcgcctccgcagtcatctacgattctccagggacaaggttctcgcgtgtattcttccattattttatgttatatatttatgattttacacttggaattctaacctgttgtttctgataaacactgaataatgttaaagtttttatgatcgataggacaattactgaatctttcacttcaaatataccaccacattgggaacatacaaaggtcgaactccgacaaaaatatcacttctattttaattaaatctaaactcctgtgataaacataatacacggtgctgttgttcgtctgtttcaatttagttttttctgagttgtttgaatttttgagatgacaagaaatttaacattgtcaaattttcc

SEQ ID NO: 9269 - DNA, 878 bp, Diabrotica virgifera
  SmartBlast Evalue=1E-77; Info=Dehydrogenase/reductase SDR family member 4 n=1 Tax=Culex quinquefasciatus RepID=B0WXE6_ CULQU
tccccgaacacacacaatagtgtacatgtaaattttcttctttagaaattataatcgcgatgccattcctcctgctatcacatagttctccccagttacataggatgcatcatcagatgctaagtaagccactataccagatatttcttttggttgaccaaatctattcattggtattgctggcacagccatcttagctgcctcttcatcttttgttatggcctcagaaaactttgtctctatcaaaccaggacacactgaattgacagttatgttctccctagctaagtgtacagctgcagccttggtaagtcccagtaaggctgttttagttacagaataggctcccaaaaactcggaaggttgaagaccagcaattgaagatataaaaactattctccctgccttactgtttctcaagagtggcagagcttcttgagccaaaagaaaagaagacttaacattcacatcaaataatttgtcccagtgttcttctgtacagtccagaacacctcctacggcgggactaattgcagcattcgacaccaaaatatcaagacctccaactttttttgcttcctcaaataatcttctcctatcactaggttttgatacatggcacactagaccagtgacatcaagtccttcattcttgagtgctgccgtggctttttctacattcttttccttcctactgcttataataactttagctccttcttgagctagtctttgagcaatggcaaaaccaataccatcagtggaagctgtgacaactgcaattcttcctgttaaacgttgtaaagcggccattctgaataattaactataaaatactaagtggtttctgtacgtaaaacaacgatatttgataaaat

SEQ ID NO: 9270 - DNA, 873 bp, Diabrotica virgifera
  SmartBlast Evalue=2E-83; Info=Cytochrome P450-like protein n=1 Tax=Tribolium castaneum RepID=D6X2T3_TRICA
catatcacagattatacattattttcagttgcagaaacatctcttggtatttctttgcgagaagataaaagttgtgccagttacaaaaaggccctttatgacttcggtgctgattttgcttattggctaatccgtccatggctatacgttcccattatctataagtacagttcactatgcgagaaaaatacaaaatcaattgaagtaatgcataatttttcaaaaaacgtcattactgaaagaaagaaaacctttgaactggaagatactccgacttattcgaagacaaaatatcgagcattactagatgtgttgctgactacacaacataatggaaacccgattactgtggatgaaatcagggaagaattagatacttttatatttgagggtcatgacaccacttccgtttctattatgtatacattgatggcattagctaatgaacctaaaatacaggaagaaatttacgacgaaataatatcggtaataggcgactcagaaactcccacacttaaagaattaggagaactaaaactaatggagaggtgtattaaggaaagtttacgcttatatccgagcgttggcctgataggtagagaagttggagagaacttacagaccaaaactggatatacaataccgaaagattgtaacgtccacatttttatattcgatttgcaccgacgaccggaattttgggaagaccccttgaaatttgatcctgataggtttttgccggaaaattgcacaggcagacatccatttgcttatatacctttcagtgccggccatcgaaattgcataggacaaaaatttgctatgctggaaatgaagagtgtctattgcgggatactgcgcaatttcaaactg

SEQ ID NO: 9271 - DNA, 871 bp, Diabrotica virgifera
gcaatgtgtcatgaatttatatggagatcatgatttttacaaaaattatatacttaagatcactgcaggttgttactgaaataattgcaagttaaatagatcttttttatcgtatgttcaagtttgatgaatctctgctataataccatttgacatgttaacgcattcagtgcccatcttgaaaaacattacttggctggtaccagacacttaaatcattaatttagtaacacagtaatattgatgccacctatgtgtcatcagtacttttgataaaaccttcgtgacactactcatgcgtcatgggcaccgaacgtgttaaaaaaggatgctttaatttacatttgaatttgtaatgaagcaattagtacttttaccaggtatatgtgtcttttgtttatattgttacacagaacattgttacacttattttttctgtactctgttgaaaaaagaacaaatgttaagaaaattgactgaagttagacttcaaagggtcagtggcatcaaattatgataaaaagtaggtgacaactgtttttttttatataaaaggagactaaacatctaatcattaaaggaataacacagaaaacacaaacaatcaccgatataacttaattaacctatgaaattaaaacctaaactatgaattagtgtcaaaatttcataaatgtcattagtgtcaaaatttgataacagtggagtaaacttgcctgaggttggaccaattacaaacaagcattacggcgcggtaaatttgaattactcctcctggtttaaaaaacagaccatcgataattccgaacatttagtttccacaatattacgcaatattttctttattttccgccaacactgcaattcacag

SEQ ID NO: 9272 - DNA, 867 bp, Diabrotica virgifera
  SmartBlast Evalue=7E-17; Info=L-lactate dehydrogenase B chain n= 1 Tax=Anguilla rostrata RepID=LDHB_ANGRO
tatcggtcttagtgcagcctcattggccaatacaattttaaagaatcttcatcacgttcatgcagtatctgtcatggttaagggtcatcacggtatagctgacgaagtgtacctctctcttccagctatgttgggcgaaaccggtatcgtcagcattgtcaaccagaacttaaatgaggaagaaatcgaggccctccagaaatctgctagaacgttagcagaatgtcaagcagatttaaaaatttaaacgccaaaaagtataaaaataatacgtacgcactaaacctaaaaattatgagggtaattcgtaaaataaggttccctacgtccctgagaaggtgtgtgacgtgctgggagaaatctgacaacactgctttacacctcagatctccgtctctctcatcccaccactttcgcctcgctgcattcctcagtgtgggtctatgcagcctttgaagatggagatcccgtcgctgttaccgccaatgtgaggttcatgctgtgatacgtttttaaatgcagggtggattttatctattgacattcatcatcagttaatagaagtatatcggtaaaactgcatatctggtcatccatcgtgaatttccgttaggccttcactccattttctacaccatttgcgaacattttgaacagatatgcacttttacccaagaatatgaaatgcttaagaacgaaactaggcagatttgagataaacaaaataaaagacgtaaaggagtagaaacaaaaattaaagacgtaatcgtaaatataatccaccatttttactcagacttatataaaacaaaaaagaccatcagaagaaattaaaaaccaacttaagtcgaaaataaaaaatgtcaa

SEQ ID NO: 9273 - DNA, 876 bp, Diabrotica virgifera
  SmartBlast Evalue=3E-85; Info=Cell cycle control protein 50A n= 1 Tax=Harpegnathos saltator RepID=E2BFV4_9HYME
gcgcatccatactataaaatcttcattttggaaaccattattttctatattgtctggatctaagttccaaatatctactttccaatcaatcggcttggcatatcctttaaatgcttcttctaaatttgcaccaggtggatttttaaattttatttttttatcagagtcccaggcaattcctgttctgagaagaggaacaggtacaatctttccactatcatcaatcatgctcaatgatatagaatcgttgaacattgaattagcaattgctccgcatggagcaataggttttttagatggattcgttttattatcaacaacatagtcaaatggcatacaatcagttgagggttttgggctcaattttcctagtagctgattgtcatctctagatttcacatatcttctgtggttctgatagtaattgcttaaaccataatacacataaactttaccatcaaaactgtcagcaagcttaaacgaaatggtacattcacatggatcatctctatttgttttaataaagtcaacacacgtctcagatgattctgtccaggtgccatcactattagtctttgtcttattacaattagtataatcaattacatgttctttaacttcgtttgataaatacagcaatactatgccaactggtataaaggcaattccaattatgaagaatgaaggcaggactgtacctgcagttaaaattggttgccatgctgggagtctttgctgcttaaatgcactatcagatggttttttagttttattttgatctggagtttcatgagccattgccctaaatatcttataaatttgagtcccaggaattatttttataataaaataacaatttacaatataattctcgct

SEQ ID NO: 9274 - DNA, 875 bp, Diabrotica virgifera
  SmartBlast Evalue=1E-16; Info=Quick-to-court n=1 Tax=Culex quinquefasciatus RepID=B0WLK4_CULQU
gtgtatggagaagagcagctacagaccagcaagggtggaggcaaaaagtaaaggaggccaaggctcaatttgggctgtagtaccgtagaagaagaagaagaaatgtcgaacattgtcacacaccctgttaatatgtaatggatgggtagtcgatagaaaagggagctggtagtcagcctataattaatcatggaaatggtggatgagatgctaccatttaaaagaacacaatagaggaaaagggagaggaaatgtgcaactcttattgagtcagcttgcccaggtccaaaagtcgggtatagagaggaagaaagagagagagagagagaaaatagtgtgggagagagagagcgaggatagagtatggtagatggtagatcagagtggagaagcgtgtgaaactagaaaaaacagatgaatttcatgtcggtagttcttttaaggagtcttttgggaaatttgtagcaggtagctgcctgaaattcgaggttaatggtggcctagcaacccttgccttacatttaatttccgtttttcgaatagtaagcaaataacctacgttttatatttttagaaacatttttttaaataatacttaactcttaacaatttcataaagatttaaattcaataaatatataactatatttaggcactaattatttttaaatcgctaggtttgtctagcgcgttctatactcgaaatttcgttagaggaaaatcctaggatgctttggatggccttgaggtgaccttggctattttctttatcggtaagaaaatagtaaacggctgattttaaaaattgtaacgtgatttcaggatctattttgttttttgttttttggcttccatcagttgccggtacatcgctc

SEQ ID NO: 9275 - DNA, 874 bp, Diabrotica virgifera
  SmartBlast Evalue=2E-27; Info=Papain family cysteine protease containing protein n=1 Tax=Tetrahymena thermophila SB210 RepID= Q22AB1_TETTH
atctatcaataatttttatttacaaacaaatacacataagttatattacaacgattggtactaaaactttatcagtaataccacaagcattttgatttctaattaatctaaaaaatcctccctctccccatgaactgtcaacccagtttttaagaatccaatagtcgacattattttctctgccatatcctactaagtttacggtccaaaggtcaggattacttttattacaatcggcagacaaccatattcctcctgtataactacgaagatttgaaccgtttatcactacattgagaatacctcttgtaactaaaagtcttttaagttcctcctcgctaatgtgattccatctttcaaacttaataggtaaattcgcccctccgaaacaagatccttgcattccattgaaatatgagtattgcgaattaacccctccatttcgctctaagcatgcatatgctctttctatagatggaccgttgttgcaaccatcagaaaatgaacaacaatctaatatatattgaggactgaaagattctaaagttccatttgttaaaaaaagttgagtttctactgcgtttgcgattgcatatgcccaatcagatctagcacaaaatattcctggtactgttggagtacctaatacagctcctttatctctccaatcgaacgatgcaggtaaatcatcactatatttgtttgctatacatttgaatatgcaacaacagaagacagtaataagaaacttcattttaattcttataaaatttataataaaatggtttctacgtatatataaaataatccgattaaagtaaataatacgaatcttaagattaaatagataacgttaaaggtcgtacaattaatc

SEQ ID NO: 9276 - DNA, 870 bp, Diabrotica virgifera
aataaaattgttctgttcatcataatgaacactttaaaaataatctacttatgtactaaaaaaatacttttgcaaactaaaatttgactatgttcaataaattttaaaaattatttttcagtatgaattttttcaaaatataaaatataattactttataccagttgttaaagacaaatggctcattagtgattatcgatcagagatcggattcttgctgatatggtttttttgcagtattataaatgattcatttaatttgtaattttgggtgtcgattacagtgtatatgtttcccacgcctctaatctctttcaaggttttcgttagtagcataccgtgattgtgggaaatgtgtattatgcacattccatacagaccactgtcgcagacacaaagattttctttaaactattaataactacccaatatgtgattttttttattaataaatatgttgtttccaatttatctctcaaaattatccattaattttttgacaaaaatacgtttatgtaatataattaattttgttctttcccgaaaagctaggggggggccaggccccccccctgcccgtgtgtatgggcgcctatgagtggcgagacagcaaactgttactaggcgagtcagttcagtttcgattcacaaaaacaaggagtagtgtacttatggatcgtaaagctaacattaaaaatataacaaacggcttataccactgcttatacaagaatttacggagataagcgtctttggactataaacaacggattttaagaagaccacatctcgctgctgccgatttcttagattcattaatttcttatttcttgtctataatatgtcgaattaaaattttttattttattg

SEQ ID NO: 9277 - DNA, 872 bp, Diabrotica virgifera
  SmartBlast Evalue=4E-12; Info="Beat protein, putative n=1 Tax= Pediculus humanus corporis RepID=E0VZG6_PEDHC"
tgatattataacctaacccatcaaaatttagacacaaacacagacctcgtaaatacatctaaagagtcttggaagaaacatgttacaatacgcgtgcttcatttgtgttacattgttagcaagtattcattgcatatcatgcctagaagctagtgtcgaagtagaagtaccaatatctgtgaaagtaggtaacagtgcaactcttgtttgtaacttgaaaccaaaaaacgagaaagatcatctcagtaatgtacgctggtgtaaagaaaatgaagaattctatcgtttttccccagatgacacaccgcaaaaaacaacgtctaatattcctggtatagttgttaatgtagaagaaagctcagataaaaaggtagtgttaagtaatttgcaaaaggaacttacaggaaactatacctgtgaggccagttggacgacaccaagcaccgtgactgctaaggattcgaaagaaatgtatgtaatggacgaattaaaaggtgatattctcctagaaggtacatctccccttcgtagtacggataagttgtttggagtatgtgttagtccctgcatctcaagttaccccaaaatttacatggcttttaaatggagaacaggtttctagtgaggagtctcaaccagccaccaaaaataataaagatccgaaccgttttatcgcttacctaaaatggacgaatggagtttcgttcgtagatggtaaggccaacctaacttgtgttgttgaagtagatggcgtttataacgctcaaaaaacggttatattgaaaagcttttagtaagcgtaggacagtttgatgactatatccaatgacgtgtgaaagaccgataacaatcaatatgattatggcaacatg

SEQ ID NO: 9278 - DNA, 873 bp, Diabrotica virgifera
gttattctatactctgtttttaaatcaagaggagtaattcaaatttaccgcgctgtaatacttggtctaacctcaggcaagtttactccactgttatgaaattttaacactaatgacatttatgaaattttgacactattggcatttcataggttaattaagttatatcagcgattttttgtgtttactgcgttgttcctttaatttttagatttttagcctgcttttatacaaaaacagctatttttagaattctttagcgacgtattagtataatttgatatttatggattaccgtcgaaggccgatatgatcaaccaaaaaggaagatgtatttggtgatttttttagtgactttcttgggtgtgaatctgtctttttagtttactcctcctggtttaaaaacaaagcatagtttatagcaagttttcataacattttaatgcaagatatttcagtatcttgtaatgtacatttttacagtcatgcaaatgctgtgaatattggattttcataattcatggtctatgaattaaatattttttccttaatctcagagtacgaaatagttgtctgtgaggttaattgaaactcgatatttttttccaagtcgcctataatattattgagatatattgacgcctatatgaaataatgtaatcaacataaacggtcagttgacacttatatggaaatatcaacattcggtattacataattgtatatatttaacacattttgagttgaagacctaagtggaggaaggaggtatgtcacattttccaaaatattgagcttcccagtgaatgaaggtgatatgtgacttctctattatatgaaacctacactgtacctataaaaagtttaatatag

SEQ ID NO: 9279 - DNA, 871 bp, Diabrotica virgifera
ctgatgcgagagtcttgaaatcggagtacaaataataaatttatgtaatcagaaattgttagtggcggagttttttgccggtgagtgtagtatgtaatattgaatagatattttcaatacctttcaaatgagagccataaggttccatttagaataatcggccacagcaaataatattgactgtaatacatccaactcccacataaatctggaagcacgttgccactagcgccattgtcggcttgagttgaactacgttttgaccacgtaaaatttgaggtaaacattcaaatttaattttataaatttttgaataacgagctaattttgctaaattaaataaaaataaaaatagttcaaacacttatacaaaaacaataataaagcaattttataaatgtaaggttagatttctctggttatcctactcatactgctagatggcgctattttttgcttcctcaaaattaatgggatatgtcaagagttgtatgtgttacagtctatagtatttggcccttggccaaagtgactctgtaacgtcatctgtcagtattacgtcaattgttatgacgcctatggccgtttatttcatccctcaaaatttcagtattaataagtataacggttcaaaagatacgagggggaggggacttttggctagcattgaatgttatagatattaaaaaagcatttaatgcatctatctgtactgaatttattttgtgatttagaaatacatgtttttttatattaataattgatataaattttgatcagttattatgaccattgttttgttgctatcattgtatatatgtgttaagttttacataggttaggtatttataaatgaaatgaatgtctgagt

SEQ ID NO: 9280 - DNA, 875 bp, Diabrotica virgifera
  SmartBlast Evalue=9E-33; Info=Gamma-interferon-inducible lysosomal thiol reductase n=1 Tax=Harpegnathos saltator RepID= E2BTM9_9HYME
agtcagtttcaattagtttattgcaatgtacaaaatgtatttacactagacaatcctgacatctttgaaattaacaatttttaaaatatatttacctataaattaaagattaaaacaaagttatcaacgaagttttaacattgatatcaaaggcaacaatagaacagctatagataaagctattctagagctagaacatttgctacagtctggtttctccagcaacacctctgatactgttaaaaagtcttttagggccaattcttgaagtttgtcggtgtagacgtcattgaatactatcgtcgggataaaagtgatttttggagttacggcattggtacggtcgccgtactttgcaagaagctcatcacctttacctgattttaagcaattgtcgatgtcatcccatttgatttggttgtcttcagcacactgtttaagtaattcatcatcgctagcatctcctgacttcatagcacacacgacaaattcgatacttgtattatacgaagcaatgtcaattgcacatgactgaactttgttaccgtagcattcaggttctttgtgctggcacgtaaagctccatgtaccattactctttatcgccgttgcttttccaaaaggcacaaagtctacgtttattttgtccttaagtacagtgctgtaagcagggttgaactgatctttgataaatttgatactatctggacacaaagattcatagtagacgctaacttttagatcagcagcttgtacggaaatgccggcaaaacataaaacaaacaaaaccgtgacactttccattttatgtttgttaataacggcggacaattagtaactagacgttaaacacgtcgcgccgcgcttgaacacgg

SEQ ID NO: 9281 - DNA, 873 bp, Diabrotica virgifera
tcatgtttttcaattggtacaatgcaatttcgttggtactctatttaaactttattttatatcgctctggaagaagtagttaagggactgcgaaacacacctactctaaaggaatccgataatgttgcgaaagcattaattttgctgccccatagattctacatgccttttcacaatctacaataacacagtcaaataaactattattccactctaaaaaaaacactaattgcgataatgcttcacagtcaccttgttctgttaacagcttcactgatacatggtaaaaatgtacttctatatcattctaaaagaacctttttaaatgcttcgacaaaagcaggtcctgtaagcgtgcgataatgcttcataagcatgaaatttgatttggttgcggtttatattaacctttcatgatcttaatcgtcccttagttaaatgagctgatatttcactgcgacagatatgtttcctgcataaactgatgctcaatcctcttctgaattaatgcttcagaacaataaaagagtttttcggcttctcttcaaaacagaaaaagttctattcagttctcagaagttcctttttttctaaaaatccttacagggaaaagtaatttgagtttaagtagttttctgctaaaaagaaactttaaaagactcgcggtaatgcctaagcattaaaattatccctataggtattattggttagtaagtttttcgaagttttcattttattttgaagaatctcttccagaaattttattgttgtcgttttaaaaataattaaggtgtacaagaacattttctcagacaaaatttcagaacactcacaataatgtttcagaagcaataaagtcgttgtccgcccccc

SEQ ID NO: 9282 - DNA, 873 bp, Diabrotica virgifera
tgaaaatctttatttgtagaactgttttactatgcacagagaaaatttatttgttttttacataatatttacaaggtactcagccaataaagaattaactagtgcacatcgtagtcatctatgctcttacacagtttcctatctcccccagaattttggctgcattggggtggttattatctttggcacatgtttgaaatgtttttattaagttctctatatctccttcaattgcagcaagtgctgactctattatcgctggtatttcacctgctatgcggaccaagtccacagctaccttaagaacacatccaatatcagtgatattatctccacactcatcaatgttctcggttgctgctttagccttcttttgaacttctgcaagttgctttaccagcggtcctaaagactcggctactttaatcacatcgtcttcaatgcaacttaaggttaggtttacaaataaaacaggcactgaattaatgttggagtcttcgaagcatttagccagtttcttacctgcagctgtgctgtcttctgctatacgatctaaaacatttgtgagttttttaaaaataccattaataattttggcccaagcattaacgattttattttgagaaccagtataattgtggtctatctcactaatagctttggttacgtcttctatggatcggtcaagagtcttttctacattatggatgagttcttttatggtatcaataagattatcatattctggtattagtagttgagtgtggaaggaatttaccgatatgaaacaaacggccaaaaagcagaaaaatatttttaggtttgccataatatattgctgatgcacttttaaactgataaccttcgaataac

SEQ ID NO: 9283 - DNA, 874 bp, Diabrotica virgifera
  SmartBlast Evalue=6E-17; Info=Histone-lysine N- methyltransferase SETMAR (Fragment) n=2 Tax=Camponotus floridanus RepID=E1ZYL8_9HYME
gcacggctagctttgatcccaataattgtggatcgctcgttataacttcacatagcgtgaggtcgatcttttaaaaatacgaatgaatacttaataatgtttaggtagagaatcctaaatatcacccgtggattttctttaagtagaactcacatatcacatatttatttctaatctaaatattatgtgcacattgatacatatatgtaatttaaagtagaccgcctaattagtagtctgttcaataagttttgcgataagagagggcgttgctactagtctaatttgattttgttatgttggtacactcttcatatgaacgtatttgaagtttcattccattctttgtttacaactcaacaacccatttagtatcgacgtgtcacagtattttttacaatggaaacaatcaagcatcgtgtagtgattgaatttttatttttggaaggtttaaaagcaaagaatatttttataaacgaatgttgaaagtgtataaggactctttgccttcaattagtacagtagaaatatgggttgctgaatttaaacgtggtcgtacaagattttgatgacgatccgcgacaaggacgtccaaaaacaacaccagaaatcgtagaaaaattacaggatatggtattgtaaaatcgtcaagtgactgaaggatatgtagtagaagccctagggtcattgggcaatgtaaacaatattttggctgaagtattagcttcaggaagcagtgttcacaatgggtgccgcattcgctaacaacggaacaaaaccacattccaaaatgactttctcagcaacatatagagcgttttagaaatgataaagtagatttgtgcgttgattcatcactatggatgagacttgg

SEQ ID NO: 9284 - DNA, 873 bp, Diabrotica virgifera
aagttataatcttacgttaaagtaaataataaaaacagtaattataataaaacaaatacttatagtaaagaatataaacaaatatgaagtgtcatcaccgcaactgtcaaataaatgtgaccaatttattctaaaatgtcaccttcgttcgattacaattacagtgtgttccgagcaaatgtgcttcataaaaacgctttataatccatttatacaaattaaatgaaaactattattgtgtatttctttaggttaacattaatagaaatcttcaaatattatttctacgcgtatataataaaatatgtatagtggctgtaattccagtatactaggcaaaatgattctaaaaaagaacacacctaccgcctaaatatttcgtgttggtatcatgtggcatcacaggctatgacgtggatgacgtgcaacggtaagtaaattagacgaagtatatacaatatcgacgccaacttttattgaaacgtgaagattccatgttaatcattttatattacctaataattaatttaaaacatgtaaaaatagatagtgaatgttgcctacttgtttcaaatgcatgtacactcagtgtttgacattgaaaaccccttcaaagataattcacccgaaatccacgagaggtcgacttaacatcgagattatgatattcgtaatatacgtaaaaaatacttgaattgatatatcatatgccttaagtcaaaagacttaagaggtagacaaaacacacaacagaatttgcgaatttataaacgaaaacgaagtttttatactttgtatattttttgtgaaacagatttgattcctgtaaaagatatactacaataaatattatcctgaatatggttctgtaat

SEQ ID NO: 9285 - DNA, 871 bp, Diabrotica virgifera
  SmartBlast Evalue=2E-32; Info=Voltage-dependent calcium channel type D subunit alpha-1 n=1 Tax=Harpegnathos saltator RepID= E2BJ11_9HYME
tgcatcgtagaaatcattcactcttcggaagtgtatggtcttcaatgagacgaggtcatactttcaatagagcgaaatctctgaagttaaattcaacccaaatcaaaattacaccggcttccagcgtcgactatcttccatacaattctattaagaatgccgtcacagaagggatgaatcacattacttccatgacgaaaacgttcaaaaccgtgttagcgctagttccttgaacaatcaggataactataaggatgaagaaattcctctgaggtctcttagtaatctgcataatggagatgagaagaataactacacggtcatcgataaatctggcttcctgcaccctaactacaaggttggagcaggtgaggcgaatggtcacgtgggaccagagcgtcttagccattcactgcctggcagtccggccgaccgtagacttgcttccttcgaagtcgtaggctctgcggaaagcctggtaggccgaatcctagccgagcaaggcttaggtaagtactgtgatcaggatttcgtgcgctacacctcgaaagagatgcaagaggcattggatatgactcaggaggaaatggatcgcgcagcccaccagattcttcaacaggagaaacttatacatcatcctctgcagcagccacattcatagcaaaacacctgagagtgttttcagtacctcccgccactctaccaagtgcctaaatttcttctggtccaaggaagactttatattaataaggtgtagttttttaacccggattttaccgatggaagggattgtttctccagttgtaattcttgtacagggtgtgaaagtatgagtatgaactctcattataatttaccattttctaatatc

SEQ ID NO: 9286 - DNA, 875 bp, Diabrotica virgifera
gcagccaattggcttactgtacatgtgatagcgtgtattgtttgtaacagttgacactgtataacttagtaaccgttgtcctgttactaagtaaagtcggcctcattgtcttcataaataatctcttattatatccaatcaactacagtacctttaactaagaagactagaaccatagtattcagtaaagaacggatcatatgaaaactggaagtttatggagttgaacaagtaatggaaatgaagtaatgaaatggagtcattgaaaaaagcctcattaacactatatggcgtaactgtgatatgaaatcagtataagggccagcataagacccataatgacattcgcatcagtaacacgtcctgagagtcaaaacacagaaaatgctggaaattgcaaaaatgagaatactcagtaaaattacatgcaacacgctgagagactgaataagaagtaacgagatcagaactaatactgagtataaacgagtggactctaaatagaaaaagaatggaacaatcacatcaacagaatggcggacacaagaacaagcaaaattgcttatggacaattgctaagatagacaacttacagttgattcattaagccgcttgctcttcaatttaatcatcgatgaaatcttcgaaaatgtaagcaaagaaagagtgtacagatttcgacatgaagaagtaaaaatactcttgttacgcagtagacccaattttgatagcctaagatgaagatagtctgcacatactagtccacacatgtaacatacgagcataagaattaatataacaatcccaactaagaaaaaaaaaaacaacagtaatcaaggtgaaagaactcaatcagatataaactagaaattgat

SEQ ID NO: 9287 - DNA, 870 bp, Diabrotica virgifera
taaaaatggaatatcttgtatcatatttgctaataagcctgatgttttttgtcagtttaaataaatgtgagtcgccatggccggcaggtataaacgccactgtttactatgaaacaggctgcccttatgacaaaagttttattgaacaacagttaaatcccatcctagagggaaatctatccaattatgtcaatttacaattattatctttcgattcaaagggtcagccttacaaacatggttgtttgggcccgcgggatagacagtgctctggacaaattgactactccgataaatatttcacacctatcccaaccggagttaatgagtggtgctttaaagatatgatttgcattctgagagaattaaaaaagcgattcgaaaaacagcctattgcttctaaagaagagttttgcgatctttctgatctatcctttttctttaacccaactttgtgttggaatcctggtactgaattacatttcaaaaagccaaataatacgtttggagatgagactttggacaaaattgatcttaaatcaaatttaaaacctgaggagaaaaatgttgctataactaccatcaactgggagatgaaatcagtatgtatggatagagtaaatagagcaaaggcgtccgagagaggagtccaaagtgatcggttgaaagcagaaaaaagtaaaattggatgaaagcagtgcaggaacacatgctctaatcaatataaatacgttggtgctaggtttctttgtttatctaatcattcacttttactataacaaagttgaatagttaagcgttgtttagccaatagctttaactagttaagaaatatgatcataacatctgtattaaataaaaattaatttc

SEQ ID NO: 9288 - DNA, 873 bp, Diabrotica virgifera
  SmartBlast Evalue=2E-29; Info=Putative small membrane protein n= 1 Tax=Glossina morsitans morsitans RepID=D3TNC7_GLOMM
tggacttacaactttatttgatttcactgatggaaaataattacaactaaaattgagttaaatagttttgtacacatcacaggatgtagttcatccatataacctaaaacaattataacacattaatacaataacaccttactaaaaaatgatccttaaacaaccattgatagccatcctaatattaacaaggttcctccaattggtgcaagacctgatagttttttatctccggtgaaggcgtggtagtacaatgttactgagaataatgctgtgcctgttaccatcaatcctccaaccaccattggatatctgcacatgggcactccgaaaatggctacactgtggataaagtgaattctgttggcagtctcgaaaatttttcttagttcgtcagcctgatctttgggatatgatctatgggctccgtaagcgcttaatgctacggcagaggctcccatgacaccagcaattttgataaaagggccatgttctgcagccaacttccacaagggagtcttttctgtgataatcgtaactgaagggggagtggatgctgttgaaaaatttttacccgacaagaatgacatcgtagatttactaattggattatcataaacaatataatttagcatatcattgaaccccattatgcttagctgccacaaatataaataaatgaaaaaaattctattgtattttaaatattgtaaaatccggtcaataataaaatgtcacagcgaatttggactcagaaatcgcaacagaacctgcactatggtgctttttcagccaatatgtcatagacactttcatttgatttttaattttctagatttctgctaatataatttttttctgtactaaattaat

SEQ ID NO: 9289 - DNA, 870 bp, Diabrotica virgifera
  misc_feature (853)..(853): n is a, c, g, or t
  SmartBlast Evalue=2E-76; Info=Recessive suppressor of secretory defect n=1 Tax=Culex quinquefasciatus RepID=B0WWS3_CULQU
gtaaattttaatgagaaatgataaatcactaataatagttgcaaatatcaaacatgaataacacaaaaacgcaggaagtctacagcgacctaacattatttacaactccagataagtttttcttggagcccaaaaatggagaggaattgcttgtgatagagagagtaactgaagagatttcagtttataaaaaccaccgtcacatcataccagcagctagtagtaggaaagatttctgtggcctcctaggaatcattaatctcttgtctgggccttatttagtaattgccacacagagggatatagtgggttatatatcaggttgtgcagtatggaggctagtaaaggcagaactaattcccttcaggagctccttaaacttaagtccagaaaaacaagccgacaatgaagtctaccttagtatgatagaacaagttttaacgacaccctttcagtatttctgttacgattacgacctgacacattcccttcagcgccttcgggacatttctccagatttctggaaacagtccctgtgggaaagagccgatcaacgatttgtatggaatggattcctattaagccctttcagaaatgtgatcagcaaaaagttttgtctgccgttgatgctagggtttgtttctattaacttttgtgttgttaatgggcatagcttgaactggatcattgttacgaggagaagtgtttttagagcaggtaccagattattccgcagaggcatagacaaagacggaaacgttgctaatttcgtcgaaactgaacaaatcgtagagtaccaaggcgatcatgcgagttttgttcaaattagaggctctattccacttttctggcngcaaaatcccgatttgc

SEQ ID NO: 9290 - DNA, 874 bp, Diabrotica virgifera
tacggcgcggtaaatttgaatcactcctcttggttaaaaaacaaacaatagtcgacaacaactggagcatgccatgactaaaagtccgcgtcagggtccgcgaatgaacgtattttatttgtttatattttttgacattgtgtttcttaaattttttgcctctgtaatagttatttagttgtcttttgcgaacattttgttgttgattttctgtagtttttagttgtaaaagtaactgaacgactatatttagttttaagccatgaataaataaagatgagtgattattttcgaaagttgttggcagacaatacagatgttgctagtaggtacagtagttagttatttagcattttaataggacattttatagatttattattatatttaatccaatgaaactgaactttatcacgattacttcgcatttcacacttcaaagcacaacagaaatgaagcatattatcgattcttttagtaaaaatgttaaattaatccttgtacaaaacaaaattacaaataaacagcaactaaaatgatctaaaacacattaagaactgatacaaaacatttatgtttgcctctacgctgtcagattgatttaaaattgacagcatgttggaatggcctatggtttctatacattttctgacgtttgagacgtcactagctagacataaaagtaaacagtgcaacaagtgcagggtccaggactcttagcggagtaggtacatttattagctcaatgtacccgtgtgcctactaacgtggctgttactgtatatatattcattatgttcaatcacctactagacgatgcgaggaaatgtttccttagtttaattagggtacagtaatttcacccaacacaatg

SEQ ID NO: 9291 - DNA, 873 bp, Diabrotica virgifera
  SmartBlast Evalue=2E-90; Info=Breast carcinoma amplified sequence n=1 Tax=Aedes aegypti RepID=Q0IEN4_AEDAE
tagagtgctgacacaagcccaccttgaatccttcgaaaagcacatatcttggacaaccgcagatgtatctcctcgatgcaaaatgtacaaatgatgaacagacgtcaactgaggtcctcctggatgtggatgaattctgaatagatgaaaatcgtggccacgtttgtcggctgtcaaaagtaacatgccgctaggatcgaactgtaaagctactacgggttttgtatgtgcgataaagtgtgctatcaccgggtcccctgatggagttgagttttcttggaggttattataactgggacacccaatgtccaaaatggtaactattcctttatgagaaacatccgactgaccaccagcttggggactgtttggggatgttcctggcttaaatgtattatttcccgtcaaactactggcgacagattctcctaaacctcttagtcctctgcccaaagacttcgcagcatggataacagttgcagtataactttgtacaccttctccatccatccctccattgctccttttcgacatatttaactttttctcagcataggctaaccacctcgctccaagagttaccggattggggttcaagccaggactcaagaaacaagttgtaacagtcatgtgatcttccagtgtgagagcatcgaatatagcaattttctcttgaaaacttaccacaacaaactgtttgttggctagcacatcaattacagaattcttgaacttaattactttaacctgttctcctgtttttaatgaaacaaaatttaaagagctaaatttaggtccagacgatgaattatcacagatcgcaagcaagggtctcttcgaggaatacaagtcctttttggttgtattaccaac

SEQ ID NO: 9292 - DNA, 872 bp, Diabrotica virgifera
  SmartBlast Evalue=1E-58; Info=Endonuclease-reverse transcriptase n=1 Tax=Bombyx mori RepID=D5LB38_BOMMO
actttcgcctctcttccatcatatctaaaatctcgtttgtcatccacgatttcttctttatttttggtggtttgaggaatttctcacgtatgtcttgtgaaactgtatgcaacttttctatctcctggtccattacatccgattgaataacggtattcaagttgttctgtatataccgttttacactctgttctgtgttttggtcttttaatagccttatgtcgaattttggattgacactacgtctaaccttctttagcctgagcttaattttgccaatcagtgggttatggtctgacttgatatcagctcctgggtatgtcttgactgatgttatgctgttacggaatcttttattaatcatgatgtaatctatttgatttctcactatgcggcctggagtgtcttgaggtgatttccatgtatataatcttctgtaagggagtttgaagtaagtgttagtaatcacaaactcttcttctgccacaaattcacccagtcggtctcctcgctcatttctttctccaagtccaaattgccctatgaattctcccgattgtcccctaccaatcttagcatttagatcacccataatcaaagttaaatcctttttggggaggcattttaaggtgttggatagttcattataaaatgcttcaattatctcgtccggtttgtcagctgtaggggcatatacctggataatgttagttgtaattgggtaggtattaagttgaaggaggagtattctttccgatataggtacaaaatttttaacatgtctggcagtttcttgatttaagattatacctaccccattttcgtgtcttccattagggttacctgaataatatatgtgatgatcattaatt

SEQ ID NO: 9293 - DNA, 877 bp, Diabrotica virgifera
ttttaatttcatattgtttattaaaaagagtactttttaagtatttaaatataataaactaatactttatacatcaggtccccgaattgacttccgtaaaatggataccagttctgttgattattgtatgttggaattgccgatgtcattatgtgtccaatggtttcgacaccggcgcctaaagagctgcccaaataaagagtggagttccacttctccccgtttgctagccagccgatccttacaggacgatagtcgtctgagttgaagaggtccatgaatgtgtgctggtaagatttaatccattcgatttttgttccattgaccacagtcagtatctcaatgttctttgtgagcgtgtatatactctgcggagtacaaaggtcgatcgacaattttccaggtaacacaccaccagctacataaccattgtagtcacttccagaataattttcatcatcttcatctgcactgaggaaggaacgggctacatacgttggatcaccatcagcagttgatccgcctattatagcattctctggtatttctccggtatactgcacccaatcgaaatgtatatcttgatttattttggcttgtgacaaacaagcagcgaacaaaactaataaaacaatcttcatttttgtgttcttctatcttaagcaatgcttaagcaatgatagtccatgatgctgattcagtttacttatatgtaatttctaagacattcttatgtaattcttatgataatatctatcattcgataagaaaattgattaaaattttaaatgtaattcgccttatttttggaatttatgttcttaataatttaaatttgatccactttaaattaattattgacggtattgcacaatac

SEQ ID NO: 9294 - DNA, 871 bp, Diabrotica virgifera
  misc_feature (814)..(814): n is a, c, g, or t
  SmartBlast Evalue=1E-101; Info=Organic cation transporter protein n=1 Tax=Culex quinquefasciatus RepID=B0W3B3_CULQU
tcgggtaacttcttatttaaagtttctggtaacaccaatgacatcagacctcctataaatgcacaggttccaaatactagtagtggtaaaggcaaccatacatgagacaatgcattcatgtaaggagctaatatcgatccaaatcgggcaaaagttgaccctgcaccaagacccgcgtttctgattactgttggaaattgttcagtagataaaatatacactgcaccataactggcagtgatggtcaatttccctatcatagctaaagttatcagaagccactggtgtccagccggaaccagcatagtaagaagtaaacatgcacctgtgatcatcatacaactacacattaaatttcttctaccccacttgtttaaaaagataagtaataatgagtatccaggtatttccacagctcccgatatcacaaaatttaaataaggatctcctcctaaattattcgtattccaggacaaaccataatatgtcaagttgttcgcaaaccagtcaaaaaatataatcagagatttctttctcatgttggggtatttaaatacgtccagtacagacgttttggtgcctttattagaattattagtatcttgagatgttactagaagctcattgagtgtttcgtcggaaatttctactttattgtatttagctgcttcttgaataagttttttagcttcttctgttcggtttttcgttaaaagccaccgagctgattctggaataaaccaccaatacccaaggaaaagaactccaggtatcgtcaaagcaaattgtaaccatctccaattatctatgtaanacgcgaacgcagctgtcaacaatatatcctagtgagaagaacatttggcaaaccgtt

SEQ ID NO: 9295 - DNA, 872 bp, Diabrotica virgifera
  SmartBlast Evalue=6E-72; Info=L-xylulose reductase n=1 Tax= Anoplopoma fimbria RepID=C3KGY6_ANOFI
agattcgaataatttattcaacacttacagatcgaaatgcttctcacataagcagattcctaaatttttattataatacataaaaagtagaaatggctttgtactttcatttggggtcaatcaacaaagtttttacgatgcaacataacctccatcaatgggtagacatgtaccagtaatcatactagctttatcactcaacaagtaagtaacagcgtcgactacttcgtggacttctccaaaacgcctcaacggtatcttctccaacatgggcttagcaacagccggatctgaccagccaagtctgcccatatctgtcataatgactgtgggattaactgcattgactctgatgttattgcgtccatattccagggcagcggctcttgtaaacccatccacggctgcttttgaggcacagtatacggtgtggttattcaagccgacaagagaagcttgagatgagatgttgacaatagatccaggtgcttttcgggttaaaagattattgaccacaattttcgatacatgaattatggctttgacattaataccaaacaatcgatcgacgtcatcttccttaacctcagttaaagggcccaaaattgctaaaccagcattgttgacaagcaaatctatcggtccaacatttgtgagagcgttttcagtggcgttccagtctgataaatcaagcggaatgattcttatagagggtatttcttttttgagtgatgctaaatgatcggcatttcttgcaacggcaatgacatttgcttggcacttaactaattgtttaacaagctctctgccgattccttggctggctcctgtgacaagagctgtttttcctttgaaagtaacctccatattgt

SEQ ID NO: 9296 - DNA, 872 bp, Diabrotica virgifera
  SmartBlast Evalue=4E-73; Info=Benign gonial cell neoplasm n=2 Tax=Tribolium castaneum RepID=D6X4B1_TRICA
tctacacgccaaagttcttgctcccgacgacatggacatagacggttttctctcattagcattggacgctccagcagccaattctatcagagttgccgtggaacaccttcaatttcttggtgctctagataaagacgaagatctaaccgttctcggcagctatctcgctcaattgacgttggagccccatttagggaaaatattaatcggtggtgttattacgaaatgtctggatcctattttaactttagtagcaacacttagtcacaaagatccgttccagttacctcctcaggcaaatcttaagacaatggcagctggtaaacgaaaagaattaatcaatggtgtattgagtgatcatctcttatatcttgaactttttaggaaatttgaggaagcaactgcttcgggtaatgcgagccgtttttgtcaagaatactttttgagccagaacgccatgagctccattataaaaacaaaaagtcaattgatggctcaacttaaaatgcttaatttcgtcacttctagttcggcaggatcttacagaaatacacactcagattgttggccattggtgaaagggttgatttgtaccgggttgtatccaaatgtagcttatccgcacggaaacaaactacaaacaaggagagcgacatgtccatcaatatcgaattttagcgcttgctcacatcaagaaataagggcgtggcttgtttatgacgaaatgttaaagcaaaaaggtggttttagtcttagaggagttacagctgttactcctttaacagtcggtctattttgcggcatggacacgataatagaatccccaacggagttggaaattgacgattggctaaacttttcctttcccaacg

SEQ ID NO: 9297 - DNA, 865 bp, Diabrotica virgifera
ttcgtctcgcctttccgaagaccattggttttgatctttcctttcatcaaagtgttgcccttcaatattgactttgtttaaattttttattcccatgctggatttgccgtctgtttcccttaactcctctccgaattttatttttgttgatgaccagcactgtattatatttgaagatttagtttagatcttcttaaacagcaattaaaagcttaagtattttttcctgtctactgtattatctttcttttgcttaataatagaatatgacaacacaagctttttttaatagccccaaacattttttttaacaaaataaaaattctttgaaggccgggggcccggttaattactttctaaatcgtctcaaatttggtataggattatataaatactagttccaacttttagcaactagccttgtataagaattaaaaaataaaatttcgacctaaaaaaaaattttaaagggccagggggcccggttaaatatcttttaaaccggcccaaatttggtataggattatataaatactagttccaacatttggtaactagccgtgtagaaaattaaaaaaaaagttttttcggcccggcctattatacagggtaaataaaacgtctataatgtaggtatatatctcacacactagaactttttcatacagatattgtgttaaaaagcatacatggattgatatgacatctttggtcgacaactatattttttaacattgcatcatatattaacattgcttaaatatgttttttgcatatctaaaaaccttaaaacctttgtctggctcgacatttcttagattagtgctacttcatcatttagacaaacttttcaatattttaatta

SEQ ID NO: 9298 - DNA, 864 bp, Diabrotica virgifera
gaataagtatgttgacaggaagtcttcctgttttaatcctctattgtatctggcttattttttttattataaaatagtttgaatgatgctgactgtaatcaaattacatattttaataaaaacaactgttcgcaataataatactaaaaaatgttgcctcgatatagtcatgtgatacctactatttataaaattaaatttagcagatatatttaatagaaagggtagaataactcgttttttaaagaacctatgcaaacattcaattaaatagcattacgtaatataattagtaaatagtagtacattatctaaaataactaaatataggtataatgccttataatagtaaatatgaactattctcataatcattaccaggtattcctcttcaaattttagtcgcccttgaatgatacttgaactatagagcgtttcatgttaagaacggaacattgccgagatagggctatgtatttcttatggacgatagaagcgcgccgatgccacgccgtctgattaaaatgaatctatatcggcaaattagtagcaacacgtgcctgagagttttggcaacactgatccgcataagccaaacgtttcgttcttaacgtgaaatacagcatagttgaattttgatattattttaaggaacagtccacgtattggtaatatatttacattttaatcgagaaagcgcctggtatgagttaacaggtatacagggtaacacgtaaaactttggtttctagaatttatttgttgctgacgttatttgttggctttagaagtctttttgtaaccgccctgtatttgctgtgaaggtataggtctgaaaagtatatattggctgtgacagctgta

SEQ ID NO: 9299 - DNA, 870 bp, Diabrotica virgifera
  SmartBlast Evalue=1E-25; Info="Regulator of G protein signaling, putative n=1 Tax=Pediculus humanus corporis RepID=E0VUE7_PEDHC"
agtttatgaaggtattctacaagaaaagtgtgaatcgctcagttgcaaacttacaaaatccgataggggatctgtcaagagcgaagactggggttcggagcactcgtcgaccttcataggaaaatttctaaggagggattcgggtatccacgaaagaaaaaagaaaattccgactaggtttaaagaggaaactatgagcgatcaaagtcaaatgaaaaaaccgctaattgccaaattgaaatgtggtgccaacaagttcaatctggtgccatcaagtgaaagtgacgaactggtggaaggtttgacaagagcccagcgtaggatagaagaccagcggggcacagagatcaactccgaattaccggatttcctcaaagacaaagaaaacgagcacctccaaaagcagagaagaagcgatttggagggaagcacggcgaaattttacctaggagaaacctcagtacctgcctcatccgacaaactacccgtcatatcgtcagctaaaaacatgaaactagagctgcagtcgaactacgaaaacaggaacgttttggtcggaagtaaataccaagattcaagatacgatattaaatcatcccctagtaagtcggaaggggttcagtcgactacgtcgccggttaaaagtacaatcacttccgtggacaggatggaaccacctcccttaccacccaagcccaaagtaatgcccattaagccaccgaactggggccaagtgaacggtttctacaagagcaaagatattccttctacagacaggaaacaggcgatgtttctggagcagtcatctagcagctttgtgtgaaagtactttttgtatatgaatgttgtgtcggcgaatctgtcttaacc

SEQ ID NO: 9300 - DNA, 871 bp, Diabrotica virgifera
agttttctgcatggtaacgagcgtttctaacatcttcatgatttgtaattgttgatttgataaggccaaatccacttcttttttattcgccatggattttttcgataagaacgttttgttctcgcactatgttttctaaggcattaatacgataccctagtagttggaactgtgatttttcatcgccagcacttaatcttaattcttttcttagagcttcgtcttttataatttcattttcttgaaccacaggcacattttgccaacattttacaactgattcattagttattttgtccggatagttaaggctagtgtgatttgagtagtctttttggggctcctcttgattgtcttgaagcttgggaagattgtcaaagaagtcttgagtgctgtacgtagaattattcaaagataatatttcttgcacctctctgctcggactagaaccaccactggcaaaattgtctttctgaggtctttggaaatctataagattatcaacgacgacgtcatttatttcagctatagatgcttctaaagaattgctggtatcatttctaacactgttcggccgtgtattgcgccctgaaggtgtaaagtcatctggtgtcattaaagtcaaatttgaactgcttttttgttgtatgagcaaagatactgattcttgtagatcgtccaatttggggaatttttcggttttctccatcacttctgcagaattatttaacgaattataagacatagtttcaggttcgaaaactatattacattcttggaacttcttaggttgtataactaacattttcaagcaaattgctgttctttctgaatcttcatcaaattcatctctgtcttcgtaaaattcgtc

SEQ ID NO: 9301 - DNA, 871 bp, Diabrotica virgifera
caccatgataataaataaaaaattcctgtaattttttaacggaatcaaaatatttctaatatgccattaccacttttacttgaattcaataaaatcaaaaacgtttaaaacattatttaaataaccataacttaagtataagaacaaaaagtagtgaaaatagtaaaaagatattcagaagattgacaatcttccctgtattccaactcgttatcatttttgtttacttgtttggacgtcaatacatcattactagtcataatattttgatctggctattttgtaatggtaatatcttaattaatttctctgcatgatttgtcagaaattattaaataagtagacgcaagtcttcaagaataattgtgtgttaatttgaatataaaagggcagttaatatgcatgcagaaacaactgcaataaccttggtaaaataacagatgcagtaattgttgtcacataatataattttcttcctctttttatacctctcacttgtgatattgaatagcattactaggaccaatcccttttttgttgtataatggtttttccgaaactttatcttaaacataagtagtttgaaaataaaagataaaacacaggtcttgggcccacacttaaaaaaattatgattaactccgtcatgagattttgtttattcagttattcatgccgagtaggaccacttttctcatacgaaaatttttggaaaggggcggagagaaaatcttcaactttggagcgttcgaaaactgcagtaaccttaaaaatttgtaggacaatattaccagtaaactgtaagtatttttatcacacaatcctgcaaatatcagccatggatgtataaaatttatactctcacagctgc

SEQ ID NO: 9302 - DNA, 871 bp, Diabrotica virgifera
aaaaattagactgttttaataaatatctagacaaattgcatatttgtaatgtacacaaaagtacatacaaattaaaagttctaaaaaaataaattttgtaattttatgtcaactatcttaattgagtgcaaaaaatgcaagaaatcgcgttgattgcactaaattgttaataattaaaaacagacgcgaactctaggcaggaaacaagtaggttttcatcctataggtcaacagtcaacaataactaaaaacgtagtcatctacctcaatatttcagtggcccgaacatggtctattttttgcttatttccctggagtaggtatatcagtgtgacgacactaaccttatctacttgtaataatacagtttgaaaatcccaaccctaactcgatgtcctactgtcgacaagtcaaatctttagtttttgcaaaatgtgcaatattgaagtgttcaatggcccaccgcatttgcccagctgccggcggcctaataatcactaaatttatgacttccatcctttttaaatgaatagtgttaagataacagaatgctatgtttgatttatttttgttatgaatgcagtttgttttattctatttagaaatgaatgccaacttctatttcattgatggatgaacatacagacttgttattcgattttaatttttatatacaaatatttttttgtacagtatttttgccgccctctcacaatttgccgccctaggcaactgcctatattgcctaatggatacagcagccctgactattgtatctacaacctgtacacttaaatactttctaccaatcgtatcccagcgagtaacggacgagacacgtattttacgagtgttatcgaatatcgttatc

SEQ ID NO: 9303 - DNA, 868 bp, Diabrotica virgifera
ccaatatcttctgtgttgggcatgttttcacttcttcgattttaaatcttttataactcatgctctacgttattatattgttgacgtcgaagaaaaaactgtctaatttgaacttttgagaagggatagacgccttttgggtaaatttttctataaatagtaagttggaaaggtaaactatcaggtgaacacatacaacatacaccagaaccatacatacgctacaaaattcccaaaattagtttaagtttttcccaaagttaacgagtttatattactgaatgtttcgtctcaaaaagtagggtattgatattagatattactgaatatgtttttattaacactttgaacctattctcagcaccaccatgtcttctgcaatgaattgcatcaaccgtatacattactataccattgatatgagtttaagtgtcttgtatgtgatatatgttaagaatatttgcatttttagaagctattgcaaggactcattatcgattttcttttttgtttctaatgttagttttgtcgaatatgtagagtaggacttaaagtttgatgattattattttggatccttgtaaataaataaaataatctgaggctagatcattatttgctaatttttcaaatgtatttcactaacatgtagttgcgaccaatgtaaaaaaacatctcttattctattcaatatttttgtttagtttattacacataattaaatagagaagtttaaggtttgtaagcgtggtgaagattgcataaaaaatttaatgaatataactgggagaacgtaggacaaatattcctggacaaaaaaatcttcaaaatcctcggacaaaaaatcctcacaaaaaattccgatcaa

SEQ ID NO: 9304 - DNA, 867 bp, Diabrotica virgifera
  SmartBlast Evalue=3E-36; Info=Fragile site-associated protein n= 1 Tax=Culex quinquefasciatus RepID=B0W2V8_CULQU
atagtcttccaacatcttcccgtacttttatcagaagaaaccgtgatgtggtcaagagctgaaccggaaggactggacatggtcataggcgtcccaactccctcgctcaaattgacgtaacctttcactgttttgcccgttgatcgcagtttttgagcaaaactttgtggccgagatctgatgctgggcgagggtgagattattggcttgtgttgtgatgagtatgatccgggatctgatatttttagactgagttgtttcgagatgtctgtagtgggatagtgtatgtcagaattagaagaatggtgcttgatatctacattatcgctcgcactagttttaggcctccttatctcaaccggttgttgttccctcaattcattctgcgtatctttaacattctgatacatgttacttatttgatgtagcagcctcagtaatggcatgttgactctttggtgaatgtatctcactccgatggtaaaattgatgactgtactcgtatggtttttaagttgtcctctcgatatgtataaaacattttttgttttcatcatttcgttaacagccatgtccgtcattcgatctatttctagttcaactccgattttttcgcaaacaaatgatggagattcatctgcattgacctcgatatacaatcgctttcctttatttttccctttctttttttcgacttttccatgttctgacacaactatgtcgattctcatagtctccatgttacccacaagacaaaattggaaccaagagcatctaaagttgtgacttcatttcctgcgcttgaatctgacattgtggtaaatctaagttgttgtggcataactccaagccacgagagtaaaggct

SEQ ID NO: 9305 - DNA, 872 bp, Diabrotica virgifera
  SmartBlast Evalue=2E-23; Info=CG2943 n=5 Tax=melanogaster subgroup RepID=Q9VHY6_DROME
atacaatatcagtttatcctcatttccagctatgtaagtttctccagaaatttcaatttctttgattttaatattttcattttctagttcaactaatttttctactctattggaaattacaaaaaagctggaatgtttgtgttcaattgcttaatactaattggtcccgagccatcacctaagatactttgtattgattttgaatgaactgtatcatccttagcaagataatcaataaaatataactgacctgaatagtcattacttgacaaacacacgtatttagagctggaaaccacgcaatttgaagtatcctttacccaaggagctgatattttcaagttcttttcgattgcttcgcctgtagaaaggtagtaactagaaacttccaaatgggacccgacaactggaatgatattgattagttttccatctagtacacggaagtccataggtggtagtttatcggtaataatcggccattctgtgataagggccccagtgttgatgtcccagcttctaactatccaggtgtttattgtccctgatactgtgtatatgtctctgtctatgtataataatttaatttcatactctttggggtcttctagtacatgtctccacaaaatctgaccatttttgaggtttaaactagctaaaacattctgttcagtggcgatgatgattctcttggaatcaatttctgcaaatttgctttttcctatgaacgatcgtttccaatcgaattttcctacttgatcttcataaatggcacttgataaatttactacacttattaatattaaatataattttaaaaatactaaatgttcaacttttgccattattgctaaatcagagttcacataacc

SEQ ID NO: 9306 - DNA, 873 bp, Diabrotica virgifera
tatcctattgctcccgattctggatcgtttatcaggttatcagaccacacctgaatgtgcttgacggcagcttcatccaaactaagcttatctcggttaattatagcgaactgattgatcttaagcctcaagttcacaacagcagaataataaggaagcagtttgtagcttggtctaagattttcttgagtttctcttcgttcaagtctaaacttgttttggaaatccaccagatcttctagaatgctcaaaaatttctgctgaactgttggttttccttcttctaattcatgcattaccgttctaagtctttctgctatttgggcaagtttactgattacggattgaacaagctcttgcctagaggtgtctaacagatgaagtatgacagaattgattttctcccacagtgactcttggttttctggccagaaaatatgtataatttttgatagatcatctgcagcttttggtattgctgctggtccaactgaagtaagtattttggaaaccatattaatgtcaattggaatcgaagagtcgctattgtcgtagaaggggtagccggtaacttggcagcaatggacgtagcctctgatgtcttcagtattggttaagtccacacctgaaacaaggcacttggttttggacatatcaaggtaagcatcttggccaggttccaatgttagggttttcacatttctgatccacataattcttgttcctgctttgacagtaacctttacactagtcttaccaacattgtaaacgtagtagttggtatggcacattggtaggattaatcctgtgtcttgttgggacacaagtcttgtagccttgggatttaaagtaaagatgttgcagttgtatttc

SEQ ID NO: 9307 - DNA, 869 bp, Diabrotica virgifera
  SmartBlast Evalue=1E-74; Info=L-xylulose reductase n=1 Tax= Anoplopoma fimbria RepID=C3KGY6_ANOFI
attgttttttacatcttagtaaaatgcatattccatgttacagaacaaacggaattccatatgattgttgttgtttctaaaagcagcctttgttgattaacatgccgtgaatcctccgtcaattggcaatgtcgtcccggttatcatacttgatttatcgcttaacaggtacaaaacagcatcagtaacttctctcacttctccaaatctcctcaaaggtattttctcaatcataggcttagcaacctttggatccgaccaacccagttttcccatatctgttaaaataactgtaggatttacagcatttattctgatattatgaggaccatattccaaagcagcagctcgtgtgaatccatctactgccgctttacttgcgcaatatacggtatgatgaagcaacccagccaaggaagcctgagaagatagatttactatggatccgggagcttttctgtccaacatattttttactgctatttgggtgacgtgaatcagagctttaatgttaacacccattacactgtcaatgtcttcttctgtaatgtccatcattgatttcaaccagcccattccagcattattgactagtaggtctatttgtcctatattttttagagctttgtctgtctgtttccagtcggttatatctagctctagaggttgtattcgaggtacttccttttgtaaagttaagagatcttctttgtttcgtccgactgcaataacttctgctccacattttaatagttgaattgcaatatctcttccaatacctttagtagctccagtaacgagagccctctttccagtaaaattaatttccatcttcttctgggcttatagaaacataagttgacgactag

SEQ ID NO: 9308 - DNA, 866 bp, Diabrotica virgifera
cagttgaccttccggagcgctcagcatcattggagtcggtacgaccacgtttgaattcagaaaaccatcgtttaatggctgtaatcgatggagcagagtcccggtatcactttttgagccattgctcagtgtggagagtattattccccatcaaataacacaaaagtagcgttacttcaagcagcgtaaactgtaactcggtaaataatcttcttcttcttcagtttattggcctccacctacttgggtatttggccagctcatcgtctcggaataagggaaaaatcctttattcacttacaatttggagttagtacataatccgaatgacatgaacattttggcagtacgcttatgaaggttatggctacggaaatgtcaaatggaaaattcattagagccgccatctcacggttagacccgggacttattgacgacgcattatatctaagccaattcgtgagctcaagcgagggtgctgccgattatttggaactagaggatttgggatgaaaatataaatgtatcaacgtcgtttgaaagcttgtcggatgtgttcatttaatgaataatttatttatattaattaattacatcaataacaatattaattataacaaaatacgttatcccaattacatcggccattttcatgcaaccgcacacctatagtcgattgagttcgcgaatacatcctatgaatattgacttagaggcatctgaaggcaggcccgcacagcagtctctgattggctataaaattgctagaaatcaactgtgtacaacatgcaaccgacatctgtcttttttatgttttgtgcacaatttcttgtagatttaggggcaaaagtgtacataagcattgt

SEQ ID NO: 9309 - DNA, 870 bp, Diabrotica virgifera
catatacatgaagttattcttgaatatattgtacatcaaacaaagacagcgttatcgtgagggatggtggataattcacctactgtcttcttggaagttttgaaaatgtttacctactcaaattttaaatgaatcttagtaccttgaacttatatttttttttcaaaaataattctaccagtatctaaagacaattttaatatttatgtattcaattaatgcttattaattaactaatatttatgtcaatactagttcttaatttaaacatttttatgtcaattcttgttcttttgctcaattcagttagctaacatatcggtattctggatctcgtcgtgttattacctttatttatgatctttataattatttctgtgtgaataatactaagtgatctaattggcctggggctgtttaatcgtaaattttataacggaagccctaatgaagatttgtaataaatcagaaagtccgttgacagttacgttcacattttgcattcgcattgacacttgccactccatagacagaataagaatagacaagacatcgtgagcaaaatagtgaaacgcggggaactcaatttggtggtctctctatctctctttacacgtgcgtgtcacagacacagaaagctccaccccacaaagatcacttcaaagtgaatattgacgtttctacctctattgatagaccggcacataccttacctagacaattcttattatgtctatgtgccactcaagtcagtcacaatcctagtatgccttttgatcaaatgacgagcgcatgcgcagtcgccgtgtttttcgtacagttctaatcaattgagaggttatgcaccattagttgtttactgttcaaata

SEQ ID NO: 9310 - DNA, 870 bp, Diabrotica virgifera
  SmartBlast Evalue=2E-82; Info=Abhydrolase domain-containing protein 7 n=1 Tax=Harpegnathos saltator RepID=E2BIG9_9HYME
cgagtgtttacttacaacactttttcaatgtagtaccagcgataagtaccagtaatggccaccatgtgtattcagtcgatttcggtggtcgattccatcagaattcacgttttgtcgatcatttttggtgtttgggtcatttgtaaaagactgctcaagtggatttgggatccgaagagattgaacagccatcaactacgagacagtccaccgtcttgcctcttggattcatccttaggacaacataagtacgtcaagttgaagggaataaaactacattatgtggaagcaggacaacgggatcaaccactgatactcctgttacatggcttcccggattgctggctcagctggcgctaccaactacctgctcttagccagcatttcagagttgtagccttagatctcaaaggctttggagattcagataaaccagcatggcgaagcagctacaggatccaaataatccttgaggaaatcaaggattttatccacgcgctaggcgtcagtgaatgtgatttgattggacacgatttgggtggtttaataggttggtatttagttcaccaacatccaggtttagtgaagaaatttatagcggtttcttgtcctcatcccaacgtctactggaagaatttgattagtgctagtaaggtggcctatcaatggctaaattttgtccaaattccctatttaccagaaatcgatgctcttaaagaagatgttaagattatcaatcagtaccacaagcatcttccacaaaacgatatatacctagaagcttataaatacgtcttttcacggcaagaagactggactgggcccataaactactacagaaatcttccatttcttaaagtccaagaaaat

SEQ ID NO: 9311 - DNA, 869 bp, Diabrotica virgifera
  SmartBlast Evalue=8E-34; Info=Mitochondrial fission 1 protein n= 1 Tax=Camponotus floridanus RepID=E2A8I6_9HYME
attatgtcacctgttatgagtagttgagaagcatatgtccgtttatttcctctctcgaaattttactattatacggataatcgttcaaaagatacgaaggggtaagaggacttttgacgagcactgtatgtgcaaactagtaaatgttcaaaatattgtgtggtcccttaaggaccttgtgatgaaatatgtttgggccaaaattgtgtatatcaacatttactagttcgctcttgttgataaatacaataaatataaatattccctttttagaagatacaaaattttattataagttgatatttggtactgatcactcactaaaaaacgaaaaattagaaaagttctggaagaactatgattttcctttactggctatagccatgcctacactgacgatggctcctactgctaccactactcctcctgccaccgccatacctactaggccttctttttccattttcttttttattagtttttctaagcctgctacttgtatattacctggctcgactgccaaaaacgatctaatatactttaaagctttggaatactccttcatcctagcatagccgacacataagaaataaagatagtctctcttcccatcttggttgtttttatatagttcttctagtagcatgatacctttttgaatgtcagcagaatatttacttctaactaagcaccaagcgtactcaaattgaaccgtcggtgtcacttcattgttatataaatgttgatgataaactttttcgaatttctttaaatcttccggtaaaactgtatcatttaataggtccattgttttaatttactatttaattttaatttttctcgatagctgtacaagattaaatgtcaat

SEQ ID NO: 9312 - DNA, 868 bp, Diabrotica virgifera
gatgtattcggccctgttctcaaacggtgtgccacaaatagtgtaccagatggaaccgttgggatgggaacttattcttgttcggcaagcagtgaaaatcgaaatagtcttcatcgtagtccgttggacataaccatttccgtttctgtaaagtcattccaaagactgtctgtaatggagagtactcgtcacaaggtccaattggctctttcatacccgttgatacttcatcctctggattgaagaatatcagcattaacataaacgtagcgtagtgaacaactagatgaaacaaagttaaatacgaactccaatgaagtttgccaaccacgttgttagcgccttctctttgcgctgttacgcgctcacctgtccacgagagtaacaggcaaataacgaacaggattatgtatgttatttcgctgtggatgttgtacagatcgtgaagtggatggtatatcagtataaaaccgatgattcctgttggaaatcccaagactgcaggaagaatggtacatattaattccttgaatacgcttttgtctgctacccatcgatccccactgttgcagattttttctctgaggaaatggaaccagaacgtaaatcctgctgcgaatgttgtgtggaaaaagtaggagttccatggtacccagtagtgcctgtcaaatagattcggatcggtatcgtgccaggtccagtggacgtattttactgagacgatgtcatatggtaaatcgattaagactactagaaggcctaccaaaaaaggctcagaccatttgggcagtttgagtttagctgcggcgatttgtgcgttgtagatgaaacagggatataaaagcattaatatgtaggggcaatcttc

SEQ ID NO: 9313 - DNA, 868 bp, Diabrotica virgifera
  SmartBlast Evalue=4E-19; Info=Putative uncharacterized transposon-derived protein F52C9.6 (Fragment) n=1 Tax= Camponotus floridanus RepID=E2AL50_9HYME
aaattttaaatttgaaccaaatgaagatgaagtgatttaacaaactttgtttggaatcctattcattaagctttaaaatgagatcttctccggctcattttatgcgcggaagccaagttgcgatcgatacagtttcgaaaaatacttattttgcaatttgtattgtgcactggttttgcaatgtcttgagttctaattgttggatttaagtttagtaaacgttttttttaggcctggagttgaatgtgttaatgtcgtcgatccatcttttttgcgctctatgcgcctatgcctcgtttatgttcttttggtcgacattgtattattatctttgcccacttatcttgcctgctttcttttgccgcatgtcctgcccattttcatttagattttgcgatagcttcgataacatattttactttggttcttgttcttagatcttcgtttctaatatgatctcttatgcttacatttatcacaagtctctcaataactctttgagttgttctaagtctaaggagagtctggttagtaagtgtcatggtctccattccataagtcaagacaggaaggatacatgtgtcaaaaacctttcgttttaaattaactgggatttttgggtcttttataataaagctttattataaaagctttgttataaaagttttctattagctataacgactttgctaatatctaccctttgcaactgttaacattgtctagaacttattacgtttaaaatttcgtctggtctaaatgtaagtctgttaaaatatatgtatcattagctttgtatcattaatttgaagtatttctttgattctttaaatattattgactgaaagataagtcattaaaatatttt

SEQ ID NO: 9314 - DNA, 866 bp, Diabrotica virgifera
  misc_feature (32)..(32): n is a, c, g, or t
tattgatataaatacctacctacttacaaaanactgacttttgttactaatactagttttttatttgtatttacactataaaatgataaactaattttacagttgagtacattggcagaaagtggttatgacaatctgtgtgaatgaggtgaactttgtatgtaaattaatgccaaaataaaattagttgtgaaaaacaaacaataaacaaaccagaaatgttgcaaattgtacttaaatctgaaaacgtccccaagcgtctttttgtacctctattttttcgatgtactgagtctaaaatgttcataaaaataacatgtgtgtttacttaataacaggcagtagctggtttgtcgttagtgtcatgcgtggaacacaatggtgctaagtgacaagtatgtgttttatctctccaggtattaatgagaaccatggactcaactgtacctacatacaatataactaccatacctttattaacgtttaacaccttggttagcgatcacttaaactaataagatgtaattttgtaccattttatccttattttgaaaccaatatgagaaactaaaaactctcgctttagagcattttaaatcatttaataacaatggaagccagcgtctcacacgatattacagtcgatattttgtgtgaaatgctggcatctcacacggtagccaaggtgttaacctacctacttacatgtacttacactatacttgttattatattagtctacttgtctacaaacatgggaggcctatgtccagcagtggatctagaggggctgatgatgatgatgattagtctatatcacttctctgtaattccaagttcctaatgacattaatgttatcttcaat

SEQ ID NO: 9315 - DNA, 868 bp, Diabrotica virgifera
  SmartBlast Evalue=1E-111; Info=Probable ATP-dependent RNA helicase kurz n=5 Tax=melanogaster subgroup RepID=KZ_DROME
cttgcctaagtcagtcatcctctgattcacatactttatcaccttttttcagttgctcattttgtcgaaggattttatttttgtgcctcaaaggaaaagcttttttaagttttcgcactaggtaattcacttcttgttgacccgtaacaaatatcaaaattcctccatccggcagttttgtattaattttcacagctttaataaaagcctcttttaagtaattttcgttggtccttttattgaaatggcaggtcactggaaattgcctagcttctacttttataaccggtggtggatttttaaatagacgttggttttctgtgaaatcttccaaacgtagagtagcagacattataatcagtttaagagggtcatttctcttgtgtcttaaggggactattcgggaaagcagaccaattaatatgtctgtatatactgatctttcatgagcttcgtctaaaatcacgacagagtatttactaagcaagaaatcgctttggatttcttttaataacacaccgtcagtcataaacttgattttcgtatcatcagtcacgttcccctcaaatctaattagataactgacttctttcgtacttaaattcatctcgtgtgcaattcgatttgacatggaaatcgcagctactcttctcggttccgtaacgccgatttgtttatcgagtgcaaatccagcttcatataaaaattgtggtacttgtgtagtctttccacttccagtttctccagctattataataatagagttctcatagatgacttccataatatgttgctcttcagctaatatgggtaattttagtctggcagcctggatttcctcacttctcatcacatccacataaactgc

SEQ ID NO: 9316 - DNA, 869 bp, Diabrotica virgifera
  SmartBlast Evalue=1E-146; Info=AP-1 complex subunit gamma-1 n=2 Tax=Formicidae RepID=E2B231_9HYME
tcagacctcttcggatttgatgtccattattgataaaacagtttcatataaaattgtattgcccacattcttactggtttctgtattggtagctacttgtgctaagatatcgttcatagcttctgaggcatctacatcgttgattcccaatactcgtagaagcttcaatatttttacctgtaaaaatgggtcactaacaccagaaacatcatgttccggggaataccctgccagaatcaaattctttaaaatccttacaagatttggcacgatctttttaaaatgattcaaagtatcaggactattttcacacatttctgttatgagtgtcactcctgttattaatacaccgtgatttttttcagaaagaaggcttctcgtggctggcaaaaagatctccattaattcaggtacccttttgatgatgcggaatgcacatagagctgctttcttgcgaatataggcgttaggcgatttcattaacctctcaatttctcccgccagatctctagccatttcaggggaagcgatggctcccaatgtacaaagcgccaatccaacaacgaattgtgtagccgaattcaagtcatttttaaggcaatttgttatcaataaatgcacatcctgacgttcatctaacagtaacatcgcacccaaataaccaatccttttatcagtaaatcttgagcttgctattaattttaaacattctaattgaccaaaatgtgctttatatcctagcatgtggatgtacaagagttttgcaatgtttcggcacctccatactgaatcctcctctcgaaatgtcgatctaatgtaggcacattcttattaacaacactacgttcttcagcagcagtccttgctgc

SEQ ID NO: 9317 - DNA, 861 bp, Diabrotica virgifera
tgatgattacaagattcttaattgtatgtcggaaaatgcataatagctacctcttaaaacgcaccaaaggtttcattttcgtggctcaaccggtcttggagtaataaataaattggcggtttgaaataagaatttcaacaccccgtatctcggaagcgaggtatttgcggacatatgtttgtggaacagactgttattattttttcatgtagaattaccacttaaatttttcatacttatttactaacaccctgtataagtgaagcttctaagcactgcggttgttaacatcttctctgcatctggatgttcagttctctgcactttcgagtcatactacaagtcagcaatacatgaatttgtcttaaacgatatttcttttatgaatgtttctgttaaattgtaaacgtagttttataagtatttttattgctttatttattgatgtttatctgctttttttcgattcgtacttacgtttacctgtttagaagtcttatttcgttcgttgtgaagcaataacttttcgagcaatatatatatttgttctttctgtgcctttttatgcgcgttttggttgttttatacgtgtttgaggttgcttctgttgtacggctccacgaattggccttttataaaatacgttgcaaaattattgagatacttaaccattttatacgttttaatataatataccttttatcctttttaactttctcaacgttttttagtacttttaaactgtagtaatttttgagatggaaggaaattaacagtttcactgattattataatagtaattagctatttttttatacttaagatattgttttaatgttgaaattttattattgcgtttgt

SEQ ID NO: 9318 - DNA, 869 bp, Diabrotica virgifera
atttattgggtaattagcgtattgtaggatttctaaatgatatgtatctcttcttcatatttatgctgtatcaacttttagaaattttctgttaagcaatactgtgttgggcatttgtctgtatatcttaatgaaaaagaagaaaggcaaggaatgagcaaaaaatcttataaggctctcgatgttgtatcggtatatcattatcgccgatttataatgcatgaagctatatagcataaacagaagaagaacgttctacaggtctctgcccactacacggtgtcatactatgatcgtactaggaccgtatcagccaaaaaaatattctttttatagtagagtatgggctcatgcccactagagcgttccgtccccgaccaacaccgtcgcgtaccatgcacggatcgtcaagaattgccggcgtgaatattttgttggtggcgatccactacgtgcatggcacgaaacgttgtcaaactggtgtacgcaggcagcgagacgggagtatacgggttacaacagcgtatgatgaccgtagtaaatctgatataaacgtgttgcatttgtcttactgccttaaattaaattattaccttaaatcagtcaacaagacgtgtgtacgcattcaataacatggaagacgaaaaattaattgaaaatgttcggaaataccaatagaaaatacaaatcgaaagaaatattataactgaaagaacgggaaccatgcggatatgatacgcggatgctacggtcactatgtgcgttttagacggctatcatacgctcttgatacgttgtagtgggcatagtacaccgtgtcgtgtttttccgttcctgttacgttcatagcccggtgatggtatgaaacg

SEQ ID NO: 9319 - DNA, 866 bp, Diabrotica virgifera
  SmartBlast Evalue=1E-37; Info=Cystinosin n=1 Tax=Culex quinquefasciatus RepID=B0W5W3_CULQU
aacataacctcacttttaggccgaaaaggcaacaggcaaaggaatgaagaggaattgaataacgacagacatgttaaaacagtttttaagacccttttctctatcatatgaaagctataataaacatatagtagttcaatctaaaaggtttgcaggccactcaaaatgggcaaatatcaggcacataaagggtgccaaagatgcagaaagatcccgactttttaccaaattaggacgacaaatcaaagtggcagttcaagaaggaggatctgttgatcctaagaaaaatctacagttaaatcaggttatagaacaaactagaagagctaatatgccagcagctactgtacagagtatattgaagagttgtgaaagtagtaaatcccaagacaagagttatatgttggaaatcaaaggccctggaagctgttttatcttatgtgaagtctacacaagtcaactacatggtttaaagatgatacttagtacaattttgaagaaacatcaatccagattcagtgatggtggtggcctgcatttgttcgaggaaaaaggtcaaatagaagcagaacaccaagcattagcaggtaaaccagaagaggaaattttagaaaaagccactgaccatgccatcgaatcaggagctgaagatgtgaaagttatcgaaaacagtcttgttcagttttcttgtggcaaatcaaacttgaaccaagtagtgggagaattggagaagatggggtataaagttactagtgcagaagttgaatatgttcctttcaatttgcaacctttacaagattctgagttagaagtgtgtcagaaattgttcgacaagttggagagtgttcctgaagttgtcaggctcg

SEQ ID NO: 9320 - DNA, 867 bp, Diabrotica virgifera
  SmartBlast Evalue=1E-19; Info=Endonuclease-reverse transcriptase n=1 Tax=Bombyx mori RepID=D7F166_BOMMO
cccagatatattataatcgtgaacttgttctatttcattttgtccgatcctcattgtgatgtcctcatctgtatttgttatgattttggtcttgctgtaatgcatattcgtatcatatgcatatgattcattcaattagtattcatatggcgacaatatgaagcgaagagaccaaggagaagacctcatatgcgctggagcgacgacatcaaaagagccgcaggaccaatatggaaacgcctcacacacaacaggtatgaatggcgagaaatggaagaggcccttaatcgacacttcgaaaagaaaaaaggctattaaaaaatcatattaaggcctatatctccagcttctatgtccagttctttcatcattttaaacaattcttattttttatcggttatcaatacgatgtcatcggcgtaccttagatggttcaagcgttgtccacaagtttttatacctttttcttcccattataatcttttaaaaatatcgtccagagcctgattaaaaagtttcggtgatattgtgtcaccctgtctcacgcctctatttatttgtattgactgtgttccttcgtatactttaattgttgttttggcttccttatattggctattacgtctgtatatctgtgttcaattctgctgttaatcaaagaacttttcactgcccaatgttcgacactgtctataaagccttttcgaaatctatgaacgctatatataggggaatgtggtattcagttcaaaatttcgcagggactaaaacagggaggtgggctggccccaacattgtttagcctggcactggagtatgcggttaggcaaatgcaaactggacgaggaaacctactgaccaaccgaa

SEQ ID NO: 9321 - DNA, 861 bp, Diabrotica virgifera
  SmartBlast Evalue=7E-19; Info=10G08 n=1 Tax=Ips pini RepID= Q5FYF7_IPSPI
ttattaggatcgggcttgccgaacaaatgttctccttttttaaattttttcctcttcagcatccattatagcatccaacttatctatataccttcggcaaaaattatctacttttaatatttgtttcagcagagttcgtggtattccaggcccatctccaggcccatgatcaggcccatctccaggcccatgtccaggtccagggccaggccctttgtctttgggtttctccacaaaggcaggtgggcctgggcagttgtcgagaattacccttttgaacagatcagggtctttcagtttcattgctaaaggaattgcgtggaaagtagccaggtcagtcagcagtaatttagcaccgtcaaagtcgaatcccttgtgtctgtcttcattactgtatcctgccacttgaagattttccaaaagcaaaactgcattctcatcaggatgttctttaccgtcaagattatatctagcagcaatcaattttggaaaaaatcgacttccttcagaccatgttctttcgcaaacttctgcattgctggtattatttcattgtaaaaggcaatttctggtttaaacatgtgagcacctgcggcagttaattcctttggcatcttttcgtcgattatgacacatttggcgacaaaatgttcggtgttagtagcattggtgtccttattcttggttgttacttgcaatctgagcatatcgctccagtaattctcacctggttgagtgagattcgttattgtcttgtccactatttcaacattttctccaagaactggcttcaataaattgtttaggtcttttattcgttcgtcttccatttttcactaaaaatacactaatacgacatag

SEQ ID NO: 9322 - DNA, 869 bp, Diabrotica virgifera
atattttcctagatgatttttatttgcatttcattcctagtttctaattctaccaatacgtcttctcactcttatttccttatcactttgtttttagatgtaattctttgcattgtaaattttgtgccgttttggtacaaccaattcgaacacatcttatagtgtatccagtctcccgatttttttggttttgaagtaaatttctcaacaaccttggtggccatttttagaatttaggtcgccatttcattaatctaaattggtctccctgtgaaaaaactaatttaggcttcatacttgatatgatccattttttctatccaacaaggtcacgataaataattcagcagttgtcaactgctgaaacagattttatttcttggactatatagatgattatattatgtgataagataaaggataaaatttgtcagattgaaagtggaagatgactggttttagcgtaataaagatgtacattttaatatttattggattgtcatccagtccttgagctgtgcttaaaattttcagtctttatcaaagtagtaaagttggttaaaaaaaaatgaaagatggtatgatatacacagaaaaatgaaagataatgttttctctgcgtagctttataatacaaggtaaggtggaactctttaaaaaaacttagtgtttttgtatcgttacacagcctcccccacgatcttaacttggtgtaaaccacagcttgaaatcggaataggaaccatacaagaaaatggaacgataccaaaaaagaagaagaactctttgtagtcccatagcacatcaattcaatcgacaaaattactcctgatagatcaatagcaagttaattaaatcaaattttagcc

SEQ ID NO: 9323 - DNA, 868 bp, Diabrotica virgifera
  SmartBlast Evalue=1E-22; Info="CG4699, isoform D n=4 Tax= Drosophila melanogaster RepID=A4V2Z1_DROME"
aaatggagaataatagatcctgattatggtaatcagtttgaaaccaaaaaataatggcgctgtgaaagaaaatgaccaagatactgatgaagaagatctcaaagaggaaaccgtaactgcccgtcacgaccgttccgaatacgaggagaagaaacgcttcgctagttacctgaaattcccgctagggtccagaccgcgctcgaatcgcaggaccgacagcagggccgaatcgagcggcggaaacacccccgatccgatgtcgcctcacaatcccgatcatcacgattcccctatgacttcacctcctgcgacgcccctgtccgccgcgggaactgacgaaagtcagtccctacctcaccttccttccgccgccgttgtgaggaggaggacgatgtcccagtcgaggttcggaatgggcgggaaggagagggagatgaaagacgattcgcgcgccactacgcctgatatagtagaggttcctccttacgacaagcggacattccctctcaccgacgaaatctacgagaaaatgttgaaacacatgcccgaagaccaccagttccaaaccaacagtagatcgcaagattctaccgaaaacgagagcagggactatgactcgtacctggatcagaaagcccccgattcgcccgacaccgagtccacggagtcggcgatcggagacggcgaagaagaagatcccaacgatccggaatggatcgacatggaaaagtttaatagagaccgttctaggagataaagatgttccgtaacatagttatttttatagacagtgtctaacacaagtgagaatatagctccaataagaagtttccttggtactatatgaaacggagttggagctgtgaaa

SEQ ID NO: 9324 - DNA, 868 bp, Diabrotica virgifera
aggaaaggtggcaacttacattcgcattggactcttctatctttattatcgaaactcttaaagacagtttccattctttcgcctagtttatacgtgtccgttccaaatttgcaagtcaaacctgtatctttctccgcttttggattagcagctacccttgttatatttgtacttggacaaacccatgaatggggacaacaaagcgggttgtcattatcgtataaataaaagggggcgcagttatctttgattttatctctgttatgaacctgcactaaacaggaccttctctggcaaaactccggagtatattttccagcgaaaccttttccgcatacacaacttagacaagtgccttgtgggtagaattcctcgccttccatgtggatcgctccatcgattttgcattcgacaggatggtcttttctggcacatattctgcctacagagcaacattctccaagtttatactttaaatagcagtcattgctggtggggctcgggttttcgtattcagggcaatccaattcagcacattcgaaagagttatcttcttgacaactacaccctacactacaagcgctgtacgtatcgttgtcagatagataagaaccaaaaggaatatctctgtttctaaatctgcaagtattgcctttggcttccaaatcacacttaaattctacagggcatttgtggccttccttcgttataggcttgcagtgcatatcttcataaacaagcgtcccccggttgtcacattgggaatccaattccaagctgaacaccaattttaaacaaataagatacactgctaatagcttcatcttgatgaaattttataataattaacaatattatttggtaggta

SEQ ID NO: 9325 - DNA, 866 bp, Diabrotica virgifera
tattagcttccgcgtcatgtaacttaagtcgtcatgatcttgagcaatcagaatttggtcatcagcgaaacatagagtgtatagtgttgtgtcgtcattgagagggattcccatgccattacattttctttctcagtaaaacacaggttaaaaataaagtaaacatatttaagataattatatacagtttaaaacaaataatataaaatataattccgtcttctgcaaaggaaaaacaatatcaaactttattacagtcataatagcaacattaaaatgatacgataaacaatacaatataatacaataacaacctcgctacgttaaatcaacatagcgctatattccaatccgcatttcacttcaatgcggcgcgtagtcactcgttcctcgctactaccgcctcctgcgataacggtcatggcaaaactccacttcaccacggtggcgttcgcctaggcatagttcaacctcacaaacggtgcatctttgcccatccagctagtgctagttcaacacgctagcaccagctgtctagccattgctagttcaacacgctagcaacgaccgattaccgattttctcattctcctggctcgccttaaatatgctctcgatgccactactccttctgtttcccccagcggtgctatgcgccaacacggctgctcctatggttgtttttggtcgaccggcacatcgctggcatcacatcattacaatctgatcaaaaataggtagtggtaggtagtgtcgtttttatgagctggcaacttcaagaccatacatttcaaaacaacctaaaaaaatcactatggaggacaattaatatgtgaactattataactgatagatcaaaaagcatc

SEQ ID NO: 9326 - DNA, 858 bp, Diabrotica virgifera
  SmartBlast Evalue=3E-10; Info=Transposable element Tcb2 transposase (Fragment) n=2 Tax=Camponotus floridanus RepID= E1ZYL6_9HYME
aataaaaagtagtgtcatgtcgtggtttatctagggatttgttcatgttaaaagtcttatattatttgttctgaaaataaaaatatcctatataaagttctcttattgattatcatattttaaataatcttttcctttaagtatcgtttttccttctatgactatttatacaatagggaccctagacttttacctgtgcatcattaatatctaactaaacacaagacacatttttgtcgtagcataaatatctgactataagattgttacacttaaatgcatagggaattacaacccatacagattcatagtcccaccatacccattgtctatccttcttaagtcgttccacaaatgctctatcctatctagttaaggtctggacttctaggaggccaggctaataactgaaatctgtcaagtattgcattgttatcctggctatgtgcggactgcatattgcttccaaagaaatgccgcctcataacattatatctccaccaccacagtgtactttaggagctaagcaacattggacatagtgtggtccaggccttcttcacattatttggcggccatcaggtaaatatttagtaaaacgagattcgtctataaacagaaagtttctccaatcttctatatcccaatttgcatgagaacgacgcaattccaggttccaggcgttttcttcgatgagctgctaccaataaagagcctgcagtaggtacatatgatatattttgttcatttaatcttcgacgtatagtatcaggtgaaactatggtaccatgaacatctaccagtctcctagtcaatgctgtagcagtagctgtcctttcttgaagctcgaagtctatg

SEQ ID NO: 9327 - DNA, 867 bp, Diabrotica virgifera
gtttgcctttgtggtgcatgcattaataacaataaaactcgcttgcgaaccaagttaatacattacatcctcttttttttgttggaaaagtacgaagctttaaatggataaatattgatgtttttcggtcgatcgaaaaagtgtttagtgcaaattgaaggctagaacgaaatgtgagaaaataaataaaacaccagtttgtttttgttaggagattagtaatttaaaaatggtgcaaatttagaatcgctttaaattttcaattcaaaaatttagtttactgctatatctatatggtagcagtagaagatgacgaccaacggatataatgtgataaattttacaataattgctgtatgcgtcattggtattacaaatattccaaatgtggaaagtgccgtaagatgttttaaatgtttacctgctctacctcaatactacacaaacgaaacaatcagactgtgtaaggacttcgactactccgacaaatttatcgtagactgtccatattcaacgtattgtgtgaaaaaaattaccagtgccaaaataccaacggctatcaatggaactgaaagaaactgcgctaatcaaaaacatgtaattcaaaattaccaccacggacaatggcatcaagaagtatcagtggaagaaccatatactcctggatgtcataaaatcaacgacaaaggtgctcggacgtcttcaatggagtattgttattgtaattcagatttatgcaactctgccagcagttacaatgtacaactcggagttggatttgtgatagctcttattatctttcttttaccatgataactatttctttatataaatgtacagaaaataatattttcaaaaaatagtacc

SEQ ID NO: 9328 - DNA, 867 bp, Diabrotica virgifera
  SmartBlast Evalue=1E-111; Info=Proteasome subunit beta type-5 (Fragment) n=2 Tax=Formicidae RepID=E2C480_9HYME
tcatcttcatcattgtgccgaaactaaaatatttttgaaaaatattgtttaagtgcgattcataaattaaaaatgagtttagcggaaatatgcggcttgtcagactacggctcacacgagagtagattgtataaacatgatttacaacaattttgcactaatttcaatagtaacatgaatctagaagtgcccccctttgaaagtcctgccaccaacttatctagatttacaaaagatgatactggaaaggctctaaaaattaattttgatcatggtaccacaaccttgggattcatgtatcagggaggagttgtacttgcagtagattccagagctactggaggccagtttattggttcacaaacaatgaagaaaattgtagaaatcaatgattttctgttaggtactctggctggaggcgcagcagattgtgtctattgggacagagttttggccaagcagtgtagaatgtatgaactcagaaatagagaacggatttcagtagcggctgcttctaaattaatggcaaatatggtttacaattataaaggaatgggattgtcaatgggtatgatgttagctggatgggacaaaaggggaccacaattgtattacgtggactcagaaggtctgagaacagcaggaaaagttttcagtgttggttccggttccatatatgcttttggtgtactagactctgggtacaaatgggatcttacggacgaagaagcatatgatttgggccgtagatcgatttatcacgctacccacagagatgcgtactctggtggtattgttagagtttaccatatgaaggaaactggatgggtacatatcgataataacgattgtaatgacttgcattac

SEQ ID NO: 9329 - DNA, 867 bp, Diabrotica virgifera
  SmartBlast Evalue=4E-37; Info=CG7970 n=6 Tax=melanogaster group RepID=Q9W0B2_DROME
atcagtgtatgtaacacataatattgtgaagttgttaacctttggccccagatcagtacatctatagaagaatcgagttctgtactgtaactgtatcagttaactatattgttcagttatttgtagaacaatggttttatcaaagcctcttgtaaattttttaagtttctattttggccaactgttcgaacatcccctgagaacaaaagctataacatgttcaattatcgctaccgctggtaattacacatctcaaaagttatcaggagagaaagtaattaatcatcacagtctgcttgcctatggattatatggattaatttttggcggaaccatcccccattacttctacagcttcctggaaggagcaatatccgaagatgcctcatttgctgttgtcaggaaactgctacttgaaagactgatctatttaccgctctaccaagccttcacattatacgtattagctagaatggaaggaaaaagtcacaatgctgctatgaaacaattgcaagatttgtattgggtgctcctcagcagtagttggaaatatttgactgtcattcacttgctcaatcttagtgttgttcctccagtgctccgagtactcgtcactaacctaatgggcttcttctggaccatctatctagcaaataagagaagacaacaacaagcaaaaagcaagagatccaagtaaacttattaattgatatataatctagtgatgatacttgttctgggattttttagggttgtgttggtattataataactaatttaattgtttatatcagttatttttgtattatgcggttactgtaattgtccaattataatatataagtaattcttacaatatatttgtat

SEQ ID NO: 9330 - DNA, 864 bp, Diabrotica virgifera
  SmartBlast Evalue=1E-41; Info="Something about silencing protein, putative n=1 Tax=Pediculus humanus corporis RepID= E0VE77_PEDHC"
attttttttgatactacaaaatgaggattgataatgacgaggattatagtgcatcagactctgatgacgattacacagaaaatgaaagaatattacttaataaagtaagaaatcgaggcaagaagttttcagatgatgagcaagaagtttttggtgttggaggcgatgaatcagaagataatgaagatgatgatggagatggaagtgatttagcattaagtgatgttgaaggacaggaggatgacaatttaccggataccagagcatggggcaaagataaaagaaagttttatcaaactgattatgtagatggtgattatggaggttttcaaggaaaagatgctcagcttgccgagttagaggaagaagaagcaaggaacctacagaaacaactagcccagcacttagatgatgatgattttggcctggatatatttgcaaaaaaagctgatgaagatgataaacagaatgaagagatcatcaaaactgatatttcaaagttgtctaaaagacaaaaactacaaattatgcaaaaagaatcgccagagttcttcaatcttgttcaggatttccaaaataaaatggcagtagtgacatcacacttacaacctgttttgaaaaaagctgaagctggggatataccacaatgcaaagctgttgattttgtacagtttaaatatgaattgatactaaactattgtaccaacatctatatgtaccttttactgaagtcttcaaaagtaaatgtgcagaatcatcctctcatcaaacgtctataccagtatcggcagttgcttctaaaattagaaccagtatatgaggatgtcattaaaccacaaatagaactgattttaaatgaagaga

SEQ ID NO: 9331 - DNA, 863 bp, Diabrotica virgifera
  SmartBlast Evalue=2E-75; Info=Protein big brother n=1 Tax= Harpegnathos saltator RepID=E2BIL2_9HYME
agtgcatctttattgtgattgtagtatagatagtatatggaaacaattttgataagctaacccggagaaaaccacgtgtaattaaaaacaaattcaaaaagtaaatctcattagcttcattttaacaaaaataaaatatcttaaaacaatttcatatattgcctttgcatcccgtgacgtacctcgagatcttgttcaggcctgtcttgtcggtaacccctttgtttgtcttcgaattccctcagtcgctggttgtaacgttcgatctgttcccgcaggagggcgtcctcttgtgcagctctttcctcgttatattccaggcaaccgacgccatccagacgatcggtgtcaatccaaccgcgccacctgacgcaaacgccgttcatgatgaaggtggctttaatgtggacctttccaggttctttgtcaaagtcgcattctttatctgccatatatcccgatgtggggggtgcgaaaaccagttgaagattggtaccggtagcagcaaaagctatttctgtgtggccttctctgcaggcattttgaaacggaccatgcgttcttcctgcggtcgatctctgtaaccggtataccggacttcgctttctctgcttaatcttctgaacaattcatcagactcaaatttcgctttctgatctggcactacccgtggcattttgaagataaacctaggtttaggttgctcatacaaactgatagagtcaaaagacatcatgccggataaaaccgatgcaggatcattcatcgagtgcatattcattattgggtcaatataacacagacagatttacgagaaaatgtcaatcaaattcactatataactatcaacacctcactaggca

SEQ ID NO: 9332 - DNA, 866 bp, Diabrotica virgifera
  SmartBlast Evalue=1E-108; Info=NADH-ubiquinone oxidoreductase NDUFS3/30kDa subunit n=1 Tax=Glossina morsitans morsitans RepID= D3TLM6_GLOMM
attttatatgtctattatggaatatacagataattaattaaatacaatttttttatttcttatccttagatatatcaacttcttctgaagcgggatttgcatttctaaaattagggaattgttcccaaggtgcactcagctcaaactttctaaactcttgagctaattccaagggttcaacaacgactcgtttcttttcatcatcgtacctcacttctacatatccactgagagggaagtctttcctgaagggatgcccttcgaatccataatcggtcaagattcttcttaaatctggatgatttgagaagaagacaccgtacatgtcccagatttctctttcataccaattggcagctttgtaaatgtcattacaggactcaactggggttaactcgtctgtgtaagttttcactcgaatccttgaattgaatctgagggacaggatgttgtatataatttcaaatctatatggcctagatggtacatccataccagcaatatcagccaagtttgagaattgggaattgtggtgatctttcaaaaactgcagcactggtaaaattccctcaggcacaatcaaaacttctaactcatctccagcggttatttgtaccctctccacatatttcggcagacattcagctacatatttaccaaaatcggtgagtgatgatcttgctactaaattgggttttcttactgtgggcctagtttctgtcttgctgtcaacttcggttgatagagttcggctggcatgttgtactagagatgtttgcaaaggcttattgcgagccaattgggataaaagtggccttaaatacattttaagacgattattattgttacctaacactttatccaat

SEQ ID NO: 9333 - DNA, 865 bp, Diabrotica virgifera
tatgactcgtttttaatattgacattagctacaaatttctattttccaaaaataaacttgcttatcatatcaacacaactttcaaattcgctatatattcgatcaatatgaaaataatttacattaaatactaattgcataatatttctcaaatacaagacattggaaaacaataatataattttcattttagtgtaaatacgagatattttactgtctttttaaacatttctttctgtgaactgctactaagttttgatagaaactagacaggattctagatgtaaggaaactgaagctctagatggaccctaatcttaggtttgacacaatctttagtgttcgaatttaaaactgaaacggaacaaacataattttttaaacataagtagatttaacacagtgtgtctgattgacgaatggccatggctgatggctgcatagatagagagcatcaacgaatacgtactctcactgagagtatatattcgttgatagcatgtacatatatgtatgatcaaaacaactgctgatgatattaatttgttcattttgtcagagggcataggcgtaaccaggatgatcctaaggaagggagttacaactactggaaagggggggggttacaactactggaaggtctctgaggggtatggtgttaagccaggggttataacccccaaaatcccccctggttacacctatgtcagagggaacaacatttttttgctcgtgagagcctctgtcttaggttacaacaaaaataacacttaattttactttcttgtatcagggcatgccattcatataatttcggcccaatatcgggctacgtcggtttcatatttttgttggcaaggcacac

SEQ ID NO: 9334 - DNA, 866 bp, Diabrotica virgifera
ctgcctgtatactccgtaatgtcctttcggtttgtgtaatacactgctccacatctacgcagttttcggattccaattctttcatgatatagttatactcctcttcatagtcttgatatgtttttgcgagctttttaaggactttagcctgttcttcttccagtaataggtcatgaacgaattctacttcttctgccgctgttatactaacattataagaaatttcttttaattcttcaatatcttgcaaaatatgttgaaagtctagtaaagttgccaattctttaaataatgatttaagatcttcttccattcccttcatgcattcggaattgtcgtcctcagaaattactttttctaaaatagagagatcctctgcaacactatggggtatattcataatttttctagttacgtttgttagatcgtatttttcaactaaattatccacatctttttccagaatattaagctctttcaaaatattttccaccgagtcagtattgttctgtacaccagtgatacttatatcaggagtattaagtttatctagataatctttgattatttttaattcttcaaacagtgtttcttcggtactgtttaatccaatgatcttgttaattgcattattgttatttgtttctaattcctttagtttgtcttctgcttcgtttatgtgctttctcaggatcttgactaactcttttaattcatcaagtacatcgtaatggtccaatagttcattgccaatgttttctttctctgtatttatccggttatgtattcgcacaaactcgctgtcatcacaaagtaaaaggacaccgtttacaaatgaaagaaaaacacagagatgtaaatatcga

SEQ ID NO: 9335 - DNA, 838 bp, Diabrotica virgifera
taatgaacattacctacccgttccaaatgcatgcgcgctcagcgcttgacactaacaacaacctcgaagccagtccagccgaaatccacgagaggtcgtcactgtgactcaacatcgcgaacggcacctatgtaagccgttgctcccgcctggcggcgctagtatagttggaggtcaaagttttgactattcgtaaagtttgtatatggtgttttgattacgatttaataaataataaattatggccgaaatatacggatcttggagactgtttgtgcgttgaaaaacgaattgagaaggaatgcgagagttactggaaaaaggaacacttatcgaatgataaactatattaatcatcgtctcaatgttttatttctatagctcagagggtatttatttagtattgactcgctccccacacgagtctgacaactgtgaataatatgatatgtgcgatctgccttacttttttatcaatttaaaattcacaattaagtgcgctcagcattaatttttgtgtttatctcatttaaaaatgtgatattttcaaaatatggccgccatgacagttgcgcatttggtgtaaaatggtttaagcatgggttgagcgcagctgattctgcaatgttgccatatttaaaaaaattataattctttatggcaatatagaatgtgttaatttaattatgtaagtataattatttgggtgtttgtccaggtgaaaggcgcccttaaatttaagttgaaattagaaaaatttagggttaggtttaatcaggttatgtttagtcattttatagcatattttaaaggtaatatgtaacttaaattttcagtt

SEQ ID NO: 9336 - DNA, 863 bp, Diabrotica virgifera
gttggggaaagctttacagagataaatcgagtgatttttcatttttacgtttgaattttttcaactttattgtgcaaaatgttcggttttggacttttgttaactgtttgtgtggtttttggacaatctcatggttcggctatacctatgtgggaatacttaagtaagcaggaaaaaacttctttcctttactcaatgttcgctacccaagtggagaaaatctgtgaatcgtccagcattcaaaactgcaacagagaattgcttaaatatggccttaacaaactaaagaacttgcccgaagaatatttggactcaatggacccctaccaaagaggaggaagctcaatagtttgggacaccatgatggcaggccaccctctagccaacgctatcccccgcccccgatccactactacagcaaaacccaacagttatgaagatgaacctttcagcgactttgacttcggttctcaaggctcagcttcagcaaaaatcgataacgtggtagtagtagcagctccaaaagacatcctcaaccaatacagagtacagccaagcggataccgcccacaaaacattttcagttacttgaacagcattggaagcgacaaaaagggaccttaccgtagattccaagagcaatatcaaaccactactaccagtactactactgaaagagctctagtagatcccatggatgaagggatgtacgacgatgctccacttactggtcctatggttgtaagagtttacccagatggtacaccagtcaaggaagacttgcctcttcctcaagacgatgacttaaggcagtaccaaatgtctcaagtcaaaatccccaacttttaagcttcataatgcag

SEQ ID NO: 9337 - DNA, 865 bp, Diabrotica virgifera
  SmartBlast Evalue=6E-53; Info=Peptidoglycan-recognition protein- SC2 n=1 Tax=Tenebrio molitor RepID=E2RYF5_TENMO
taaagatagtgatatattttcgcacatctttaaagtatgagtagatatacagtcttttaaatatttacatgtattaataattgtaatctaaaaacattgcgatagagaggtgtttattccataagagaaaaggtaacttcgctatgtttacagtttctttggggaagcatcttgtggattggcttcaaaatgaggccatttttcgataactgcatgcactcgatccccgggacattctgttttatcagcttgccgatgtccgataaggtgataatctgcaataattttgtgatcagctgctgcacaagacaaaaagtcttccaatgctttcagttgtacattaggaggattcgtatctttaaaacttcctaaaaggcaaacccctaagcttcttgcgttgtatggaatagaatgcgcaccatgtaaaccatatcctctaccttcgtatatagttccatcaccaccaatcaaaaagttgtaaccaatatcatcccatccattgtgatctatatggtaatcttggatgctttttacaagttttgaacaatcttcaactgaaaaacatgagcgagtggccgaatgatggacaaccacatatggtggaggatcttctcttaacggtctggtacttaatgcttttcgagcgctccattcattgcgagtatatattttagggcattcacaatttgtctgataaaatagtgataacactacacacacaatccacagatatctgctataaatcattgttgacactggcaaaacccaatcaagtatgatgttattgatgttatgaaggttatgaagttcacttttcttattatcaaaaccgcaactgaatattgaatacggttactccccgttt

SEQ ID NO: 9338 - DNA, 865 bp, Diabrotica virgifera
  SmartBlast Evalue=4E-60; Info=Pheromone-degrading enzyme n=1 Tax=Popillia japonica RepID=Q2TIL3_POPJA
ggtgagctctaggacggtcggtttttgtttgagtgttttggtatgttctgtggtatgcaatgattacccactggttaggattagtgatgggctactacagggagcctttttaaaaactcgaaataatagaaaatttagtggatttaatggaataccatttgctaaacctccggtgggccaactaagatttcagccaccagttccaaatgatccttgggagggacaactgaacgccactggtgttcatgccgaatgtcctcaaagagatgtgtatagaagatctcccaaaatatcaggagaagaagactgcctgtacttgaatgtgtatacgccaaagttgtcaaattttgaaaatgatctactacccgtaatgatatggtttcatggtggtggattactatgcggtggtggcaattcggattggtacggacctgatattttgttagacagggacattgttctcgtagtaacaaattatagattgggtccattgggattcttggcaactggagatgcagttgtacctggcaataacggtcttcgagatcaatcattggctttacgatggattcagaaaaatattaggaaattcggaggtgatccaaatctagttaccttatttggtgaatctgctggaggatccagctctaattttcatatgatttcacctttaagtagaggtctttttacaaaagctattcttcagagtggtacaacattatccccatggacctttagtgagaaccaagaaacagaaaaaaattcaagaaagctggctaaagccttaaactgcccaactgattccagtcaagaaatggttgaatgtttaagaaaagtagaggccagaacatttgttgaactggat

SEQ ID NO: 9339 - DNA, 863 bp, Diabrotica virgifera
  SmartBlast Evalue=2E-96; Info=Protein phosphatase 1B n=2 Tax= Formicidae RepID=E1ZVH7_9HYME
atatgcgcacaagtcctcattactcattacatcccaaatgccatcgcaagccagacaaggaactcgtccgatatatcgtccctctcccttacaaatatttctggttccggtgaaacgagttgttcacatggacccattccttccacatttttgtaatcaaaatcgcccaatgctctactcaccgccaaactaccattcactctctgtatcatgacagaacctcctgccttcacaatgcgatccctttcactgggtaagacaggtttgtgatcctgagtcgtgaatattggggccttatcacgacataatacagcacgcgagtcaccacaattagctacatatatattgcgtggcgaaataaaagcacagaccgcagtggtaccactcttgtcttcaccagaagtcatctcgggcaggctgcgcattttactgtccagttctaaaaagcccttgtggatagccttcttaacatcatcctgaaactcttctgatgccataattgtttccaacaaatgttccgaacaatgcacagacaccgtccaaccggcatgtccatcgaaaactgcaaaatacgaccaatccttcagggcttctccaagattaattttggccatgtgagcgtcttccatttccacacgccatccttgcatactcgcaaccccataacgaattccattaccttccccatcttcctgatatttatctgtcataggtttgtcaagaaaacctcccatttcgctttttagtacaaattgagcttcaaatactaacgaaacttcatttttttctaaatttctttaaaataaaatcgtttaattaatcgtaattttacataacaatttactctccccccgtcttagtga

SEQ ID NO: 9340 - DNA, 861 bp, Diabrotica virgifera
ttcatattggagttttcaaaaaagcgcatacagggtgaaattttttctaagacccaaactcgccctgtatattgttaaacaagggggagcagacactttttggtggtcatttgttattccccataggagcctctgtgcggggtgggagtgtgtacagtgcctcatgactcaccctgtatcaaaataaaaacttggatgtggcactcacgtatggccaacgagaggaatcataactttcttatcgtctacgcacggagtgatggtttttaatttttattttatttcgaattaatttcatttatttcatttcgtttcaatttttcattttattttaatttgttctatgatatttttatttaatttcttttatattattttttgttttatttattctttttatccatagcccgcgataaggaagatttgcttccaaaaaattgcattataaatttagtagctatgcttcttttcatgagcatttttcagtgcgtcacaaatgatagaaaaaaaggtaagtccgtgataatatacattctagtgacatgacattttagttaaatctgacagttatcacattttatttgcaattttgcataaaatcaaatcaattgtgtttattgaatttataaaatggtattttctttgatttgtatagtcttataaattgtacggatcatattcgtagatatattatataattcggaaataatgtatttttcgattatagcgccatctattgacaactagaatatatgttataaatgtaaccgacgaaatgtaatcaccgacgtgcgtttttttctgtcgcatgcaatttaatgcgttagaaagaaatcaaaaaactgtgacgcactgaagatc

SEQ ID NO: 9341 - DNA, 863 bp, Diabrotica virgifera
  SmartBlast Evalue=1E-26; Info=RNA-directed DNA polymerase from mobile element jockey n=1 Tax=Drosophila funebris RepID=RTJK_ DROFU
ttatcagttttaattttgttttcatagctaatttgcttcttcttcctgtgagtcctcttattgccgctctggccgctgctgttttctggactgttgcgttgacatgtgatgtgaatgtaagaccttggtccattgtgactcctaaatatttaacttcgttttgccattcgatgggtctgtcttgcaatgttagctgttcttctgggttatctcttctctttttgaagataaccgcttggatcttatctggatttattgctattttccattggatactccattctgctattgtatccaatgccgtctgtagatttcttacagctatatctaggttcacgtgttttgcagcaattgcagtgtcgtctgcataaaggctgatcaatgttccgggtgttcttggaacatctgctgtatatatgctatacagaaggggtgataaaactgccccctgtggtactccagcttccggcattccgtgttctgatagaactggtcctatccggaccccgaacttccggtcgcttaggtacgaggagatgagtttcgtcatggccccgctgtatccataatctttcattttgtatatcagtccttcatgccacactctgtccatatctgttcatagatcagaattacatccattattatctactatttgctttttccaaaaattacaataaatttatatagaccactcatcaacggtaaaaaactgtaaaaccgtggaattttgagaatcaacactgattttaatgaaaatttgggtttaagctcggttgaccctttcttcaaaatctaccaggacacgcgccaactcgtaacttttaatgacaaaaattttcaaatcaaaatgtgcaccggcc

SEQ ID NO: 9342 - DNA, 862 bp, Diabrotica virgifera
  SmartBlast Evalue=1E-121; Info=Transcription elongation factor SPT5 n=2 Tax=Formicidae RepID=E2A5T8_9HYME
aatgggtatctggaaacagcagatggttcccatcaaggaaatgacggatgttttaagagttgtgaaagaacaaactggtttgaaatcaaaacagtgggtaaggcttaagcgaggtctttacaaagatgacattgcccaagtcgattattttgatatggcacaaaatcaggtacatcttaaaattttaccaagaattgactacacacgtttgagaggagccctaagaacagcacaaacagaatctgaagcagaaaagcgcaagaaaaaacgccgccctcccagtaaacctttcgatcctgaagctatcagagccataggtggtgaagttacgtccgatggtgactttttaatctttgaaggtaatcgttactcacgcaagggctttctatacaaaaattttaccctcagcgccgttataattgatggtgttaagccgaccttggcagaactggaaaggttcgaagaacaacctgaaggaatcgatttggaattgtccgtggataaagaggagaaagctgttactcattcattcagcgcgggagataacgttgaagtttgtgaaggtgaattgatctatttgcagggtaaaatcatcagcatcgatggacacatgataaccgtaatgcccaaacacgaggatttgaaagaggcattggtgtttcaagcttatgaattgaagaagtatttcaaaactggagatcatgtaaaagttttggcagggcgctatgaaggagacactggtttggtagtcagagtagaaaataacagagtcgtattgatatctgacctgactatgcacgaaatggaaattttaccaaaagacttacaattatgtactgatatggctagtggtgtcgattca

SEQ ID NO: 9343 - DNA, 860 bp, Diabrotica virgifera
aaacaagtgcccactatacataaaacccgtaagagaactgttgaagaacttgactacaaaggagacaaagaaagcatgctcacgtctactcatattccgatcggggtgtactatgttacataaaattaaacaatcaacggaaatggtaatatctatcttaaagttttcacaaaaatacatatcgtatgccgattgcgtaccttgcacggtttattggaattaagtatacctatttggaaaatcgctcactagatttcttctgtccagtcctaaacatttctgtgtttacagtcacttactgtagattatataataaacattttccacttttctcttaaggggacttttactttccaaattaaaaaaaatctatttaggatttttacgtaaatacattccttagaattgaagaaatactgtcctaaaattttattaaaaaattcgaaatagaaacgaagttaaagctctatttataacactatctagctgagctaaaactcggttgtaaaaaactcgcgtggcgcctgacctgcgcagctgcaacttggcagttgggttctaaaacttataaagctagcacgtgttttatattatttaaatttatctaaaattattgttttgaaaaatccgaaaaaatgcctggatctggtgggcatttaaaaaggcactcgaagtagggggatgcatcgaaagaagtacaatattaacagacaagttaaaggtaatcagtttaccacagaaaacaataattcagaattatccaactcctcggcaaaaaattaaaatctagtgatgcattgcatgcacattacgggaataaaaattggataaatattgctcgtattgctcaagccaataga

SEQ ID NO: 9344 - DNA, 862 bp, Diabrotica virgifera
  SmartBlast Evalue=1E-63; Info="Grpe protein, putative n=1 Tax= Pediculus humanus corporis RepID=E0VIG9_PEDHC"
aaaacttaacaataaaaaagtttactcaaaattttattacaaaatgatacactgtaactaagtcttaaaattgtaggtactgtcttgtgaaataatcaaaaccaccatggactaatacaaacttataaataaatcatctagaaaaataataacacaattatttattttgatactcccactaacgctggtctcagaactcgatcatgtaatttgtatcctatttttgacactatcactactgtgtttggatctttacctggcacctcctgttgaaacagagcttcgtggaaattgggattaaacttttcatctataggattcactttttcaagtccatgcctcttaaaaacactcatcagctgtgcttctgtcatcttgagaccttcgtataaacttttaaggtgaggattgttgctggtaacttcttctttaggtacagtctctgtagctttgttcaaaacatctgcaacatccagtagatctttacaaaagctttggattccataaattttcgcatctgctatttgtttggtcaatcgtgttcttaagttttcaccttcagctaacgcccttttgtatttatccaataactcatctttctgacttgtaagttctgtaagttgtttgttcaaattttcaatatctgcactacctggagacttcgtttctgtctcgctagacgtttgtgcttcattcttagcttcagaagtagttgattttcgatgtgaagaaagagttacatttctggaattgaaaacaatagaatcactaatggtttgtccacactttagaaaatttcttatactaattaatgccatttttggaaattttggaaactcgttccccaaattttgaggttatg

SEQ ID NO: 9345 - DNA, 862 bp, Diabrotica virgifera
  SmartBlast Evalue=1E-130; Info=Cleavage stimulation factor 50 kDa subunit n=4 Tax=Apocrita RepID=E1ZYC5_9HYME
cgcttgagtaggcgaatgagcaatcagtcttactgcgccattatgtcctaaagacatcagctgttttctggaagcatttcttgagttccatgcacacaaagaagttgtaacctcatcgggaaagagaacataatcttcggtatggttaaagacggcttgagcttcatattcttgtttgcctgtagtaccagcgcctgtataagccaccaaacacctactagtcgtcaattcccataatttacaaatggaattcttccccgcagatagcaaatactttccattctttgaaaattgcacggaacaaacttccatcccgtcgtgtgcttttaccaaagtgttgatacacctatttgagacagcatcccaaatcttaatgttgccatctttgctgctggaagcaaacagtttggcatctcgagaccattttaaacttgttacaggtgcagtatgttggtgtttggggaacgaacacacaaagcagtgcagggtgttcatatcgtaaagacgtatgactgggtgcttggttgctacaattaggtggtcgcctaaaggatggaatgatatttctttcaccgattccgattcagtaatagttttgaaagcctttttcacactaggtttagaaatatcaaacagctttattgacatatccctacttccagaacataaaaatggttctttagggtgaaattccaaacaagtaacttcttccatgtggtcataaagagttctaatgacaggatgtccttgctgttcccctcttgaaggatccatttcatctggtgcagatttggccaacattctgtctacatctaatatttttatactagcgtctacactacctgtagcgattagttgacca

SEQ ID NO: 9346 - DNA, 861 bp, Diabrotica virgifera
ggagattgttgaaagcaatcttcttttttttattattttttatgagtggagcctttagaaactgtctttagagcaggttttgtagcagcatggttcgagattaattatattcagttacagtcatccataatattacattagtacttttacctgcatttttcctatctttggaatattcttgagttaaaagcaaaatttctccttcattataccttaattttattaactggtgtgaaggcagttgcaaatgcttttcttcctaaaaatttggccattgagcgagacatctggactttaccatcagtttatccacagggttattgtaatattccctaaattgtccaaagtatgtaataccaagtctataactgcaattgggaacagggaacagtattattgttgcaatacaaacattacttagtattagtaatgtgcttaaaacattctaaaaacattgttccagtaatccaagcatttgtatttactcctttgtattccagttgtgcactttaagcatatgtgtttaaattttttcttaagaatacaaaaataggtgacatattagctattagcagtggcataatttgttacaagcaccattttttcagcgctagttgacttgcctactacttgtttcttcgtctaaaaaaattcatataaatacgacattttataaacttaaaaatttctatttgctcttcattagttcctttaaatacccttacataataactatgtaaagcataaccttaatttctgcagcagaatcgatagtgtttgtatgaaggtacgcgccgaacactttgcgccgtgtgtgcggtacgcgatcttggcgggttccttagattagtacgtgttttc

SEQ ID NO: 9347 - DNA, 858 bp, Diabrotica virgifera
  SmartBlast Evalue=1E-98; Info=WD repeat protein 46 n=1 Tax= Culex quinquefasciatus RepID=B0W308_CULQU
ttttttcttggcttctattttcgctctcaagcttggcatattaacatcagagataatcataggatttaacgtaatcaattctggttgaatcttttccaaaagtgatttaacttcagcctctcgtctttgtgtcttagattggaatggattagcttccaaagtatcgaagttggcttcccctgctcctggtactaaaatactagtaaatccacgagccgttccaacacccaacacatcttcatatgggcaaaaattaaagttacttatagtattattgaatcgatgtcttaaataagccttttttgcaggtgttgtacagcaatctctgtaaatttccacaacatttcccattcctgtagccaataatcttttctgagaaaaatttaaattatttgctgcttgaatgagtttatactcttgaacaggcccctctaattttcgtacatcccatatttttaattctctgtttgatgctgaggtagccatatatgttcctgtaggatcaacgtgaagtccaacgataggtgctttgtggcaaagcattttggctaaaggatctctagaagtaggtgaccaaaatgacacaacacctttagcatgtcctgtacataatgtagcattccacggattttgagataatacagataatctacctaatccggtattgtaaaggccagcgatttgtcctatggatatatctaaccagcctaagtacccttcatcactacaacttgccaaaagaaaatggtaaggtaaaaattccattcttgatactttatttaatctcttcacacaatgtagttcaatcccctgattgtcgtaaatatacacccaatttttctgagcaacagcgaacat

SEQ ID NO: 9348 - DNA, 857 bp, Diabrotica virgifera
tgtacatatctgcactagttcttgagttttatgtgggaagaatgtgtatacttaaaccctccaatcactttttctttatgtatgtggatagtttttattacctagacatacactacttcccctcaaatctcccttttatattaaaaacgtttgggtaattatcgaactacaaattctttctttgagtaggtacctcattggaatcctcataatgcttttcaattactatcagaacctataaattgtcaaacacgcacgattctatgggatttcacattttatcgtcgtgatggctggtgacgataattctggtttctgtaatgaaatacccacgctgtggtcttaaagtcttaaattattatctctatattaatagataaataataaattctattactattaatggtccgagttttattaattcaatggggatgtatcaaggtcctgtggctttctcgtttttcatttcctttaaaggctcgtcttatctcgtctacactgattgaatgtactacatcttcgtctattagatctagcaagttaataacaacaacgaaaacaattaccataaatagttaaaaggaggttaacaatgacactaaaaatgtctcttaactactttggaaaaataacattatagtgatgttatatttgatacggtcacatttattttcatggagaaaaacatttaaaacaaaacatagtaaaagttttggttagtttgcatgccatggctacaaagaactaaaataagacaattttttgtgtaatatataaatatattggcagctgttatttgtcattgtaaatatattggtagtagagtgaacatcagcatcaagaatacctatgcacaa

SEQ ID NO: 9349 - DNA, 856 bp, Diabrotica virgifera
  SmartBlast Evalue=0.000000003; Info=Endonuclease-reverse transcriptase n=1 Tax=Bombyx mori RepID=D5LB38_BOMMO
ggcggcttacatcacacaggtacgttacagacattttagaagagcatgtcttgccatttgcaccatttattggggttgtagggttgtgttatagaggtagtaccttttatcggaacgaccacatcaagcgtcatagacgggagatggttcttgataactggtcctcataagacaactaactctcacttatggctccacgtgccacaccccgggcaactgcattggtctgcaggctaaactaagtgagggtagccagatatggcgataatttaaccgagtgattgccggtataagcaatctcccacttaccgaccaacggcttcgggcggatgagttagtaagtggtagggcactcttttgtcctggggttgagaaatcggcctcgaaggcggatgaacaaaaaaaaaaacggtcaacggcataaggatgtagaaggcaaggggaaaccactacattaaagatcatatacggatatccctagtacaattgtcatggctgtacaaaaaagtaactctgttactgatcatggatatcggagaccaagatccggcaggggaggcaaatcacagatagaccacagggcctctcaggtcgatatcaaacgaaatccctgtgaaatacccatcagtaacacatcgtccaaaaagaagactaaaatcgacaaaaagtgcatgaaggtaggcacgtggaatgttaagtcaatataccaagcaggtaaagtccataatgtcattcaggaaatggaaagacttaacataaaaatattaggattaagtgagaccagatggcccaattcaggtgacatattagtaggccaaacaaagatatactactctggtaatgacaatgacccaaa

SEQ ID NO: 9350 - DNA, 861 bp, Diabrotica virgifera
ctttaaaacagtctataaattttattttgtgacaatataaggtatatgagtaaaataataattgaaataatttaatatttaataagttttttattgataaagaatataaaatctaaaggtaatataaaattattattaggcaatttcttcaacacacttgataggaaataatgtatactcgctcaaacataaacgtaaataatttttcttttctaaattaatgtaagtttttaacatttaaaatctgtatttaactcaggcatgtcatatttattgaattaattaatatagacatctacacgtgcggatgacgaatataaaatcttaattatttttcaatgaaatgacttgactaattatttaagtttactaatggtatattttttatccgaaattggttcatttcttccaaaaattaattaaaatgagtttaaaaattactttttaataaaaatgtattatattaaaatttaaataattaataaaaaacaactatcactgagaaattgatagtttttggccttttatatgttgcgatgatacatatatttaacaatttgaaatactaggatcttggagcttccacaattcgaacattttaacgttatttttggacctgtgaatctatggtgttgtaaagtctagaactaacaatataccacgcataacaatttatgtactttatattaatttaccgaaatcacccctatgttaccaaaacatatttgcttattaattaaaattgttatgttaacgaaaaatatggtcttgtgtattttcacttatgaagcagccgatgtttgtaaatgtggcactcagtataacttagttattgtgatagaccaagggtaaatctttttt

SEQ ID NO: 9351 - DNA, 848 bp, Diabrotica virgifera
aataaacgttaaaatagggacagtgtgtctcgggctttaagcaattttttgaagaaaataattcactctaatgtattagatacactaggtcatcatgaacacatttgtttcggttgtgggtttctcagaatccaagtataaccaaaagtttggagatcttttacgacagatcgttgtaatgactaaatttttaatatattgattttttaaaccaaggtctttctgattcccatttatatcgttttaaagccttcgtctatcttcagtaccaaattgttttgctttagctatatatttaatcttactgcaatcaatgtcggatgctgttgtgtggcctataaactataaatgattgtgtgtgattgattataaattggcgcccaacatggggcacaaacccatgctatcaatgtatgtctgtcgacatagcgagccgaaaaaaatttgtttaatcacaggcttttaattaaaaaattgttcaccaacctttttgtgtttagaactcattgtttattattctatttgatcaatcaaaccactctcaatcgtgtaaagatgaataagtgaaacgtcttcctatatattacatggtaagcattctataaaacctaaatgagacacattgcccaatacccagttctacagttcttcaatttagagtacattattttgcttgaaaagtggaaaaccaggtaggccccttcgaataaaaaaatcgaaccaaaaacacaccttacattgttatcacagcttgttactaatattatttgaattgagattttgttttcacggataaaatgtttgcattatgtaagaaaacatgaaaaatattaacctcttgaacaaat

SEQ ID NO: 9352 - DNA, 852 bp, Diabrotica virgifera
ctaataaacttagacatagggaatgttatatagggattggagtgccgtagtggtactttttagtagtggtataaaatatagggtgttccatttggggttactgagagagtgatgtaattgcgttttggatcacactgtgtttgatatatagagagttagcaatattaatcatgtttgaaagttctgaccgtgaatagagagatatggcatcaattaaccattgctgttttgcttatttttatttgtacagggagttgaactgattttcttataaaattggctataactttgtgaataccctgtataaagtaacaaacctttatatttttgttatgggacagttgggaagagttcaaatataaaataaatacagggtgttccatttaaaaggcctaagtttggtctgccagtgtgttaccgagcaccctgtggcattctgattaattttgtaacgtgaagctcaaagttggctacaatttttgttattgacttttattgctatctattactatagcggatctattgagctttaccctactaatcaaccaccctgtatgaatacgtatgtaaatacgatgatgggcgcgctaataaccggcaaaataacgcaaaatatgaaaaacatagagttgtaaggataacaagttgtaaaataaaaagtagatgaaactagtacaggtggaaacatatgaggaggagtatgtcaactaaaactgccactgttagagtggtagttgccaaactcgtctgatacgtctaaaggtgggaaacaattaatataatgtaaatttttagatttagatcggtaaattttccacctctactagctttatctctttttatctcataact

SEQ ID NO: 9353 - DNA, 858 bp, Diabrotica virgifera
gtcatttattatgggtgatggtataccttcgtcttttttatctatgtctatatcttgttgatagatcttcctagaaaaccttcgtagtgactttgtgatgtctctggagaaattctttttaaatttactaatattttttgtgaatttgtcaaatccattcgactcggtatttcttggttctggtggaagtggagtgtttgtaacatcgtgtcgtaactccacctgctgaaactcagtaatattgtaatattcaccttcactatcactttcaaatgaatcgtagacgatatcttcatattctggtgtatcatcatcatcactatgtgattctatatagaatgatatttcttgactctcgatactatcctcgaagattttgttcttgagtttaggtaagtccttggatgttcgaattaaatcaccgactttattaaaatctgtatcacactccgctttgttttcgcgattgtttactgccttattatcgacgtcattgttatcggacgtattcaaatacacttttgaatccgacgttattgtcacccgatccccgacatcccttcgacgatttttcacataccgtgtcgaattttgcgacactaaactacccgacacagaactatttctcgaatgcgaaccaaggtccattttaggttacactgatgcaactggtcaaccgcacttttgttgctacatgttgttaacaaattgtttgggtttcgactaactaaacacaagacacgatactcatttgctacatgtaaccttcctcaaagcagtgttggtatttttgcgtcacctgactgctaacttaactttcacttaacaaaacgcaggcattttcgctttaaattttat

SEQ ID NO: 9354 - DNA, 861 bp, Diabrotica virgifera
  SmartBlast Evalue=1E-74; Info=Methoprene-tolerant n=3 Tax= Tribolium castaneum RepID=B5U9B2_TRICA
tgaagaactgctactcgagctgctactactgctgctgcttgacaacatactattttgatgaattccggtaggcgttccctgccggtgcatgcccatcatcctcacttgttcgtaaacagaagtctcggatcgtggacctgctcgtttcagcttaatgttgaagcatttcctccattcttgttcaatgtctccttcacattgtaggaaaatctttagacggtcctggtcatcaggagaagtaatgttgaagagagattgacccataagatcagtctgtaagtgtccaagaaggttttcaactgtacttgaaacaaaaacaattttcccgttggccaaaacaattagcaaaaaaccgcccatttgctcgtaaatcaattgttccagaaggatttgatcaatatgtcttggaaaacccatgtttggtactattctactgttgtttaaaagttgtttgatccttaaatgtgttgcagtcagtcggaggatgctggttttatctaaccttttagcacttcttgctaccatgggcactaaagaagctaactctccgatataagagttcagtctgtccctcctttgtttttctgctttattccgttgttcccggctgttgctaggaggagttgtatccactaagaaggcctgtctggtgggtgggtaccaagggttctccatcatgtccaatgtcactgtactactagttaaaacagatgaatacatcactttttagtcaaaacactttaaattatccagtgtgccatttgttctccggaaaagtgaacgaacaacgcataaataccaaacgactgtcggccgtcagcgaacaatttagcgataacaaaacgtacaaacatgtcaacg

SEQ ID NO: 9355 - DNA, 856 bp, Diabrotica virgifera
  SmartBlast Evalue=1E-110; Info=Muscle M-line assembly protein unc-89 n=1 Tax=Camponotus floridanus RepID=E2AYP1_9HYME
aacttcttatgacgcagctcattgagcatgtctagttcattgtacatgaatggtctgaaatcgccacttccgtacattactttagcagcataattgcgaccatttagtctctcaacagcatgtgatgtaattccttgagtaccacgtcccaattcatcaccaatatcgtagaagtcggtgtaaatacgtttcttagttttgattggcgatatgttggagtagtttctcatcttgtaatcttgttcgttctcttcaacatacaacatcgcactagcggacgtagaccctgcgacattgcgggcgctcactgagtacaagccttcatctttcagaatgatgtcgtggattgttaatactgttatatcaggttcgatgaatgcaatcttaatcctgcttgatggtgccaaaggtttccagtctttgtaccatttaatttcaggatatggtacaccgatgattctagcttcgaatttagatttacctcttagcattgagtaatcgatttctggtcttctaatgaagtagggtatttccgcaatttccaaacggaccctttggcgtgcttctccgtgttcgtttctcgccactgcttcgtagcaacctgcatccctctccaacattttattaataaacaacgtagcctgcccgtttctagtgtagctcatatcgaatcgacctcctggttcaataagttcgtcgttaaagtaataagtcatcttcggtttcgggtatccgtacacgtaccagaacaagttagtgttctggtctttgacaccgtattgggtgtcgtgttcttggcgcaagatctcggagcttgggccatgccatcgtggggaggtctttcgatatcgaagtc

SEQ ID NO: 9356 - DNA, 857 bp, Diabrotica virgifera
  SmartBlast Evalue=6E-51; Info=Nuclear migration protein nudC n= 13 Tax=Eukaryota RepID=NUDC_MOUSE
tgtttgtgcgaaaattgcgtatgataatattttccccggttgtttttgaatattttctaattttgaacaaaaagtacacaaaatgagtggtgacggtagtgacactgaacaatttgatactttatttctatctgtagctcaatatcatccacagggaccaacacagctcctggatacatttgtgagttttttgagtagaaaaacagactttttcattggcgccaaggaaggagaatgggaaaagttagtgatggacacattcagaaaatatgaaaagtcgagcagggcaaaacacgaggaagaactaaaagaaaagcgagaacaagaagctcgaaaaaaagcagctgctgccaaaaaggcagaagcagaaactgtcaagcctgctcaaatcaccgaattgactgatgaagaagctgaaaggcttcaggctgagattaatgctaagaaaaacacttctgataaagctgaaagttcttcaaatggtccagaagctgcaaccacagctaaaaaagtaggagaagacgaggatgaatctgaaaaaggcaagatactgcccaactcgggaaatggatgtgatctagagaagtacaagtggacgcaaaccttaggagatattgagttaaaaattcccctcaaagtaaacttcagggtaaaacagaaagatctcgtagtaaatatgacgaagaaacacttgacgtgtggtatcaaaggtcaaccacctatcatagacgacgattttccacacgagatcaaattggaagagtcttcttgggtgatcgaagatggaaaaagacctattatttacttttgaaaagataaataaaatgaattggtggagccaaatagtcaaatccgat

SEQ ID NO: 9357 - DNA, 858 bp, Diabrotica virgifera
catgcaacaataatatatttattttaaaaatgagtaacagaatattccatacatggattttaaaatttaaatggttaaaaatttaaatggcgtaaattcaacattaattgcaaaatttaaatactaaaatagtacacagaaacaaaaagacaatacttagtttttatgagtaatattaacacatggttaaattaatatctattagtaattatcaattcaaaaaaatctcaaatcagaaataatacttgtttagtcaatgtactcaattagaaatctcataaaatttaatacgaaatgttttcctaccatcgtcttaaaagtatatattaaaagaattacatatgtttagtgtgtaaacataaaataacaaacacatatttaagcaaaaatccctctaggttttttatatatatcctccctttcaatcaccttcacgaagttctattttttcaataactgtaaaatcgtcgaagtttgattccgtaagaactccaaaatattaatttaccgttggtataaacattttggctcaaaagtaactgcacttttttaagaataagggttaagttaagtcagatggaaccaaagtaccaaagattaaagttcggggcaatctctcacccaaaaaccacttcataatcttcttcttcttttcgtgtagtcatgactgtctgtttttcaatgtgcctccagtaagttgtcattccatcgttttcgtggtcttcccactgatcgtcttctattggggaaccgtctatcgctgtcctatttgttgtctttcggcttatgtggtcattccgttctactcttctgtttcttacccagttattaatgttgtccaccttgcatctccgtcgt

SEQ ID NO: 9358 - DNA, 842 bp, Diabrotica virgifera
aaagtacaaaaagaaagaatgatctcatcgttttaatacatgaacttgagaagatgttacagtagaatgtgtgttgtcatgtgtatagtgtaattcatagtgatttttcactttttgacagttggaacttctaaaaaattcgtcacttttttatagattaacgtattgtaaataaaacttaatatgggttttttttcttctatttctaatgtattataataaaaaaacttagtagtaatagttttaaatgtaaatactaagtacatcttttgtaaaagagaaaacccaaaacaaattgactggccagttggttgttaaaaccagtgccaatattatcctgcattacggaaccgctctttaaaatcaaattttctctctattcgtttgttagaacctcaaggaactcatatttctgcacgaactctaagaaaagtcctacatgaaagtggtttacgttctcatacgccagtagcatgcactaaattaacagcatctcatcgagctaaccggatgagatttttaatgatggactgttcagcaatggtatggtcagtaatgttttctgacgagtcccgttttttgcttacgatctccaggcagacgcgaacgtatatggaggatacccagagactgatttgcagcttactgtatttcacctagaacgccgttttgtggcggaggtgttatagtatgggtgggtatttctttcaaatgacgcactgaattaattttcatcgaacatgaaactaaacagacagatacatacgaaagtgtctggaggaggacaatgttgtcccctaagcgccttttcttgaggatcatttcttatgtatgcatgataa

SEQ ID NO: 9359 - DNA, 858 bp, Diabrotica virgifera
  SmartBlast Evalue=1E-91; Info="Mitochondrial dicarboxylate carrier, putative n=1 Tax=Pediculus humanus corporis RepID= E0VIX6_PEDHC"
agaatgaagtgaggtaaccagacaaaaagtactgtaaatgctcttacctgacaagaaaaacaatcccacaggagataaataataatttcacaggcaatagcagaaaaaactttataaatccttactaagatgacagagaaagaaaacaaattggccagatggtacttcggaggtttggcttcagcaggagcagcttgctgtactcatcctctagatcttataaaagtgcatttacaaacacaacaagagggcaaactttccatagttggtctgacgataaatatcgtcaaaaaacaaggtattgcggccttgtataacggaatatctgcctcacttcttcgacaattgacttactccactacaagattcggaatatatgaagtagccaaacaaaatactgaaagcgatacttttgctgcaaaagttgctatcgcagcaattgcaggtggttgtggcggtgtagttggtactcctggtgatatggtaaacgtcaggatgcaaaatgacatcaaattacctccagaaaagagaagaaactataagcatgctattgatggactaatacgggtatacagggaagaaggagccagaaaactattttctggctgttccatggccacatctagagcagtatttatgacgataggtcaactgtcattttatgatcaaatcaaaaagacattgttgatgactccatacttctctgacaattcgctgactcatttcttgtctagccttagcgcgggcgctatcgctactactctaactcaaccacttgacgtcttaaaaacaagatccatgaacgccaaacctggtgaattcaaatctttaggcgatttaatactgtacactgccaaa

SEQ ID NO: 9360 - DNA, 856 bp, Diabrotica virgifera
tactgatcatagaaccatatttatgagtttctggtcaatgcggcttcatctaactgtcctggtcattatctctagtcatgaaacttcgaataatgaactagtaaccgtagatcgtagccaaatgccgttacaatttctttttcttactggatgacctctgtagtatgtcatttcctgtgttacgtttactttgtaaactactgaagtacatatgcaattcgtaataccttgatcgatatatctgctgaattttgataatgtgtagataatatcgatgaatttaaataacccaagttcataattcactccaggaaatccacgggatctagtatgtttaatagatagagattagttggtgaaaaaatcttatcatgttcttgttgtttgataacttgtattcactatcaaaataccgagtatatacgtaaacatattttttaatataaacacttcaaagtatacatgcctaccgtctcgttggattctaggatgtgtgtagcaattgtatttttgacaagatatttagacgtaagaacaactgtacataatgttttttagacagagcattttctagcacaggtcttttccaaaacgtaggagaaactaggatagtaactacatagttttacacattgtaaaaagtaatattgaatgaaaaaaaaaacgacttttctacatacagcagtgaaatgtgtattgatcttccctagccaaaatggcttagaataggtaaaattagtattttattttttgatgaagatctacatagacatataggtagttgttttaaacactacatgtaaaagatactgctcataatcaaataaattcttcctaaatcaacatctataaaatt

SEQ ID NO: 9361 - DNA, 859 bp, Diabrotica virgifera
ggagagcagacgaagaggatccggaattgtcaaaccacttgcatcaacttcgtcttcatcgagccaatcggcatcctagacgataacctcacaaaaagtgatagataccacaaacttgcttggggtttgaaggattcagcagggtggtggcaggaaacccggaaaacagattttaatgcaatcctcgagcgagaacagcaggattcgtccgcgcttttaatttattgcaagaaatattgcgattcacggaagtgagtgatatataccatgaaagattaggttctgctggatcttacaggctatcttcaggctttctatattcccctgaaacatagttgtaaattttcatttcccacccgactttggcaagtgtctccccagcgtgctgaaaattatctttttccaaattatcatcaataataattcattttttatcgagattagcaaaatgttcatgctgcatcactagcttcacggtgttcgatctgtcatcattaaaggttgaatgcagtcaccgataaaaatggttcgaaatcataagcatgggtgttcgatgtggaggatgtttccacctccttatagaatatatgtgtgtcagtccgctgtaaccagcagcttcttccttaccaaaaccgtcaaaatccacgttcgtactggcgaatacagaagaaataaatttgtatataccgctctgccacaacccagtcatggtcacgtaaaagtactctgtattccatatgcactaaaagaaggcactgacttttcactaccagtaaagctaatggtacacgggtcttatcatcttgagagagaacaaatacttgctgcggttccaaaagcaacgcgagaaattccaagg

SEQ ID NO: 9362 - DNA, 856 bp, Diabrotica virgifera
  misc_feature (128)..(128): n is a, c, g, or t
  SmartBlast Evalue=1E-44; Info=ATP-binding cassette sub-family G member 4 n=1 Tax=Camponotus floridanus RepID=E2AAR3_9HYME
tctcaacgtgcagttgttgtgtgacggttgaaatattggaatctgccggaactcgcgctcgcgagtattgttgtgttcttctccgatacgtatccatttcaaacgttttgtgtaatttttttttttgngtgaagttcaatgttaccatcttcaggatgattggaactgaggaaattacgcgttatatcgacgatgacaaaatcaaaatcaacccatcacacaactacactgcaccatcgtcaataccgttgacagaaaatgtcaacatgacagacaccaagagcttagccatcaactacaacaacaattaccgttttaaaagtacacaggaaaatatgagcagtgtattccccaagaagacggcagtagacttgaattttgaggatatcactttctactccacgtcatggtccattacgaagttcaagaaagaaacgaagaaaattcttcatggggtctccggtcaattcaaatcaggtgaactatctgtaataatgggaccttctggtgcaggaaagagcactcttcttaatgtgttagcaggatatataaccaaaggaagcaccggaacagtaaaattaaacgatgtcgttcgagaccagagcccccggtatagaaaattatcagcttatattccacaagatgaagaacttagaatggctttgacagcgaaggaggccatgacgtttgctgctcacctaaaactaggttaccgtgtttctaacgattataaattcaaacagattgcagggattccgaaaatgctgggtttagaagaatgccaacatacactaacagcacaattatctggtggacaaaggaaacggttggccgtggcactggagctacttagtaa

SEQ ID NO: 9363 - DNA, 858 bp, Diabrotica virgifera
  SmartBlast Evalue=2E-53; Info=Ca2+-binding protein n=1 Tax= Glossina morsitans morsitans RepID=D3TP68_GLOMM
gagaattaatcattaatcataaatgaagttacctctgttgtaaaaaattatatagacgaattgaacaacctatttattccttaaaatatagttataattataatacctgtaataatgtatccaaatccagcatatggagcttacaatccaggaggttatggtggtcaacctcaaggaggaaattatggccaacctcaaggaagaagttatgatcagcaccaaggaggaggttttgctcaacaacaaggtttcggccaacctcaagggggttttggtcagccccagggaggcggtttcgctgcatcaggtggctatggtcaacccaatcaaataaaccctgatgtccagtcatggtttcaagctgtcgataaggatcgttcagggcaaatcagttgggaagaacttcaagctgcattaatcaatggacaaggtgaaaatttctcccccacagcttgcaaattgatgatatccatgtttgatattgatcacagtggaactattggggtaaacgagtttcagttgctttataactacattaaccagtggctagcagtttttaaaaactatgatagagatggttcaggtagtattgatgagacagaacttacacaagcctttcaacaaatgggctttagattctctccagagtttgtcaaatttttgttagttaaaagtgatcttaaaacccatagcaggatgtctgttgatcagtttattgtagtatgtattcagattcaacaattcacagaagcctttaaaaagaaagatcgtgaactgaagggagttataacactaggttttgaagagtttttgggtattgccttgagttgttctgtataattaccatatgtatctcag

SEQ ID NO: 9364 - DNA, 853 bp, Diabrotica virgifera
atttcattagaaagttttatgtacaagaaatgataaaaaattacatccagtgtgctctttttccgtcatagtcctttgttccttcgtatatgttacgtcgtacctttctttcgcgtcattccaatatctgtgtatctttctgacttaatcgatttgaatgattaattctgtctcatcgagattgtctactatgaaatagtatcctctaggtagatgctagtttggtatagtaacatgtacagttttgtatttttttatggtttgactatcggatccttatttcccttgatcaggatcctatgctgaatgcatcggaggtttacatcgtagtaggggctgtgtaacgtgtcaaatctttaaaaactgtattacagaatagtacaaattatattaacataatttcttgtaaagtagttcccttcgcagcatattcacttattccaaggtagtttccacttctagagaatgtataaactgttgaaagactgttttgtggaacgctattaccttatccagcgtttttatttaatatttttaatagtgttaatcctttgccttttcaaaaaactcgttaaatttgaaaatcaagaaaaaatggtaagcgctaggtctggtgagtaggacagctgattgatgttgattctgagaggaatcacgaatgagtaactcagaatcaactaatgcgttgtagtggttcagcacttagtcttcattttgccacatcttaatcttttccttaacacagcatcacacaaatttcttagtgcttgaaattaaccaaaacgactatttgtttcatctcatggaagaaactcgtaatagaccacacacttcaccatcatcttggtgctac

SEQ ID NO: 9365 - DNA, 858 bp, Diabrotica virgifera
  SmartBlast Evalue=9E-38; Info=Glutamine and serine-rich protein 1 n=1 Tax=Harpegnathos saltator RepID=E2C9J9_9HYME
agaaaccgagaacagacaaacctcccaaacctgaaaaagaagagaaagacataaagataaaaaggacaaagaaaagaaaaaagataaagactctttagaagatttgccgcgaagagaatctacgaaacgcgtagcaaagaaaaagaacagtttagcggaagtgggaggaaaagacgacgagcctgaagaacctccagagttccaggattctgattctgatccagcgtggactccagccgccaataacgatgaagaggaaggagcggtagccgttaaaagaacagacgagggagaccattgggcagcaaatctaagaaaacactcaaaaacttaatatcagcggcagctcagggagctggtattggcgaaggcgatgattacagcagcgatcattctcacaaaaagaaactcctcaaaatcaaacagccgcaacaacctcagcagcaaaatatggcgccaacgttggaagataatatcgccgcttcattacaaaacagtattccgtcagcaaatgatgatgagccgtttaaggcaggagagttcgtagtaattaagtctgaacttaacgaagaatggccagccatatggagggtcgatggcaaaacccttcttcaaaaatatgaaccgttcgaacaaaacggtgttactttatataggaatatatcgacgtatacatcttggacgccagaaagcaaaaagcaatatatggtagttccagtgaagtatagatcgcagggccagctagaaacgattgtagagtttttgaaacatgagatgaatatagtcgatttcgaatatcaagatcaatgcatgaagcagttcgaatcttaccaggacaattttgaggtgtatatccag

SEQ ID NO: 9366 - DNA, 862 bp, Diabrotica virgifera
  SmartBlast Evalue=2E-53; Info=Synembryn-A n=1 Tax=Harpegnathos saltator RepID=E2BFK7_9HYME
cgcagctatcttttgatatcctcatcagatttagaaaaaaacatggattttgcgtaatgatgtcatcaatctgttgacgaatatgcccgaagaaacttattctgagttgctgcctccagtctcagagtcccaccaaattataaaatcgttggagtttgaaggaaagaacatgaccgctatttacgaaatgacaatgttcttgaaggccaagtttaatgatcaacctgatatctataaccaacatgaaatcctgtctcctatagtgacagttcttctaaaaggagcaaccactcacaggcctatcagaaagtttttaaggaatcaaattttaccacccctaaaagatgttcacaccagacctgaagaaggcaatacattgaggaaccatctgtgcaggttacttaccactcctgtcactcaattgcgagatttggttgccgatttactgtttgttttgtgcaaaaacaatgtggcccgtatgataaatacacaggatatggcaacgcggcaggtctttttgctaccaaaggtgtcttagcaggtggacgttacaaaggtgaagatgattatgattctgaaagtgaggacagtgatactgacgaatataacttacataaacatggaataaatccagttattggttgctatgaagagcctcatcctagtgcttcagaacaaatgacagaggaacagaaagaatatgaagccatgaagttagtggtacttctggatagtctaatgaaatgtggatcaataaatccttgtgtagtaggcaaagacggcaagcctgaaccaataacgcatgttctacagttgcaagaaggactcaaggaaggaatggttaaatttttaaacgaagaca

SEQ ID NO: 9367 - DNA, 847 bp, Diabrotica virgifera
gtgagaagtgccagttgatttttaatttcttggttgttgaacttgtttggtgggttcgcgaatttaaaaatattaatcttcccttcagatatttgacatttacaattgtacatttgacatggatactcagggtaatgtacttacttatttattcagtttatgcagttgtgttcagtatttagttttagtatttgttaatcattggtatataaagtagataaaataaaaattgaagttgcatcaaagtgtcggtcttaaaaaacatgtacgtcacgcgaccgaaaattagtgtttttcaggtctccccaatattgcagggctggttgtggaatctgcttggctcgaaaagaaaaataccatttcccggtcttgtaacgtaaataactattacttggataaagttaataaattaataagtcacaaaatttaacaactgtatcttaggtaactgtaagttaaaaatacacaactttataaaaactaacaatactgttaatttcaccattgcaccatcaatatttgtatcatttttagatattttttcaggccataagaatccttaaaacgatacttcaagatccaaattacataaatatgtatgttcaacagcttgaaacaaactaatcaaaatattttctctcacaaaacaacccacggtattattttcatgagcaagtatctacaaaaattaaagaatatttgaatgttggagctgagtccaattgtagtaattttattttgatgatattttggcaatacccacataacaatgatgttcgtatcatgttctaagcatatactaccaacattcgtcggagtatattcttttaagtacaagcatagcttg

SEQ ID NO: 9368 - DNA, 856 bp, Diabrotica virgifera
  SmartBlast Evalue=1E-152; Info=SCP-like protein n=1 Tax= Diabrotica virgifera virgifera RepID=D7EYY3_DIAVI
caagtaggtatcagaagcaacacaatggatagacgcatcaggctgttttatttgcttttcgtactttatactgtaaaagcccaaactgattattgccaattaagctgcggtactactctacagacggtgtgcgaaagaaaaaatgtgagctgcggagctggaccagattgcataaaaaatttcaaacaaatgtcattgactgatagcgaccgacgactcgtactggacgctcacaattatttgagaaataaagtagctacaggacaggaacccataggacctcaaccacaagcgtcaaatatgaaagctctgagttatagcaaggaactggaatatatagctcaatgccacacaaactcctgcaagtggggccacgacgcatgtagaagaactcctgaatggggatgggtaggacaaaaccttttcttaagatcttacaaaggaggttctataactacaagagatatgttaaattcgtcgatatatagtttgtacgacgaagttcgagacttcaatccgtcgtgggtttcttcattcgatacccatggaaaagagataggccattatacagcaatagtgtgggctcgcacacgatatgttggctgcgcaatcactttcttcgtagacgacaagggctgggatgtatattacctagcttgtaactacggagaaggaggcaacgttaacggatggtcagtgtacgaggtaggaactccagcttcaaagtgtgatggcttgcccaaaaattcgaaatatccaggactttgcggacctgataatgtttagaaggattagtcgactgtatatagctaattgttttcataagttatcagttataaaaataaagcaaatattt

SEQ ID NO: 9369 - DNA, 857 bp, Diabrotica virgifera
atattaaaaatgataatcatcgttccaataagtacaaatcaatttttgtatagtagagaattgtgacagggagttagttatatttttcaaaaacgaatgttcttcaaaattgtgtacagtataaattgtatggttggataaagttttgttctctttgattgatgtttgtgaattagagaaacgtttataagaacacttttctgttatatcgggtgtatttgattatgtgttgctatgttgtatgtgtatacgatgtttgcactgttaatttttgaaaggaatatcttatgatttttattagaatattcgattatattgaaagagcgattgatattcaccaaaataatcaattttgctaattaatattttgcattgaattatgacagcgtctgtgcgagcttgccaattttttgtcataagtttaaaacattttaaatgattttcagttttataaatattttgatagagtttccaacctcaaccaactggtatattattacaatgacatacgataaatgtcattaaaatataaatacatataaccataaacataaataaagtataattatgtgacgacacgggccgtttgaactattttaaatacacaggagattttaaatttgtacttctaagttattatgagtttttgaagcgtgaaattttagaaatctcatttttaaacaaaactgaacattattatgtaacaaaaaaaatgtgtaagtttcatattgctaatattataaagtgtgacgtactaagtctcgatcatcacaattaagtaagtgttcaagtgttgttatcaaaattcaagtattttagttgcatattatgtcgtatatttgacaatcagtaaccat

SEQ ID NO: 9370 - DNA, 844 bp, Diabrotica virgifera
cgttcaatttacttgaaaatttaatatttaaaaatatagatctgtggttgtgatcattacgtagcccaattatttctcaatttatattcatttttgtatcaaaacccaattcaaggattaaagaatgctataatagtaaaacaatagataatgagcaataaataaaaaaaatgaagatagaaaacaaaaaacacagacctaaacttttcttttatcttcaagtaacgttcggtttgttttcttgtgtaacttttacggtatcgacttttttttatggattaacaacaatttcaattgaagatacgttttttttggtatttctattgtcacttcggaaatgaaatttgtattttcagaatggtctccgaagttaaaattgaaacataaaaatgaacgtatttttactgcaattatggtcagttcccatttaaaaaagtagataatcgatattcaaagttttgtgtgttctccttccgtcaatttcttaattttcttttctacattctctagtctttctttaactgtgtttttcctcgacatttccatctataactggtttgtagttattctttctttagcttttttgccttctccagatttgtttaaatttttctagttcttgcaatttttccgcattgtcttctactttttgataacttttaagtgattatcactggtcttttggaaaatacttgtcgaggaaatttagaagaataaaacagaagatattgcgctgatccagccaatcagctatctttcactttttggctaagaaacgcaacgagagagagagagagagagagagagagagagagagagagagagagagagagtagagagagag

SEQ ID NO: 9371 - DNA, 857 bp, Diabrotica virgifera
gaggtcagatactttgtttttaatcgagaattccctgcagctatccttgctgagacatatttttctatgtggtcatctgtgattaccgccctcagatatttaaacgcttttactatttcgaagttgtggtcattaatagttatattctgaaaaattcttactcttggtcttggatttttggttactagcatgtatttggtcttctctcttcatttattcgaaaccctagactaaatgtttcctccttaagttgtgaaaatacctctctcgaggttcttgtagactgagcgactgcatctagatcatcagcaaaggccagcaatacttttgatcctcgattcgcaaatccccgtcagctcagacgatattttacttattgcatattataaggccaaattaactagcaacggtggtaaggggtctcgttgtcgtaagttcagttttttaagagtatttttggataggaagtaggttagaataacccttttgcttgcctgtagtttaaaatattttcttaatagactgaattaagttctttttcctactttcggacatcgtttttgtaatatcgcagaatagttctggcccgacaaaaggactactagctccttctctagtaagtattacttaaggcattgcttgcaattccatataagactttcatatatgccgttctcaatttaagccagcctcgacaatgtagtgtactaaagattagagtagtttaaaatctctactgggatctatgagtgaaaatcgcaacaattgtttggtagtctcatacatgccatgcttaactagacatccgaatattaagcttcgactggtaatagtatatactacaagcgccaattatt

SEQ ID NO: 9372 - DNA, 856 bp, Diabrotica virgifera
  SmartBlast Evalue=7E-62; Info=Cellulase n=2 Tax=Apriona germari RepID=Q8I815_APRGE
cactattacgtacattttttattcaagcgatgatttttattatattctctttgctagcctttgttggcctagctccttctatagatgctttagaactaactccagttgaagggggtctaagtggtaatggttccacaagccggtattgggactgttgtaagccagcatgtgcttggccctcaaatgttccgcatagtccaaggccagttactagttgtaaagctgacggaataacaccaataaatccagacgctatgtcaggttgtgaaaatggtactgcatatacgtgcacaaatcaacaaccatttattgttaatcaaacgtatggatatggatttgcagctgcttatttaattggtggatcgagcacaaacaacttttgctgtgcttgtttcttgcttaactttacagatcaaataaaatataaacacatggttgtacaggtaacaaacagtggtaccaactttgataaaaacgagttcgtcattgctctacctggaagcggtgtcggggatcacccagaaggttgccacgatcagtggaacgctccatggacaggatggggtgaccaatacgggggagttcacatgagatcagaatgtgtgacgctccttccagaagaactacaagagggatgtaaatttagatttgattttatggaaaccgcggcaaatccactggtttcattccaacaagtagtttgtcctgatgaacttgtaaaaattagtggttgtagaattcccgaataatattatgatcatcaataatttttgaatgttttatatgtaaaaatatactaaaatattttatacaatacgtgttccttatattttatataaatgaattttctggtttt

SEQ ID NO: 9373 - DNA, 857 bp, Diabrotica virgifera
  SmartBlast Evalue=1E-44; Info=Putative FK506-binding protein n= 2 Tax=Suberites RepID=Q6ZYL1_SUBFI
cgtgccgctaaacgagcttacgccatttttaaatttccatttcatttctttttctgatcagacactaagtcacgtcagttttaatttaaataacttaccaattttattaacgcaaccatgggagtaatggtagacacaattacacccggtgatggacgtaccttccctaaaactggtcagtttgtttctgttcattacactggtaccttggaggatggacaaaaattcgattcctctcgagacagaggagctccttttaagttccacattggaagaggagaagtaatcaaaggttgggacgaaggagttgctcagttaagtcttggacagagggccaaacttacctgcaccgctgattatgcatacggatccaggggccatccaggaatcattcctcccaacgcaacactcatctttgatgtagaacttattgcaatagagtaaacttaagattgccttagagaatgttagatgatgactacatatttctaagagtaagatttggttttatttagaactgaattttacacggtttgtgaattttatattaaagttattagaagtgtagaaagaggtaatttttttatttagcatatcgttgttttcataagcttgacatcaaaatgacaataaaaagcacaaaccgacaaagaaaatgttgtagtgtaaattcgtctaaaataaaaacaaataatagtcattaacaggttaattttgtgcattttttcagtatatttaagtccttgcagtgttaaagtataatttcaattaaataacgaaagtgttctgatactttcacatttcattgcatttataggtgttgtgatgttctaataaaaagaatttgatgtcaaaaa

SEQ ID NO: 9374 - DNA, 854 bp, Diabrotica virgifera
ttgattatacactacaatgtactgtataatcaatattattatatgtcatattataataatgttgttgttaattaatatatttcgacaagtaattaaaatcgattaatatgatttatataggataaaaaggtatagatatattatctgtataataagcaagtacagttacaagttataaactaataattaataatgcatattatgcaataatcgaatccaaagggccggtacggttaactaaccggagtttaatcgagaaaataccggccctaagaataacagacttcataaatggaattataattattacctataattataataataattaaaattgcatttattaagtctgatattcttacggtcggtattttctgtcccgatagacaccggccctacctagcgtcaccaaattaaaatttggtaacaccaatacgcggtttcagagccatcgttcccgcaaaattttcagagacgatccagtcaaagatcctactatcgttgccactcacagaagtggtaaacggcgcggcgcacggtaagggcacagtataataaatatggaacctctttatactgtgcaaccgattttacataaactcgctgatattttcgtgcgtctagttggctattttactgaattaggtagatactattaacaaatatttctatttttaaaaaatataaatggaattatttcatagtagtcataaaatatttatttacaaattttaactgttaccaatggtaacaatggttacatggacgcttcgccagtgcttaggtaccatccgtattcatattcatttcagataagtccatgtcgcaaacaaaaaacaagtaaaataaacata

SEQ ID NO: 9375 - DNA, 853 bp, Diabrotica virgifera
  SmartBlast Evalue=1E-127; Info=Paired amphipathic helix protein Sin3a n=1 Tax=Harpegnathos saltator RepID=E2C8T8_9HYME
atgccttggtggtcaagactctttaaatagtatttttcgttttgttccctccaaactttattaaagcctttttgtgcttctcgccattcttcttctttagctttaagtcttcgcagcaccacaggcacagctacggcaggatttcgcttcaagccatcaattatgtcctgtgctttatccccatatattcttctgattgctctttgatgcagtgtgggagagttacctcccaaacaatcatctaatttgaacttgttaagatcgtcagtgttcattctgcccatctttttgttgatcccttccaaaaccctgatggtagaagcatttacttcaataacaacatccaattcaaaccgttcatcttcacaacgatacatatattcctcatactgagttttgcgtgaactaacaaaagtactatcttcagaccatgtaggaaatgacacccactgatcattcagtacttccttgcagagttgcgtcctaccggaacatttcaatccttcttgtgcctttggaatgatgcaataactagctccaagcctctttgcagttgccaaatcaatttccagggcatgatcgccttgaggacgctcgtttctagctacgttaaatagtacgggttcactttcattttggcccataaattcacggaaccaacgaagaagttcgggaaatttgccaagaaagggtgtaactatttgaataagttcggactttgaaacaatttcttgattaaagagtgtgaggcaacgtaaaaagttgttgtaaacttcttgagaacggacagcttttcggaccttatcaaaaaatgcgtaatcgtttagagttccatattttccagcctcactta

SEQ ID NO: 9376 - DNA, 857 bp, Diabrotica virgifera
cccggaaaacaagcttggagccaattttaatgacatttttgctgaaagctcatttttgtgaaaatgttcagcgttaattagatcagacatttcttggacggtgtattagtagtattgaatggcctgctagttcacccgatttgaatcttaaatatttttattgggaatacttaccagcaagtgttgcagagctaaagtaaaagaattatcgatgaatcgatattaatttatagagaaacataaagaaatgtaatagatgtattctatcatcatttacgatactgtcaaattaacaacgaaggacattttgaacacttgattaggttgatattaatttagcaatgtagtaaatttttaattcttatgttcaaatttagttgtaagtagtttgaatcaaaaaatcgattgagacgattaggagtttctagacctttctttttaagatgttcctatgtaaaatcgaaagtatcgtgtacgcttgaactggtattaaagcggatatttcaataaaggtataatacatatactgaaacgtttcaaatatgacttggaaacgtttcagtgagatcgtacatcattgccgatggttttgcgctgtgatttgcctaaaccgtgtatccttttgtttcttgagagtcgttgcttgtcatgatactgattactgaggtttacatgaatcttttaccaaggaaaatcgttaaaaaaacttacatctgactataacttcattttcgtccaatacgactcgcatagttaacttataacaaaaaataaatgctatttgaaaagaataaatacttattttacctgtatcaccattgttaaggtatatcggttgattctcaagtgtagacagc

SEQ ID NO: 9377 - DNA, 855 bp, Diabrotica virgifera
  SmartBlast Evalue=3E-81; Info=Titin n=1 Tax=Harpegnathos saltator RepID=E2BM23_9HYME
tacaacgaaattaacaataaagaagaatttgaataagaaacaaaaaggaggaaagtatgaagtgcgagctaagaatccaagaggtgaagctagatcctctggatcagtacaagtggttgagcagccttacgacgcacaaccacccaggtttgttgaacttattaaaccacaaaaagccactttaggagatataataatattagaagctacagtcgaagctattccagaagcaacattccagtggttccacgagaccttacctctagaaaccttagaaaccagtcgtatcgttactaaaggtaataaatcagttttattaatatcacaagtgactccagaacttgccggatcaatcacttgtagagctgagaacgtagcaggctcagtgacatgtactgcgtcgataagaattattgaagagactgaatacgaagaaaccaacgaattggaatatcccagattcgtcaaacgactatctcctgtaagagttatggatggcgaaaaggtcgagtttagttgtgtagtcatcggtaagcccgttccaaaggttgaatggttccacaataacattccagttaaggaagccaaagatgttgtcatttatcaagacaccgaaggtttatgtacgttggccataactgaagtgttcccagaaaatgctggagaatacacttgtgttgcagctaatcgaatcggtgaagctatttgcaaatcctctttgattgtagaagcttatgagtatgttcctgattctgaattgggccacatgaccggttccgaagaggatcttttggcagataagactataagtgagactgattacttcccatcagacagtgacgtagaatgtgcccc

SEQ ID NO: 9378 - DNA, 854 bp, Diabrotica virgifera
  SmartBlast Evalue=5E-42; Info=Small heat shock protein 21 n=1 Tax=Gastrophysa atrocyanea RepID=Q3LGX2_GASAT
attcagattcagtcagttaatttagaactgaaaatttatattcgcagcgcgaaaaataagtaatttacaaagtagtcgtcaagtgaaaaatgtctctgataccgctaccatatttttttggcgatggaccctacagcagaccatcaaggctatttgatcaacattttggtcaagttttggaaccggaagatttgctacaacctatctcaagacagttcctcagatgtcctgccggctatctcagaaactggcagtctgcatcgtctggaaatgattccggctctacaatagatttaggaaaagaccagttctcggccaacttggatgttcagcagtttaaacccgatgaaatatctgtgaaagttaccggagaccgggaggtgaccattgaaggaaaacatgaagaaaaggaggacgagcatgggcatgtctacagacacttcaagaggagatatgttttgcctaaaggttatgatatggacaagatagtgtcgaagctgtctacagatggtgtcctttccatccatgctcctaagatagctgctggagaaatcgaacacaagaaaattgccattgaacacacaggcaaacctgctaaagccctagagggagcaaaaggagctggtgagaagtaaaattaaaatcttcgacataactatatgtattcaaatattcagggactatatgttatttcattgctttgtagttcataatagttttgcatagattctatagacactatttagtgtaaattcatcttggtattaacagatcttttagtttgtattattttgagactgagttcatctaatgttaaaacttttctgtattttaatataaagtaatagcaatcg

SEQ ID NO: 9379 - DNA, 856 bp, Diabrotica virgifera
  SmartBlast Evalue=2E-53; Info=Putative chitin-binding protein n= 1 Tax=Lutzomyia longipalpis RepID=A8CWD0_LUTLO
gacatattcctgtttttttattagtttcatattatctttttttacaattatccaaaataagtaatccaacaggacatcagtatgacactaaaagtggttttattttttgggatatatctagtcgcaaagatatctggacatgggatgatgttaaatcccccaggaaggagttccttctggaggtttaacaaaactgcacctataaattataatgataaccaagttttttgtggtggagcttatgtccaaaatgaactgaatggtggcaagtgtggtgtatgtggagatccgtatacagatcctcatcctcaaaaaaaccaaaataccggattttatggtacagggattgtcgtcaagacctatgaaccaggttcagttattgatgttgaaatcaagataactgctaatcatctaggaaatttcaaatacagtctatgtgaactcaaagattttgatgctccagaacccaataattgttttgaagatttgctactggaggatggttcagataagtatatggtaaatggggaagataaaacagtcttcaataaagttcgactgccaaattttcaatgcgagagatgtgttcttagatggacttataaagcaggaaacaactgggggatatgtgaggatggaaaggggagattaggatgtggacctcaagaacatttcagatcgtgcgcagatattgcaattttataattattagaaacatttaacactattcagtgagacaaattttatagttaaattaagaagtttggttctttaagcactttgaatcgatgaaacttacagatcatataaacaataacttgtaaagcggtacggttaatttcatttggtatgctaa

SEQ ID NO: 9380 - DNA, 852 bp, Diabrotica virgifera
acgttgcgagttgcccgttgcgaatttgtgtagttacggactgtcgccgttacgaattgtcgccgttacgaactgtcgctgttacgaattgtcgctgttacgaattgtccgttgccagttgtccggttgcgaactgtcacgttacgagatgtcatcgaaccaggcaaaacactgcctcccttgtccccaaagcgttcctaaaaccaaattgtgactcgttgatttccgcttcacacttgttgtagattctgttatatatgattgtggtgaaaactttggtgataggatccatatggatccagtctatgattttcaattccgcaaggttgctaaaaactttttatcactgatggtaaaggggctatagtattgccgaaccaaaattattgttttgttgtttgctatccaaatatatcaaaagggttatttaattttttgaaaatgtgaattttcacattgcgttcatttcattagatgcaggacgtcctgtaggtctttagtccgttaagcacttctctccctaccgtgctactctgcatatgggcaaatacatttttattctttcaattttgctatagtatattcagtgtctgaaatatggattgtacaattccagttagttgattttcagcgtttattatgtctatcaacatcttcttctagttggctatagatttaccgttcataaaaactcatgcatattttccaggtacatatttttttgccaaaccatgttgccttttgtgtgatgagaatttttaatcatgaatggtaataaacgatattgattgacattattttgataaactcatattttgacaaaatatatcagatcttataaaaatatgtata

SEQ ID NO: 9381 - DNA, 856 bp, Diabrotica virgifera
tgccagtcgtttttttagaataagtagattttttaatgtagatattttttaatttcttggaaaaggttccttgaaattgcattagtcaccaataattgcgctctcgtgcatatatggtatccagtaaaaagtaaaatatcctgaaatatctttagctcttcctgcgttacatgaagtgatgattattattttgagggacatatacttgtatgttctgtaataagcaagcaccacactctcgcgaagttacttcgggaaagttgaccgaagtccgaagtacccgttactacacacgttcaacttttcgaggaacacatgcaagcggggctataccgactacgtttctttgacttggtcacaaaaaccgccatagaatggaagtacactctcgtactcgccgaacttcgatcgacttcgcgagtagtatagtgagcgttatgtaaatattcaataatttcattgtcgaaaaatttatcgaactgattcgatacgagatttacctcggaattactctttcatatcatccagacgacctttgtaacctgttgtagatgtcataccaatatcagtaatttcttccgtctgctcagagtcaagactcttgtaatgaacttatatttctccgggaacattattcggaaagctttgggtctgaagatcatcctcatctttgtcctcattttcagtttgattgtcaaccttaggaggaataactaccaccgatacatcttatgagtggaaatcgctatgtcatcatgaagctaaagcgagtgttttataacgttttccataaaatccaatcggactcatacgcggcaattcttgaaaatcaattccaataaaaatattgaacatg

SEQ ID NO: 9382 - DNA, 855 bp, Diabrotica virgifera
  SmartBlast Evalue=4E-51; Info=Putative secreted salivary protein n=1 Tax=Xenopsylla cheopis RepID=A2IA77_9NEOP
caaagggaattaattttattatggtgaccctattcatgtaattaacaaaaacttacaaacttaaattgtatatctaatgcaatttgctatttaaaaataataaactataatttatttttctattcgtttcctagtcttttgactctttttattaacagcttggtttttatccttgtcagtctgcgctggtgtagtcgatccagccaagtaatttgagaacctatcagacatttcaaatttggccatgttttgaatttgctccatttccttctttgtttctgggtcattcatcatctttggcagaaccatgactaagagaagaggtaggaccatcatcatgatcattgggttaaataagagatctgttattctccattgttctctcaattggaaataccgtgttttccctaatgctttcatacgtaatggatatggcactatgataacttcagaaatcttgatatgatttactttcctagccctaaacttccccttggaatttatttccactctagcaggctcgaatgcaaactctggatgtaatacttccacaatataagatccggcgggtacgttatgaacagtgaaagaaccatcccttctaacaaatcccaaatattcgccaccatttacgtgtattcttgtattagcttgccagttgaattgcttgctttgggagtcagtaagagggaatactctaccttctagaacatacctagaagcgtcattgtcttcttcactatttaattccgatttagccgcatttataactactaaaaggatactaaagagataaaataatttcagatacattgttaattattataaagaatacaataagctcactgaaaaact

SEQ ID NO: 9383 - DNA, 851 bp, Diabrotica virgifera
  SmartBlast Evalue=0.000000002; Info="CG9134, isoform A n=2 Tax= Sophophora RepID=Q9W0I2_DROME"
aaatagtgttaaaactgctgtgtcaacgaaaattatgatgatttcagcaaaatgtcttattgtagtttttgtgtttgtttgtataagcgaagcttacattagagttgatgacaattctgtacatactgtccccgtttcttcaaagcctcaatgggaaaaaaacttcgagaatggaggacagtcgactctgccattagttcgtttcgaaaataaagtctattacttgggcattcacgtaacggagaattggctagatgctctgaaattttgcgaaaccattcagatgaagttggtatcaattaattcagcaaaagaaaatgaaaaaatcggaaattacgtaagagaacaaggtatccataatcgatattggatggggggagcaaggttcatagatgacgctaaatggttgtggataccttatggaagcagaaatgaactacagcaattggggccccggtcaaccactcaaaaatgctcataagtgtctgctggggtccatagtacgcgaccagttcacttgggttgtaggaaactgcaatgttgcactaaatttcatttgtgaaagatatgtggatgatgggggctctacactggggtcaatatgatttttgacattattttgaacgcaactattaatatttaaaaaaatgtgatatttaacacaaattattttcaaatgatgaacgggggtcgccaatgcgagtccattatagttactattggatataaattcagtcaatctttgtatttatatttgtcaatctttatatttatttgatgttacaaattgtgggacaaccggtttcaagactttcattctttgcctcatcatcaggtccagtacatatctt

SEQ ID NO: 9384 - DNA, 853 bp, Diabrotica virgifera
gcctgtcttgtactatcttaaatgcataccaaaaccttaggatttcttatgttgaccttttaaaacaccccacatttcgttaattaagccacaaataaggtcttacttctaatgaaaagttaaaaattcgaatattctatgatctgattttaaaccaagaggagtaattcaaatttaccacgccgtaatgcttgtttgtaattgatccaacctcatgcaagtttactccactgttatgaaattttgacactaatgacattcatgaaattttgacactactggcatttcataggttaattaagttatatcggcgattttttgtgttttctgcgttactcctttaatttttagattttagtctacttttatatgaaaaacagttgtttttataattttttagcgaagttttagtataatataatatgtacggattgccgtcgaaggccgatatgatcaaccaaaaaagaagatgtatttggtgatttttgtagactttcttgggtgtgaatctgtctttttagtttattcctcctggtttaataacacaccataggaaactgttttacaaatctctatttgtaataaattatttaataacatttcgaaaagattaaaaaaaatattaaaatttcaagtagaatataattattaaaagattaaaatttaaatataatatgacatatcacatatcactataagaaaataacgaaaaaaggagattatagttgataggataaatctcagttaaactttgtacatttcatttccataaaatcttaacaaacatgaagcaattttgcttaatagacctcaaagtacacagacttactataactattcggcagttcgatag

SEQ ID NO: 9385 - DNA, 854 bp, Diabrotica virgifera
  SmartBlast Evalue=3E-91; Info=Fork head n=2 Tax=Tribolium castaneum RepID=D6WMG3_TRICA
aatgattgtttcatcaaagttcctagaacgcctgacaagcccggaaaaggatctttttggagtttacacccagattcaggtaacatgtttgaaaatggttgttatttgagaaggcaaaaacgatttaaagacgagaagaaagaaatcctcagagcgacgcacaaaagtccttctcatagtgtagacagcagtagcagctcgggtaagaaaactcctgttcaacacggcgaagacaaatctcatcatttagacaaagctaacgaaaacattggatctatgttaagtttgcatcctgcaaaattagacgtcgatcaattgaatcttctaaacgcaaatgatcttcataatatgcagcaacatcaccaccaccaaaatatgtctcacgaagagttatccgctatgataaacagaagtaaccatctagcgttgtccagcgaacaccaagcgatgctgcatcatactccgatgaaccaccacctgaagcaagagcccaccggatacactccatccaatcatccgttctcaataacgaggctacttccagcagaaagcaaatcggacatcaagatgcaatacgacatgcagtacgcgggatacaacaccttgagcccgctgccgaacgctatccattctcatagtaccataggtaatgattattataatagcccttctttataccatagttcttcgggcacgacgtctttgtgacagtatcctttagcttaagcaaagttttctcgaatacactatttgtagttacgtatggacgcggttctgttggataatttatatttttgaggcaagtttttaacaaattttttaaattatttagagtaatctcatatgattagaat

SEQ ID NO: 9386 - DNA, 840 bp, Diabrotica virgifera
  SmartBlast Evalue=2E-34; Info=Ecdysteroid UDP- glucosyltransferase n=1 Tax=Harpegnathos saltator RepID=E2BS88_ 9HYME
gaagtatattacgccctctttggattcatccaagaatttttttagatcctgtggtaaaggttctgtcggtttaacatgaatactttccaagctaacaatagtaggtatggttggtctaggtgtgtacataaatggattggtggttattaacaacaagctcatatttcgttcaatgtcctcaatatatggtatgtcattgcccaaatatttcctagctaatgcatctgccttgggtaaaatcacaaatgttcgataaaatcgaacaaataaatagtaagtagtactttttattctttcatatagtgtaagctttccattgtacggcaagaacatttctgagtacaaggatggtggatttgggttacccatagcaaaatgagtgccaatgtatgctcccatagaagaaattcctattaacggtgctttaaattttgcagctatactataaagtatgggtgaaatatacgtctgagcaatcacaacatcgaacttttgattagaattgttataaattttgataaactcttcattctttaatattacctcggcaaagtcgtaatgcattgaaatatcttcggtattttcgtatgaaacagcatattccttgttcatgaaaaactgaaacccatgtcgccggataagttcactatttggtgcactaacatcgatctcagttaaatttgttaataaagggtccttaagtggtataggtgttacacaactactcgtgacctcgtaaagataactctctccaaataggctggaacactctttggtgactaaaggctggcatttggaaaacgcataatatacgagcaccacaaacataatctagtattg

SEQ ID NO: 9387 - DNA, 849 bp, Diabrotica virgifera
  SmartBlast Evalue=1E-64; Info=C12.2 n=5 Tax=melanogaster group RepID=Q9W347_DROME
acagcactataacgattgcttcatcgtacgcttcttcgtcgatatttgatactgcccactgggtcgtttctaaggtgtggtcaccttgcatgcagtactgcgaatgcgcgtacatggtctgaaaaatcttatgacctttatccaaacggtacgggccacctttgcctcccaaaccagcggtatctctcccaccagtccctcctgcccatctattgcctcctacatgaggcgcattatctggatcttcctctccatgttttggttcttttgtatctagtccactatacctatttacagtaacattttctttcgctcgtttagctgcaatatattcggtggatacaacgtttttggaaaacccatgtttatgtagaacctctcctaccgtttctaacatatcggggctatctctatcgaagtcgaaaacattgaataatacatcttctaaatccgcgttaggatatttctgaaggtgtttaacaatattaacaacttctctagtagaatagggatagttaataagaccttgatccgccatattcctcagctcaccaaagattccgaccaattgcttaatagtattcacgtcaacgtcgggtccatattgtttcagaagttctatctcagattccctagaaggattatcaacagaatggctactgaagagatcgcccaacgatccgaaaaaatcgtttcccaaaaaggggaatccaggcctgtttgctaaaacaatcattctaaaatcgggatgagtaacaataatgttatcggtgtttgattctttcagtgtttttgtatttggaacgattcgtcgaccatcgctaagaatcatctctcccgattctacca

SEQ ID NO: 9388 - DNA, 855 bp, Diabrotica virgifera
gttgtaaaacataaataaaggattttaaaatcaaagaatatacatagttgcttaaattcagttttcaaatatggcattaacaaataatcatcggtattttatgcaatacatgttaaaaaatggtgcaacaacggtaaacaatgcacaaaaatattgtgactacattagtgaaggtgaaattgagaacctggcccaattgaaaactttagtaacagaaattaatagagaaatatcaaaacaatcctacaaattagcatttaatacttgcgaagttaccaatgaaccttatttaatatggcttaatacaaaaaatgatgatatagcaaaatttcagataagttattctgctctggagcttgaatattttcatgtgattcttcaagagattttacgttcagatgaacataggataactttcattgtatgcttaaatttaacttctacacttacagcatcttacagtagagaaaatggggaacaggttttaagaaaatggattaaaaatggatattttatcaataagaatccttatgtatatcttgggcccagacttatattagaatttacagcatatttaaaaacccacttgcccgactcaatatgtaatttgtgttctgaacttgtattctggggaaaatcatgtgaatcatgctataaaacattccatatatattgtttaaaaagatatttagaaaatcaacataattgtccatgttgccttactgaatggatgtcaacaatagaagaccacagcactgttgaagataataatgaaatagaacatgcagctaacaatcaaacagctgagtctgatgtttccgatagcatggatactgatgacattatttcatctac

SEQ ID NO: 9389 - DNA, 851 bp, Diabrotica virgifera
  SmartBlast Evalue=4E-58; Info=Vitellogenin n=1 Tax=Anthonomus grandis RepID=VIT_ANTGR
aatggccattgaatgagacagccatgcacagtttcgctgaactcgcccgacgtatatgtggacgatggttactatcagacaaacttcccaacaaagagtttcaagaacttaagagataaagaaggatctaagtttgttaaacaagttgtagttccatacttccgtcaagctctagacaaggctattgctcaaaacgaaccaaacaaagtacacgcctacattcgtactttgggatatattggcgttccagaaattcttcaagcattcgagccttacttggaaggcaaaaagcaagcttctcaattccaaagagctttaatgatcgcttccatggataaattagtcaagacttatcctgaaattgctcgtgttgttctctttagagtttatcagaatgctgctgaaatccaagcagtcagaactgccgccgttttccaattgatgcgcgctcaacccaccagagaaatgctccaacttatggcagcttacaccaaagttgatactcaagaacaagtcaatgcagccgttaagagttcaatccaaaatgctgcagcattaaagactggtgaatttgtagatttacaaaaagcagcagagatggctgagcctcttctaacagaaaagtcctacggagttcaccaagcaggaaattatatcaagaattatttcgcagaccaactaggtgtcaactacaaacaaactgctcagatgtacggaaacagcgaaagattctaccctcgtggaatgaaaatcgctttaaggtccgacaagaatggtatcagagatcaaagaataaacattcatgctttattgtcctcttctgaacaactttacaaggtattagcggaact

SEQ ID NO: 9390 - DNA, 846 bp, Diabrotica virgifera
  SmartBlast Evalue=2E-13; Info=Transposase n=1 Tax=Beggiatoa sp. PS RepID=A7C285_9GAMM
tagtgctaagtgtaaaacacgtgtacatttatctgatgatgccaaagaaattattaggaatgtttatcaaactgtgaaagaagataatccaaatccagaagacggtaaattcctcatcaagacaacatctcgactgacaaggatgccatatacaacagtgtggaaaattgttacgaatagaattcaacctcgtaaaaagcggagtgacttttctacacataaagcagtaaatgaaaaagatgctgaggtaattagaagagcaatttacaatttctattcaacgaacctagttccaacgcttagtatgatctacaatctacgatcaacttgttaaagactattccattacgtattcgccttcaactttatcaagatttttgaatcacattggttttcgatacaagaaaattaataagcgatcatcaataatggattctcctcgtctaattaaacggagaaatgaatacttggatgctatatctaaatttagagatgaaggaagaccgatattttatctagatgaaacatggttcgatacccacgatactgctcaaaaaaggttggacagacgattctattaaatgtgcaccctattatccaattaatagaggtcagcgaataattattctgaacattggatccaaaaaatggctggcttggaggggaaagttttttactatcggcaaaaaacattaaagattcaaagctggactaccatgaaaatatgacgagtagcttgtttaaggaatggtttgaaaagaaggtgttgccaaatttgcctccaaaaagtgtaattgtaatggataacgcaacgtatcacagcgaacaaattagaaaaatccccgg

SEQ ID NO: 9391 - DNA, 852 bp, Diabrotica virgifera
  SmartBlast Evalue=1E-41; Info="Glycoprotein 3-alpha-L- fucosyltransferase A, putative n=1 Tax=Pediculus humanus corporis RepID=E0VWX1_PEDHC"
ctgtatcaatcatctgtatttctaaaactgaaatcgatatcggatcaaaacgcctattagttgcattgtaacgtgttcctggtctaattgattcctgatgaaggcttgtcatattatttgctgcggattataggtaatggattatccctgaaaatgcccccgcgactatcggcgcgcaggattttcctcatcatcctagttcttttcagtttttcagtactaatctcagtacatcatcggttttcatggatccgcatcggtagtggaccttccctacaagaaaatcaagatgatccagaaattaacgatatcggtgacgatccgccttcttcaggtcgacttgaaatatccaatgaggttggtgaggttgaagaaccaactgcgaaggagaaccaaggcaaaccttggttcatgaagggcgggaccgagtttccggggaactatagaggacctcctaggttattcccagatcaggccgatggggataggatcgtggaacaacttatgtacgtgcccgaggattatcaaggatatgatactccagagaaggtaatattagcctacaatggactcggtgcgtggggccagaaatcagggtcggcgtcctttcacggttgtcctgtcaacaggtgtactttgacggacgacaggagcaaggctgctgacgtagacgccattttgtacaaagaccattttatacatcctggtgttgcgcgacctatgaaacagatatggatcatttactttctggaatgtccatatcacacgcaaagtgtaaaattcgctgatctcattaattggactgccacttacaggcgggacagtgatcttgtagctccctacgagagatgg

SEQ ID NO: 9392 - DNA, 854 bp, Diabrotica virgifera
atacatagtgttgcataatttcggggatcctgtcctgcggaagtgtatagggataaattaggagctctagttgcaaaacgaccattctccactttcacaaattttacaggaaacacgaaaatctataactacggtatatatggcacaatgagtacaattgttcacacacacacttaacccattgacaccgaaattaataaaatattttggagaatggttgtgttgcagccaaccgttgtatattggttcttttgcaagttaacaatgtagagattggttattttttaatttaataaaattgacagaacctttttacaaatttattgaacaaaaatcggatcatttcttcttctggaactgtttgagtgtcaaaattatccaggcattatttgaagtaagttagggaacatctataaactacattgtatagaagagggtggggagactaaaaagacactgaaaggggggtcatgagttgcaattccaaagttcgcttgaggggaggtcctcaactataaacgacgttttacgacgaaggtgggaaagggtattaaaaagtcccaaattttttatgacatagtttatgcatgttcccttagacctgcctcctcctccaattcttgactaaaatgatcttaaagaaggttcctcacgtcgcgcaacttatattactacttgcaaatttttccggattgacaagtggatgatgtggtggtgacaacattcctttgttggtggtctaaaactcttcagcacttattacgaccaaattgggcatagatttttttaagagatctattgatgtaattttgattttaaataacctaaaatacgaagtttgtaagcctatgaat

SEQ ID NO: 9393 - DNA, 855 bp, Diabrotica virgifera
tattatagcagtccctacatttataaattgtttaaataaaatatcatatctatttacattgaaaatagataagatatcgattgacgggatcgtttagtcaatcttacaaataggtacatctttaagtaagtatcatcaacatggcgaacttattgggaacaataattttatttggattttttgcactggggtttgcaactcaagaactaatatcctgttacgattgcaagccaagtgcagacaaacctgatgaatgtgtttatccagaaaagaatcttgctcccgttagtaactgccaaccaccgtcaaatggaacggcggtgtgcgtttcgtcttacgttcaaaatataaatgctgctagaactggagtctaccgaggctgctttaacataacagcagaaataggcaacgcgtgtgatttgtttgtagaagaactctcgtctaatacatcaacaattaaattttgtcgatcatgtactacagatagatgcaacacagattatttgaatgaaaagggtgcagccaattataattacaacctggaatctttaataatcattaacatactagcgatattggttgctagtatttggaaataatatttaaagttacatagaaccagttgtagcctgtgttggataagagtacttgtatcttttgattaataactagagttaaggataaattataaattacaatgttttatatttttttgtattcaatttttaatattttttaataattgctaaaattggattaaaaattttataatgggttaaaacaaatatttaaaaaatatatcatttggaacatcaaaattgaataaataactgtttgtagctttgtgtgtaaaaa

SEQ ID NO: 9394 - DNA, 846 bp, Diabrotica virgifera
  SmartBlast Evalue=6E-58; Info=Inosine-uridine preferring nucleoside hydrolase (Fragment) n=1 Tax=Aedes aegypti RepID= Q17J48_AEDAE
attgggttgattcatcttcagatgatctaatacaacctgtcctcttgtgagatcgccatgaagctcaacagacgcatggtgaatactagatttaagaatcaggattcgtaaaagcgaaggtcaggaatgtatcgcagggaatccagtgttccctattgtgtcttttgtatataatttcttccgctttggttaataacgtaagttcaggtgtcgcgtttcccaaagcttcaaacctccattccagtggtatttttggcagaagacaagtttcccaaggtagtacataaatcggacatatcagattttcaagtgctatgtaagctgcttctgggtctacatgaaaattaaattcggcacatcttgaaacatttccaacagcagtgtagtttcctcccataatccatacatccttaatcttagaagccaagtcgtcgtaaagtttaagagataaagccaaattggttagaggtccaacgcagattagtgaaactgcattagggtgcgcgtctactatgtcgtgtattgctacagctgctggtgttttacttactatcgacagatctggatctgtgtcataatataaatctccaagaccgtcttcaccatgatagcgttctatattatttaaaagtattaattcacgtttagcccctttgaataccggtatatcagtccttcctataagttccaatagcctcacagtattgattacaacatggtcaagatcagtatttccacttgtgcaaactattccttcaattttgatttcgcctctattttcggcatgcattaaatgcaacaatgccatgtagtcatccgtcccaacatctacgtccaatataactc

SEQ ID NO: 9395 - DNA, 846 bp, Diabrotica virgifera
  SmartBlast Evalue=1E-100; Info=Probable phosphorylase b kinase regulatory subunit beta n=1 Tax=Harpegnathos saltator RepID= E2BY55_9HYME
ttcgtacggactgtggtcttcgatcctcttctgatgaccgaagattttcagatagtgtttgatggcctccagtacccaaccgatccgtatcttcaatatacctttaaacaattcgggattggttgatattaggcgaccgcaatacagaatgatctcttgctgcaaaacggcttggattacgtcgtacggttggatggtgttgtatacgacggtttggatttctgctggcgtcatgggtttgtcgaagacggtttctttttggcctatgactcctactgttaactgttttccgtgtaccaacacagcagtgatgaacggactgatcgaatcaacattgtgatttagcaaactgctggtatatctgacggcagcccaatgtctgaggcatcccgctttatggtacaagctgtgaaggtgttcttctacggtggtatggtgtacgcgaaactgacgaccttctcttttcaataaaataccgaacagctgacacttggctgaaatgctttccaccgatcttatcatttctattatttcgttggttccttggtttgagtaactcgtgtaatctttagcttcatcttgaaaatctagtactctaggcacgtccgttaaactctggtagccaatgtagtcatgttctaactgtttaaaattgaagaaatctttatcttcagtatccaagttattcataaaatccaaatgttcaacacaagaacttgaaatgagattctgtagccgtccaatcctcactttgacgctatcacaatacccttcttcagcatagccaataagtctagcatttcttaaactgtggatctctcatatgttcttctcgtataagcaaac

SEQ ID NO: 9396 - DNA, 847 bp, Diabrotica virgifera
gctcatcagaggggcaaatccaactgctaggacaacaaagagtctctccttcgaattctgaatagtaaggtgcacaatagctggaaacttctctttgtttcctcacttggacattacaaaattgcctcctgcagtgaggagcctctaactttccgttaaagtttttaggacaaacacaatgggtacacgtgtcttttgggtagaaccgctgaccttctaacactgtctttccgtcaacttcgcaattgccaggcttgtcttgagggcacatttgtccatcagcgcaacattggtccaacttgtattttctgtaacaatctttttgaaggggaaatgctcccaaccattctggacaatctaaaatggcgcatgtgaattttcccggtatattatatggttgattattgaacattttatcaatctcagcgggatcgtagggaagatctttattgcagaagcatccgacgttgcagctaccgaaatcgacgtctgttgggcgagttgtagtgctaatttctgtacctctaaacaaacaggtattgttcctgattgccaagtcgcattcgtatttgattggacaacttttacctggtgccaggactggggtgcaacctacgtcttcgtagaggaggatgcccagtttatcgcagtcatctttgagtccttgtacacaatgtaagtgcagaacaagtgttacaataccaaaactgaccaacgatcttgaccacattttgccgaatattacaaataaatattggtaacaatcgtttaaatacctacaaatttttacaaacgggtttatatctttcttctattaatatacaaaacgagataaaaaaaatattat

SEQ ID NO: 9397 - DNA, 854 bp, Diabrotica virgifera
  SmartBlast Evalue=3E-82; Info="Transcription elongation factor SPT5, putative n=1 Tax=Pediculus humanus corporis RepID=E0VS63_ PEDHC"
ccatcaaaattattagagggccttataagggcaatattggtatagtaaaagatgttactcaaagttcagtcaggatagagttgcatacatcttgtcaaactatatctgtggataagaaccacattaatgatgtcggagctccaagcggtagagatggcagcgcttccagttatggcaaaactccagcatacgcgggtaaccagactcctttgtacagagattctggcaacaaaactcccatgtgcgattctgggtctcgtacccccttgcattatggttcaatgactccgattcacgacggttctaggacaccaaatgctagttcagaatgggatcctgcggtctctggtaatacttatccatcaccaggatatactcctagtactccaggctatcaagccaacggtccatatacgcctcaaacacctggtacaatgtacgacggtagctacagtccatatcaggcgagtcctggatatcaaagcgccatttccactcccagtcccggaaccggatacggccagtctcctgcttctagcaacaatccgtacagcactcccagttctgggtatagcccgaacatgccgtacaatcctcaaactcccggtgcaggtctggatgtgctacctatgactgattggcataccgtcgatattgaggtaagaattcgcgatagtcatgatgatcctggcttagttggtcaaactggcgttattagaagcatatctgcagctatgtgtacagttttccttcctgaagaagatagagttgttaacatcatatgcgatcatctagatccagtacggccacaaagaggagatcagtttaaggtaattattggggaagaacgagag

SEQ ID NO: 9398 - DNA, 852 bp, Diabrotica virgifera
  SmartBlast Evalue=2E-80; Info=Serine/threonine-protein kinase 16 n=1 Tax=Camponotus floridanus RepID=E2ABZ5_9HYME
tgaggttgtaggcactttctgtgtttttctgtattgtgtagttaaattatgagttatatgctagcaaattcaataattttagagataacttaaaaaatgaatactttggggcttagtatgatattgaaaatgggttgtatctgtgcaaaagaaaacttaagtataaacggaataagatatgtggtattagaacgcttaggagaagggggattttcctgtgtagatctggtagaaaatagtacaacgaaaaagaaatacgctctaaaaagaataacatgccacagtatagaagatcagaaaatagcaatgcaggaaataaattattacaagaaacttaggcaccctaatattatagaacttgtggattccacttttaaaggatctgcagatattgtggtacatgctacatcagaagcatttctagtactcccttactacaaaagaggtactttacatgattacctcactttaagatcttttaataaaaattatttagatgttaaggatgtctcgagaatattttttgaaatttgtcaagcattaaaattccttcatgattttacaccagatcccatagctcacagagatataaaaactgctaatatatgtttaacagaacatatggatcctattctgatggatttagggtcttgcgctccagcgaaagttcaagtttgtggagctcaagatgcacaaaaattgcaagatttggctgctgaaagatgttctatgacatacagagctcctgaactattccatgttgagagctactgtgtaattgatcagagagttgatatttggagtttgggttgtgttttgtatgcgatgttgtacttcaaatccccctatgat

SEQ ID NO: 9399 - DNA, 850 bp, Diabrotica virgifera
  SmartBlast Evalue=4E-20; Info=Conserved oligomeric Golgi complex subunit 2 n=1 Tax=Harpegnathos saltator RepID=E2BXG1_ 9HYME
ttaaaacctactttagccttgtggatagctgtttctcagtgctttgacaaagatatttatctagaccaacttgctgatcagtttataagattatcaatgttgctcttgtcccgatatttgaagtggtctgagacaactttgaaggtaaagttttctacatctgaagaaacagaaaaattcatcatgagttcgttaattgatttcacatttgttgaaaacttactttgcccatctttagataatccttcaaatgttagtacaaccatatatggaataattagttgggtgtatgttatcccaaatataatcaaggccaaccggaaaaccataattcgtcttcaaaatattttgaaaagtaacttaataaaaatgaaagtagatgagatatgcaaccaacttcaacatgtgggatcaataccaagattatacagaagaaccaacagaagttcaccaaaagaacctagctcttacatggtagatgctgtgaaaccaattactacattccataatgaatttacagttgtcgtaaaaaacagaacaaatgaaattttaaatgatataatcctgcaagttactaaccattatttgaatttggtccagagcgtgttaaggtcagtttgcaaaaccgaagaatcattaagaagattgaaaagtagaaatgtaaatatatctgaggaaatttccccacaatctgactcaggatcagatgaaataaaattagggagcaaatcaaacttgatgtagcttattttcttgaaaagctgcatccactgggttctgaagattctagacagacaatggacttactaaaggatgaaattaactaaatgaataaccttaaggaaaaaat

SEQ ID NO: 9400 - DNA, 852 bp, Diabrotica virgifera
  SmartBlast Evalue=1E-50; Info=Small heat shock protein 21 n=1 Tax=Gastrophysa atrocyanea RepID=Q3LGX2_GASAT
attactatttttattaaaaaatctagcaaatttaaaaaatatttggatgaaatcagtcttacacatacatattttagaattttacatgatctacaatattctatacgacaaaactacatcttactcacaagaatactggaaatatcgaagaaacacaaacaaaaaaacatttataaaattaacatatcaagttcaaaataattcgagtaaacgatataatacttgaatattttactttttcggaacagctcctttttcaccttctactgctttagctggcttgccagtttgttccacaggaatactcttgtgttctttggattcatcctcaactttgggggccataattgaaaggacaccatctgaagacagcttggactcgattttacccacatcataatttttgggcaagacataccttctgacgaaatgtctgtaaacgtgaccatgttcgtcctctttttcttcgtgttttccttcgatggtaacctcccggtctcctgttactttcacagtaatttcttcgggtttgaactgctggacatctaagttggctgagaactggtctttaccgaagtttactacagagccatcatcgtttcttgacgctgcggacctccagttcctcatgtaaccagcaggacatctgaggaaatttctggacaccggttgaaacagatcttccggttccaaaaccattccaaaatgttgatcgaaaagccttgatggtctgttgagggctacatcgccaaacacgtaaggtaaaagagacatttttacactttactgttaactttttttgatcaaaattcacttcgctgttatcgcgtttttaaattatttctcgctgag

SEQ ID NO: 9401 - DNA, 852 bp, Diabrotica virgifera
  SmartBlast Evalue=2E-72; Info="Rho-type guanine exchange factor, isoform D n=5 Tax=melanogaster subgroup RepID=A8DZ20_DROME"
attttaattttaattgagagcctatttcatcacttacctaaataaaaaggaataaatagttctgccaatagattatgatattttaacgcccagcgataaaatttgtttatagaaacgtgtttgttttttaatggaatctggagaaaatcatggccaatgaactcttggtggtccaggcgatctattcttacaagaggagcaataatgatgagctaaacttcaagaagggagattttataaccgtaacccagaaggatgatggttggtgggaaggcacccttaatggcgagacaggctggtttcctagtaattacgtcaaggagtgcaaagatgctcccagacccgttgttcttcagcagaatcaatacaaatctgtcgtcctcaacgatttggtcgattcagaaaaagcacacgtcaccgaactcgagggcctcgttaccaatttcctacagccgctggaaaaaagcaccatcttaactcctgacgaatacaaacagctgacgggaaacatcacagaggtcttggaaacgcaccagcagcttttgaaactcgtggaattggaatcgagtaaaccaggtaatgatcagcgagttggtaaattattcctcaattgggcaccaagaattaaaagtatacaccaagcctactgttcgttacatcccagggcagtatgcattttggacaagtatagggatgaactaactaaatacatggaatcaaaaggtgcagcaagtcctggtgtactggtattaacgaccatgttaagtaaaccgtttagaaggctggacaaatattctggaatgcttcaagagttagaaaggcacgtcagggaatccgaccggacagaggcga

SEQ ID NO: 9402 - DNA, 850 bp, Diabrotica virgifera
aagtaagaaatgacaaaaaaactattatatcaaatttaacatggctatttatatactggtaactgttgtacactaaggaatgtaaggaagtccattactctttggtatctatagagctcatgcagcaacttttcctaaaggtatataaatatccggtacaggaatatccacggatgaaacaaaatgcgtgggccgttctttatacattacttccgtccacatcctttctgaccatttacgtgggaagaatttttccttacaatatattctctcttcatatattctcttcgtggaatttaggaacagaagtagattttcgttgtaccaatagggaacagtctttggtgttaaataacattttgtagtaaatctctttggtgtttctcctgagtaatcagtcctttcatctatggttatatttatttctgaggtttccaagcagtcgtttgataacatcgattcttctctttggataacatctgtattaacagtttcaactgttttcgactcaatggtctgaatcattacaccttcactttcattttgcacacagcccacctcaccaaaaatattcctttcattatccagaaagtcgttagttatgtttctaatattgctaatcattttaccgcttgaaaaacttatagaatacaaaacaccaacgaacttctcgtatgttaatgaaactatgtggtggaaccaacaggtaagacaagacaccggtggaatacctgctttggtttgttttacttatttaaacaaatgaatagcaataggcgagtttgtatcaactggtgtgtgtcactaagtgacgtcaacttttttgtgatgtgttagtcatactaacgat

SEQ ID NO: 9403 - DNA, 852 bp, Diabrotica virgifera
  SmartBlast Evalue=4E-57; Info=cytochrome P450 CYP4BN1 n=1 Tax= Tribolium castaneum RepID=UPI0000D560C2
cgctgttaaagtgatacaattattgtttttgaggtgtcctttactatcactaaaaattttaaatattttgtttgtgtagtaaagaactattatggaatattgtcatttttattcaaatatcagattactgtaaacaatgattggatttggaatcattgttgttttatttactgcgttttacttttatcagcaatcacgtagaaacacaaaatacatgcgaaatattccaggtcccaagccgaatatattttttggaaatttattggaatttgcttttataccaacgcacaagtatttagacgtctttttagggtttatacgtgattatggtaaattagtcaaggtctatgatgggccatttagtatggcaatgattgctacagatgaaaaattcgtggagcatatattaagttctacaaaatatattgataaagctgaccaatatgattacatgaaaggatggttaggagagggattattaactagtacaggggcaaagtggaaaaagcgaaggcgcatgctgactccagcttttcatttttccattttagaaaactttcttgaagtcttcgacaccgttggagatatatttatacaaaaacttcgacgagaagtagggaaaaagactgtcgaaatcagcgaaccagtatctctttacacgctagacgttatatgtgaggcagctatggggataaagttaaatgcacaaacagattcaacttctccatatgtaagaagtaccaaatcgatgtgctacgtaattgtagaacgaattttatctcctctagacccttcattgtatcctctaactttaaactattaccgtgaaaagagagctttaaaagtacttca

SEQ ID NO: 9404 - DNA, 850 bp, Diabrotica virgifera
ctagctatgtgtatgccaaatttcatgtcaatccaagcggttctttaaaactgaaaaggttttgcaatattttaccgtgagtgaatggagtaactcacgacttgcgcgaaaagttatccaattttgagtttcgcgcagagttgccagattatcgggatagtagtgaatgtggggaattatgaaaaattaaagaattattattaatcacaattataatgaataaattcgaatttattaggaacaatttctaaagttctatttccgtatgctttgaaatgtttcaggttttcgattttcactgatattaagaaacaaaaggtgtattttctatatgtggcattgagtgtttggaaatccgctaattttattgtcgggtatagcataatcatcattttatatttttctaaatatacaggatgttttttaagacgaaatctctaaattaatataaataattggtaatatgtttgaaaaactttcaaatatatataaaatgtgtgcttaagtaacgactatttatatactagagcatcgagtgccatttttaacgtattaaaagttgattcaatcaacttttcgaaatagacaaaaagtgagtagagtcggttataagtatagggacacaaaaacgtaaaaacatatcagtaaattaaagaattgtcgataactcttcataattggaagacgaattttggaaacagaagaataacataaggccgtaaagacaaactacgtgaagacaatttcgtggaattaaaactagtattctacgcaatctatattctatcgtatttatttttgaaattttcaaaaaatttcatattttgacagacaatcccctgtttgacag

SEQ ID NO: 9405 - DNA, 852 bp, Diabrotica virgifera
  SmartBlast Evalue=4E-87; Info=Peroxiredoxin 1 n=1 Tax= Harpegnathos saltator RepID=E2BSB2_9HYME
caccaaaaaaacggtttatttaaaaaaaataatacatgaagattatatacttcctaatacatcgtaaataaagtagggaatttagtttttgtttactgttgagaagtagtctttgctgccagtggggtcgggtttcatggttttctggccaggtttccatcctactgggcatacttcaccgtgctcgtctgtgaactggaaggcttgcactaaacggagggtctcgtcgatggaacgtcctactgggaggtcgttgatggtgatttgtctgaggttaccttttccgtcgatgatgaaaagtcctctgaatggaattccagtttcttcgtccaatactccataggccttggcgacggctccggatttgtcggagagcaaaggaatggccatctcgcccaaaccgccttgtttccttggagtgttgatccaagccaagtgagagaactggctgtcggttgagcatgcaactacagctgtattgatttttttgaattcttcgaagcgatctgagaaagcgatgatctcagtgggacatacgaaggtgaagtccaatggatagaagaatagtactacatattgtcctttgtagtcttccaaggaaatatccttgaacatgccattgacgacagcggttcctttgaagactggagctggtttttggagtgatgggacaggcatttttagttgatgatatagggggaaattcttgatacagaactaattaacagccacgtgtgcagaccggtactacttccttgtgatcgcaccgacacagacgagaaaaatgaaaaatgagaatgataaattatttttcttttattcgctggtcgcggtcgctactgctagtctgag

SEQ ID NO: 9406 - DNA, 848 bp, Diabrotica virgifera
  SmartBlast Evalue=9E-17; Info=Sugar transporter n=1 Tax=Culex quinquefasciatus RepID=B0WPL1_CULQU
tggcagtctcagtggaaggagagttgctggaagtaatgtatgttgggcttgaaaccgaagatgagcatgagctaaaaccagagaatggaagtagtcaaaccaatactttattttatatctaacagttcttgtgatacaaatgccaatactaataagtggatcacaaatagtatggaattctcccagtatacctaaaataacttcaaacgatagccagataaatcctttggaccatccagctaccaccatagatatatcaatgatagcaggcattccaggcctggctggacttattggaacgcttgtattaccaaaattttcgaacattttgggacgaaagttaattttacaagttatggtatgttttactctattgggatcgctactgttgacttttagtagatctgtgactgtgataattgtttcaagatgcattattagtatatttttacatggtgctgttgctattgtacctatttatattacagaaatttgcgaggatcataatagggctaaatttggttgctttttaggactatttcatcaaattggtcacttttatacgtttgtagtaggacctttgtttagctataaaatgtttaatttttttatttcacttccagctattccgtttcttgcactatttatatttttcccagaaagtcctgcttatttgctttccaaaggtaagaggacaagctgtgtgaaagcattgaagaaactgagacgtaataaaaccgacaaggaaatagaggaagatataaaaaaattggaagaaactgtcaaatccaaagaacgtactaagcaaaactccagtattttatcgttattccaaactaaagaatctc

SEQ ID NO: 9407 - DNA, 851 bp, Diabrotica virgifera
  SmartBlast Evalue=1E-82; Info=Syntaxin 13 n=1 Tax=Tribolium castaneum RepID=D2A0Y0_TRICA
aataaagaacagctgatgttaaatgttatctattggcttccaccccttattttcattttcaatattctatgaagattattatcagagttattcagtattactaaaaaatgaatcgtcagcctccaacgtacggagctatagctccgtcaacacaagtggtatttagtgatcaagtagctacggaattcaataatagctcagaaaacgttgttactaatatttatacaataaacaacagtatcaaagttttgggaaatgctttaaaagtaattggaaccaaaaaagacaaccaaggcataagaagccaagttcatgtcacgcaattaagtacaaatcaaatagctgccagtactagtaaggaaattgttaatttaaaacagctttcaaaaggacacaaacaaagacttcttcaagttgaaaaattagaagaaaatttcaaagaagcactagggaggtatcataatttgcaaaaggatgtggccaataagcaaaaattacatttattggtaccctcagaaagcgtggaggaaacagcacaagatgataatgatgaacagcaaatgcaggctcaaaaaactagagagttggcatttgaacaagacatgttaatagagcgagaaaatagaattatgcagatagaatccgacattttagatgttaatcaaattatgagggagttggggtctatagtacatagccaaggagggaccatagataccatcgaaaacagtattgaccatgcagctggaaatatagaagaaggtacagagcaactggtgaaagctgctcaatatcagaataaatacagaaagaaactaatatatcttgtgggaatagccgttatatgcgct

SEQ ID NO: 9408 - DNA, 843 bp, Diabrotica virgifera
  SmartBlast Evalue=7E-91; Info=Retinol dehydrogenase 14 n=1 Tax= Harpegnathos saltator RepID=E2BNF8_9HYME
attttctcggcgttgaactggacacttccactgtactagccattttagcggtgttacttcttggttttctgaccgctgtttcgctgctgaagttctacgcttatgtgacctgcggattcttccacgaaaaagttagaatggagagaaaaactgtaattgttactggagcgacgggaggaatcggaaaagaaacagcacgagaactggcgaaaagaggagctaaagtcattattgcttgcagaaatgttgagtctgccaaaaaagtaagagacgaattagcacaagataccaaaaaccaaaatatcatcgtaaagaaacttgatctctcatctcagaaatcaataagagaattcgccgaagatatcaaccgtacagaaaccaaactggatgtgttgatccataacgcaggtacagcggaaaataaactcaaaaaatcagaagatggtattgaactcacaatggcgaccaaccattttggaccatttttgttaacacatctcctcattgatctacttaaacgttcagcaccttccagaatagtcgtagtagcctcagaattatacagactcgcttcactaaatctagacaatcttaatcctagcagtacttggtgtcctgaatattggtactacgtatccaaatacgccaatatatgtttctctttagaacttgcaagaagactggaaggcactggagtaacggtcaattgtttgcacccgggtatgattgacagcggaatatggagaaatgtacccataccacttagttggggtttgaaattaatagtaatgtgtttctttaaaactccaaaacaaggctgccaaacttcagtatttctagctt

SEQ ID NO: 9409 - DNA, 835 bp, Diabrotica virgifera
  SmartBlast Evalue=1E-12; Info=Retroelement polyprotein n=1 Tax= Glyptapanteles flavicoxis RepID=B7S8P8_9HYME
tgcataatcttgttttagatccttcatcttttttaagagccaatgtaacaggtgctgcaaagggcgaagatgattcttctattgaatttgcttttaacaattgtccaatttgaaattctatctctttttgatcctctattgagcatctatatggcttctttgcgacaaatttatgttctaaaagtttgatttgagcttcattattttgaacttgcccaatatcaaatttatgttttgcaaaaatattgtcatatttatttagtaatatttctattttacttttctgctctggctttaaatgttctaattttgcttcaaaaagctctgtgggaattccttcattaaagtttattgaatattctgtcaaattaacattgtgattaaacttttcaatcttctcttcaatatctagatctaatctttgataaatttctaaatcaaaatcttgtttcatttgaaaattcaaaatagaatccaatccaagtagaatatcatactcgaaatattcatcattaattacaaaaagattaacatttttctcaattttattaattttcatttttgcaattagttttcctgtaaaatttgttctgccatttatcgttttaaacatattcctatcttcatgaataactaatcccaacttacctgctaccttcgaattcagaagagtaacattcgaacctgggtcatagattccacataattctctattatttaggaatacttttaatttgatcaatggcagcaaattcagtttttttggtcggttaccctttcatttaatgtctcctgtatagcaatattattaacatattgaatatcatttgatttg

SEQ ID NO: 9410 - DNA, 851 bp, Diabrotica virgifera
  SmartBlast Evalue=3E-84; Info=Mn superoxide dismutase n=1 Tax= Bombyx mori RepID=Q65Y02_BOMMO
ttaaaactatgtattatataaaatttaaaataaattgagttaacaaaacaagtgttttaacgcactaagtttagatcaactaaaagtctttcgagttccaagagtaccaagaaattaacagccagatgcctttttgtacctttcagacacatccttccaattaacaatttcaaaaatagcatttacgtaatctgctctgacgtttttgtattgcaaataataagcatgttcccatacatcaatgcctaaaagggggaccaaaccagtagttgcatgaagtggatcctgatttgcacatgtagctatttggactttttttgtattgggattatatcctaaccatccccagccagagccttgaatagcagtagttacagctgatagttgctttttcatgttgtcaagacttccaaaagcttcatttatagctgcgcataactctgcactgggatttgacttcgaaggagataaattttgccagaaaatagaatgattcaaatgaccacctccattaaacttcaaagcaggtgccaaggaaataacagtactaatatctcccttagaagcagcagcttgtaatttttcttcagcagcatttaaattggttacataagtgttatgatgtttagaatgatgtaagctcataatatctcttgaaataataggttcgagagcggcatattcgtatggaagctcaggtagggtatgcttggctctgacagcacttcgggctgtagtccttgttacagttgctaattgcctgaacccgaacatattccgttacaaatgaaaaaataaaatagtaaagtccaaatgccgacaaaaattcgttttcgtttcttctgtagact

SEQ ID NO: 9411 - DNA, 850 bp, Diabrotica virgifera
  SmartBlast Evalue=2E-47; Info=Rab GTPase-binding effector protein 1 n=1 Tax=Camponotus floridanus RepID=E2AJJ9_9HYME
attccctaattagaataaaaataataatgattctggtgatttttttgaaaatatcacaattactaagcctctgtaaactttaagatatgttatattaagccacattttgcacagctttcagaagttccaaatggatcagcaatcagaaattcaaaatgtacctgataatgaaaaagattcacaagctcatatacaggaattgctatcagaaaagaaaaaaattcaagaagaatttgatatacaaagagccaagtttaaagatttgtttttacttaaagaagctgaattagataaaaaagtagaagaaaatgtacaattaacgggagaattgacaaggttaaaaaatgagttagatgattgcaaaagtcaactagttgtagatagcatgacattagaatcaacctttgaagtagaaaaaaggaaagctgaagaagaaattgctacattacaaagattagttcatgagactgttgaagaatccagctcaacaagaactttatatgacacagaacttaaaaaattagaacactacatacagcagctgcaaaaagaaattcatgatttgaagagagagaaaaatcattctccacatcacatatcacaggaacatagcagtctagcacctagtcaagtttttaatgttttaacaaaagggttgaagaaattgggagcagattctttttcttctcaagaaagcgtggaggattcttttaaaaagactgaagaggatgcagaggtcttaagatctttagtcgaaccgttgaacgaccaaataaaggccctgaaagagaaactgagagctacagatgagcagttacaaaaatgtagagaatgtggtcatagacaagat

SEQ ID NO: 9412 - DNA, 848 bp, Diabrotica virgifera
aatcaggagacaagcagaccttgtataaccatcgtaagagacggaataaatttctaaatccttgatacataaataattaatttgagtaccttgttgcaaaacaatgttctacaagagtaaattttccatatcttatttttcccgtttaaaacaaaggaaccgcttcttaatatttgataaaaaatatgtgatttgcgtgataataaaacaattaaaaaatctgctgatctaattggttccacttcttagaaagcagactttatcaataaacaaatcagaaggacatttttttatatatatatataaacagaaaacaatttaggggtgtcataactctgattatttttatattagctgaaacctatcaacatttttaaaatgtacactaagtttactgttgttgcccttttattgtgtgttgctttaaatgaagtacatagcggagttatactcggcaaaggattaggtagaagttttacagcatgtcctgatccccttaacccaggaatattggtatccgacaacgacatttcaggaggtctcttcgaatctatcaacttaagaattccagaaataggattgttagaaacgcctatttcatgcatattgatcgttgataaaaagaagagttcaactgacccaattattggtgcaggaggtgtaggttctccatatgttgaaataagtatcaaaccaggattcttcgaatctcttcattataggattgaagtgtacaggaaagcacctgataccacgcctgcctcaacagcaacaactcctttagttaatataaatacatattttttaaatatttttcaatgtccaataaatttttgaaatagaaaaaa

SEQ ID NO: 9413 - DNA, 839 bp, Diabrotica virgifera
aacaatttgttgtttattttactgcaaataaaatattatcaatcatgattttcttcatctttgcatccgttcttattgcatctacaaccgcacaaaataggccttcctttgcaggactcagtccaaaaggtgttcctgatgtagcagcacgatttaagcccgggggtgccttgtataatcctcctcaagacctcggcactagatttggatcagccgatgctgcccccgaaagaactcctgttgacttcaatgttggtcttaaaaaccgaattaatacctggccagaagaaaacaaaccattttggtatgtcaacgctgaagccattcaaaaacatatcggagcttctccaaaccgtggaaccaactctaatggaaaccagcctttatctgatagcggaaaccaagtttttgaaagcagatttggaagcggtagtagtcagtcaggaccagaagttgctggacactcttttaacattatcattaataaccaatggaaaacgtacgtttacgacccaatcacagatgcttggtatgctaaaagaaattagtttaatccaaactattattggacaagctgtgatatcatatcaataatatatgacttattcagtaatagaccatatttggtaatattattcaccaagagttacaaaaaaaatttaggactaatttcatttcaaattagtacaaattaatggctaaaaatcctttagaggaaaaacagcaacaacataattatgaaaaggaaagttgatatgaaaaagagagaatacagaaaaatgtcttataccaataccatccagtgagataatggttggattcaattattgacaaacgat

SEQ ID NO: 9414 - DNA, 848 bp, Diabrotica virgifera
  SmartBlast Evalue=1E-24; Info=Mariner transposase n=1 Tax= Bombyx mori RepID=Q1HPJ3_BOMMO
gcaataaatacaattgatgtgattttatgccaaattgcaaataaaatgtgacaactgtcagatttaactaaagtgtcatgtcactaaaatgtatattatcagggacttacctttttttctatcatttgtgacgcactgaaaaatgctcatgaaaagaagcataggagtaaatccaagatttatcgctactaacaatactataaacgttttttgagcttcctttgttgaaccgttccaatgtttttcgacgccaattgtcgcgaaccgctttttgcttttctgtaagcaaatgagggatccaacttcctaacacccagttcttcatgcaggatcttttggatcgagatctgaaatgcccaaagatgcctctatctccaggtatgttacacggcggtcatccttaattagctaacgaaccgcatcattgttttgctgtatgacatgttttgggtggacctggcctggattattcgtcactgagactggggcgactacgttgaaattcgcaataccagcagaaaatagttgactggtgtgatgcttcattcccaaacacagaaaccatttcagcgtgacattgctgttgggataatcttctccgaaaattgtaaaaaattattgctcgaaaatgttctcagctaagatccatttttccaccgacttgctaatttcaaaaagtcactgtatctacacgacttgtatcgcaatgaaactctcgattcatgtcaacaaaagattgaggttacgtttgtgtctgaaggttttcttggtggcgccctctaagctgctatatgcaagactaaaagacaggccacgtatcgagcttaatcaataataagagtctctta

SEQ ID NO: 9415 - DNA, 840 bp, Diabrotica virgifera
attaggcaactggtgacgccaccaagttgctccaccagtgactcatgacgtcacggggcatttaagtaaatgagacctattagactacggcaactggttgcgccaccagaaattgttgtcgatctggtggccgaaccagtccaccagccgggtaaccgggtctgttggcgccaccaagccggggcgttatgttatatggatcctattagactgagcaactggtgtcggccaccactagttcatttgtattgtaatcgagtgcttcgtatttcttttctattaacttctatagtttctattaacaagcgtatatttttctaaaaccttttttgttgatttataaatatgcttatattaaaaagttcctctcgcagatttagccgttaattgtttattcattgtttaaacaataaaagctctttttatattttagaaatatcggtgaattcatcactttaccttgatcaaaaatgtttctattttgtttttgattatgctgaatccgaatgtgacgttaattggaaaatttaaaaaaaaattgagcttttatatataaggtacagtatgtctgcgtaacttggaaccatatgggaaacttttttcttatcaattttacgaaaaaaaaatattctttataaaatgctctgcatagtctatgttatacgaggtatgtcaaaaaaattgtatgtaaagtacctttagatttcacaacatcgaaaattgttattatgaaaagttgttaagaattaaaaaactatgtttgggacgcattaattttattacatcattctaattgaaaaagaaaatgcaattttttttaaattacggatacccaacatc

SEQ ID NO: 9416 - DNA, 847 bp, Diabrotica virgifera
  misc_feature (696)..(696): n is a, c, g, or t
  SmartBlast Evalue=5E-38; Info=Alpha-tocopherol transfer protein- like n=1 Tax=Camponotus floridanus RepID=E2A8Q9_9HYME
attctctgaatcgtattattagattatttttttatttttgaaaattgtgttagctgaagtgcgtttctaaattatcataaatatatcgataatattgttgtattatacaacataatatacctattatattgtatacaacaaaatatgccttataaagaaataacaattgaggaagtgtacgcaagggatagtaaattgaagaaggaagacgtcactgcattattggaatggaaggataaacaatatcacttaccagaaattacagaattacaggcagctctttttctccatagttgttattatagcaatgaagcagctaaagctacaattgatacttattttactgtcagaactttgtgtccagatatttttggattaagaactctaaatcataagccattagaagaagctatagataccgctgtacttacagctcttccaaagaaactccatctggagatactgtgatcctaggaaggctaatggatccaaactcagctcattacaatcctccagaacaatgtaaaatgttcgatgttattactttaattaatttacacgaaaaaggcccaatgaatggcgttcaaatcgtaattgacatgagccaatcaacattcgggcattttattaaagttagtcctgtacttatgaaaaagcttttatattatttgcaggaaggaatgcctatacgactanaaaagatacacttaatcaatatagcctcatttgttgataaagttttagcattagtcaaaccttttatgaaaaaagagctttttgactctttagctatccattctgacatcaaaacactttatacagacattcctcaagatatacttcctgc

SEQ ID NO: 9417 - DNA, 850 bp, Diabrotica virgifera
  SmartBlast Evalue=2E-15; Info=Cytochrome b561 domain-containing protein 1 n=1 Tax=Harpegnathos saltator RepID=E2C1A3_9HYME
gagagtcagtctatgttttattgttatagtaaaaaaacaaatggaatagcgcccaccttacagttgtaaaaaatgcgagcactaaaacaaataaatatacagaatatacataaatatattattatcttctggttttcggtcattattttcgtaaataccaaatttctgcacagtgatgtactaatcgttcctcaaataattgtaaattgatttaaagggtccgattaaactgtatgttgcataaaccaccaataacacaaccaaagccacccaacctcttcccgttccgtacatatattgtaaaccatagcagagggttgcgactcctaatgcataagtggtaattccaagaagaatgtggcaaagttttatcactcttggacttaataaatgtctaaaatacatagtaattacacctccaagtgctgtgatgaaactgaatatccatgtaattaaacctaaaataccatgtgtcgaagtaaagtgtgcccgattggaatcttctttctggctaatttttagtgagatgccaatagttatacagacaaaagcaaatgccataactatcatatgagccagctttttttcttccctagtgttgccaaatgtaacgacactctcatgccgaaatatttgtacaccttctgccatgcataaagcgaaacccgtaacacacagtataatatgccatgtacctttgctattaacagggctatttgatataaataactgccacaatacaagaagtacgaagactgctatcatctgttggaacaaaatttccgtaacatgaaaaattctttcttttgacgtagtcataattgtgaaactgtggcaggtacttctcaaa

SEQ ID NO: 9418 - DNA, 836 bp, Diabrotica virgifera
  misc_feature (174)..(174): n is a, c, g, or t
atccagtggtacacgtgataggagtggaatcagttacctttggaatggtttactgtataacgttgtatgacttttttttgaggagattatggtttttcaaggttttatacttttaacgattttttataatataatataaaaatcaaataatattattatataatatattatatnttatataatattatattatatattatgtaatacctaatataaaaaatattattttttatatttttacgattatttttgaaatttctcattataactttttttttcttatacatgaatatactatgtatatattgctcaataaagagggcttactttctgttctttaaaatggtgtatcatctatatttaaatatgtaatggaaaccgagtaattctttgatatttttttacttgtattatttaaaattatttcttttacaaaaattacataaacattagtcttagaaaacatcactttagttaaaattatttaaacgttgacatttaaaaaattttcaaaatcaaagtccatctcttcgttagcattagcttcaatatcttcctttgacacctcagttatcttagagttcccacaattagtacccatgcacatgcaccctttgcagaatattgaacaactaattccattttcccacaaccgcagttttttgtacatcctttggtacatttacatgctattttttcaagcaaagcttgtggtgcaggagctttgacagtaaatattggaattaatccatattttgaagtttgcccggccgagtcaagtggatccaaagtattacctataaaaaataagattcaatcataacacacaatcacat

SEQ ID NO: 9419 - DNA, 848 bp, Diabrotica virgifera
agtggcggctagtcctatgaggcaggtgaggcagtgcctcaccagtatatcaatcgactctttaccttattttcgttatttcatcataaattctttaaatacaatttaactttgtgaaatttgctaaatacctttatttttattataaaacttctctacgtgggagggtatatgcgtgtcatgtccactttctcaaattatatagcagaggcatagtagatccatgcctctgatggtgccttgtctagcatattacgaagccgacagaaataatcggccggcagcaatacaatttgaactgagaataatttttggaaaatcttataatatagtaatttgcttattgcttgtttctatttccctatattgaatacatttacaatataagattaaagattagttctaaaatgaaattatcacgggtttgtaggtaattatatagggcttttcatttacattcatttgtttcgaccttctgtcatatgtcatataatccgtgtatattaatattatacacaaattatacaacataataatatgacagaagctcgaaacaaatgacatcgatgaaaatccctattgtttgcgtacaataatttcattttggcaactgattagtaataacagaatcagttgtccgttgttgtcatgtacctagtatatataatataatgtaaattattttgcttaatatggctgtacaacgctgatgagaccaaagaaggacgaaacatctgattcataatgttttgatatgtggtatggtatcatagtaattatttttagctaaaaaaacagctactatgagtatcaacctgtgttgccattcttttgcgaataaaattatt

SEQ ID NO: 9420 - DNA, 850 bp, Diabrotica virgifera
  SmartBlast Evalue=1E-116; Info=TGF beta-inducible nuclear protein 1 n=3 Tax=Endopterygota RepID=Q1W759_BOMMO
acagcgtgttatggtggagtagtcgattctctccataatgccgcagaacgagtatattgagcgccatcgcaagttgtatggtcgcagacttgattatgaagaaagaaaaagaaagaaggaggccagagagccccacaaaagagcgcaagtagcccgaagccttcgcggtattaaagccaagatctttaacaaagaacgcagaaatgaaaagattcagatgaaaaagaaaatcaaggctcatgaagagaagaaaatcaagaaaacaacagaaaaggtttcggagggtgccttgcctgtttatctgttggatcgtgatgtacaatctagagctaaggttttgtctaatatgattaaacaaaaacgtaaagaaaaagctggtaaatgggatgtgccaattccaaaagtgagagctcaagccgatgctgaggtgctaaaagtcgtcaaatcaggaaaaactaaaaggaaagcttggaagagaatggtaaccaaagttacgtttgtcggagaaggattcacgaggaagcctccgaaatttgaaagattcatcagaccaatggcacttagattcaagaaggcccatgtcacccatccagaacttaaagcaaccttctgtttacctatcattgatgtcaagaagaatcctagttcgccgatgtttacaagtttaggtgttattactaagggtacagttatcgaagtcaatatttcggaattgggtttggttacgcaagctggtaaagtagtttggggaaaatacgcccaggttaccaataatccagaaaatgatggatgtattaatgctgtactgttagtttaagtctgttcttgtaggttaggtgttctttataat

SEQ ID NO: 9421 - DNA, 849 bp, Diabrotica virgifera
  SmartBlast Evalue=7E-59; Info=Valacyclovir hydrolase n=1 Tax= Aedes aegypti RepID=Q172Z1_AEDAE
agctacaaataacgttggaccatcatactgtaagtcattaagttgggggaatttcgttacatggtggaaattagttaataaactaggtatatttattctccatccaaagctgccattgcttttttgaatcaagttcgttaaaaggaatgccctcaaagccttgtcatctatagatttcgctaattcgttatctacaatagtcctacattgtgacataggaatgttggaaggtagtttaatcgtttcaacaactttaaaaataatcggtaaagtatccagatttggactactagttactggagaaatatctgccactatcagtctttctacaagctcaggatatttcagagcaaataacatggaagctcgaccacccatagaatggcccattattgtagcttttttaatattcaactgtccatacagtgcttttatgtctgctgccaggtgagcataggtatgttgatcactatgagggctatcaccatgatttctagtatcaacagctataatttttctggatggattgaatctttggttataatacttacagatactgttccagttcgacttcgaaccaaataagccatgtataattataaagggatgactttggttttcactattagtgctttcatatgtcgcatacgacatatctacaggttgcaatgttcctgtattgctcacacatcttattaactttaaatttgtgtttttatgtaaggtaaacgcaagagataactgattttttaatctagtaagagacatgattattacgtaactaggtttcttatttaatagataatttaagtagactagattttaaagcagtgcactaagcgttaagag

SEQ ID NO: 9422 - DNA, 831 bp, Diabrotica virgifera
catttcatcacattaaaaacactcttaaattctggttttctcggcttgtttagctttgttttccatgcaagtctaattatcttactatgtagtgtatttccttgtttccacaaacttaactttcaactcgtcatttcacatccgatgacgtcacaacttaaaccacgtaaatatatctgcattaaatttaatgaatctataagttattctggaatagagagttgctaatttaaactttacagtagattttattattcaaataatttaaattatttttgcagacaaacctccgcattttgttgaaaaggtccaagatcggatgaaactttaaccaagaattggctttgtcttgtcatgtcatgtcgcccttgtcaagttgtggatccacttcataatttctcagttggtctgtgcccattgaattggcaagtacctagtatcttcgagcagggaaccatggcacccttttagcatttgttccactttatccattaacatcgacttgtagtcataacattttaacatattacattatgtaaaccatatatgatgatgttaacactatttacggtgtgctagtttcaaaatactcggcaggatgtaagtattcccacacttttttcattttaacagtcacatttttaaccctttgctttaatctaacgtggaaatacttcattctaggcactgaagatgttctgtttagaacgaaaacgttctgcaatcgatgacattttatagttttaaataaacgattttataccagaatacatctcgaagtttttacttctgtattggttttttaaactatggtatacagccaactattgg

SEQ ID NO: 9423 - DNA, 847 bp, Diabrotica virgifera
ccttactatataatataatatgtatcaagaatgtatataatttaagtaattaggctgttacaaaaatgttgtttctacacatgcaaacaaaacgaaggttgattgacggagtttgtgtaacctcgcagagactcacgtatagtttacttttcaaagtccgaattataagaagatataaatagcccacagagggattaatattggcattatagtattgttattattcatattaagatcgttactatgctagttagcagtcatgcgagaagggggtcctgaaggactaccccgcgaaacaacatcttatagtaaccttatattgatggatgttgtaaatcataaataaagttataagttagagtcagtgtttcaactcggcataccaaccctgcaacgtatcatggcaatctaccaacttaacatggcgaccctttccctttaaacctggacagctgagacgacagagggacagctgagacgacaggacgacgagaagaaatagttatgggaaataaccaaaacaaggagaaggaggagcaaatatttataaaccatgcgggaaacagcggaggcaccacagctactaaagaaaagtgatacgatatatctattccagaaatattgggaatagtagcgtttgccctagtatttatattcgtcgtatggttgatgtatagacaatggagaaggcagctggaatgacagatccgacgagaggtgactagatcaacggaactgctgagattggatacccagtttccggaacagccacgaaccaatgagagggataaaagacaaaactggatctaacacatttagaaacaatcttctacgatttaatagtaac

SEQ ID NO: 9424 - DNA, 849 bp, Diabrotica virgifera
  SmartBlast Evalue=4E-87; Info=Alkylated DNA repair protein alkB- like protein 8 n=1 Tax=Camponotus floridanus RepID=E2AE04_9HYME
cctcaccatatagacacccacagtgctttcgaagatccaatcatgtccctatctttgggatcttcagttataatagaatttaaaaaagatgattcacatgtttgtgtgctattaccacgaagatctttagcggttatgtcgaaagaaagccgttatgagtggacacatggaatcacgcctaaaaaattcgatatagtgcatacgaaaaatggtttcaattctttggaaagaggaacaagggtatcatttaccttcagaaagatattacaaggaccatgtacatgtaaatttagatccaaatgtgactccaagctcccccaagtcgatattaaaaatgaagtggcttcccaacttgaacaggaacacgtccataaggtttacgaaaaaattgcagatcattttgatgacactaggcataaaccttggcccaatgtggtgcaatttcttgattcatttgacgttggctctgttttagtagatgttggttgtggaaatgggaaatatcttggaaggaacaataatatttttgatattggatgtgacatgagctcaaatttgttagaaatatgcagaaagagaggatttgaatcatttgtaacaagctgtttgacgctaccactcaaggacgccattgctgatggagttataagtattgcagtgattcaccacttagcaaatgaggaaaggcgtattcaagccattcgggaaatggtccgtgttttaaaaccgatgggccgagcattaatttacgtttgggcgaaaaatcagtgcaaagaccaggaaaaaacaacttatattaaacaagaccggaaaaaccgcaaggaaaatagtagtatcgtcgcgaaaacg

SEQ ID NO: 9425 - DNA, 847 bp, Diabrotica virgifera
  SmartBlast Evalue=2E-47; Info=NADP+-dependent farnesol dehydrogenase 1 n=1 Tax=Aedes aegypti RepID=D2WKD9_AEDAE
atagtcccacgatggttctttctatggacagatggaaaggcaaagtagccgttgttactggtgctagttctggaataggagcagccattgcagaactattagtggagaatggacttttggtagtaggtgctgctagaagaaaagaaagaatagatgcgttagctcataaacttcaaggcaaaaaggggaagttgtactcagtcaaagcagacatgaccaaagaagaagacataaaagaaatcttcaaatggacttcgacaaatgttggtcctgtagctatcctagtcaacaatgctggttgcgtaaaacacgtaggtctaatagatggtgacacagaagcttggaaagccactattaatgttaatctgttagcattatgcatagcaacaagagaggcaattagtatcatgaaaaagaataatattgatggacatattattcatataaatagcgtattcggtcataaagtaagtaattttccacaagtgaacgtgtatccagcaaccaaacatggagtgactgctttgacagaaacattaaggaacgaactaaacgaattaaagtcaaaaataagagtgaccagcattagtcctggtttggttgagacagaaatggtcgacgaagttaaaaattctgaatattttgagcaactaaaaaattcaatattaaaaccggaagatatagctgatggagttttatacgtcctctctacaccaccacatgtacagattcacgagctaatgattaagccactgggggaacagttttaaattgtttagttagtcaagcggttagcatttagttgtattttgtttatttttatttaaattaataaaattttcatttt

SEQ ID NO: 9426 - DNA, 846 bp, Diabrotica virgifera
caaattcaagtttatctgtaggtaaaatttgtaaaaagttttaaaaataaataaggctataaggcctatttgattaactatgtccgacaatgaatctgcggaagagcaaagtgaagatggagaattgggtcaaagccccgtagatcctaaacaaatacaagaacaagaaactgtagaattaagtggctcagaagaggaagaaggcgaggctgtagactcattagatattaagccaccacaagctaaatcatcctctcatgtctcctcatctaagagtaaaaagaaagatcaagatagaaggaagaggtctgatcgccatagggatgaaagacatctacatagagaaaaacatagggagaaatcaagtcgttcaataaaagaacgagaacttcatcagagggaaaaagatagatattatagagaaaaacattttgaacaatccagttatgatggacattatagagacaggcaagaagagaagtcaagaagcagacatgaaatgaagaggcacgatgacaaaaagctaagtagtaaagatttaagacacaaagattcagaaaacaccgtgactattatgaagattccaagcgaagcagagctgagagagctgacaaagccttacacgatttcagagccaggttactcagcaaaagatccagtaaacctgatgatgaagctgggcattccaggcataaatcttcacataaagagagaaaacacaaatctcgcaatgttgatccgttggaaggcgaagcaggaatattagttaaagaaattattcatatcaccaccgaggataaaaagcaaagaaaagataaggatgaatcgaaaatgactgaagaggaa

SEQ ID NO: 9427 - DNA, 846 bp, Diabrotica virgifera
  misc_feature (361)..(361): n is a, c, g, or t
gtcaaagataagatcatgcgtagacttaataccgaagagggtaggctgccttctacacctttgtaataaagtttctatcatgttttctttggtagtggtggttttaattttgaggtgtagacaaatatccttaacatcttttgcaggaagtgttcccagcagtgattccatactatcatttttataatctgtatcaacaaaattattttcctttaaaaaattgaaaatctgaattacgttttgatctgtcaaattgggcatataatccttacagaatcggaaaatattgcgccatgtgttcactctggtatataatttgtaacaaataaactgatattcttttttcgcatcttttaaaatntcccaccgctgttttgctttgtcgtcaatgacctgaacaagattctggtcttcctgttgtgtcgggaacaccgttgtaaatatatcgttcatcatggttaaaaagtcatcgttcattttattttcgtccttttttggactagctcttactattctacttttctttttagagtttgttgttggatgagacgttgtaccgtttgcatgacttactatactttttgtacgtgattttgacggcgtctgattgctcatggtagatgttgatggcgttgattcattttgattcccgtcattctgattactcatggtagatgttgatggagttgatccaatttggttctcgtcattctgattactagtggtgggtgttgatggtgttggttccttttggttctcgtcattctgattacttatgataggtgttggttcattttcgttctcatcattctgattgctcatggtagatgttgatggtgttggttc

SEQ ID NO: 9428 - DNA, 844 bp, Diabrotica virgifera
aatattgttagttaatcggtcttaatggatacatatgtcattgagaaaaatgtcaaatataaaactttaacacaatataaaatacgcaccacaagcaacaggatgctttccttggggcattgaatattcatagtttgaagactaaagtaatgtttttacaataaaagacaataacgtatcctttacctagtattagaatattgttaaatcgtttattaataggtttgctccaacacaatatttgtacggtcccgaaatcgtcacgaaactatttgtactgtttttaggcgcatgttcatcattcgtatcatccgttgacgctaattcgaaaatcaaccctagtgcgcaggtcagcgcaacaagtactgccatttatccgagtactgaaatgatcgtctcgaaactgtcattggacgatcacaatttttgttggaacaatcatcggaaggatgaaacgatgaacggtcattgttgttagaacgtatttcgtttactgcgcaacatgacggttcttcgttgtgttggaacaaacttaaaggcacgtatccactatgttgcgctccgctctccctgcaactgctccaattgatatggcatgcgctcctctacatacaaattgccaccgattagagctgaggcggagcgcgcaccattacacggtccgggagcgcgaacgtattcactatgtagatcagttgcaggagcgcgtaacgcaagaggaacgcgaacatagtggatacatgccgtaataccaaccacttccataacccttacgatttatgcatcgttactaagatgtttaatttgtcaaataccaaaaagttacaaataattttagaaaacg

SEQ ID NO: 9429 - DNA, 848 bp, Diabrotica virgifera
ctaacttaagcatggatgttagcaatatttcgttaatacgccccaggtaacatctgagctatggttggacttgttcacatagtgtcagtatggcagcaagtgaataaatacttgcaattgattcgagtgtcgttctaaactgattctcccccgattctaaacagctctttataaattctacgaaaacagtttgttaaagaacatcatcatcatcatagacattaatatgttagcagatttgttggggatcatcattgagcttcagcagctcggatagtttgattaatgatagctttggtcgaagtcatctgttacatgtactgtatactgtttgttgagaagctttttcgcaatgtctgcccatcactgtagagatttatcgcgttggcgtcgactctgtggaccgattctataagatcaacgcgaaacaattacgttcgttgtcgcacggtttgctatcctgtaagctcattcgggaagaatcggagaagcagatcacgaagccgattacaaagcgaaagcgataactattggtattggtagtgattggtcgatcattttcacgtggcacacaagcgcaagcgctaagcgggttgttcgttgttgttgattccacaagaattctttgttgataatgaattcgtgatgctcttacaccatcttccgtaagttcctgtagctcctcaatcgaactagttctttgcttaagcgaaaaatatcaataaaccttctatctgttaaaccaaatgggtcacttctatctcgaaggagcctgttttcctctcgcgttaaccgcagttggtttcttcgctcgagttctccatatatgtagaacaaattgcaccggc

SEQ ID NO: 9430 - DNA, 844 bp, Diabrotica virgifera
cctacatacaacagaggtgtttgcttcattccacgttgttatattgaaggtatacagccaactacagggtttaccccattttaaagtcactctttaactccaataaaaaaagtatgctcaaaattgtgcacaacagatgtttgtcaaggccatttgatggaaagtgtctgaaaacttgcaccatttcagaaatttaattgcatgaaaacttgaatatacagtcagaagttaaattagtatgtggtttcctagtacctgatgaacattacaaagattatatagaattaaataaataatttaagtaaatttaaatataactgaatggccatatagtattcgatagtgagaagtattgaagcgagacgaagaaaaaatagtttaagttttcacaacttgtaacaatatagcagccacctagatcgttggttgtcaattgtttaacaataaaacgacacctaagtcgtctaatatgaacacacttaatgtgccaattttattgtcaaacaattggcagacaacgtggggcccaatgtttataacgtcatcccatatagggaagagcaagcaggtttcaggggaggttttagtatttttggcaacttaataaaaaataagggggtataatatcactttaaaattaggtacatcaaataaagaccaatgtagttttgttttgcctttgtagaagttaataattttgtagatttagctttttgttacatagatattaagacatcggcttcgaaacactacttatttatttttaattcactgtcactgtcttttttcgtaaaccatacctttctgcaaccttatacccttaacttgtttagttcttctgact

SEQ ID NO: 9431 - DNA, 845 bp, Diabrotica virgifera
  SmartBlast Evalue=2E-52; Info=Putative glutathione S- transferase n=1 Tax=Stomoxys calcitrans RepID=D2D0D4_STOCA
ctccaacaattgtattcaatatatctgctgttatcgcgtacagagaaataagactgctatgttctctcagttattgcgctcattttcaacttaaaggttcgttgaagatggctcccactttgtacctgatcacagccagtcctgctgtaaggtcggtaactctatgtgccaaggctctcaatgtagaacttaacgagaaacaagttaatcttcttgctggagaacacctttcaccagaatttctcaagatcaatcctcaacatactgtacctgtgttggatgatgatggcttcgtaatagtggacagtcatgccatcaatacatatttagtagccaaatacggaaaagatgactctctttatccaaaagaccttaaaaagagggcgattgtcgatcacagacttcactatgattcaagtactttgtttgttagaggagtcgcaatttctagaagtcttctcttcgaaggtgagaaagtaattgcccctaaattactaacagcgctcgaggaagcctataatatcacagaaaaatttttggaaaagaacaactacatcgctggtgaccaactaacagtagctgatttctcttttattacttccattacctcatggaatgcgtttttcaacttgaaggaagctaaatatcccaaaatagttgcttggatgaagagaatgcaagctctgccttactacaaggaaggaaatcaagttggcttggaccagtattatgcaattatgaaagacaaagttcccaagtagaatacatcttgtttgctgcggatcactgtatattttcttaaaagatcgaatttttatttttaaatatattattttgacaaagtt

SEQ ID NO: 9432 - DNA, 845 bp, Diabrotica virgifera
  SmartBlast Evalue=1E-56; Info=Ammonium transporter 1 n=1 Tax= Culex quinquefasciatus RepID=B0WXN8_CULQU
cgttaaagcttggccaataaatccataggaacacagtacctatcatggcaaacaagtctgatgtgtagttagcttctgctaaggaagcggctgtttccgagtttccttccttattcttctttttcctgttcagcacgtaactaacggctagaccgaagtaagcgccgaaagcgtgaacgaatatcgaaccacctgcatctgcgacctgcaagacctttgttccaagatatgagttggctgagaatactacaatttcaatcaaacccataatgagcaaatgaagaacggtggttcttccaagcacaactcccactgaaattagtacacttgctgcagctatatcggctcggtaaatactttcgatccctatttcaattttatagtctgcgttgagttcgaagaatccctggcaaagtatagcccactgaattatgaaagatcccaataataatgtaaatccaacgctgctgtacccataccgcttcagaaacgtcattaaaaaaccaaaaccgatgaatatcatgacgtggacatcctgaaacaatggatatttttcatcccctcctggtggtgcatatctcccgaatacacaaaataaaatcaaaagaactatttgcacaatcacaagcggcaagacaatctctttcgtactcatattgtctttcagaacgatcctatttcgtttgtttactccctaagactgacttctcattacaaatttaaattggctgaattggactccgaaaaaaccgtgctcgaataacaaagtgattttcaataatgttaccgcacgaatactgacgctacttgatccctttgactaaaacgaatgttcataattacag

SEQ ID NO: 9433 - DNA, 843 bp, Diabrotica virgifera
  SmartBlast Evalue=1E-54; Info="Abrupt protein, putative n=4 Tax= Neoptera RepID=E0VIL3_PEDHC"
gccctcaacaaagttatactgaccattctctgcaaatatttaaaaaattgagatcagtgaagttctgttagatttgttatcttttgtgtataccaaatttcagaggcactattgtacccgggttacaaaattcttatttccatctccaaatggaactaattcatattcaataattttagcatgagatctttgaaatagactgtaaaaatgtaattactgtctaatagtacttcaaccaatctacattttatttttttgattcaaaaacattataaaaaaaaagatacatctcccacgattaaacaaataatatatatctaaaacctaattctattaaaatatataattttaaataggtatgttaaagaaattataaaatttgatagatatctaaaaatcacgatttttgtgaaaaactgttctctactaagtactaaggtagtttataaactattccctattaattgcctgtggagcttctgccaatcctttaactttaagcctgtcagctgtttttaagaaagcaggcaactgttcttgacttacgttcacttctcctgcatacataaattctaaaatagcttgcaagtggctgtaggcgacatctttgagaataattatagggtgttttgaaggattttcctctaatagacttttaaaataaggactacaggcggacagtaccattttgtgagctttacacgtttgtccctcacaagctaacgtcacgtctgtaaaacttttttcatctctaaggtgtcgaaaagacgacaccatattactttgaaatcgttccattttagaaaaaattgctgctgatccgccatgtctaagataaatata

SEQ ID NO: 9434 - DNA, 842 bp, Diabrotica virgifera
tgaaactaaaacacaaccaccgcctcatgttttctaaaattccgtccctttgattcattcgcttatgttggataataaaaaagttaggcactttaacaaccagccttgtttttaacaacttgtttaacaactaggaatttaatatattggcgcgcatacgggtaatatgacccttatgtgcgcccatggtgaacataaaattcttaattgtatgtcaaaaaatgcacaataactacctcttaaagcccaccaaatttcatttgcatatatttataggttttagagcagaaaataaatcgtcagtttgtaagaaaaatttcaacaccccctatcttggaaatgaagcatttgcagacatacgtttaaaaagcaaactgtcattattttttcatacataagtttgccatacttattaaaaaaaccctgtattggtgaaaaacaaggctagttgttaaagcacccaactcccttactatccaacataagcgaattaataaaaaacagaatgttaagaaaacatgaggctgtagttgggtccaattgcagtacttacatatgctagaacattccacagggtgacgcgaacctggagaaaaaatcagagtttgattgccacacccggtacacaatacaaattcacctgtctagcaacaatactattacagcgatattgctaaagaataaggctacaacatgttaaaaaaaatcacttaaatcggacaacacgtttagaaaattcgagacatcaggaatgaccaatttttaaggtggtgcgttaattctacgaatgacgcatgacgtatatagatggtacgtcatatgtcatgtgttcgaaataaatg

SEQ ID NO: 9435 - DNA, 847 bp, Diabrotica virgifera
tttttccgctagttgagtcgccatttatttttttaagacttattagtaaaattttcgaaagctttattttttatttgctcctatttttcgtttttcgattcaacctgaaacctgtgatttggtttaaaggcacgtttatttaatataataaggtctttgtatgaagccctggtgtcagttcaaatataacaatttgcttaatgcaattttatgatcagtaacaacagcactgtcatatactaccacagccataggatggtaacacgggaaggcacaagcacagtaaacgtcaagagtacagaactggcactggcgttgtcatacacagacttagattaatataacgaaatgtacatatatctaaggttaaattaaaaattgttattgtttttgctcccgacgtggtgtaaaacgttaaaatctaccttttgagatcagcacggaccgagattcaaaagagagggggaagtagcctcctcgccctccccctgattgttgttgcgccacgttgttcgttagtttagttcatatttcggccacgggtgttataaagtggcttcattcgtttcatttcagttttaatttgaaaggcctttagttgaccgttaccattgccacgccctgtataagagtaactatcgtccgggctgctgacagtgctaaagatcgaacagaggcagccattctttttttggaaagatatagacggtttgagctggtctcgactgagtttggctgcacttgtttaggcagccaatgtatagttatacattgtaatttacatcagttttgtaaaacaagattatttgtgtaaataaagttgacggctttctggctgtcttaagtt

SEQ ID NO: 9436 - DNA, 845 bp, Diabrotica virgifera
  SmartBlast Evalue=6E-50; Info=V-type proton ATPase subunit F 1 n=8 Tax=Diptera RepID=VATF1_DROME
agaatatttttattggactaatagatatattacatttacatgtttacatacgcactacaaacaaaaaattgtagaaagaaatgttatattagcaactaaaaaaggggtaggaatgatgaataatatgtattatatctgatatataatatctctaaatatcatgacaaataaaacaaacagtttctggtttaatactgaatgtgttctataacacacatattaattaataattaaacatttatattttttgtgaactattaagattttatacatttttattcaagatatattatgtacataataacaataactgttgtgaatctgttgtgttctagtaaatttttatactgttgcacttgccactgtgtagtttgtacatcactgaaacaattggaccatttacaactcatcaggattgaacatgccccttgcacgtctcaaaatggagtccttactagcatcatatgggtggtcttttgatggaatctcaagtacggctggtattggcgaattgtggctatcgattacatgtcttatgatttcagcaatgttttggttgattaaaataatatcaatatcatctcttttgaggaaacgcttaaagcaatcttctatttcgctaacagcagtatttttatcaacaaccaagaaattggggtgcctgtttttattcatttctccaactccacccaggagaaacccaacacaagtatcctcatctcctatgactgatattaatttacccttaatagctgcgtgtaatgccatttttgtttaaatttttcttatattttgggcaagtacaactcaaaaagtcacctgacttgtgtagaaaagcagctgac

SEQ ID NO: 9437 - DNA, 845 bp, Diabrotica virgifera
  SmartBlast Evalue=4E-30; Info=Prefoldin subunit 6 n=1 Tax= Harpegnathos saltator RepID=E2BJE0_9HYME
atagaggttcccttgattaaaataaattggtcagtctgtttgctttttcgatttaaaatgagtgaggatatccaacgaaaattgcaaaatgaattagaaaattacaaaaaaactcagaaagaactccaaagaaccatccaaaccagacagcaattggatggtcaattaaacgagaatgagattgttaaacaagaattagacctacttccaagtgatggtaaagtttataaatccgtaggacctgtactgattaaaacagagttaatagaagccaaacaaaatgtcagtaaaaggatggattatattagcaaagaactgaagcgagttgatgatcttattaatactttagataaaaaacaagatgttcatagggaagctcttcaaaaattgcaacaccagtttcaacaagctcaagtgaaagctgctcttcatgcttaattttaatactggacttactttaatgcttgaatatttattttaaaaaccaatttatgttaacttttgtattgaagtacattttctgttatataaaggttctgaatctgcaggtgatatctaaacaactttgaacagtccttattgttacaaatctgcagatataaatacgaaaagtattaaaataaggtaaattaccattttattattaattaaataactgccttgccataaagcatgtgtaaaataatttgtgttaatgtaattctttcataggttattcaagtatcttatcaaatgaaaatatattttgcacatttatagtttcaaaataggtaaagtgatgtatcccctgattcggttcctttgacaatatgattttttaataaaataaaaaataatgagctctt

SEQ ID NO: 9438 - DNA, 846 bp, Diabrotica virgifera
ctctagcaagaaaaaacctcaccgtgaaaaggaaccagattcaggaaacgacaaagaacccccgcctccacctacgtggaattctaatgagactgctccagcaccaggaacggaagcctggaattggaataaccaaaaccaatcgtggaattggaataatagttggacttctccagttccacctccggctcctagtattagtggattgaaagcaccattgttacctactcctgttaattcatatgctgagcctcctgaaactattactgataatgcggtaccttttggcagtaacgctaattctaatagttctcattactggaacagctcttcaacttcttcaaaacacataaaaccacataacaaaaggtacagcaaagtgaatgtgcctattagacaatctgcagcccttccccctatgccagtttcagcagttgatccagtcacattaactcctgcatctttggatacagctaaaagaaagcaattaccagcctggatcagggaaggtttggaaaaaatggagaaggagaaattaaagcaaatggaaaagcagaaggagaaagaagagagggaaacatatatggaacaaactaaacattctaataaagaaactatggaaattttaaaatccacgatgaaagaaagacaaagaagtagatttgaaagtgatggagaaaactctgataatgaaaacaaagttaaaaaaaagaataagtctccagaaccaatgccattaacacaggaggaattgatgttgaaagtgagaaggacaatgactgaaatattactaaatgtgacaaatcgccaaatagaggcagtgtgtaaagaggaattgcaacgttt

SEQ ID NO: 9439 - DNA, 846 bp, Diabrotica virgifera
  SmartBlast Evalue=1E-118; Info=Ribosomal protein S3 n=2 Tax= Cucujiformia RepID=D1M7X5_9CUCU
aaaagtcactagattttggttacctcgtggaagtttcttttctgtctgcgaccttagcgaaaatggcaacttcaatctcaaaaaagcgtaaattcgttggagatggtgtcttcaaagccgaattaaatgaatttttaacccgtgaactctccgaagatggttattccggtgtggaagtacgtgttaccccaacacgtacagaaattattattatggccaccagaaccgacagggtgttaggtgagaagaacaggaggataagagaattgacttctgttgtacagaagaggtttagcttccctccagattccgtagttttgtatggtgaaaaagtagccaacagaggtctgtgtgctattgcccaagctgagtcacttaggtttaaattgattggtggtttggccgtccgtagggcttgctatggtgtcttgaggtacatcatggaatgtggagctaaaggatgtgaagtagtagtatcaggaaaattgagaggtcaaagagccaaatccatgaagttcgtagatggtcttatgatccactctggagacccatgcaatgactacgttgacacagcaacccgtcacgtactcttaagacaaggagtattgggaatcaaggttaaaatcatgttgccatgggatcccagtggcaagactggacccaagaagcccctgcccgacaatgtctcagttgtggagcctaaagaagaaactcttccccaatccccaagcagcgaaattaaggcatcaaagcctgacgctcctccagcagttccaattgctgtagcttagggtttaaatatgtttttataagtaaaaaagttctaataaaaccaatttaaaaaat

SEQ ID NO: 9440 - DNA, 845 bp, Diabrotica virgifera
  SmartBlast Evalue=7E-92; Info=Proteasome subunit beta type-1 n= 2 Tax=Formicidae RepID=E2AV04_9HYME
acttttcatgcttgtcattattgtccggtgttgactagctgatttttttagattcaacaatcttattttataaaataattagttaaaatgatgcaaacagctaataatgcatattatcccgattattccactgctccaatgcaacgtcaaattaacccctatgcagataatggagggagtgtagtagcaatagcaggtgaagactttgtaataattggtgcagatacacgtttgagtactggattttccatttataccagagaacaaaacaaacttttcccactatcaggcactactgttttgggttgtgcaggatgttggtgtgacactctaacattaaccagaatccttaaatctcgcatgcagatgtaccaacaagagcataacaaaacaatgtctacaactgcatgtgcccagatgttgtcaaccatgctctactacaagagattctttccttattatatatcaaacattctagtaggtttagataatgaaggaaagggctgtgtttacagctatgatcctattggacattgtgaaaaagctacgtatagagcaggtggttcagctggagctcttcttcagcctctgttggacaatcaaattggacagaagaacatgcttaaaacatctggggaacctcttagtcaggagaaagctttgtctacccttaaagatgtatttatttctgctgctgaaagagacatctacactggagatagcgtacttataaatattattactaaagatggagtaaaggaagagtccttccagttgagacgggattagaagcaagtggttttgtttatattttcttacgtgtaattcaaatatactttctaaat

SEQ ID NO: 9441 - DNA, 845 bp, Diabrotica virgifera
  SmartBlast Evalue=2E-24; Info="Transcription initiation factor IIA alpha chain TFIIA p30, putative n=1 Tax=Pediculus humanus corporis RepID=E0VTQ3_PEDHC"
tgcggtttctaacctcacctttcatttatttctggtgttacaagttacaagatggtggaagtgataaattaatagattaataagcaacatttaatatatgattagatttgagaatgcgctccataaatagttcttagtttttatttctactaacatatccagtaaacgttattcgctatatttacgaacggtagtagattatcctagttttccttctagatcctgtagtaaggtctctcccactgtttattaacgaatatatcctttacttattcttaaaatgtcttcactgctttgtaagaactatgtcgtccgagtatatcaagaggtgatagatgacgttatagctggagtgagagaacactttcttgaagacggtgtagatgaagtagttcttcaagagttaaaacaaatatgggaaacgaagcttatgagtaccaaagctgtacaggaagagccggagaagaagaaaattgaccatcctgccagcaatggatatccaaaagttgtcaataatccaatgccacaagctaccaatcaacagactgtacaacaaccagctcagcaattgcaaccggctattcagcaccttgataaactggttccaatccaaataactttacccccacagcccggttccgaaggaggacacggccgaatacttcaccatccaagtaccgggctccgctctacaaggaaaccaactccaaaaaatcctcacaggccccgtcataacggccaccatgggtctgccggccagtatcgcttcttctttgctacagcaacatgtcaacgctgctttcaacagtcaacagcaagcagcttccgtggccattgtaaataaa

SEQ ID NO: 9442 - DNA, 843 bp, Diabrotica virgifera
  SmartBlast Evalue=2E-28; Info=Adenylate cyclase n=1 Tax=Aedes aegypti RepID=Q17KH3_AEDAE
aattcttcaagatctgataaaatatttcagtaggttaaaatggttttcaaatttagttttcctgttgaaattcccttagtgctatgtagtcttagtcaaacgttgctaggtcaaatttcatccaatctgtttatttacagaacctgttacgtaatactagagtatgataaatcacaatgtgaacaactaggaaatgaaaggaataatcttaccgaatggctagagccattagttcaaccgacggttaataatatcgaaactgttatgagaatctcagggtcaattttgccaatttttctcagcctctttattggaacattatcagatagacttgggcgaaagccgttcctggtgatgggtattacaggaacaacaatacatactcttctaaatactttcgttgcatactatgaatatctttcaccttggtattttgttattgcttcactaccaggaagtttagttggaggatttagtacaacatttctcattattacactttatatggcagatattacgacaccaaagacgagggccattagaatgggattttttgaagcaggagtcgctctgtcattcataattggtagtctttgttcctcttatctattctatgctaccaattacgtaactatctacataatttcaacttcaatgatgtgtgtcagtcttttgtatagtatatttttggtaccggaatctctcaaagttgaaaaaaagatgccctctttaacagaattgatgtcagatgtaaatattaaagaaattattagagttccgtttataaggagggaagtaacacaagatattacattctaacctttgatgggatacttgtaggtt

SEQ ID NO: 9443 - DNA, 844 bp, Diabrotica virgifera
  SmartBlast Evalue=4E-73; Info=Elongation factor 1 beta' n=1 Tax= Spodoptera exigua RepID=A9LSA6_SPOEX
aatcgttttaaaaacttaagggacagaattatttctcttcctcttacattttttgaaaggaggtatcagcatctgtttcgtccagatcctcattaaaatacatataaaaatggcttttggagatttaaaaacagaaaagggagttaaggagctcaactccttcctagaagacaaaagctatgttggaggctatatcttaagccaagccgatgtaaacgctttcaatcagcttccaaaagctccagctgccaatttaccccatgctttacgttggtacaatcacatcaaatctttctcagctgatgagcttaaacaggccggagtctcaggtaaccccttgaaatctgctcctaccaccacagcacctgccaaggatgatgacgatgatgatgttgatctatttgcctccgacgaagaagaagatgctgaagcagctaaagtacgtgaagaaagacttaaagcctatgcagaaaagaaatccaagaaacctgaattaattgccaaatctagcattgtacttgacgtaaaaccatgggatgatgagactgacatgaaagaattagaaaaagtaaccagaacaattgaaatggatggtctcatctggggagcatcaaaactcatgccagtaggatatggtatcaacaaactgcaaattatgtgtgttgttgaagatgccaaagtatctattgatgaattagtggagaagattcaagaattcgaagactacgttcaatctgtagatattgctgcgttcaacaaaatttaaacaactggtactatatttcttatgtatttttatgaattaaagcaatcattttaaatttaaaattatttattatgcata

SEQ ID NO: 9444 - DNA, 845 bp, Diabrotica virgifera
catgatttacaatgtatcaactttgtaaatcataatttgggagtgcttctcgtaacattcagcgtgtcttggtttgtttatttctggtgcatctttgttgtgattttagtttagtatcagacatgtacaggtatctacaaattcacactcaaaaacctacaagcacaaataatacagtgactgacaaagcattgtgtttaatagccctacttacagttttgaagaataagaacaacaaatttattggatgcctccaaaagataccaatcttccaactcatacagttttgaaattattaattttctgagtggtactttttttattttacaatattactttgcaaatagagtaaaatttctttaatctgccacattcaaaaattgaaactggattgatggatataaaatattctggattataggatgatattgataactgttgtgtaaaatttctttactaaataattactttttgtagagtcttggaaatccatacaagcacattatatgtatgtcatcaatataccagcttctaatttcttggctctacaactcttagtgagtcttggcagcatttatactattttcctccaaacttgccagtcttgcgcaataatctcccactgttgcacccccatcttacgcagatcactcactactccatccttctatccttttcttgggcaaccaactgatctgccatcgggcatttcccagaaggttatatttagtagtcttttatcattcttgatgtatcatactatggtttcatctccatagagtggttggagttcctggttgtgtctttatcaccactctcatgtcatctcatctctacaaggcccc

SEQ ID NO: 9445 - DNA, 841 bp, Diabrotica virgifera
  SmartBlast Evalue=2E-61; Info=Retinol dehydrogenase 14 n=1 Tax= Camponotus floridanus RepID=E2AM66_9HYME
tctgtgtctattccctgtactttacatattctttcactttcttcccacagtttcttggacaagcctggctcggtggcactcttgtacctggacaccattttgcaatcatgaaagtgctgaccattgtgcttttctagcccgtttgctacagcacagtatatctgggtttgtgcaccttctgaagcagtcttaaagaatgtatcaatgaaaaacaggataaaccacctaatcaaaggtgtaatattcctaaaaatctctgtctttataaccccagggtgtaacgaataagctgttatgttggttccttgaagcctagaagccagctccatggtaaacaatacttggcacagttttgacgtaatgtactggttagcttctgttgtaaaaaatgtcagtttacgaaaatctatgtgccctactttggccccaatggcagatacattaacaattctgcttgggtgtttcttcattagatctattaacaaataagtgagtaaaaagtgtgaaaaatagttggtctgcataacaattgagatgccatcttcagtctctttatttcccaaccttccagctcctgcattgtttactaagatgtccagcctgtcttcattactatttatatcattggcaaaccttcggactgaattaaaacttgttaaatcaactagtctataaacgacattcttattgtgggtctcagtgataatcgtatcaacagcttcttttgctttggcttcatctctacaggccaaaattaccttggcacctctttttgcgaagtctaaagctgtttcataaccaattcctgtgttagctcctgtcacaatggcagtttttccag

SEQ ID NO: 9446 - DNA, 845 bp, Diabrotica virgifera
  misc_feature (814)..(816): n is a, c, g, or t
  SmartBlast Evalue=2E-32; Info=Beta-amyloid-like protein n=1 Tax= Camponotus floridanus RepID=E2A6I8_9HYME
gaaagaaaagaacaaagaaagaaggaaaaatcagagctaaaagaagaaaagaagcgagtcgaagaagctttgggtaagaaaatcagcaattttgatgatgaggatatggaagatgaatcgttgcctgaggaaaaaacatccaccacatctctacctacgtcaggaattactttctctgaaataatgagcaactcaataacagcaacttctgagaaccacaatgttgacgatgctgcagtgcaggaagctgtagaacaagtcgctaaagctgccagtcacagacaagacatcataagagtagcacatgtaatgagccacgatatcagtcacggtgaacctacatattctgtacgacgagagatatttgctcgcaaagacggcaagagcgtgtacttcacattggcgttcgcaggaatggcattaatggcagccttagtggtaggagttgcggtagctagacgcaaaacagccagatctccccagagccaaggcttcgtcgaggtagatcaagcagctacaccagaagaaagacacgtagccaacatgcaaatcaacggctacgaaaatccgacttacaagtattttgaagttaaagagtaaattggtgtgttaatttcgatctttcggagcgtaatttttgcctggcagcacattttaggtattattttctaaaatggcaatgttgtttctcagtaagtaaatacatactcaagtttctgcttttgttcacaactaaaaatgtttctaaggaaaatgattgcagtattatttgatattaactttgatattttttctttgtaaataatttggcagnnntgtagtttgtcagtacgcgttacttgctg

SEQ ID NO: 9447 - DNA, 845 bp, Diabrotica virgifera
  SmartBlast Evalue=1E-71; Info="Ubiquitin conjugating enzyme E2, putative n=3 Tax=Culicidae RepID=Q16LE6_AEDAE"
attttgttattaacaaaatctatttgatttttctctaatctattttaaatgttttatgtacagtttaagtaatttacactttttgaatgtttatctaaattaaatccgtcatttatgcaatgaaagtgtaattacaaaatgtcaggaatgtcaccatcagagaggagattgcagaaggaattgatgtctctcatcaaagaacccccaccaggagtctcagtagatactgacataaccgaaaagaatttactacattgggttataaacatggacggagccgccggtaccctgtatgagggtgaacactttcaacttcaatttaaatttagtaataaatatccatttgattctcccgaggtaaccttcgtaggaacaaacattccagttcatccacatgtatatagtaatgggcatatttgcttatcaattttaacggatgattggtcgcctgccttgtccgttcagtcagtttgcctgtcaatagtatctatgctaagtagctgtaaagaaaaacaacgaccaccggataactccttttatataaaaacttgcagtaaaaatcctaagaaaaccaaatggtggtatcatgatgattccgtgtaatggctggtccacagtgaatggaacttaaaagttatgtgattataataatatattattgtttattgatagattgaaaattttatatttaaataatagattttctgaattattgaaattttcatgtgttagactctaaacaataaatatataatttgtctagtgcctaccataaagttgtattatgcttttctttaaacttaaaattataatagacgtttaacttgttgctaataaatatatgc

SEQ ID NO: 9448 - DNA, 838 bp, Diabrotica virgifera
tctgtgatggcaacaacgaagtgattcacgaacaataattgtcactctgaatacaggtttacattgggaaaaaaaagtgtaccagttttatatgacgcgaagtgtacttctaagttattatgagtttttgaagcgtgaaattttggaaatctcatttttatacaaaactgaacattattatgtaatagaaaaaaatgtgtaagttccctattgcttatgcataagatacacattacaggtaattgaataagacaataatctataagattttatttataaaagttattaacatttatctaccaatgtgatcattcatcagtcaaaagacacgagaacgaaatataaagaaattttttttcagtgaaaaagttttcaagttttttactgaaatggactgttggagaaatgcagcaggaaggacaagggtagagaaaaactctctaatattaaatatcaaaacaaattatataagtaattatatacagtgatgagcgcgctaataaccggcaaaatattatttttctcatgagcatctttcagtgcgtcacagtttttcgatttctttctaacgcattaaattgtatgtgacagaaaaaggggcacgtcagtgattacggacatttataacatttattctagttgtcgatagatatcgctataatcgaaaaaagttatttacgaattatatgatatatctacgaatataatctgtacaatttataagacacaattgatttgtttttatgccaaattgcaaataaaatgtgacaactgtcagatttagctaaaatgccatgttagaataaatgttgtaaatgtgtattatcacggacttacc

SEQ ID NO: 9449 - DNA, 843 bp, Diabrotica virgifera
  SmartBlast Evalue=0.000000009; Info=Endonuclease-reverse transcriptase n=1 Tax=Bombyx mori RepID=D5LB38_BOMMO
taactatttattttagaccaataatttataaatattaaatagttctaattatcaaaaaatatacaaccaaaaagtaaattaatccagagtggtgagacggtaatcaagtttggaactcttttgtaatctatgagaacataatatcattttcgaattagtgaacagtatcgtttcatatccagaaaattttaaaaacatatttctctcttatatacactacacttatattttacatcatcaataaaatactaaaacatgtttttttattttgcaacatttattaaaatgtcttaaataaattaatttaaattatttagagatacattttggattatttatttaattaaagaatttaccaagtgaagaccatgttcataaatagacgaattagaacagaagtataggtataataagaaaaacgctaatactctagtagataatgcagaaaaagttattattggtgaacgaaaaatacttgaaacgtggagtaattatataaatgaattgctgcaagatgacaggcaaaatgtacagagcaatataaatcaagaagatcctgaaattgtaaaatctgaagttcttcatgtaataaaatcagacaaaaccaaagaaacaattggaccagacaacattccagctgaagtcttaaaaatgatacaagaccacatcagtgctctagttaatctgacgtgtatactactgatgaaataccagaggacagggtaaccccaccatctctaatctggaaaacattttacaaagttaagtgcttcttgagacttgaatatcttgttcgtttgcattcaaaataaaatcacgttgaacaattcagtacgaatctaa

SEQ ID NO: 9450 - DNA, 844 bp, Diabrotica virgifera
  SmartBlast Evalue=1E-138; Info="Pre-mRNA-splicing ATP-dependent RNA helicase prp28, putative n=1 Tax=Pediculus humanus corporis RepID=E0VZS3_PEDHC"
aggagttgccggagatgactgagagagattggcggatatttagggaggattataacatcactatcaaaggtggaaaaatacctgaaccaatacgaacctggaaagaatctggcattcaaaaagaacttctagaaattatcgaaaagatcggatacaaggatccaactcctatccaacgtcaggccattccaatcggaatgcaaaacagagacatcatcggtgtagcagaaaccggttctggtaaaacgctggcgttcttaattccgcttctatcgtggattcaaagcttgccgaagctagaacgcaacgaagatgcagatcaaggcccctatgcgattattttggctcctacgagagagttggcacaacaaatcgaagaagaaactgttaagtttggtcaaccgttgggaataagaaccgtggtagtggttggtggtcttagcagagaagaacaaggttttagactacgtcttgggtgtgaaattgtcattgctacaccgggtcgtctcatcgacgtcttagaaaatcggtacttggtcttgaaccaatgtacatacattgtacttgatgaagccgataggatgatagatttgggttttgagcctgacgtgcaaaagatcttggagtacatgcctgtcacaaatttgaagcccgattcagaagaagccgaagacagtcgattgctattggcgaactacaacagtaagaaaaagtacaggcaaactgtcatgtttacagctacgatgcctccagctgtagaaagattggctaggacttatctgcgtcgtccggctgtagtatatatcggttctataggaaaaccggtagaaagagtcgaacagat

SEQ ID NO: 9451 - DNA, 840 bp, Diabrotica virgifera
  SmartBlast Evalue=8E-14; Info=SCAN domain-containing protein 3 (Fragment) n=1 Tax=Camponotus floridanus RepID=E2A2L6_9HYME
taggtaagtgataaatgtgtcacttttcttgagcacatacgcagattgttttgaatcaagtattcacatactgtcttaactcaacaaacgacgctttacacacatcctagatcagtgtttcccaacgtggggcccataccccacaggggggcaatttgattgttaaggggaaggaattcgaatatgggctggacacgagttcaccttttcgctatgggccatttatatgtaatgctaaatttctgtgaaaaacataaagtttctatataggtactgctcatacttcatctaataatcttattcttgagcctagtcaatatctttattcatcgctaaaactggaaaaaatcataatacaggagagaatttaataaaaccgtcaatatcagcatttcttaaaacgtttcttaaaatgttttaagacaaaaagtaatgacaaaaatgtaaaagctatgccactcagtaacaatactgttagcagaagaatagacgaaatgggtgaagatactgaaaaacaacttgttggttgaaaagctgaaaacaagaaatttcttgtgcaaatgaatgaatcaactttgagagataatgaagcagtattggtaacttaggtgagatgcattgatatagggcattttgctaaagaaatgttgttctgtaaaagcacaataatgaaaaatttaacatcttgtgctgctaatggcgctcctaatgtgatggcaaacgaaatgcttgcttaagtgattcttgtacattgtgttatgcacaaaaatgttaaacatctctcctgttctatatgaagcactacattccctaagaaagtgtgttaatgctattaactct

SEQ ID NO: 9452 - DNA, 843 bp, Diabrotica virgifera
taaaattatatttatattatttagtataattaaatttatatttttcttatctcaaatattgttgatattgtgttaagtcgaaattttttattacatcgggattcagaatttcatctattactttgtttacaccatctacaactttattggatgcattttttactatggcttcaataaaaccttgaagaattggatggagcgctgtggtgacaaattgtgacatgatatttagaatgacatctgacaggtgtccgtcgaactttacggtgatatgtccactattcgaagttttaattttgtttaattttgcctgatacttattaagatctaagctcagatttattgatagtctgaaattatcgatagatcctgtcaatccccctgtcggtccaactagaaaaactacgacgtggtagtcatacgtaaaacttaattttttgaaaagtagtggaaggttcaacgtaataatattggcattacgatcgtaagttactgtaacatcaccatctctgtaaacatgtgataaaccgttcagctttccatgcgttaattcgattgatgcagtaaggaattgctgttttatattatccagtagtattggttccaatttagatttttctgcaaaagcaggaaaattttcgcaaatcttatcaacaaattcatttatttcagtatttattgcagtcagtttatcaccctctagagaatttctttcatccttaaatttgctttgcaaaccattttttaacaacgcatcttcaacagatttagctgctgtcaagctcaaaagagctaccaaaataattgaagatttcatgttgaatatagaactcctgatgaaac

SEQ ID NO: 9453 - DNA, 843 bp, Diabrotica virgifera
  SmartBlast Evalue=4E-28; Info=Kurtz n=2 Tax=Tribolium castaneum RepID=D6W6M4_TRICA
gcaagtcagaaatatcaaggtgtatgttgtgcagcattgcgaggtaacaatggtcaatgcccaattctccaagtacgttgctagtttggagacacgtgaaggttgccccataacaccaggtgcaagtttcactaaagtggtataccttgtaccacttgcatccagcaataaggatcgcagaggtgtagccttggatggtcgtcttcgtgacgacgatgccaatttggccagttccactttggtcccggaaggaaagtgccctatcgatgccatcggtatcgtaatatcatactctctgagagtaaaactgaattgcggaacccttggaggggaattggtgactgatgtaccattcaagcttctacatccagctcctggtacaatggataaagaacgctctcagagcttgaaaaagatgaaatccgttgacaagggacggtacgagaaaagctttgcaaacgatgatgatgataacatcgtgtttgaagatttcgctaggttcagacttagcagagatgaattggagtaaaaatgagtgcttaacaccagcaagaaatacctacattacgagcatacctatattgcgcaatatgaatgcttttgttccttatattaaaaaacaaaaaaaaaattgtaaaaaagttttgaaaaattcaaaaaaaaaatggttcaacgtccaggagttggggagatcaaaattataaattcgcaagatgtacctatttaatcgataggtttcaaaaatggtttatattttttggttaacatgttacagctgctatcttagataatatataacgtaggtagttgtctatatcaacataaaaaataaatagataatat

SEQ ID NO: 9454 - DNA, 842 bp, Diabrotica virgifera
  SmartBlast Evalue=3E-37; Info="Solute carrier family 2, facilitated glucose transporter member 8 n=1 Tax=Zea mays RepID= B6U615_MAIZE"
tttaatagaacttataattttcccttcatgccagaaagtccgtattatttactgtataaagacaaaccagacgaagcccttaagtctctaaaaaggctaagaaaagaaggtcatgatatagaaaaagaactagaaagtattaaggtggcagtagatcgacagaaatcagaacgaggtagaatctttgatctctttatagttcctagcaatcgtcgagctatatttattatgggcttattaaatgcagctcaacattttagtagtattagcgttttactaatgaatatacatgttattcttgacgcagcaggatctatttatatacagccacgaatggctgcgattttattttcagctgtaatggtgttagcagcgtcagtagcttgcctcaccatagacaagtatgggagaaaaactttactcattacctctagttgtttaacagggctgtgtttactcgttctagcaattttctttagtttgaaaaatggtggatcagacacttccagttacagttggattccgattgtgtgcgttatgctctatgctttaacttttaagttaggcctgggtatggtacctatagtgctcactgccgaacttatttcctgctaaaatgaaggccttcggtatgaccattgcagatggattttatgttatagcttcattgctatctttacaagtatatcaaagattaactcaatattttggattacaatatcccttctacgttttttcatgtagctgcttcatcgctgctggctttacttacatatttatccctgaaacaaagggtaagacattagaagagatacaaatgattttgaaaggaaatcacccgg

SEQ ID NO: 9455 - DNA, 843 bp, Diabrotica virgifera
  SmartBlast Evalue=1E-104; Info="Splicing factor U2Af 38 kDa subunit, putative n=8 Tax=Neoptera RepID=E0VP11_PEDHC"
acaggcgtacggcaatttaatgttttctttaaaataacgttttcttaggaaaatcctaaaaaatataaacattttttaacttcattaatgttaaaatatttttagataagtagtgtgtagtatttaatataatttaccgctatggctgaatatttggcctcgattttcggtaccgaaaaagacaaggtaaattgttcattttattttaaaataggagcttgccgacatggtgataggtgctctcgaatccataacaaacccacattttctcaaacatgccttctacaaaatctatatgtaaaccctcaaaactctgccaaatctgcagacggaagtcatttggttgctaatgtatctgacgaagaaatgcaagagcattatgacaacttttttgaagatgtctttgtggagtgtgaagataaatatggtgaaattgaagaaatgaatgtttgcgataatttgggagatcacctagtaggaaatgtgtacatcaagtttcgcagggaagaagatgctgaaaaagctgtaaatgatttgaataatcgttggtttggtggaagaccagtatatgctgagttaagccctgtgactgattttagagaagcttgttgtcgtcagtatgagatgggggaatgtacaagatcaggtttctgcaattttatgcacttgaagccaatctctcgagagttgagaagatatttgtattctagaaggaagggtggcagagctggaacaggaataggaggaggtagatcaaggtctcggtctccaagacgtgctcgttcacgttccagagaaagaagaagttctagatctccaaaacatcgctctggtcgcagcggt

SEQ ID NO: 9456 - DNA, 842 bp, Diabrotica virgifera
  SmartBlast Evalue=3E-44; Info=MOXD1-like protein 1 n=1 Tax= Camponotus floridanus RepID=E2AUK9_9HYME
ctgcagggtatcaagtttctccccatatgataatctgacgcgctcgagtaacttcaaaaatccccgcttgggctcccctaccatttttgctgaaacacattattgaaaatatgtatatacattattatttttgttttcaggattgtcatggtgttcctactagccaaggaagcgcacctgtcagagatgaaatcgacaattacacattgatgagaggcctccaaaaatgatacacatacggtcattgagtttcgaagagctttcgacacctgcgacccggacgattacgttttatcaggtgatactgtacgaataatatgggctcttcatgaatatgatccccaacgaggggcagaaatggtctatcacggtgaaaacagaggtcaccaaagtgttcatttactaggtccacctcctgtggcaaaaatgagcattggtcattccagtcattgggatgtcgtttttgatgattttaagattactgaggaagtaagcactatgtactggtgcaaagttttcaaagcgccaacattaaattcaaaacaccacatagttggattcgaacccatcattggagataaacattcaaatctggtacaccacatggtcatgcatgaatgtgaattggatgttaatgaagatgtagctatatgggaacaattttctaaagagaagggcaaaccttgctattctaacacggcgtctttatgggataagtgtttaacgcctctggttgcttgggccattggatcaaaaggtgaaaactttccaaaccatgtcggtgtacccttagcagagaagaaacattctttctatatgctggaggttcatttcgataatcc

SEQ ID NO: 9457 - DNA, 839 bp, Diabrotica virgifera
  SmartBlast Evalue=3E-15; Info=Endonuclease-reverse transcriptase n=1 Tax=Bombyx mori RepID=D7F170_BOMMO
gtcaaatgttattccgactgggctaacgtcaaaattaggaaaaagtaaaaagtagattcgttaagttcctcacagtattaaataagtatttcttgtctaatttattaattgttacgaagttattattttttatatccctcgcgtgttattagttataaatctatatgtttaactgtttaaattttagaacatgacacatattatgtttactggtacgaatattaacaactatttaagtctaacataagacattgttgcgttgtggttgtgaccaatatagtatatttcatgtgtgaatttcaattaaagttcatttttttgtgtaatatccattttttatttggttattagtgatactttaatgattaagattattagtttgctcgcaaaggtaatataatcaactgtgactaatcaaacgtaataaattaaaatagagtagatatattaaaagtacgcgttcatgatgtcgacataattcttcttttgacataataatcctggatgggtctttgcttgtctggctatgtctttccagtcagatctctcttgtgcccttctcctccattgtcttatatttatggttttcagatcatcttccaagtcatccaaccatctcgtcctgggccttcctttttttcgctttcctatcgggttccattgcaatattttttttattatttttttttttgttgtttttgcatcctcttgtctctggacatgtcccagccatgacagtcgttgacttttcacaaatctaacaatatacccttcattcaattcattaacctcgtcgtctttcctgattctccatgtgccgtattcctcttttatcgggc

SEQ ID NO: 9458 - DNA, 841 bp, Diabrotica virgifera
tgggctaaaggagcatgcatttataattcacagaagggcaaaccctcttgcaatatacaaccatactgattctaacgtttgaaatggagcgtaggtaaatatagatagtgccacctagtagattccaattaggcattactgtacaaaaaagcgacgtataagaggtaaaggaggaaatatttaatcttattttactttttgtttcttaggacgtcgtaatttttataatttttatactcctgtaatgtctagacagtatattaatatttctataattttattaattttttctaatatgtttaaccttggagtatctattggactaaaaagcatgtaactgattgtcactatttgacgaaaatgaacaaaattatttactccacataagcaagaaatcagcaaattactaaacctaacttatgcatgcttaaattaaattcattgcttttcacacacttagaatttggttttggtactcttggtttagagattgaaattgctatctaatttaatgttgatataagatatatgtaagaaaaatatcatgttggatgagaaaaacatttctgactacataaacgcaaatcattgaaggctttgatgaaatatctttatttagtaacttagtcaatcaacttattgaccattcttgttatatagtcagttttgaaattaaagaaacaaaatcatcgcgtttgaattgtggtatactgatcatggtattgatatcggtccatttcgaatagtatttagtgagattgataaattgtaggtagctaatatcagtattgaatagcatttgatatatgtttttgtaaaagatattttttacgggagccac

SEQ ID NO: 9459 - DNA, 840 bp, Diabrotica virgifera
  SmartBlast Evalue=2E-78; Info=Glycogen debranching enzyme n=1 Tax=Harpegnathos saltator RepID=E2BPT9_9HYME
taccaagtatcttggaatgttttcaaaactcttggtattgcgttcgatccaatcccctagttctttggtgccagggtccagtttgagccttttccaaataaattctatcatccagttaccatctctcagattagcacacatcggatgaccaaggtcattattcggtcttatatttgcaagtaacgacatgaaaccttgtaatccggcatacaccatcgaaccaaagctgggaatgttgtatgtatcgaaaccaaatccttcgtcgcgttcttcttggccgcatctgtacaaggctctattcatatcagcaacgtcattttgttaactatggtggctagttcggtgggtttagccagtgaaatagaactgattaaggtcctgacggtctttatagcagcacgcattggttctggcagtgaagatttaataacaactacagagcctggtttgaagtttttgaagttcagttgagtgacgttcttcgttcccgagtcgactttttcaaatatatcggagtccggaacttgaatgtgctctttcacacatacttggtagtcaggaagaccgttgatccatttgcaatccttgataaatggatgccatttggtatatttagaaccaccggatttgtgctttacgtgactcaaagtagcctccaagacgatttcgtccagatttccctcgaatcttaacggttttattcctctctggtggtctcctgcatcctcatttggatgtccaaatgctgtaaaagctaccaaaatatagctttgatgggtaacgggacagtgtctagtcacagctactatatcagcatccatctggtctacatatacctgg

SEQ ID NO: 9460 - DNA, 843 bp, Diabrotica virgifera
aaagacaccaaacacgaccccccctctccaatccctggaggtggggtgggggataactactttacaatcttaaataggaacacccattttttattgcagagttggattccccatgaaaaagtaagcaacatttattcgaaacattttttagaactgttgatagatgccgccaataaaccgtagttttccgattatagcgccatctatcaaaaattataaaaaatatcttggataaatgttggggggggggggggaggcataataaaaaatggtaccgcctaatcccccgtgggtgcaagtggagagtagtgtttggtgtcattcgataggtttttgataaatattaaacacatggtttttggatttacttggaagtatatttctcgagatattagaccgtttctataatttacctagtgtctcacgataagtcatttttccgattatagctccatgtattacaattatagccgattatatttatgcaattatagccgattatagcgccatacatacaattaaaaaaaaatgtctcgaataaaagttgctcacctttacgtacggaatcaaaatctgcaataaataaaacatgtgagtctatttaagattataaagttacctccaccccacttccatgcggtcgtggggagtcgtgtttggtatcatttgatagatttttgaaaaatattgaacacatatcttttcagtttttcgatccaacgttcatttcgcgaaatattcgaccatcccgccactcttggtacaccctgtagttgatttaatgtaattttaaataaaataatattaaataatatttctttagttactaagaagtccaataca

SEQ ID NO: 9461 - DNA, 841 bp, Diabrotica virgifera
  SmartBlast Evalue=2E-26; Info=Adenylate cyclase n=1 Tax=Aedes aegypti RepID=Q17KH2_AEDAE
accataatcacagtcattaatataattatcgccctgttgaagtttgctcttggtttggttattacgtgaaccattccttttaggtctgagggtttgaaaatatccttccaacttttttcatgttcgatattttccaaagactcggacaaaacaaaaataaatataaattatgtttaatcccattattccagctgagataccatacatggacgggtagttagttgcataatatagataggaactacaaagactgccaaatagcatgcctgctcctaacatcccttccattagggccattctcatccctctagtttcgtcagtgctaatatcagaaatgtaagacaatattgtcactaaaaatgctgcaaatccaccagttaacattgacggtatagacgacaacatgaaataccatggatttatggaaggaatggcactaaacactaccatgattaacaaactaaaaaattggcctatttgtgacaccaacagaatgggtttccttccaaacttatccgaccattgaccagcaaacaaacaaatagttaatccaaatacttgagtaactattgaactgactgtacttataacatttactgttggttgaactttcttctgtaaatcatttaatgtaggactctccgtgtttcctaacaaggcacattctgtttggttatatcctaatattatgtagcaggtacgatatagagttagatttgttcctactggacctaataattcaaaagcaaaaaatgtgagtaagagaggcagttcaattaaacgccttgtaaaagccatttttatcctaaaacacaaatcaagtagtcaattttattataat

SEQ ID NO: 9462 - DNA, 841 bp, Diabrotica virgifera
aagattcctttgatcaaaataaggatagcctgcaggtctaggcggtatgttatccaattcgggacctcttccagaagatcttcccaataactgagcaggagttaatgaagccaatgactggtttctaggaattgcatcataaaaatcttcttctctaacttgtgtactaatagaaaaggaaaaggatgcagatgatactgtttggacaccaacagattttacaagtctttttttccgttcatcacaagatttacatgtagaaggctcagtttggaccagcttttgcagacgatttttaacatagttattggattttgttatctcaactggatgtgttttgtgaggggaaaccataggagctggaggaggggaggatttgttttgagtactagtttcatcatctgagaagctatgatcatcaataacaattacttcttcagtaagtcctacttgatccataagcttttgtatatattcactaaacgcaattttttgttgcgcaggtgtaggaatttctgtgaatggaaccttcaattgataactcttcaccaaaggagattggaactgttgggggttggagcttgacttggcttttctttgaatcaataacggtccagaaaatttcttttcgctttgttccagatattcaatggcgtcttgacaacgtcttattacctttattttctctttcaaattttcaggactggcagcataaacttcaggttttgcagttacagccagaaaatcagtcaaagaaattttcttctcctcaaatagcttttgtatatctccttgattattacttggttcttgaaagcttggtggattaggagtagacatc

SEQ ID NO: 9463 - DNA, 843 bp, Diabrotica virgifera
  SmartBlast Evalue=9E-78; Info=Ribonucleoside-diphosphate reductase large chain n=1 Tax=Aedes aegypti RepID=Q8WRS8_AEDAE
tagatatttggcgggaattagaagctttctacagtttttattaccgttttattgataatataatttcaaatttagatattaaaacgttgaaaagtatctttaaaaatctcaagtcttaaaaatggtgaaaccgttgaataaattttatgttttaaaaagaggaggccgaagagaagaggtccatattgataaaatcacatcacgtattcagaaattatgttatggcttgaatgccgattatgtcgatccagttagtattaccttgaaagtggttaatggcctatacccaggagttactactgcagaattagatgcactggctgcagaaactgctgctaccctcagcgaagaccatcctgattatgctactctagcagctaggatcgctatatctaatcttcagaaagaaacgaaaaaattatttagtgatgtaatagatgacctttacaatgtattcgacgaaaacctaggagaaaaatcaccaataatttcagaagaacttcacaaaataatagcagaaaattcagaacgtctaaattcatgtatgatatacgatagggatttttcctatgattatttcgctttcaaagaactggaaaaatcatatctattaagaataaacggcaaagttgtggagagaccacaacatatgttaatgagagtagctgtaggtattcataaggaaaacattgatgatgcaatcacaacttacaacctattgtccgaaagattttatatccactctacaaatactctactgttagcttctacacccaaacctcaactatgttctagcattgtcatgatgatgccagatgatagcatagaaggaatctttaactg

SEQ ID NO: 9464 - DNA, 842 bp, Diabrotica virgifera
cacaaaatccaccaaacatgttgcggctttctttcttgtttgtagctctcttgatcttttcaacagtgcttgatgcagctgttctgaaagacgattttgactacatcccggataggccgcaagatccaaaagggccgcaagatccaaaagaggtcacatctagctcttcggtggatcccctaagtcctgaaaatggtgaaattgacattctcgaaggaaatttgacggattttaacggcaccggaaaggatttgtttgtgataaaaacggttgtttatgaaattggaattttgacggatattggaaatgatactaacttcgacaatgaaacccatgaacaaatcgatgtttcatttttcgacccagcccacaacggctccatcatagacctatcccaaatcccaataccgattcaaaccaacgtcagtggagtctctatcaccggattactcccagccaacttcggcgacttgaatttacttaaaaatggcactcctacagtgcaaggatcacactttcctctgttcccgaacaaacaagtaagagttacccataatgtgagcacatctgacagagatagaacgaacgatgtcttgtctggtttgccggaattgttgggcttgaaagacttcataaaatacgattcttcctctgaagaatcgaaggaccaaagtagcggagaaagtaaagatagtggcgaatctaaagaaaagagacataagaaacacaaggaatcaaatgattcaagtgagtcaaaagaatcaaaggaagatgacaaagagaaaaaacattgattctttaatttattttaatttgtataaataatatattaaacacttgtt

SEQ ID NO: 9465 - DNA, 841 bp, Diabrotica virgifera
  SmartBlast Evalue=3E-47; Info="Presequence protease, mitochondrial n=1 Tax=Harpegnathos saltator RepID=E2C3H2_9HYME"
tcgttagtccttttaaaaactcttcatttcctttcgaacttggaggtattggagtatcaaccgactgaaaaacgcctaatttcgcttcgaatatgtcctgaggagtgattttgtctatttcagatcgtaaccagttgtaggtgttatcaaaaacatctagcgtatctaaatttctgggatctctgtaactaaagaaagtaaatactccgtcggatagtactctcgcaccccctccatatgctccttgtttttccctgagttctggatgtaaatacttagatgacaacaatcgactcaagatctttaacttcgcataatccgcatgagtaaacgggactgtgagtacagctttactacagtaattgacgggtaagttgaggacatggtgttgacaattgacagcttcagtaggactccacacatcaccgactatgtaagtgtcttcggattgcagatgcggaacagttgcttgtggaagagtgccaatgaagttttcgaagtacgaataatatctgtttgattgtctggcgtcaaattcagtgcaaccctcattttcttcttgtcaaataaaatctcagctatattcaaaatttctttgagtatagctttgtagttggatgtactgactagactcttcatgtacgatatatgttgtaaaccactcaacagttccacttgatacgcagttcccgagacaagactcgaagctgcctgcattgcatatacatgtccagactctgttataccatttgacaaattttgacatgtacaattctactagcatcttaaacctgtcgacatcttttagccctctcatagtgaatagctgattccaaaatgt

SEQ ID NO: 9466 - DNA, 841 bp, Diabrotica virgifera
  SmartBlast Evalue=2E-72; Info="ADP-ribose pyrophosphatase, mitochondrial n=1 Tax=Harpegnathos saltator RepID=E2BWY5_9HYME"
agttaagttcccattaaatttaaacttaaatagtaaaagatatgtaggtgttttaaacactgctgtgcttgataaactaaaaataaagtattgtgataatttcaataagaattaaaacattgaactatttccataaataaatataacaccagttacaagttgatgttattaaaaagaatggttcacacaaaatgcagagacatattctatccatttagtgaggttaagcgattccaaataaaagatgaagaagtgccttggtcagtcagtctcaataaatatgatccacctgaatacaattcaaaagttctaattaataaaccttgggcggatccccctcttaacgatggcgttttcaatccaaagtggaatcaattagatggaaaaattaacaggcaaagccatacaggtacttacaacattgttgatggcagaccactgaatccagaaggaagaacaggaattaaaggaagaggagttctaggtaaatggggaccaaaccatgcagcagatcctattgttacaaggtggaaaatggataacacttaaaagttataaataagagtacaaatttgcccattcttcagttctgtgctattcaaagaaaagatagtaaacattgggctataccaggaggtatggtggatccaggagaaaaagtgagcgagacactccatagagaatttcaagaagaagccctaaatagcctacaaacatctaaagaacaggcagaaagagatgctcaaataataaaagattttttcaaaactggtgtagaaatatataaagggtatgtggatgaccctagaaatactgataatgcatggatggaaacagtggc

SEQ ID NO: 9467 - DNA, 837 bp, Diabrotica virgifera
  SmartBlast Evalue=1E-136; Info="Ankyrin 2,3/unc44 n=2 Tax= Culicidae RepID=Q16PP6_AEDAE"
agatgccagtgaagagatccttaaccaagtcctaaacgacagtttcgaagcagatgatcttagtcaactagaagatatctcctcgggccgaataaccaggatagtaacccaagatttcccacagtacttcgcagtcgtgtctaggatacgacaagaagtgcacgccatcggtcccgagggcggtatggtgtccagcacggtggtaccacaagtacaagcggtgttccctgagggagcgctcaccaagaagattaaagtcggccttcaggcccaaccaatagatccagaactaacagcaaaacttctcggacacggcgtcgccgtttctccggtggtgaccgtcgaaccgagaagaagaaaatttcacaaagccatcacgttgagcatgcccgcacccagagcccattcccaaggaatgatcaaccagtattccggatcagctcctaccttaaggctgctttgttcaataaccggtggaacaacaagggcacaatgggaagatgtcaccgggtccacaccgctaacattcgtcaacgactgtgtgtcttttaccacgaccgtgtcggccagattttggctcatggactgtagaaatattggcgacgctaccaaaatggcaaccgagctttacaaggaagctatccacgtgccattcatggcgaaattcgtcgtcttcgccaaacgagtagatcccctggaagcaagactgagagtattctgtatgaccgacgacaaagaggacaagactctagaacaccaagaaacatttcaccgaagtggcaaagagtcgagacgttgaagtattggaaggaaaacaacaatatgtggaattcgcgg

SEQ ID NO: 9468 - DNA, 842 bp, Diabrotica virgifera
caagtccatattgcagtatcgatcgaaaagacgtatcatctcagaggtactctcagttctaatctaaggaacaaattgtttagtggagtaaaaaaaaacaacgaatttcgattgaaatattgttcaggttatttcagataatttcgaaataattcactatttacagacattccaatatatagaggtctctgagctattgatgttttatgtgttagaccagccaagttatagaataagaatacattatcactatcattatcacccattataattgtagatattctccttctcataggtatctttcagtgcgtcacagtttttcgatttctttctaacgaattaaattgtatgtcacagaaaaaagatacgttcgtgattaaaatcatttataacatttaatgtcgttgttatagatggcgttataatcgaacaaaaaatgatttatgtattatctatacgactataatctgtacaatttataaaactatacaaattaaagaatttttttaaagaaacctttgtataaattaaataaacacaattgatttgtttttataccaaattactattacgattctgacaactgtcagttttaattaaaatgtcatgctatgatatgattcgctacattattaaaatcatattacatcattaatgacacactgaaagaatgagaagaactttaaattatagtcgtataggtaatcagtaaatcggtaaacctaaatctttttttttttcgattatagcgccatctatcaacaactggaataactgttatatgtacatgtgtatgtatcacggcgagcctttttttctgtcacttgcgtcacactaaaaaa

SEQ ID NO: 9469 - DNA, 836 bp, Diabrotica virgifera
ctgagtaacgttatattctgtttacatccgtggactaccgcattctgagtaacgttatattctgtttacatccgtggttaaactttagacaaatatataacctataagacaattattatatttaactatagcatagaaactaaattatggatgtaacaactgttttattttacaattttattcttattaaacattttataattatcaaataaccaataaggatttagcaacctgtgcaagagacgtcgaatgaagtaggttttgtgtaaatccgtgactgcataaatataatgtcaataatgtgtaataattgtttaaatttaaacaaattaaggcagtgcattaattttttaactgatttctgtgcaatttatttaggtataaggaatttaaattgattagtaggtattaattaaatacagtttaaaatttatcacataggtacctattataattaatcgtcgtttggaaattgtgatttttatttttaggaaaaactgtgcttgtagaaaaagtatagtgtgaaacacgtgcagaaaggtaatttctcactcgtttgaattgcggcactcgcttgcgctcgtaccgcaacttttcaaactcgtgagaaattagtacctttctgcacttgttgcacaatatactattttcctacgagcgtgcaaaaatgtctactttcgcgcacgcattttagtttagaaagttttacatttccgcacacgtgttacttttctgcacgcgtattacttttccgcacgcgttttacttttccggacgcgtgttaatttagatatgttaatatggccttaaagtaattataatacaaatgcaataaa

SEQ ID NO: 9470 - DNA, 840 bp, Diabrotica virgifera
caggtattctcgatgagattaaggtcgggcaagtcactctgccattccaatacgttgatattgtgttcatttaagaactatgtcactttattggcattgtgagcatgggtaccatcgtgcataaagaagtcacattcgtgaatttcccaaaagttcaataaaatgttgttctagaacagttacatagttgcttgcctccttgaacattcttaggcaaaaaatgcaatcctgcccttcattgacttccaacaaacgcacctcataccattatattttcatgatgtttgacggttttaactgtgaactttggatcgtaccttgaagcggtcagtggacgacgaacaaatttggagcttcctctttctaacacgaacgtactttcgtcactgagcctgacttttttccactgttcagctgtccagtgctgatactttttacagaaagcttattttatgttgcttttgtaagtataaggacttctttgcagcacgtcgacttgacatctttctcaagccggtgacgaatcgttcttattgaaacgttctgaagaagagcttatttttaagttccgtggcagtgtttgtaagagttgaacattactgcacggctgatgatggtgtcagtcctggatgatgtttttttaagaacttcagaaccaggttttctttccagcactgtccctgaaagcaacgacgcagccgtccgtttcaattgataaattgcctctcttgaaacaccaatatcacgtactacgccatagtgatgttgaaaaagtaactattcgttacaaagtactcgttacttacgaataccgaaagtaacgattactatactgagagg

SEQ ID NO: 9471 - DNA, 836 bp, Diabrotica virgifera
  SmartBlast Evalue=4E-26; Info=Integrator complex subunit 8 n=1 Tax=Camponotus floridanus RepID=E2AIH7_9HYME
gttgtcttaactccagttttggttttcttcttttattggtctctaacggttccattttcatcacacattccggtacatcaacagttgactggaagctttcaatatacgataaatcaagtttgtcaaaggctgaagaaatgtctttgttggactgcactttagccaacaaatctggaatgtcacctcttatgatttcttctatcagaaacgtttttatggtctgtttatcaacataggcaaacgaattccaagaagaatggattgcccatatcagtgtatcgcagttcttatacaagcataacgaatgctggtatatcggttttctatccaaaacgcacctcaaaatattaagcgccttaattttttgaaccaagtctctagccacggtaaaagcgccgctcgatagggcgccttgaatgtccaattccagattgattctgtgcattagaggaatctctttggccacgttatcctgttgtagaatagtcgtaattcctttatattgattcactacagaattgttgagttgttcgagcaaatttcctctctgaatgtcagcagatccatgacacgcttttatatatacatccagcatttgcttgtcgacatcatagaaaccgttgatctctggaatatcagcgaacagttcgaggcacttggagaaatgttttttcgccagatcatactgttcccggtggaagaagaacgtgcccaatcgtagttgatctgggcacaaaattcgttcttttttaactcttcacttttcgtccaattcgaattctatacagtcgttagattctgtgggtagcttgaagcagtcgaaggttagtaaggca

SEQ ID NO: 9472 - DNA, 837 bp, Diabrotica virgifera
taatctacaaccacctgacatctaagaaatttgaacttactcctttttcttgatattcttccttcgtgaaggctcaagtatactttcttttacacatctcttcccagtttgcctcttttttcgggtccttcttgtatgtttctccttctccccttctttttagcaactgttttaggggctatcctagtgtaaaagtacgaaattcatacagtttctttgcgaatttctaaaataaaaagtactgcaccaattgttttgaaaatttggatgagcttttattataaaaagaagtacatacatgcaaaacaatattcataaaaaatattgaaacctaaacgatccatgcgccatctcaacatagctccactgctacagtgattgggaccaataagagaccctgaaacataaaatttcacagtgactcattgaaatacaagtatttcttataccatcaactgggatttttgaaaatattaaaatttggaaaaatcaacacgaagtgttgaaaatgtttttttaaaattaactaaaacgttttcagtttcaaaaatcgccaaattgacatttgttatccgatcaaaaacccctagttgatggtatagaaaataacttgtgttacaataataacgttgaaactttatgtttcagaatatctattagtcccaatcactgcagcagtgaagctatgacttttattttcacggtgccagtagatggcgcataaatcgtttaattttcaatatttttgaagttatatttctttaggcacgagggcgaatttttattttaccgggcgcatgcgcacaccgacagtatggttttagtcgctcaaacgtt

SEQ ID NO: 9473 - DNA, 838 bp, Diabrotica virgifera
  SmartBlast Evalue=3E-74; Info="CG8379, isoform B n=11 Tax= Drosophila RepID=Q7KSU3_DROME"
gttatgtcagacttttctagaaggagaatcaactgaggctgttaaagcactatgccttaaggttattcttatcgtaacaacaggccttgactccataaatcaaaatactttaatagaatatattatgatatcacctctcttcgagtgtcttgtaaaattactatgtgatgttcctacaaggcaaagacatggctacgatgtagttttgatcattacgctgctggttaactacagaaaatacgatgcaacaaacccttatgtagtgaaactatcaattttggatgatgaactagcgttaaatggatatgggcaagtgataacatcttccttatcggacttctgtaaccagtataatgccgagcatgctgaaaatcagagtgcttcatggttctcatctcttacaaatattgttggcaatatgttcatatcagaggaaggaggttttaggatgcagcagatgcgtgccaataacgcactcttattggcattttacgaggcagttcatttaaataggaattttattacaacgttagcgcaaactcagactgattcaagctcccctccatctcccaataatactttaagtaacgtacaaggtgttccagatttgtcgacagcaccggcgacttttgacattacgactcagccttcaaatttgttagttacattttttcagtattgctcaatagtgatgcaagatacaaagactgaagcaggaacaaacactgtgaaattatgtttcttatccttagttgtataacggaagatcaatatgccaattcgttgatgcatgacgtaacgttagcattcaaagtaagactgcatcgttttccaatgc

SEQ ID NO: 9474 - DNA, 840 bp, Diabrotica virgifera
  SmartBlast Evalue=1E-46; Info=Chymotrypsin-like proteinase 6A n= 1 Tax=Tribolium castaneum RepID=D0R8R1_TRICA
gcactcaagatgtctggactaaaatatttcgttctcttcgcccttgtgacagtcacttgcgctcgccacgtgagccgcaaaagtactggtttgaaaatcaatggtggtagccaagccaaaagtggacaatttcccttcgtagcatctctagagttgggaatcttcggtatctacgaaaacgaatgtgaaggtgttatccttaatgaaaattgggttctaacatcaggtgaatgcgccaaagaagtatccagggttgtagctggtgttacagacttgcatggcaatgaaacaagcagacaggtggctgaagtcgaacatgcttatgtacatcccgaatacgacagtaatgggcctagtccaaacgacatcgctcttgtcaaactgaagacacctttggtatttaaccagttcgtcggtaatgtcagcttgcctgaacaagacgctgtatttaatggcactgctaaccttactggctggggatggagcttcttaccagacttcaataaactaagcttcgtagctgacttacccctaattgatattgaagaatgtaaccgagtggttgattcgatcttagaagagaataccttggacaaaaagagcaatatctgcgccggagatctcgacaaaggagcaaataactgtgacggtgatgttggaggttctctcacccaaaacggtgttcttattggtatcgttacctggtacatcgaaccttgtgatattgaaggaactccagatattttcaccaacgttgctaacttcgttgactggatcaatcagactattgacaaacatcaataaactgtaatttttgatatttttaatatattggtattt

SEQ ID NO: 9475 - DNA, 836 bp, Diabrotica virgifera
agaaatacccaataacgatacaataaacgaagaaataagtaaaattgtagatgtcaagagggaagaagatgttacacatattgaaacagaaactgataattcagatactgcgcctccaaataatgatttctttgacaaactttttgaagcttcaacctctaggccaagggtagactctcaaaatttgggcaggaaaacgcgatccaagtctgctgaacctgaacgaaagaggaaactttctctcgaaagtagctacagtaagaaaaagtttatctaaattgggacttatgaaaagacttagggatgctaaagataaaataaagaacacattttcaagagctacctccaagaaagatttgaaatctaatgagcctgagaaggtaaaacctgtcgaggtgaagagcaaagaactaaaacctcataaagttgagaagcctgtctacattcacattcctttaaaaccgcctgaaggtacaactgatgagttttctcatttagagaacgaaacaactaaacctgtattacaacgaagtgaaacagtttctactacagaagaaacgccagaagagttacctggtaacgtccaattcatctttctgacagctccttctgacgacgagattctagactataatagctcagacgtaccggaaacaccatcctcagaacataagcgcttctttgcgactaaagtaaatgagcttaaagaattagcgaaaggagcagtagatgtcgttacaacaggatcgaccaaattaactccagttagtgaagaatctggaagtaccaaaaactccatcgaagacattacgaaacatttaatagaggaggagggt

SEQ ID NO: 9476 - DNA, 838 bp, Diabrotica virgifera
  SmartBlast Evalue=4E-28; Info=Organic anion transporter n=1 Tax= Culex quinquefasciatus RepID=B0WGA6_CULQU
gccgccttctgatttagacgactgtttagaacttcttctttttggtggaggttgtaatggaggaaccaactcaccgtcgtctatgtaagattgcattcgttcttgtctagtcatttgaggagtatgtcttcgtgttaaactattagttagctcttgtatgaatggatcttgttcctgtggtggtaaactatccccggtattttgactgtcattgcgatcaaaggtatttactctagagtggaagttatttagctcatagtcgtaactaatcctgttcttaaaaagattaatgttattgatggtcatcagtaagaagagtgataggatcactccgcaaaactccaaagttatagttacaatggatactgccagaggaaaattctcggaaaagtattgacagccattatcagtttggatttcgcaaaatccctctgttacaaaatgatagataattttaattggtatatatggcaccaatcctaaaaaagttagctccagtcctagagctgtggctttgtcttgttttgctactgacctaagactaatcagtacgttgacaataagtgtactagccataatcgcatttgatagaatgttgttaacttgactcaaggccaagataaacttacaacggtcctcgtcgcaagagccttctgttactatcgatccacatgtgcaatcatggtatacatttgtagctgcagtgaagtttttgcatccagctacacatggtgaaaaataagtactcccatcaacacaaactggttggaaaggttctccagatgggcattcacagtttatactgcagaaaggaattgttattgagtgtttatgctcg

SEQ ID NO: 9477 - DNA, 839 bp, Diabrotica virgifera
gttttttcgagaactggcaattctgcagagctgaatcgtaacagtctcgccaccatggacaattattcagtgcaatataataaaaacggtaacgattaccaatacgtaaaacaaagtggcgctagtaataaagtgacaaataatacgagaagtgacgttaccgacggtaatagtgataggacagtgggggcttacagaagtactattagaaggggcggttctgtagaaaatgttagttctagttctgtagatatatcgaatgggaagaaagtcaagtatgaaagtgagagtgacagccataggacgactggttccttggaatcccttaacaaattatcaaacgatgatgaatcgttactaagcacgatgaccaaactcatcgatgagaagctaaaagaagatacatcgatcttatctggcgacggaatccctttcgtcgacgaatctcccgaaaaacacccaaagaattcttatccagataaagaaaacatcccccaggctagtgacttgtacagaaatcccagtttacataaaaaccaactcaaaatgtcaaaaaaggaggacaaagagtataaaaatgataaggagaaagaagtagatacgatggctatggaaaaagtacctgataatgatagaaacattgctaaaacgttagtgttttcaaacaacaacaagctcaaccagagcggaacaaaattaagacggtccgagtctttaaataagccagaacgaacggtctcgcctctcagtaacaaattaaaaagatctgaaagtttaaacaaagctggagacagattgaaaaggtccgacagtttaagtaaaagcgaaaaaaccgagag

SEQ ID NO: 9478 - DNA, 838 bp, Diabrotica virgifera
  SmartBlast Evalue=2E-55; Info=Protein DDI1-like protein 2 n=1 Tax=Harpegnathos saltator RepID=E2C9L8_9HYME
ttgttcctcacggtcctgtcttgcctttacttgttctcttagaacacttgcaaaattgtctatatccccactaagaagagcatcagctaatcttggattattctgtttcaagagggcaagttgatcagggttggcgagaaacatttccctgataagcacagggtcatcttctacttggcggtttctcgtgttgttggttgtatttggaacttctatgttgctaaaatctagattacctgactggtccatttgtgactcgctttggatatgttgtagaataacagcatccccatcattaatgccaaaatctttaagggacttcttattgtccattaggggcattccattaaaggctattgcaatttcagaggctggaaatccagattcaatttcgcaaaatgctttaaagttttctagttccagatcttcagaaacatctaacacaaatatgaaatctgttaaggttgttactgttaccttcatgtttaatctactatttgaacaccgcgagcaaatcagaactgtgtatttatattacgataatttaactaatatgtgttgtttttatatattattatacattttctggaaacacttaaaacttggatgttggtccaaaatatatgctagcaatcactagcaatgacagctatacactaaaaaacgctttgttcatcaacaaaaaggaggaatgacttgcagatatgtaagaacaaaaatagacttgtatacaaatattgtccctttctctgttctttgttggaaagtatctcaaaataaatgaaaatgaaatttgaaattaaccaaaatgcaaggttattaacccttaaccccacgt

SEQ ID NO: 9479 - DNA, 840 bp, Diabrotica virgifera
aagggatagagatagtgaacatgagagtgaggtagagataaagaagcaaacatagaaagaaagaaacccgatgatggatccttcaactgctgtagctgaggtttataaataaatatcatttgcacatgaattgtggttgagggtcctttgccgtatacttttaaactaattacatatccgattatattaattgttaaacttaatccattcctaaattattcataaaccctttgcagcgaatatatgtgatataagagataagatgtttagtttatagattcagagattaaaacattgtgttgggtccgtttttgttgactgattttgcctagaacagattccgtttatggtgccttattgatattattacgtatacaattattatgagattaaagaatagtcgcatagaaaattaaaagctgcagctctgtccaggtgtttgttctaggatttagaaagaagctaatatttttaagtagttgtaaaatactgcaaatgtataccaaacaagtttgtgatgagacaaatttttgttaagtgaaaaaatcattttggtggatgataataattgatattgcgtgatattgaagaagacttaaagatatcagaaaacagagtctttattatttttcttgaatatttttaagcgatgatgctatattcaaaccatactaatccctgtttttaaaccaggaggagtaaactcaaaacacacccaatgatgtcactagaaaaatcaccaaatacatcttcttttttggttgataacgtcggcattcgtcggtaatccataaatattatattatactaattcgtcgctaaagagttctaaaacaactg

SEQ ID NO: 9480 - DNA, 839 bp, Diabrotica virgifera
  SmartBlast Evalue=1E-119; Info=Diacylglycerol kinase theta n=1 Tax=Camponotus floridanus RepID=E2ACQ0_9HYME
tcatcgaaggttctatgtttggtagcagcataactaacaacggttgtttatcttcatatttcgactcccttaaagcatataacgccctcacagccttatctgagtcttcataagtaattaccatggagccgtattcgtaatagataggaccaattttagaaaatttgttttcttttcctaaaaagtcagtgaggatgttttcgtaattgcgttcagaaagatttggaggtaaatttccaacgaataaagctaaatttggtccatgcggatcttgcttgagttgtaaataaaaccgcattagctccatttgccgaatactatctttgcccagttgtttcattatttcccatggtctctcgttccacgaaagaacacgctcggtaactcccctatccagtaggacttcgctgcatcgataatcttcggcatggctgtcttctaacccaaaacgattaagagcgtcgctgataagatcaccaacatttgtgttagaatctacaggcacggtgcagtatgcctgagatacttgtagcttaccgggatacacccgaacttcgccagcgtcgttgtccctgtctctgaatctgagaaaaacagctggtctttttccttctttcctatgcaagttaagtacaggagttggatcctgcaggactgcttcatccggagaataaagatcagtaagatgaaacgaatttggatctttcgtaatatgaaacgcccgaagtgcctgcgtcaaaacctgtctcaaaggtgcctgtcttggtactacaatgattctgaatatccgtctgcgcaaagagttgttcccgtcatacaccttaattgcttcttcatcg

SEQ ID NO: 9481 - DNA, 837 bp, Diabrotica virgifera
  SmartBlast Evalue=5E-38; Info="Protein tramtrack, alpha isoform n=1 Tax=Camponotus floridanus RepID=E2AHT6_9HYME"
aaacatcctattgtgatattaaaagatgtcccttataatgatatgaagtgtttgcttgacttcatgtataggggtgaagttagtgttgaccaagatagacttacagcatttttaagagtggcagaaagtcttaaaataaaagggttaaccgaagtaaatgaagaaaaatgtgatagtatagcttcctctctcacccaacaaaatttacacaatttgccaaatttacaaagattgcaacaaaccaaaaggtttggaaatagtttaaatatgttaagcaatgcgttactacaacctaaaaggaaaagaggcaggcctcggaaactttctggatgttcaaatggaccagatgattatgacaaggacattgttcaaggtagcccggagatgttagaagttaagatgggaatggataatttcacagggaataattctgacacgagtgtgaaaaatgaagttgaagcagacgatgacaagttaaaagacgaagcagatccagtgcctggatcatcaaatgaccagacaccaaagtataaccatcacgatcacgacgactttcatccttcagaattgctgtcccaaaaattactgataccgaaaacagagttggcagataacgcagaaagttcaaattcagaacaatcaaatcagcgcccagcaactcctgcgtcctctcgtattagcactccagacaatattataaataataacaatatcatgacaccttcaactagtgcagtaacaccgataccaaatatgtcgaatctaccgcagaatttccaaaacgccatgtcagcaccttcaggtaggcaaccgacaaaacgcagagtcaaggacgta

SEQ ID NO: 9482 - DNA, 838 bp, Diabrotica virgifera
tatagttataaaaaaggagagaaacgtgttaataacttatccttacaaccaaagaaatgtgcgaattataaacatttgatttttatatatataaaaatttgatatgtactacggctatttataataaagctattttttgagttctgcatcttttgcaacatcagagttccaataaaacgaatgagaactagtacattaatgaataaattccatcaaataccattgtattggatggaatccatgtatggattccatccatacatcaaatataaaataatatttgtcatattactcgttaacaccacatctatctttcgaaattttgcccatctgcgcagagcacagatagggaaagtattcggaaagaaagacatagatgaacgtcgagactagactacttgatttttaaaatgtagtttacaggtcgagtttacttcttttattcttttactacggtaatttccagtaattttgctactcatcaagtgggtgtaccgattgtagaattttcattcctagtttttacaaagtgtatctaattagtttttgctctaagcttcttatttgaaactttgcaatacctgagtgaagctccagaattttctatttccgtaaggctgtattatttgaagacaatttaaccataatatgaaatattggttgctttcagtctctagatcccaatgagattttttgcgagctcttaattttagattttaatatatttgtgtttctattgaacgtctattttctcaaaagttgcaagaaatgtcgaactctatggatacagtgaatcacgttttgttccttacatacaatcaacaggttaactatgtta

SEQ ID NO: 9483 - DNA, 833 bp, Diabrotica virgifera
  SmartBlast Evalue=6E-34; Info=Endonuclease-reverse transcriptase n=1 Tax=Bombyx mori RepID=D7F159_BOMMO
tgcgtattcccttgttggcccagtccagttttttaaacgcatattctaagacagtcgtgaaaagcttcggcgacattgtgtctccttgtctaacacctctctcgattttgaatttgttagtttcttgatggagctgcacactcgttgttgcgtgtttatagatattatgaatcaaacgagtgtacctgtaatgtattcgataatgggcaagtgctgtcgctattttatcacttttaattgtgtcgtaggctttctggaaatctacgagtatcagtaggtactagtgatcggctatattcgacagtttttttctgtcaataccttcagtgatagtaggtgatcgtttgtcccaaagcctgagcgaaagccggcctgttctactggttggtataagtccaattttctctcaattcggttggtgatcactctggtaaaaagcttgtacatatgtgtgacaggggactaatgggtcggtagttttggatatttgtggggtcccgttttttatatatgatcaccataagggcattgtttcattcactggaaattatgctatgaaaaaggcataaattaaataggccttggattttttctaagagtgtacaagccgacaagccagtgctggcgcgtgaccttgagcgaaaatacacagcgacaaatgcagaatacaagaaggtcagccgccacctctcgcttgtcgctctgtacttcctccaatttttttatgcgagaccttgtatgctagactggaattcgttatgtaaattctcatttggagccaagtaatgtagtggggggttttctccatttgtgatatttatctgaatgtgatt

SEQ ID NO: 9484 - DNA, 838 bp, Diabrotica virgifera
  SmartBlast Evalue=1E-124; Info=Ribosomal protein L7 n=3 Tax= Cucujiformia RepID=D1M7Y2_9CUCU
ccgaacttcgtgtatatcttctttctgtggttaagtccaaaatggcaccgacagctgacaaaactaaaacggttaaagggctccccgcagtcccagaatcagtcttaaaacaccgtaaaagacgtgaagcatcccgtgctaaacaactccagtctgtcatcaaaaagaaggcagaacagatcaaaaagaggaaagatattttcaaaagagctgaacagtatgttaaggaataccgtttaaaagaaagagacgaagttaggctagttagacaagccaaaaccagaggaaatttctatgttcctgctgaggctaaattggcttttgttgttcgtattaagggtatcaataaagtagcacctaaagtacgcaaagtactccaactattccggttacttcaaatcaacaatggagttttcgttaagttgaacaaggctactattaacatgcttaggatatgcgaaccttacattacatggggatatcctaacttaaagtcagtaagagaattaatctacaaaagaggatttgccaaagttaatggacagcgtgtagcaattaccagcaatcaaatcgttgaagacaggttgggaaaatctggaatcatttgtgttgaagatttaatccacgaaattttcactgttggacctaagttcaaatatgcctccaacttcttgtggcccttcaagctaaacacacccactggtggatggcgtaagaagactaaccactatgttgaaggaggtgactttggtaatagagaagatagaatcaatgaacttctcagaaggatggtttaaaccaatttgtttataaaataaattatgtataaaacacaaaa

SEQ ID NO: 9485 - DNA, 834 bp, Diabrotica virgifera
  SmartBlast Evalue=1E-107; Info=Putative rRNA methyltransferase 3 n=1 Tax=Camponotus floridanus RepID=E2AKJ6_9HYME
ccaaacaaaatatgcctgtatccagcgtagttgtcggtgtagacttgttccaataaaacccattccaggttgtataagtttagtcgaagacataacaacagagaaatgtaagacggccttgggaaaggaactacagacgtggaaagcagacgttgttcttcatgatggtgccccaaatgtaggaaagaattggttacacgatgcgtaccaacaagcttgtctaacactgagttcgttaaaattagctacccaactcttaaggcgtggtggatggtttgtaactaaagtatttagatcaaaagattacaatgctctaatttgggttctaaaacaattattcaagaaagtccatgctactaaacctcaagcttcccgtacagagtcagcggaaattttcgtggtttgccagaattacatagctcctgataaaattgatcccaaatttatggatgccaaatatgtgttttctgaattagaactcgaaccaaagaataaattaaatttctttcatcctgaaaaacagaagaaagctaaagctgaaggatacgcggaaaatgattatactctgcaccataagttgaaagtttctgactttattaaacatgaaaatggaattgatatactgcaaaatgcatcagaaattatttttgatgacccagccatcctaaaccatgcaaaaacaacaaatgaaataaaggaatgtgtcaaggacataaaggtcttgggcagaaaaagatctacggaatattttagcctggtggaagatattaaatgaagaatacaagaaaagcaattccacagaatcaaaagaaagtgttcagagtgatgaggaga

SEQ ID NO: 9486 - DNA, 835 bp, Diabrotica virgifera
  SmartBlast Evalue=2E-31; Info=Probable thymidylate kinase 1 n=1 Tax=Rana catesbeiana RepID=C1C504_RANCA
tcgggatcggacatattcttatacgcagaaataacattgtttcgaaattctgaagaagacttcaataaatcctcttgagcagtaaactcttttcttcgagacagtctttgtaatctgacggattcgtcgacatcaaggaaaatacaaacatctggtttaaacaaatcttccggccaacaatatacttggtctcctcttggaggtatttcctgcaagtctgcgctgtcttgaactgcttgagctataccgaaggctgtggtggagtgccagtatctgtccattaccactggtgcatcttttagagccacttgaacctccaaagcagcaatataattacccagagagtaataagtcgaaaacaaaactctgttttcgtcggtcagacttcgaagatgtctgatactttcaggaggggtttgccattttcttccatttatttttttagcaaacttagaaccgacagtggatttccctgatccatccaaaccctctaatactatgaaagggtgtctcctactgtctcctgatgtttcagatttgtttttattttctttggcatgttcataaatctgtaatagttctttaactccatgtattgctaaattttcaggttttctcaaaatgctcagaattgaatccaaactgtggtacatggtagaaaatgggttagccatggtcagcaaatatttaattttcaaaagttggttggttgataacagctacacaaaaacactttactctgaaacaatacacgcaaaattgtttgctttgctatttttttttatagtttatagataactgtatcttgttttggtatgggaatcacataggccac

SEQ ID NO: 9487 - DNA, 836 bp, Diabrotica virgifera
  SmartBlast Evalue=1E-50; Info=Sorting nexin-25 n=2 Tax= Formicidae RepID=E2AR00_9HYME
catttccaagcagtaaaacaatgcatactaagctttatttaggaatactagtgtctgtcatactaggaataacattttcatgcccatcatgtttttcatatattttatttggtctcttgcttattgtcagtattgttctggggatttttacagcattttggttaaatgtatatctgtctctacctcataagactactgtaggagctgaacaccatttgaagcaggcagaaaattttaggagcagtattgttatggactatgagacatctcctgcagtaaagaatgtgaatccacaattgccccaaatttttggaaaaactgtggatagtttgctccagcaattgttggactttgtgctaagggattatattttgatttatatcaaggattatgcatttgaaacagataatttaggaaataatattaaggatgatttctggggagccataaataatcttcacgaaaagctatcttcggttgatcaggcaaaattaatagcaagtgatattgtattaaaagttacaacgcattttgaaaagataagagaagctaaggcgcttgtagaggattctgacctacctccagttttttatttgtctccacatgtgatgtcatctgaaaaggaaatagaatacttgcgcacagttagtgaattgatgataatgtttctattaccaagaacatactctctatcacccaccaaatattttctacgtgaagtattatgctgcaaagtattcaaaccactgatagacatcctaacggatcctgatttcttcaatagaaatattatcaattacattgaagccacacagatgcaagtgaatttacctaag

SEQ ID NO: 9488 - DNA, 837 bp, Diabrotica virgifera
  SmartBlast Evalue=1E-111; Info=N-acetyltransferase 10 n=1 Tax= Camponotus floridanus RepID=E2AFN8_9HYME
caatgatctacctgttctcataaccattatagtagaagcgagaaatactaaatatggacccagcatagctttaacatatggcagaggaatggctgcagcttcatctataactagtagctccgcttgagataatctgtggctgtcagttggatggatatactgaattgtttgcctatggtccctaaacacatttaccctaataatagccttattaaattcggggttggtactctgaacaagcccatagtcaatgtgttcttgatactccaaggcatcaaaacctttgaacacaaactcgaaaaatgtgttcaaattctcagggcttggactagttacaaatatgttggagtatccgaaagctactgctgctgaaactgccagacccagagctgcagattttcctcttcctctagatgctgtaagtgatactgtggacctcaaagttttctcggaaatagattctataaatttaagcaaagcttttccctgatccaatgtcttacaaagatttactaaatttcctacaggctgagtatcccgtaactgctccttcaaatcattcagttcagtagtactttcatcaacttcctgtacattttctacaggtgcaacatgtaggttatgtgacgaaataggaagaacagtaagttgatcatccactactagacatcttttacaagaagctaaagatagtaagaatctttcattaaacctacatactacatcctggtgtgcttcagttctgaatctttggtggacatccatgctcatggtgtacagttgtttcagagagttaacagatcttagtaacaaaacgactaaaccgcctccttcaac

SEQ ID NO: 9489 - DNA, 836 bp, Diabrotica virgifera
tacgtaatacttgaacggccccttaatatacaaatcatttataaaatttataataaagaaaaattccctcccagccggaattcgaactcacgacctttgggtccaaagataggctctcttgccactgagccaaggagggattcaatggtaaaaaatatatcatgaagttgggtataattttgatgtcatataccatataaaatttacaccatgaaagtaattttttgataattcttacgatttttaaataatatacaatattggtaagatgttgaggtatcgtttgtaccacagcaacaatcttatcctggtctatctacaactattcaaatgtgtggaattagccatagttccaactaatccttctttttagagtattccacatatactctgtgctgtttagattcgaacttctaagtggccactccaataccgactttgcaacttcttggaggtactgacgaattattttggcaatgtgtcggaataatgtcactaaaggtatcatctgttcttgagacatttccttatatacctgtccaagttaagaatgcctcctcgatgggttataagggccatacaagcttcccattatttccctattttattatacctccaccaccaaacaaatacaaataatgtattttacaaataaaaaataaaaggcagatatcgagcacagtcatttattcgctgtgagccgatgagtagaggggatttgacagttttcgccagcgctgttagtggcagttttgtctattgaatttgaacaattttatcagaaaagtaaagtttcaaaccgcgagagagcgctaccgacgaaactcacaaccaat

SEQ ID NO: 9490 - DNA, 833 bp, Diabrotica virgifera
  SmartBlast Evalue=2E-70; Info="Sialin, putative n=1 Tax= Pediculus humanus corporis RepID=E0W365_PEDHC"
gtatttgttctacttaaaatatttctggtcaatatccaatcccccagttgaccagcaaattgaatcataatcgccatggctaggtatggagctccagataccataccagatgagtttaggtcgaattttaatatatttttcataaaatttggtaaacaagttaagagcgtgtaaaatccccaaaattcagaaaaaaatgcgagagcattcgcccacaccgccaaagacgtgacgtagtgtcttataggaatatcaagcacttctttaatttgtcttgtagcatttatagattctctaatgtacagtaattcttctttgcttattctagagtctttttcaggtgcatctcttgcaaatattatccaaaatatgtaccatatcaatccaacaccaccaaaaaagtaaaatatactttcccatcccagatatgttgctaaaagtgaactaaagggcatagaaactaccgctcccaagtaaccaccagaccaagctatcgcaattaacctggttctttctaaaggcggcgcccatttcgcgtagaaagcattacatgctggatacgtagttccctcaaaaaatccttctagggctcttacaacaataaacaaataaacgttaaattttgctgcaattggtgtaataatggttagcaatgacgtaacggctattccaataccaaaaactttggcacctccaattctcgaggctacgtatcctccaataatctgtgtaagaacatatccgtagaaaaggaactaagcacataaccctgtaattttgagtcccagttgaagtcgcttttcataaaaactgttgccattgtccaacttgac

SEQ ID NO: 9491 - DNA, 839 bp, Diabrotica virgifera
  SmartBlast Evalue=6E-95; Info=Vacuolar protein sorting- associated protein 28-like protein n=4 Tax=Apocrita RepID= E2A688_9HYME
gataagtcataataaaaaaaaaaggagtttgtctttggttggattaaaaaacaaatataaatagaaaaatgtcagcagaaaatcgccctgagctgtatgaggaagtcaagctatatcacaatgccagggaaagagagaagtacgataatttagcagatttgtatgctgtaataaacactttgcaacaattagagaaggcatatattcgagattgtgtagtggcaaaggaatatacaggagcttgtagtaaattattagttcagtataaggctgcgtttcgacaagtcaagagtgatgaatttcctacaccagacgcctttgttaagaagtacaggcttgactgtcctgcagctttagaacgtatcaaggaagataggccaatcactatcaaagacgacaaaggcaacactagtcgatgcattgctgatatcgtatcgctattcatcactataatggacaaactgcggttggacattcgttcgatggataacttacatcctgacgtgagggacttagtagatactatgaacagacttagcattctgccatcggatttcgatggaaaggtaaaagtggctgaatggttaaatactttaaatgaaatgcaggcctctgatgaattatccgaagctcaagtgaggcaactgttgtttgatcttgaaagtgcgtatgcgtcctttaataaagtccttcataattctgcctaaatgtacgagatagttgttatgattgttacacgtttatgtaaatattataagcaaaacaaattgagctagatagttattggcaatgtatgcatttatcaattttaaccctaattggaataataaaataagtat

SEQ ID NO: 9492 - DNA, 835 bp, Diabrotica virgifera
  SmartBlast Evalue=9E-75; Info=SET and MYND domain-containing protein 5 n=1 Tax=Camponotus floridanus RepID=E2AJ10_9HYME
ccgacgtcaaaacaacgtgctttaaatattaaaaacttagatggatgttgaagtgaggattaccgattccctaaaaggcaaaggattatacgcaaaaagagattttcctaaagatgctgttatttttcaagaagatccccttgtgtcatgccagttttcatggaatgctgaatataaatacttagcttgtgatcattgtttaagaccattagaaactgctcatgaaaatgcaactcgtttggctggccatccaatggtattaccatatccagattgctgttcaacagacaaaagtaagatagtatcctgccctcattgttctataaaatactgctcagatgaatgtagagtagaggcatacagtcaataccacaatacgctatgccatgaaaacaatagcaatcatcctttggaaagattaaatgatgtctggaagaaagtccattacccaccagaaacaaacagtataatgttaattgtccgtctgctagccagaatcaggcaggcgcctaatagagatgcagccatcgcacaaactttgcagttttgccatagaactgtaaatgaagatgccgatttggctcacaaactcctgggagacaaatttgcagaccaactaagcctgttgcataacagtttagttgctgctattccgaacgatggtattgaacagtttttaacttatgaagggtttttgagcatgttggcacttataggtacaaatggacaaggtgttggaacaagcgcgattgcccaatgggtgtcaaacacagaaaaacttaacctccctgaatcagaaaaggaactattggacaattttatagaacatctgtat

SEQ ID NO: 9493 - DNA, 837 bp, Diabrotica virgifera
  SmartBlast Evalue=4E-16; Info=Odorant-binding protein n=1 Tax= Culex quinquefasciatus RepID=B0WBT5_CULQU
atttgtgaactgcaatgtataaaatagtaatttttgtcgcagtttctgctgtgctaattctatctgtaaatgcatacgaattcaacaatgccgattataatcgaataatagccgatgaaatagataactttgagagggaactgtatgttccaagtgtgagaacacgaagagaagcaccagaggacgaaaaatgcccaccgaggaaacacaaattgtgctgcggagaagaattaattcacaaacttcatcacgataaaaaagactctaggtccgaatgttttaaacagattatgggaaaagaggacaatccgaatagtattccacacgatccgtttgactgcaaaagtatagaggaaagacaaaacaaatttttgtgtgtcttacaatgtgaaggccagaaaaacaatattattgacgatgatggaaatattaagccagaagaatatcgcaaatatattcaaacacagcttgcggacgttgaatatctagctgacgttcaggacaaaattatagccggttgtcttgcggatataaaaaatgctagtaaatcaagcggtaaatgcaaatcggacggaatggtctcagaattttgtgtgtttaagaatatccaacttaattgccctgaagaccaaattaaggataaggtgttttgtgaaaaaatgcgggagagattaaggcaagaaaatggccgaccaatggttttgccgcctcctccacctcatcctaaagcataatttgaatgttcaatcactataatttagataactgacagtaacagattctttaaatggttataacatatttcacattactgtataatccggcaatacactttat

SEQ ID NO: 9494 - DNA, 836 bp, Diabrotica virgifera
  SmartBlast Evalue=1E-21; Info=Nucleolar complex protein 2-like protein n=1 Tax=Harpegnathos saltator RepID=E2BS53_9HYME
tgggcccaattctaacacacagagttggataactccattgaaaacagcggaaccttcaactttatattcagctggttcttgatcttcttcttcgcttacaactgttcttagagcagcatggaaggcatgtgtcactgcaattattgttttgttactcttatctgtctgaatttctgtttgccaatgttttaataatttaagagttatcactcttgaatcttttggcttatcattatcttcatcctcaaaatcactctcatcacttgctactgacagtttatcactaggcttatgaatatcatcatcctcatcatcatcacctactttttcttcacctgcttccccatcttcctcgtctgataaattaaattctagcaatttcttgtcattctcttgcaggaacttgtaaaattctggatcactttcttttaattttctaaatccctcttgtgcttttctgctgaatcttcttcatcactttcttctatgttctcctgatcatcatttacagttgcatcttgatcactgtcatttaatgtttcatccatttcccaaatgttgcaatcgtctgagtcttcttcaacctctacatctatattttttcaacatgtttagatggtttctgtttaatttttaacttctcttttgatttctttgagtaccctatcactttcttggtagatttctttgttttgggatcttttgcgacctttttttgtttcatttctttctttttcagttttaatgcagccattatttatgaaagatattaaacagattattattttttatagaatgtgattttacagacttattacatacacatacagatacac

SEQ ID NO: 9495 - DNA, 834 bp, Diabrotica virgifera
gcccagatgtttcacttgtgtatataaataaaaatggatattactaataataaaaatataggaaactgctgctcatccaaagcaaccgaacatgtcgattgttgggcgagtagctgtcaccttaaaactaggtagacttcaaaataaaacgtaactatgcactcaacatttttacatatatggcctaattttttaaatttataactaaacaacagaggatgtgctttacgcgccgtacgccacgaacaacacaaaaataaaaatcaaaagaactgtcgaaccaacacgacataaaagaccccataaaggaaaaacaagaaaataaaggaaacagtagtacttttagattagacgaagttttaaaaatgatttaccgtgtaactgataatgcatatttgattgaatgtaattaatttaattaattattaatttctttatatagctgccctattaaatgtaccagtcttttaaacctacgacaaaattttgtagcgcgctaaaattatttttgaatgttaccactaaagttgccaatcaaaatacgatgtattgttatctatatacagagtgtaagaaaaagacatgtcataaattacatcacatattctgggatcaaaaagagttcgattgaacttaacttaccttatagtcctgtcgccagggcggctacaacggcctcccttattcagatgtacctacccaagttctcccatgtgtttctgacccgtagaacacgaatcccttgggtaacagtcgatccggatgtcgacaagattattacaaacaaagaacctgaggaactacctaacagcgatttctcgcaaaacaaaacat

SEQ ID NO: 9496 - DNA, 837 bp, Diabrotica virgifera
  SmartBlast Evalue=5E-20; Info=Flightin n=5 Tax=melanogaster subgroup RepID=FTN_DROME
ttttattaaaaactgctttatttgcttaataatgaaagaatgttacacacagtttttgagggtcttataaaatggcagttaattgtatctaaatcgtctcattaatataataacttcgaatatcttttattaaaatggtctttagagtaataactgtaaaaatgtccgctaatttgagttctagttactagtttaacatcttctaggtgcttatcgaatttgtctagcttccacaatggatcacttcgttgtctgcatatcctttctgcccaggtttgggcacgtggaatatccctcctcactcctcgtttacgactgtcgagtacctccatcacatcatcgtagtagttccttctatattcgtggatgtatctgtatggtaaaaatttgggtctaatccagtgtttaaacaatatcaatttgtcgggatctaagtattcttcttcggcttctggtctttcctcctcagcagctccctctgcaggagcttctccttcggctggtgcttcttccgctgctgcaggggctgcttcctcctctgctccagctttctttataagtgatttaacgggtggtggtggtgcatcatcatctccacctgcgaaccagctgtcttcttcatctgccatattatttcaggaatactaacttatgtataaatcttcaagattaaggtaccgactaatgtacacctggttccaaaaaaaaactgatacgactcttgaagcgtattttgtagaaaattgagcagtgtattttgaaggataaatacttaatatttacatactgtcaatgtcactgccaaatcttaaaatttgtcagatagcttattctgtt

SEQ ID NO: 9497 - DNA, 836 bp, Diabrotica virgifera
  SmartBlast Evalue=1E-112; Info=NADH dehydrogenase (Ubiquinone) flavoprotein 2 n=1 Tax=Tribolium castaneum RepID=D6WDN3_TRICA
acgcagtgacagctcagtgtttaccgtcagaaaattttaaattaaaagaaataaaatttagaatatgttgaaattgttcaaagaaatatcttcaagtttggggaaatctcttaccaaaaggggacttcaaactacttccactttacaacatgatagcttatttgtacatcgagatactcctgaagataatccagatattgtctttgaattcaccccggaaaataaaaagagggctgaagctattctagccatatatccagaaggccacaagagggctgcaatgattccattacttgatttagctcaaagacagtatggatggttaccaatttctgctatgcataaagtggctgaaattttaaacttgccaagaatgagggtgtatgaagtagctactttctacactatgtttatgaggaaacccacaggtaaatatcatgttcaaatttgtactacaactccttgctggttaagaggatcagatgagattctggaagctattaagaaaaatcttaagttagaagttggagagacaagcaaagacatgttatggaccttatctgaggttgaatgtctgggagcatgtgttaatgcccccatggtacaaattaatgacgattactatgaagatttaactgttgaagcaactaatgaaattttagatgaattgaaaagtggcggtaaacctgcaccaggtccaagaagcggtagatttgctgcggagcccataggagaaccaacctctttaaaagctgagcccccaggtccaggagtaggtgttagagcagatttgtaaatttattttatttatataaataaacaagatagttaatatt

SEQ ID NO: 9498 - DNA, 827 bp, Diabrotica virgifera
gtttattaatatgttgtgcacggctaaaatctgccctcccagcattattttttttttaatttttaactctttattgtttttatattgtgtatagttattatcttgtgcacacttccatcatttagacatacagtgtttacaagtcattatttatctttatctgagactctcattttctttacaatcattattcgaaaaattaaactattaataacaattgtgacacacgaattatttttgttactttgttaccacttaaaattataagccaacgaaaccaacaaacctaatatactaaatgcaaacttttatggttttttaattttaatttattcagttttacgatttaagtccacaaaaaaaacactgcataatttgtatcacttacacatcctaaaggagaaaataagagatatcatatttaggtcatgtggtttccggtttccatgacataatatatcgtgacaaagtttccattagaaaccaataattattagaatgaactgatgattccagaatctacatgattatttatgaaatggtacacttgcattatatatgaatctacatgcaatcgtacacttgctttttccaaaaaatcacaacagatatttaattcactcagatttctttcgaattgtttaataatataaatattgataacaaaaaaacgaaatttatttcaaatcatctgaaaacaaaatcctaaaaagctgtcattgattgatcgaagaaatattactaaaaatcaggatttccttctcgtcgatatttgtagtattgtatgacgattctcattctttgaagcatactttttatcacagcag

SEQ ID NO: 9499 - DNA, 834 bp, Diabrotica virgifera
  SmartBlast Evalue=1E-94; Info=Cytochrome P450-like protein n=1 Tax=Tribolium castaneum RepID=D2A203_TRICA
tatgaacaagcagtcaagacgtcccaatttgacgaaaaacaaggaaaccttattgaaactcgcgatctaatgtcaaatttattaagggatgatttggatgaaaacgaggaaaatgatgtcggtgaaaagaaaagattggctttccttgattatcttattgaagccagtcaaaccaaaggaaatgcacttagtgataaagaaataaacgaagaagtgaataccattatgtttgagggtcacgacacgactgctgctgcttccagtttcgtcataagcttattgggtatccatcaagacgttcaagaaagagcttttaatgaattgaaagaaatcttttccgacaatttgcaccgacctgtcacatttaatgacacgcttcacatgaagtacctggaaagggtaattttagaatctttgagaatgtatccaccagttcctatgattgcaagaaaagtgaacgaagatgtaaaactggcttctggtgactacaccattcctgcaggaaccactgtaattgtatcccaatacattctccatcgtaacgagaaatactataagaaccctacggtgttcgaccctgataacttcttgccagaaaaatgccaagaacgaccatactatgcttttattccattcagtgctggtcccagaagttgcgtaggaaggaaatacgccatgctcaagctcaaggtactccttgctgatgtcatcaggaaattccacatcgagtcagtagataaagaaacagactttaggcttcagggagatatcattcttaaaagggaagaaggatttagggttaaggtgactgaaagggcttgaaatataaattaa

SEQ ID NO: 9500 - DNA, 830 bp, Diabrotica virgifera
aaaatcatgatttgggagtgctcctcgaacattcaatgtgtcttggtttgtttatttctatatagtgcatttttgattgtgattctagtgtagacggttatgtctcggactagcgaatcgactataaataacttttcccaaaagtgacctatttttctaatctgcacagactacagtagttgtgttctaaatcgggttctgcggtcaaaagttattgctaaaggaaaacaatgtgtcgatattgtttctggttgtgttagacgacaataaaattatggtaattttttatattttccatggtatacttcgattcctttactgtcataagtggattctttgccgtcttaagggtaaggagatttgtaggttacatcaataatgtttgaatataattactacaaccatctgctttcagaaagatgttttatggttcaatgagatgtaattattaatagtgctgaatatccatgtactccttatattagtgccttatgcatgtatagttcataccaaacccttctttcagtgcatcaacgataaaacgtcgaaatatagtaacctagaatgacaataattgcaattttaccccttgacattgtgaaagtatgcactatccgtcaatgaatacataattttctgagttctatgtataataatcacgatagagacaattcgacaaaccatgatgcactgaaagaagtgtttggtgtgaactttactgctatgttctcactccaaagagtttgcaactaatacgttataataattaacacgttgatggacagtacgtcaatgtataagcaagtgttgtgatactcttgtatttacaa

SEQ ID NO: 9501 - DNA, 833 bp, Diabrotica virgifera
  SmartBlast Evalue=1E-115; Info=Putative U5 small nuclear ribonucleoprotein 200 kDa helicase n=10 Tax=Drosophila RepID= U520_DROME
tgggaaaaatggagcaataactggtccgctcacttcatcttctctttccaattgaacagctacatggaccgacgatcctgaatggatttggtctttgtctatgacttcgtaggtgagttctatgttgggatatcggttacagaatttagctacgtcagccgtttgtgtttctgtcatctggagcaacttcgatcgatcttcgtcttccagttccataatgtcgaatactgtttcaactcccttatctgtgcatctcttgataacatctaaaacaaagtgaggtaactgtttcagatacgagtccttactccacatcgcttgcgttaccatttgtgccaattccatagcagctacagcaggtgaaagccaaccattggaactcagaacgtctacgcacgcttggatcagtcgtatggccttcgataggaccatttctgtgtccccttgaagttctgctcctaattgtaaacggcataagtgagcctgcaatagtagattggttttaacgtggggatcattgaacttaggttgaccaccagagggcgacgttaatttgttgggtagcttctgtgacagctgtcgcagtatattgtcttctcgatgacgaactgacacatcttcatattcggctgcagacgaaatgatctccaagagtccgcgaatcttcgttttgctgttcaatgataaactgaacaattctattgtagtataattgatgtaataataagcagcgatcattcccaaattcaaaggtacgcaatcgatttcatcttcgatgctaatacatttcgattgctccaaatcggacaaagtattctcgaccaattctgaca

SEQ ID NO: 9502 - DNA, 833 bp, Diabrotica virgifera
  SmartBlast Evalue=2E-68; Info="Bullous pemphigoid antigen 1, isoforms 6/9/10 n=1 Tax=Camponotus floridanus RepID=E2AVR2_ 9HYME"
aaatctttaatagctggtattcaagatcataatatagacgttgaaaagggtagagttcttgattcaaaatctaaaaagacttacaacttggacgaagcatttaagaaagatttattgataacgttggaaagacctttggtagaggagtttacgcaaaaatcaataacagagtctcaagcaactcccaaacaaactagggaatgttctctggaagaggcacttaagtttgaacttgtggatccaagtgtggctgtaataaaagacttgcaaacaggtaaatttaaaactgttggagatgctatcgatgaaaagcaacttaacgttaacaaaattgtagtttttgatccagcaactggcaaagttagatccctttgttgtatgtatgacaaaactattgttatctatttaaaagaacctctttcgtttattaaagctatcgaaaccaatctgttagacgttaatactggtaaatttaccgatccacaatccaacgaagttctgacattgaaagattctattagtctaggttttattgatcccgatactgctcttatcaaagactcgaataaaaagaaactaatcaaacttccagaaggttttagaaagggcctcattgaagctgaaaaaggaagcgttctagatactagtacctcaaaacttttcccactgcaaactgctctagataccggcttactgataactaccaacagaagtttcagtttgatagaatgtattacgtacggcatttataaccagaccactggtcactttaacgacccatttgtcactaccaacattatagatagaaagaagcttacgctcgatgaagcttt

SEQ ID NO: 9503 - DNA, 834 bp, Diabrotica virgifera
  SmartBlast Evalue=2E-89; Info=Titin n=1 Tax=Harpegnathos saltator RepID=E2BUG0_9HYME
ccttcagtcagtccttgtacagtgaagttagtatccttacaagagctagaaacagtgatccagtgggttcccaaaacatcttttctttcaacaacatagtgagtaactcttaagccaccatcgtagcttggaggtttccaagcgagtctgcaagtatgtttcgtaatctctgtagtttccaaaggtccagttggtggtccaggtaaacctgtgatgtatactgcaaagttaccagatgcacttccactatcatttttgacagttaagttataattgccagcatcgtttttgttaatatctttaataaatatgataatgtaatcgtcgaatactgtgtatctaatatgagtggagtcatcaacattttgtccatttttagacaaagtaacatcaagtggttggtctccagagtaatagattttaatcttcgtattgtcaccttcggccaaatatagggcatctggaatacgttcaattcttggtggtgttccaatcttcagacgggctgtagttgtgacagctcccagagtattactagcttcgcaagtgtaatcaccttcatcaattccaaggagatcagatatgtgaaggaatgcagtgcctcctttaacttcagttctaaatctaccaccaattttaatttcacgtccatttttaatccatctaaaagctggctcaggtttacccgatgcctcacattcaagcgtaactgattttccaagtggtgcagatgtgttattaagacgacgcagccagtctggtttttcgcctccaagaacttcacataccctaacaggtgtagtgcagttactaggctcactcttaccagctgaa

SEQ ID NO: 9504 - DNA, 831 bp, Diabrotica virgifera
gtcctgtgtatttagtagacacatgtgcctaaaagtctcttgttaatcgatttctttgccaggttttggaatgagtaataggttagctagtttccatttttttagggaatacttgtcttcttagaagatcattcgtgatttctttttattctggtaggtatagttttgtttggacctggtgcttttccagctttcaatgtgtttcatgctaccacaatgtcttctgttgaaaatccagttattggtgttttgtttgtgatggtcttatagcgatacgctttaattaccatttttgctaattttattttcttaatttttaataacttttctcaaaacgaaacaacattagtcatttaaaattcacaaaccatatgccaacaagggccgttgatttcgagaaacgaaaatgtatccccaaacagattgtagaagattaatgttttttcaaggaaacactaattgattacaatgccagattgccacactcttcatgtcaacttcttaaaatacaaaaaggttctcatcttttaaaaggcagatgcagtaatttatggctcttctggccattatcgcaaaaccgcaaactagttgacataatagttggtggtccggcaaagtcagtctctacacagcatgcgaacgattcagacacaccctcgctctcgctaacaataccctttcgagatataagcaaaacaccacgcttgtttacccaaaataaataaatatattactgttcgttgttacacttatttttaattaattccgtcaacacacaccaccggaatagtctaaaattaatgattgctctttttcgaaataattccgctg

SEQ ID NO: 9505 - DNA, 831 bp, Diabrotica virgifera
  misc_feature (798)..(798): n is a, c, g, or t
  SmartBlast Evalue=6E-45; Info=tRNA-specific adenosine deaminase 1 n=1 Tax=Camponotus floridanus RepID=E2AUE8_9HYME
tttttgtatcgcaaatttccataaacttcttaaacagctcaactttacaaatcttcagacgaccagcttcggtgttaagtttcttcttggtgacaccttggcgtttaccttcgacagctacttcaagcctttttccatcaatggcacaccatgacacgctagaaggacaaggttgcttgttatcatctttgctaaaatcaaaacttaagcaactttgacccaagatcattttgtgtcgtttataagcactcagcagagagacatcttccaatctactgtagaatgctctttctagtgcttgttcacaaaatggcgtgtttccgattaaagtgaaactacttaaataaattggagcttccaaaagaattcctagtagactgccctggatgccaaggtgtacccattttgccagtttgtcgctgcatgatactgaaagagttggatcgcctctacctggttttgttcttacaacgccggtaatatggtaatccatcccaggcaatttggcatctacttcttttgaaccttccacacatttggctcctgtcctaaatatatctccaggatccaacttaacttttttgtgaggtggttcgttccattccccttcagtatcttcctcaataacgttaccaaagtcaatagctgtttgcattggaaaaatcgctgcatctccacaaggtaccaatgttgtaaaaaaatgaaacttcacttcaggattcaacaagaatttattagatgtttctttaaattctataatatttgaagttgcacgcatctgatcataaatatatctgngaaatgatcttctacaaataacttctgcatgag

SEQ ID NO: 9506 - DNA, 834 bp, Diabrotica virgifera
gaatgaacagttgacatctgccaggatataaactttagatcttttacaacgtccggattgttcctctcgtataaaattaaaatattatgataccagaaatctccgtgaattattacagcttcctcagggacttctgacaacactttgttagcaatagcgagaaagccatcttttaaatccttctccattttctccttcagatcaaatcttttttcttccatcaacatatctgcaacaacttgtagacctgtttttaagttatcttcaagatttaaggatgcaagtaaagatttaatatctggtaaccactttgataaaagttcttgaaactcttcggtgcactgatcaaatgcagaaaaggaaagggcatgaaattcggccaattgtcgtaaaattacgttaattgtaatgggtgaaaatgatctactatgaatcggttggaatcccattgaaaacaagttattataaactaacacatccctgtcatctgtagaaaacatcttaaaacacatgggaaaaggaaaggcaggatatcttactttccttttcctacataattgcattaaaaagcgtgttatgtgttggaaaaggtattgctcccttttaaaaaattgccttaaaacgttgtcactttcacatttttcacttattttaagagttaaatccagacataacttgttcttcagataatcaactccctttatatgtgtcgaaactataagccgttcaccttcaaatctgtacaaatttggcaatactttaaaatctattttatattcgaaaaaatttgcatcttccacagttctttcgatgtacgaaaatatatcatttttg

SEQ ID NO: 9507 - DNA, 833 bp, Diabrotica virgifera
  SmartBlast Evalue=9E-22; Info="Beta-1,3-glucan recognition protein n=1 Tax=Galleria mellonella RepID=Q0E666_GALME"
ttatattattaatattatttaacctaatacactaatctaatttttgaatctaataatgatttttttgctgatctaataagaaacactttgtcctccagactagctacctgaaagctaacacttttatcgggatttctcgtagcatttactactggtactgtcagtcttagtttctcattaactaaaatctgtgcaacatacgcggcatcatcaaatgcgggtaacacaccctcaaattttaaagtccttgaaaggctatcgtccttttggaccagttgtgttagaacagtgttgatttcccttaactttttgacctcctcgtacagatccccggcaatatcggaaactttgagggctatcttgtagccagtgtcactctcgttatcaagatgaaattgttggcccgatgacgcgtgaaagttgttctcctgggatccttctgacgacgtggtcgttatatcactatctttcaccaggtacaccccctcttttctgtagcctaagtggtccttgatcacgaacaaccaataataaatcacatcacctctttgtaacttagtctgtctatcttcgaagatccatctaccacgtttactttgagcaacgtcctgggcgatttgtccagcttccagaccattcatgggcacattgagattaccgtgaaacgcgaatagttgaatgccttcttcttggggaatgctcacacggaatcctttcggaagcaccttaaaccgtggtttcggcacctcgtagtctgttgaaaagacggaaacacattgaatgagaaatactaacgctaatagctgcataattatgtataacttgttctgtaa

SEQ ID NO: 9508 - DNA, 832 bp, Diabrotica virgifera
  SmartBlast Evalue=4E-65; Info=Cysteine dioxygenase type 1 n=1 Tax=Camponotus floridanus RepID=E2A5K5_9HYME
ccaattcagtcttccgccatttaagttattttcaattaagtctccggataacacgtacagctattgttttttaaaaaacttcaaaaaatcgctaaaatatcgaaaatggaagtgtgcaaatacattaataacattggacaagaccatgacgatgatttcgatgttaagttttacaaagaaatgggaaataatttacctgttgttaacagtttggatgatttaatcaaagaattaaggctcattttcgaaagtgacaaagttaatattgatttagtcagttatgtgatgaaatcttacaagtcttgtccagcagactggaaaaaatatgccaaatttgatagatttagatacaccagaaacttagtcgatgttggaaatggaaaatacaatttaatggctgtttgttggggtgaagggcacggctcagctattcacgaccacgcaaatgctcactgttttatgaagatgctgcagggatcattagaagagattcgatttgcgtggccaaaaactcagggtgaacagctaaaagaaattggtagaacacggctagaagttaatgattgcgcctatattaacgattctattggtcttcacagagtcgaaaacgtatccagtgtggatacggctattagtttacacttatattgtcctccttacagtaagtgttcagtgtttaaccaaaacacaggaaataagtcaactgctaatgttacgttttattctgcgtttggaaaacgtattagggacaacaaggagatcgttgaacccgaagacaactgaaacggacaatttacgggatgcttttagatttttagattacccacttact

SEQ ID NO: 9509 - DNA, 830 bp, Diabrotica virgifera
tttcattagaagcagttacattattttgtagacgcgaatacgttgtgtggtgaaatttttctggttttcctttgtgaaaatctttagtggcttttggtcccgccgacttcgcgagggtgatctatctgcaccctggattttcggcggggtgcactcaacgaatctacctcccacaacccccaaagaacttttctccatcgaagaaagctacttccaacaaatcatcagcaacaacatggagaacgacctgcgagaaatcctccgcgagaaagccgaaaagcaccgcgactattacaattcgctgataggtaccgatattaccgactccactagttcgccttccgaccaaacgatggtagtaccggtaccgatcgcggtttcggacgcgccggtgacgacagaattacctgagcctagtagtacggggtctactaccacaaaaccgaggcaaagaagacggggtgtttatgaaattgaaggaatgctaccggaacctaccgagttcaaaagtgtcaagctgctacgggaaaattacatcgcgatgttagagaaaacctcgaaacaactctcgcgagtgtcggaaagccgcgacgaaaactcggaaatttcggatgaaaagccggaaattttggaaaaatcggaattgctggtaccaccgtccagtggttacagtagttcgaccgcttccggggctagtgacgatgagcgcgaaaagaattggaggaagatcgagagacgaagcggcagctctgattcagctgttcagagcgacgaggagggaccgattcagtcaaattggggggagaagaaggaggagatttttcctattg

SEQ ID NO: 9510 - DNA, 833 bp, Diabrotica virgifera
  SmartBlast Evalue=1E-143; Info=Dynein heavy chain n=1 Tax= Tribolium castaneum RepID=D6WRL4_TRICA
ctacttagtaacgaaatgacatctttccacgccaatgtatccaagtcaagatcagacttggaactccaaagcatcgaggctgccagcacatcagacgcggttagcttcattacttacgttcaacagttgaaacgaagcatgaaggcttgggagaaacaagttgatatttacaaggagggtcaaaggattttggaacgacagagattccagttcccaacaaattggttacacgtggagaacttggaaggagaatggggcgctttcaacgaaatcatcaaacgtaaagattctagcattcaaacccaagtagccagtctccagcagaagatcgtatccgaagacaaggcagtggagagtcgcactaatgacttcttaaatgattgggaaaagagcaagcctgtcgaagggcatctcagaccagacgacgccttgtcacaactgcaactgtttgaaagcaaattttccagactcaaagaggaaagggacaatgttgccaaggctaaagaagctctcgagcttcaagatcctggcggtataagcaccagcgaagacagaatgcaagtcgtctatgaagaactccaagacctcagaggtgtttggtccgaattgtcaagaatatggcaacaaatagatgaaactagggaaaaaccatggctttcaattcaaccaaggaagctcagacagcagttggacgctctaagtacacaattaaaggaactaccagcaagattgaggcaatatgcttcgtatgagtacgtcaagaaaactttacagacatataccaaagttaacatgctcatagttgagcttaaatctgatgctctaaaagaacg

SEQ ID NO: 9511 - DNA, 833 bp, Diabrotica virgifera
  SmartBlast Evalue=2E-59; Info=CG6030 n=2 Tax=pseudoobscura subgroup RepID=B5DTE3_DROPS
gtaaaattgactttgacatcttgaaattatataaccaaaaagtgggttttttaagggacatccatatttttcagtgaggtattacgagaatatctgctgaaatggctgctagaagaatcacgaaaagtgctgttaactgggctgccttaagcgaaaaggtccctgaacatcagcgtgcccagtttttagcgttcaaaactaagtccgacagctatcttaggcgtgtcttagcaaatcctgaacaagccccagccattgattgggcttactataaatccaaagtaccagttgctggaatggtagatgatttccaaaagcaatatggagctttatctattgcattccctgcagacactgtcaaacctcaactggatgctttagaaaaagaaatcaaaagtgatatcgaaaaattcaaaactgaatccaatgctcgtattgctgagtacagaaagcaattggcccacatcgccagtctaattccatatgatcagatgacattggaagattaccgtgatgcttacccagaagacgctatcgaccccatcaacaagcctacattctggccacacactcccgaggaacaacacgactatgttgacaaagatgcccagcccagccaccattaatactgtaaaggtggtgatgctttcaaatacagtgatttgaataacactttcaataatgataagtttatgaaactatagtgttttttcctgcatttgaaagtatttgtacttgtcatatactaagttctatagttgtgtctactacatttttaattagaattttttttggttattagaataaacttaaatacccacaaaaaaaaaaaa

SEQ ID NO: 9512 - DNA, 830 bp, Diabrotica virgifera
atgtggatctaaagatcaaaatactgaagtgatttccattctgctgttaggagtagattccatgattgcaaaactcaaagctttcaaaatgtgactttacaggagaatattgcacattagttggatggatcactgactgaataacgagactgttaacgaagaataaagaaaggtaaatataaatagtagaatcattaaaatgtgaacagtaacgtatttcgcatgtttaataaggcatataaacgagtcaaactgattacttttacaaaacaacatttatgaaacaaaattcagaaagaaaaaagaaatccagttagacgaacatcgcggattataaaccaaagatagtaatattcataaaaacctgcactaagcggatacagcactctaaagccgcgtagctatttcgcgaggtggccgcacgcggcctggctcgcgaagcaaacttggcatttggcacgaggctttatcgctttgccgcacgtacagtgtggtagccactttccgcagcaacggcaacgaacatgccgcgcccggcagcctcgcgaaatggagacgcggcttaaaagaagcagttaataacagtgccttctctcccgagccatgaacgagctatttcttttcttttttttttgtgtccttattggtaattctttctagtttaaatttgcatatctgtaccgtagaggtaaagggtagtatatccatctagcgaagttttgagataatggggaaataagatgaattccagaaattattgcaatcattcttaatctgaagtacatatgaaattatatattatttaattgtaatgttgtattgggaccgtg

SEQ ID NO: 9513 - DNA, 833 bp, Diabrotica virgifera
  SmartBlast Evalue=1E-80; Info=Transmembrane emp24 domain- containing protein 7 n=1 Tax=Culex quinquefasciatus RepID= B0WQX1_CULQU
caaaatttataaatatattaaagaaggaaaaggtacaaaatggtttaggtcacaaagtttatttgaattgcgtgtaaggtttcttttccgtgaaaaagttcttcaaaacgaacacctgcccgaaagcaatagtaataactgccaaagtttccattattgaccaccagagcaccctttcgttcagttcttcggcgcgtttcctgccttgggcttctcttaaccgatgatgtgtttggtagtccaaaatcgtgttcagagatttgtggatttcttgggctgatgactccatctgcgttaaaacggtggcatgttcaccaataccgggtaaaggttgctcctctccaacttggaaatccatatatacaagtttatgtgaaaaagtggagaattcattgctgaagcatactttgtagataccatgatcctgagatacaaaggtgtgtgagtcgaactgcattttgacttgtttgtacaatatattgcctttggggtcttctaaagctacatctacatcataattgcctccagttacgacctgatactctaacgtgcaacttgtgttctttttaatttcctcgtgaaagcattctttggcactatcgggcagttcgaatgttaattctgttcctaatgcaaattggaaaagacctaaacttacaataaatacccaatacctcatttttttctagtattgttaataatgtcctatgggtaattaaactataaatcaatgtgtagactgtgtagtgactatcatattttgcacctataaacttttaaaaagatatatctacatggaaaagattatgtggacttttcgtgatgacgttttt

SEQ ID NO: 9514 - DNA, 834 bp, Diabrotica virgifera
  SmartBlast Evalue=5E-81; Info=COP9 signalosome complex subunit 3 n=1 Tax=Harpegnathos saltator RepID=E2BPK5_9HYME
tgaggatagtgtttgtggtgtttatttttaattaaatagtttaaaatttatcccaattcataggtagttccaatgaaatggcatctgcattggaacagtttgtgaatactgttaggacttcatcaacccacggtaactttagggagctttgtgaatttttaaataaatctagtgaagtacttataaagcacagtcaacatctggataatgtattggaaactttggacatacaacatcattctttgggaatcttagctgtactatgtgctaaatttagtgttcctccaccaaacaataccactgataatagattttctcaagctcatgattttatattaaattgtaatggagaacaaattaggtttgcccctgatacatttgcggaattatgtcattctgtcaccaactatttagtagaacagaagcaaccaatgaagggaatattacttcttcaaaaggccatttcaaagctaagactatatgattcacaattaacatctattcatgcagacttcgtgtcagctgtgcctgttggcaaaatgttttaaaccagctttagaattgttgaatgtagatgttacaggtatatgtcaagagatgtcacaaaatccaaacggacctcaattcgaatcgaagtattttctgttgtattattattatggtggaatgatctacttagctgttcgtaatttagatagagctttatattttttcgaagtagcgattactacgccctcactagctgtttcacatattatgctagaatcgtttaagaaatacattttagtgtctttgttgctttatggaaagattcagtcaattcccaagtttgct

SEQ ID NO: 9515 - DNA, 822 bp, Diabrotica virgifera
  SmartBlast Evalue=2E-51; Info="Paramyosin, putative n=1 Tax= Pediculus humanus corporis RepID=E0VGP7_PEDHC"
cacacgaagataccattgaaaacttaacgatctctctgaaattacagctgccttggacagagctttgtaactaactacgatcaaattcgaaatgaaattaaaggtttaaataggttagaccgagtaatgataaacactgccgatggtgttattgacaccaaacgaaaagtagagtttggagtgcaccaaattttggccgagatatccaaatattcgaaggaaaccactaaacatgttcaacaagcagtgagtaacagactagatacttttgaaacgtcaattttggatcccgacactggagctctggctaactcaacatcaaagatagaagatgacatccaacaagtgtggcggcaaattggaataatgtatcaacaaatgagtagcaactcaaagctcttaaacaactgcagaatcagactgacgcgtatattactggttctcttgggacaatgaacaatgtgaaaggaaaagttggtcaaataactggccgaattaccgaggttgatgaaaatcttaactatctaatcggcagactttcgttggtaacggaagaatttaacagaatcaaaacgggactcagctctgcattagaaaaaatcaaagaaagtttccatgcggtacaggaaaaagttgatgaaggaccaggaccacacaatattgacagcagtgagcaagtgcctcccaccgcttaatttttttaataattcttatttattgcaatgtttgttcgagcgaatatttgtattttagcgtagctagacttaattttttattaaagtgtgagtaattcaaaaccgttaaaatacaagaaactcgttt

SEQ ID NO: 9516 - DNA, 833 bp, Diabrotica virgifera
  SmartBlast Evalue=8E-98; Info=Negative elongation factor B n=3 Tax=Culicidae RepID=B0WYZ6_CULQU
tcttgcaacatctaatacatatggaaggaatggctagagataatacaattttgattcttcttctgcgaatgttagccttaggtttaagcgcttgggtaatgatagactcgcaagattttaaagaacccaaattagacgctcaagtggtgaccaaatttcttccagcgttaatgtctctaatggttgacgatcaagtgcgacagctgagcggcaaattaccccacgacgaacgtgaagctgctatcaccgtcatcgaacattctggacctttgcccgacgcggtagaggcatatttgcaagacagtactgtggctagtattcttgccatgtattacactttgcatgctgcgaggctaaaagatagagtgggactattgaggatactgactgtcttggctaattgtaaagatgacagggcgtttgaggatccatttttacattcttttgtgtgcttactcattcacaactcggatgaattccaagcggaagatttttgtactgctcttttcgacgaatttttcttcgctggtctctctagagacaacgtaactaggcaccttcttaaacttttatggtacgttcatcaaaaattaccgacgagtagattacattctctaatgaaagccctacagccaactcatcaacacagtgaaaaggttcatctgctgtacaaactgctccaagacaagatagtttcgcaagaagagactgtgatacctcctgaaatggatattgatattaattcaccgttaatgagtgtgccgactcctgccccctatcatcatacattgtaaaggttatgaagaggatagaggacaagaaaagaaaggaag

SEQ ID NO: 9517 - DNA, 829 bp, Diabrotica virgifera
  SmartBlast Evalue=3E-43; Info=Long-chain fatty acid transport protein 4 n=1 Tax=Camponotus floridanus RepID=E2A3N0_9HYME
cttgcatgagtaatttttgcagctttaggcagccctgtagtccctgatgtatagatatataacagcttatccttggtatttgacatatccatgtgtttttggggggatgctactgactgattagatatacattctttgatatctagcactccatttcttgattctgcagatggagaagtcttaaaatggtatagttttatttcgccagattcgggataaatttcttttacggcacttgcaaaatctgatccaaatattagcgccctaacttttgccaccgatatacaatgttgcaatggtttggaaaccagattggtgttaattagagctgttacaactccaatttttgataatcctatccagatagcagcatattctggtctattttctaataagagagcaaccgtgtcacctttttcataacccagagatataaaataattcgccattttattactgtaatcttctatttgtccgaatgtccaagtttcgtcttcaaaatagaaggcaactttatgcggtctacttttagctatctttgtgaatagcttgggtatcgtctcctgattttttttcacatttggctattctatacatggcaggaaatactttagacaggcctcttaaatctcggcgccatgttttatatagaatatataaatatctatatcttccatgtgtaaggaaaaagcaggatatcaataatacaaatagcagcagcaaagcctgacaacctaaaatatttgcaaacatcgttttcacactcacaaacacgaattaacaaattcaattaaaacaaccgtgtatctcactgcagatctgttttgag

SEQ ID NO: 9518 - DNA, 832 bp, Diabrotica virgifera
gccctcaatgccaaatgccttaaattagcaaaagcaaaccttactttaaaaaagcaaaaacaaaaaagttttccttaatgtccttcaaccaacaactcaatcaggaattgaataaagttattaaaaaataactgaatctttctaatagtatcttaaattagcatttaatagtccagtcgaaaactctatagaatttgttactgtgagtcggaccttagatttttgtaaaatattgaagactttttaattatacaaataatataaaaacaaataattaaaattttagtctgcttctgctgaaacagttctgtaaaattcaggaaaaatttatgcccgaaaaattgaattactgacccttatttcttaacttattgtcctcaatatctgggaaattatcacctatggcagtggttctcactatttttgagtcatgtaccacaaaatagtacagttggtaaaaaaattaaagacaaaaattgtaaaaatactgatatggaaatttgatgatggaaaacgaaagtctttaaaatttgtgaacgtttatgaatatacagcaatattttgaaggtattttcaaattgcacaactcaaattttcgcaatatttaacggattttccggtttttgataatgatatttccaaaagttcaaaatttttaatatttttcaatttttccaaccaaactgggacaaaggtatcccgtgtttcgttaaagcaatatttttgaggtatcttcaaattacacatacaaagttttcacaaattttccgatatgtctgaattgttccgaccaattggaaaccaatgtaacttgttttttgttactagcaat

SEQ ID NO: 9519 - DNA, 831 bp, Diabrotica virgifera
cgtccgtatacattaaaataggaactatcaaaacgctcgtttttctttaaaaatagtgtctctataaaataaaaaatatatcaacaaataatactggtctttcatatattgctctctatggccggccactgaattttatcgacatcactggaattggcaacgaggtgatttttcacgatattttgcaacactgtcctggcttctttttcgtctccaagttgcgatgtcaaggcagtcacattatactctaggatgctgactttggactgcagctgctgtatggcttcgggtatggctttgttcagttcggacttcgtagcgtcactgacattcactgaattgacagtgcttctgggtttcatggtggaacataggcttcgatgacatccaagatgaaaccgtcctccttgtagctcatcggcctgcggctggtatacctggagtacggtccgttgggggaagtacccaaagcgaggtagggtcgcaacggcggggtggggcgcagacaaatggccgaccatccacggcctgctgcgtttacgctggcgatgctatgattggaagctgaaagagtgggagttatggaacggacgctgccttggcgctggtggttactcgtcaggtttgggtttccgcctgatattagtggcgtcatgtgtggaggtggctgtggaacgaactgtgcttgggacggagatactttctgactaacggtggaaacggtggacgacctaggcatctgcttcctcaataattccacccagtggtccgcgtcttcttttattctggcacaccaccagcctcctgtcgatcatggggggcgcttgattt

SEQ ID NO: 9520 - DNA, 833 bp, Diabrotica virgifera
  SmartBlast Evalue=1E-105; Info=Suppressor of ty n=1 Tax=Aedes aegypti RepID=Q174B1_AEDAE
gggtgaagttatcattaggccttcgagtaagggtgcggatcatttgaccattacttggaaggttacggatggaatctatcaacacattgatattaaggaacaagggaaagttaacgctttttctttaggaaaatcattatggattggaaatgaagaatttgaagatcttgatgaaataatagctaggcacgttacaccaatggcggcgcatgctagagatttactgtattttaggtattacaaagatttccaaggtggtcataaagataaggctgaggaatatctaaaagatgaaaaaaagaaaaatgcttctaaaattcattatgtagttagtgctgctaagaatatacctggtaaatttcttctttcgtaccttccacgcaacaaagttagacacgaatatgtaacagttactccagaaggctttcggtttagacaacaaatgtttgattccgtttcttcgttatttaaatggttcaaagaacatttccgggagcctccaccaggcggtgcaacaccaggtagcacgccaaggatggcttcaagcagaactggatatggaagtgccacacccgcgtatagtatgaataatgaagctattcaaagagttgctcaaaatttgccaagtcatgtagttcaagcgttatctgctgccaccaaccaaactccacattatccccacacccctggttatggaggcaattatattaatacgccttacactccaagtggtcaaactccatacatgactccgtacgctacaccccatacgcagcaaactccccgctatggtcatcaaacaccttcccaacacatggcgagctcagcaccac

SEQ ID NO: 9521 - DNA, 831 bp, Diabrotica virgifera
tgatttcaatatttattatatttatttaaactttaaaaaatcaatacaataacaagaatacattaactattattattatttgtggctatagacaaatgtaatgatatttcaaatattgctattttacaaaaattttaagttgtaaatctctgtttattattacaaaatgtgcgagttctttagataaatgtgtgtcttattcgattgtaacccgcaagtattttcattgtgtacttcatgcacttacattaagttacaataactttggaacaattacagccaatacaacagaagctagtgccacaaagctgaactgtatgcttggagctgagttacataagtcttgttgacaggcggcacaagattttggttctcccttggttgttgggcaattgaagtttaattttccattcacctttgggactgctgcgcatcctctgtctacggcatctttgtaggtagctctggatttgtaatcaattcgtgaacacgcccattccataccagctgcgggttggacagtgccacaagctctttttggccagctgcttggagatccttgacaatcgtcgcagaaataacattctaatgctgaggcatagccaacaactgccaaacatgccaataaaacaacgaatttactcatgttgctattttttctttgtataaaactagaagaactgacaaaaacgaagttactggaagtgtggaagttactttttaattcaaccgctcttgctacgctcgaactaatgtcactgtttcagtggttggcaataattgtcacgtgatggtagaggaaaaatttagtgggagtttaagagtaggatg

SEQ ID NO: 9522 - DNA, 830 bp, Diabrotica virgifera
  SmartBlast Evalue=6E-23; Info=Endonuclease-reverse transcriptase n=1 Tax=Bombyx mori RepID=D5LB38_BOMMO
aaaattgacttgagtattttttattctgcacttaactttaaaaaatatacacgctatattaaaatttatgtacacgcagcacgtagagaaggtagatttaaatggactactaaagctgggacttcaattgaacaagtcgaactgacatatttcccaaacaaacttcaacaacacataaaagtgcataatatatctaatttcaactttttatttgtagcgacatagattgtagtattattataagtaactaaaaaaactgaaaataaaacatttattatattgtactttgaagatggtttgaatccgtcttcataccactgccaaaaaagaagatcgccaaattatgccaggacttttgccttgtaagtctacaaaataacattcagaagcttttcttgtgaatcatacagaacagaatatatagagatgtgacaagtcaccggtcaagaacaattatttggcttcgggaaaggtatgaggacacgagaagcaatattttgtcttcaaactctggcacaaaggtgcaaagatcaacaagcagacctttttttctgttttatagattttgaaaaagcgttcgaccgagtacagcccaggagcttgatagaaagattgaacgacatcggagtcgacaaaagagagtctaaaattatagaacctatttactgtaaacacagctacactagaacagtgttttggaatccaacgaagattcaataaaagcttgaaagtaaacaaaaaacttcccattgttgacccagataagtagcaaaaatgatcctttgatggcaaaccaagaaaacgagtaaaataaaggaagagacggtact

SEQ ID NO: 9523 - DNA, 829 bp, Diabrotica virgifera
  SmartBlast Evalue=1E-134; Info=Dynein heavy chain n=1 Tax= Tribolium castaneum RepID=D6WRL4_TRICA
ggtttacacagcaagtaatgcgtaatctgcatgttgtcttcaccatgaatccctctaccgatggtctgaaagatagggctgccacttctccagctctgttcaacagatgcgtcttaaactggttcggtgactggtcagatggagctctcttccaggttggtaaagaattcacgaatcgtttggatcttgaaaaacaaagctggagatgtccagacttcttcccggctgcttgccatcacatctcagcgtctcctactcatagagaagctgtcatcaatgcctgtgtgtatgtacatcagactcttcataaagcaaacagtagattggttaagagaggaagccgtaccatggcgatcactccaagacattacttagattttattcatcatctcgttaaactgtacaatgagaaacggtcagatctggaggagcaacagttgcatttgaacgttggtctgaataagatcgccgaaactgtagaacaggttgaagaaatgcagaagagtttggccgtcaaatctcaggagctacaggccaaaaatgaagctgccaacgctaaactcaggcagatggtgaaagatcaacaagaagctgaaaagaaaaaggtacagagtcaagagattcagcagcagttggctgaacaaacgattcacattgaacagaaacggtcagaagtaatggctgatctagaacaggtcgaacctgccgttattgaagcccaattagctgtaaaatccatcaaaaaacaacagttggtagaaatccgtactatggcaaacccaccagctcttgtgaagttggctttggaatccatttgtttactgctcgg

SEQ ID NO: 9524 - DNA, 831 bp, Diabrotica virgifera
  SmartBlast Evalue=1E-125; Info=Dunce n=1 Tax=Tribolium castaneum RepID=D6X3D8_TRICA
ggctatggaaaccatggaggagttggattggtgcctagatcaactagaaactatacaaacccatcgatctgtctccgacatggcttctcttaagtttaaacgtatgctgaataaggagctgtctcatttctccgaatctagcaaatctggcaatcaaatatcggaatatatctgctccactttcctagacaaacaacaagaattggacctaccctcccttcgtgatgaagtccctgagctcctcccaaaacccactcaacgcaaagaacgtgcccgaggaccgcattctaccatgtctcaaatatcaggtgttaatcgtaaaccactttgccacaccaattcttttaccggtgagaagttacctttgcacggcattgaaacaccttacgaagaagaattaggcaaaagtttgattatgatagatcaatggggtatcgatattttccgcatcggagagttaagcaacggaaagcccctaacctgtgtagcttacacgacctttaacaatagagacctcttgaagacaatgaacatcccgccgaagacgtttataacttttatgatgaccctagaagaccattatgtgaaagaaaatcctttccacaattccctgcatgcagcggatgtggctcaaagtacacatgtactgctgaatactcctgcattagaatctgtatttacaccgctagaagtgacagcagctctattcgcagcgtgcattcacgacgtagaccatcctggacttaccaatcaatttctaattaattctagttctgagttagcccttatgtataatgacgaaagcgtactagagaatcatcacttagctgt

SEQ ID NO: 9525 - DNA, 829 bp, Diabrotica virgifera
tttcgatttcttcagtagcaagttttttttgcttttaacaagtgtatatgccttcgaaacgccttattagaatataggctttaggtaataaacatctaccaggtatatccttgatacatacttaattaatttatttagaaaaaactaaaaaaactattttttgaatattaattgaaaatggttattcatttttaatttatttagaattttaagaaatttttgtatacagtgatgagtgcgcgaataactggcaaaataacggaaaagacagaaaacataatatgttatgaaataaaaagagatgaaactagtagaggtgggagattatcaatagaaaactataaatttacattattttggtagtttcacacctttaaacgtatcggagtcaaactgtcacaggagaattttataaaggcggtatttacgaatctcattgatagatcacattaatacatcacaaaaaaattgtcggccatgatggcaagttgctttgtgtacttgtttttggtactcgttgtaggtattacacgatgctggttttatatttgggtgaaagttaaaaattataaagaaagcctgtaatatatttgttgcttaatagtcttacgaaaattcagtgatttagaaagaactgtaagattttttagtgtagtcttaacatatatttatttctatatgtctatgttataatattaattacgctgattaatatagtgagatttttatatatacacacacgatagattattttttattaattttctttgtagaatataactttggagtagtgattaaaagtttggttgaaggagtaccatcaagttat

SEQ ID NO: 9526 - DNA, 826 bp, Diabrotica virgifera
  SmartBlast Evalue=0.000000002; Info=Endonuclease-reverse transcriptase n=1 Tax=Bombyx mori RepID=D5LB38_BOMMO
cacaagccgccactgtctggcagtgtgaacttcgaagctccatttgagtttggcaacttttgttgttatgtcctcatttgttgttttatttttgatattagatttactttacgtaaatatacttgaagtttcttaatcatgtaaagttgtttgatatctcaattttttgtaatatctcttgagaatcaaataaaaattgtaaaataaatcctttatgttaacgtgtctactagcagacgagaatataatttgtagtaattattattattccatgatagttctatcagacaagataataattataatatgtatatctattattattacttcttctcactaggtacacaagcaaccctgtgatactttatttttcttcaagtgccatctcctcgacggaggtctgtaatcatcatagctattcggactccagagacggctgcactgaaaagttaatatgatccgtgccattctctcaggttgcgttgccatgatattcaacgtttccctatgcttctttttccttgaatctttccttgcatgagttgaagcaagttgtatctctctccacctgtaatatgtccgagatattccaattttctggttttgattgtatttaagacttccatttcatctttctcagaacgtctttgtttgtgatgtgttctggtcatgatattttcagaattgtgatatgttaaatagagataaatattcttttccgcaacagatagtagtggttttactcaccagggcagatatgtaaacaattgaatgtactgaccagtgtaagttggtaatgatacctatccctgacgcgacattacgg

SEQ ID NO: 9527 - DNA, 831 bp, Diabrotica virgifera
  SmartBlast Evalue=5E-75; Info=Phytanoyl-CoA dioxygenase domain- containing protein 1-like protein n=1 Tax=Camponotus floridanus RepID=E2AIR3_9HYME
gcttcgctgtagtgtactacttggccgtgtattaagatacaactacctttggtaactggaactggagaaaactgctttttgataataaggagcagctgagttatatatcagcagctcatccgcatttggatcaggatttctgatgaatcgcctatggattccaccgttatgagacctcctagagaaccacaagcaaccgttttctacagtggcatcatccagagctatccagaagccagctactttcagagggtcggtgtgtagatatgaagcatcttggtgagcagttacttcacttccaatctttggatttttgaagatgtacatgctctgtgggataactggttcttcgaaacctaattgaaaagcagcctcttttattttttcggaaaacgtgtgcttcttgaaaacaggattaagttcgtgaagagcgtggcctattttgttcagtgaattttccggctctaccagtagttctccatttggtcctagagctccttgctcgtagaaataagctattttatcaccgctgtctaagaaatacttgtctttgttttgttgtgactcagaatgtgttgtactgaatactgttctctttgattcgcctggcatagattttataaggttttgtgcttcatttttcatttcttccacttcttctggtgtgaataaattttcaatgaccgcgaaaccttcagtttcaaactttctttttacgtcgtcgaacattgtcttaattattcactaaactacaataattttatcactgttaaagagattttcaaactcgttttaattaaagccaaatcgtatctggcaaattctgttttc

SEQ ID NO: 9528 - DNA, 830 bp, Diabrotica virgifera
  SmartBlast Evalue=7E-24; Info="Mitochondrial import receptor subunit TOM22, putative n=1 Tax=Pediculus humanus corporis RepID=E0VP91_PEDHC"
atcagtccttccattaatactgatttaggtgttaatgataaatttagtttttatttgatacattggtacattcgttaagttaaaattaagttaattggtcaattgttataatacacgtatttttttcttatggcaccagctgaagaaaacgaaagagacagcggaatggaatcccaagaaggttctcaatctcaagaaccagaggaaaatgttaccaatactagccaatctatttctggagaaaagaaaagacctgaaattgaagacagttacgatgatgagcctgatgaaaccttctgtgaaagattatggggtctgacagaaatgtttccagagtctataagaaatttcacgtggtctacagttgtaaacactaaagaaggcatcaaatttgcttatagtttttcaaggagcgcaacgtgggtagtctttagcacatctattatacttttcgcacccataatatttgaagtggagcgagctcaaatggaagaaatgcaaaagaatcaacagaaacaaatattattaggacctaattcagcgatatcagggggagtgcctcctcctatcatgcctcccatgccacagcagaagagttgagatacatagttgttattaaagcattcacttaaaattgactgtatattatattatcttttaaagattatgtaatttcaatctgttgtctaatgcatttgcagattgttactcatagaacaatattgtagaaacatgtttttatagtttgcaaaattatttgtgatacagggatggttactggcaatagtacattacagattttgtgaattacataaaatatgttattagtg

SEQ ID NO: 9529 - DNA, 831 bp, Diabrotica virgifera
  SmartBlast Evalue=2E-29; Info="Histone H3 methyltransferase, putative n=1 Tax=Pediculus humanus corporis RepID=E0VWC8_PEDHC"
ggggaggttgtgtgggatacaaaacagtcgtccgaggggagtactgctgtcttggactcggttgaggtggcgttatatacttcgaatgagaatgtatataagctaatccttccagtccttcagtggaagacggtctagagatagggctgtaaacttgctgtctaggcactggatcgggttctttgggggtgggtggtaaagtagataatggaggcatctctgcattaggcactttaacattgactctttctggacggggtggcaaattggcgttgaccacagaccttgaggacaacgttgctgtaccctggatatcactcatgtctactgcggcatttataatggattggttagatatttcaagggttcgttcgatttcaccagacataaggtccccaattgttcttgtagcaaccattccatctgcagtattataggggatttgttggtgagccaatttctcctgggaaagatgtcttctaagggctagcttggcaggtgatacttgggtataatctggctgttcagcaggtaaacttcgatcagaaagcgcatgtctttcaggattcgaatgcctctctgcattgaggggcctttctgaattcaagtgcctctcagcacttatttgtctttcctgatttatatgtctatcagcagtaatgtgcctctcagaggtgtactgccgttcatggttaaattgtctttctggaattaactgcctttctgacgttaaatgcctttcatgctgtaaatggccgttcttcgagttaagtgcctttcctgagacatatgcttgtcgatggccattggtctttcatgagcttgattgta

SEQ ID NO: 9530 - DNA, 831 bp, Diabrotica virgifera
  SmartBlast Evalue=5E-93; Info=5'-AMP-activated protein kinase n= 1 Tax=Culex quinquefasciatus RepID=B0WG19_CULQU
tatatacaccttcaaaccactcgtttctgtgttcatttgccttctttaatgacacatctaaatcgttgtaagttttttctgccgccagattaataacatcaaatttggcataaatatctacaagtcttccttcggtatctatcacaggtagcgcggaaactcgcctttcgacgaatttctttaaagctagaataatcgtggtctcttccgacgccatttcgatattgtcgtaactaccgatcctaagttccctcagagttttctgcatgtaactgggttttggtaattcgttaatatacaaaaataaaatctaagtattcgtttatgcgtgagaatatacagtacgtttcccgtttcgggatctatgacaggcaacctgtgaattctattgtgtattaatgttttaattgcatcgtagagcgatgcatcgggacctatatttataagaggtttcttatccttaagtacccgtcgccaggtatctaatttgtgttcttctaattcgtccatggctacatctggagatttgtaatacatcctaaggatctttatgaaatctgtaatggttaacataccaacaaactcttgcttggaactatcccacaacggtgctgccctgacaccattatatacaagggcaaaaaaggcctttttaactaacaactgtgtatcgaagacgactagcttggcagatgttggaatgaggtcgtaacatttgtggaatttgaagaacttaacgaaaatttgggactcatcttcctccaaatctgagatattaactttatcgagaaagggatccactgcaggtaaccctcgtgaatctctgaataa

SEQ ID NO: 9531 - DNA, 825 bp, Diabrotica virgifera
ataatatcaataaacactgcacaaaataaatgaaataaactaatatgaatcttaaaacccttctactgaaaaagtgaaaattcttagtcataaccctcttcttccaaatgaacgatataacataaagtgatacgctgtcacgaatttagggcgcggagcgttcacaagacgaaacacaactgttaccgctccatcggtaactgctctctcacttttcgtctcctgaatgcgaccattatttccacagttatgatgcgaaattctgtattaatatcacaaagttttgtgatattaatcacagcaatgatttgtcatattccataaaaacaaaatgccataatgactcataacagacgaatttataatcaggaatttttaagaaaatgttaccgtatattagttcataattccctaatatctggacatgttacagcacagttatttcgaaattattggcttagttactggtagcgccatctatcatacaataagagtaatatgcaataattcgttaacttacttgatgttctactataaattctttgatacatatgtggaaggaatggggtttcacgcgaatacgtttagttttcaattaggtatatgcgacttaaggaagccctaaaatcggtaactttgcttagtccactatcgttatttaatcgccgaattacggcggaggtaggaggaagttagaatcagcgagaatcatgtgcaatgtacgtgggaagtggaaccgtctggtacacgacggtgcgcattggtgtcatttataggccgtatatctaatttaaataaacatgtatatccgcataagcacgacag

SEQ ID NO: 9532 - DNA, 823 bp, Diabrotica virgifera
  SmartBlast Evalue=4E-38; Info=Pol polyprotein n=1 Tax= Schistosoma mansoni RepID=Q6IFU0_SCHMA
caggttggtgtttgacctgtagttcattcacggccgagcggtaggccatcaggaataaatgaatgtgttggtcccaatctcgctgatgttcagatacaactttggacaagtgtttacccatcgttcggttcatcctctcgaccattccatctgattgaggatgcaggggtgttgttctggtcttattggcaccaatcaatttacaaacgttttggaaaagagctgactcaaagtttcgcccttggtcggagtggatctccaagggaacaccaaatcggctgaagaattctttaacaagtacctctgcaacggtagcagcttcttgatttggtaatgcataggcctcggtccatttcgtaaaatatccatggctaccaggatgtatttatttccagcatcggtttctggaaatggacctgcaatgtcgattgctactctttccataggacttccaacattgtactgtctcatgggtgctctctttttaccaactggaccattaccggatgcacacagttcacatttcggcaccatcttcttacatcatctttacagttcacccaatagaaccgttctcgaaccttttgcagagtcttcgtaataccaaagtgtccacctgatgtaccgtcatgcaactgacgcaatacttctgacactttacttttaggtacaatcaactgcagcttagattctgtaccatcatcgttctcaaaggttctgtacagaagatcatcttttagtaccaggcaattccattggctccagtaggccttgacttcctggactacatgcaccaatgttctgccaactaggtctctcacct

SEQ ID NO: 9533 - DNA, 829 bp, Diabrotica virgifera
cccaaccctgctgctgtaaccccctgatctcgactatctcgaaaatttacggaaataatatttttgattggaaatttttaatatgatttagggttttcgtaagtagaaaggtcactttagctgatgtttaatttagcacaggcacaattcaaaaacttgccagcactgattaacgtataggatatgctgcatagttttaccagcactttaaatgtacagggtcattaataggtgtgatagagctcagttaccaaaaaatgttatttatcaaaattgtaggcagctttaagtcttatattttaaaattaattacaatgttataagtttctacaagaacgatcgtattgcagccataatgattcgtttttgaactgaaatgaagagcaattaccctgaggtgataaaataactagaggaaccaagacaacgatataattcacaattctatcaaccaaaaatgacaacatatgacaaggtatgaatgtaaaaggtgtcatccatcgaaactttagaggatagaataagcacagaggaaatatggaacagaatggaagtagaatgcccaattacaaaaaagttggaaaacagagccctgcagtatacaaaaaatgccagagcacagctggtcgaaaagaataggtatccgccggaaagaagacggagagaaaaacctgcaatgagatggaaaacttacgtaggaaatgctatgatagatagagacctcagagaaagtgactgggagaatagagtgctgtggatgaagaagactcgtaatgagaaaaagccgaagaagaagaagatagcgctagataatttacaagaaagaggg

SEQ ID NO: 9534 - DNA, 827 bp, Diabrotica virgifera
  SmartBlast Evalue=4E-75; Info=Sorbitol dehydrogenase n=1 Tax= Harpegnathos saltator RepID=E2BCH2_9HYME
ctagtgtcaatacttcaaaaggggacaaggtttctgtagacctaatagtggatgtctatgctgcgatcactgccattcaggaaccctcattattgttcaataggtggaatcagtaataccattggaatctttagaaacggaggatgggccaattattgtgtcgctcctgtggaccaagtccataaactaagtgattccattactctggaacaagctgctttagctgagccactatcatgcttagcccacggatgggacatcataagtccagttacagtgggacaaaaaattttaatcaccggtgctggaatcattggaaacctatgggtctgtaacctacacttgcagggacataaaaacgttaccgtttctgagccaaatttagctcgattagacatgattaagaaacttaatactggctataatctcattacccccgatcaactgaaaaagaatcaacaagctgatcccaattacttgtttgatctggttatcgattgtagtggatatgcaccagctgtggagcatgcgatatctttactgaggagaggtggaaaactatgtatatttggggtggcaccacctcatgcagaaataaaaataaaaccatttgagatatacatgaaggaattaaaaatctacggggtactggttaaccctttcagctttcccaaatcgttgggtttattggaagccatgggtgacaggtatttaaattatgagaagataggaattaagacgtttgccttgaaggattacgatgaagccataactttattgaagaagggcacaatagcaaaggctgtgtttaagctttaaaaataact

SEQ ID NO: 9535 - DNA, 829 bp, Diabrotica virgifera
  SmartBlast Evalue=1E-128; Info=Titin n=1 Tax=Camponotus floridanus RepID=E2ARB2_9HYME
ctgcaacggacgacccattcaaactggtcacagattcaaaacaacttatgacttcggttatgtagctctagatattctctacgcttatgccgaagatactggcacatacatgtgcagagcaagaaatgctgttggtgaagctgttactacagctggtatttcagttgtagctaaatctggattatacttagatactcttgatgaacagcgtctttccaagatcagacaacttgaaagttatgaaagacctaaaaaggaggaaattgaagctgttccacaaaaaccagttttccttacaccattaattagtttagaaaatcttaaagaaggagaacacgctcatttggaatgtagagtagaacctgttaatgatcctaacttgaaaattgaatggtacgtcaatggtgttaaattacgtgctggtcataggttcagaacaactcacgacttcggatatgtagctcttgatgtcttatacacttacgctgaagatagcggaacatacatgtgcaaagctactaacttggttggtgaagctgttaacacctgtactatcaaatgcggtagcagaaagagtattattttcgatactcaacatccagaaggtcttgagaagatcagggaattggaagcacaaggccatcatgcacgccttgaaattgaagaaccagctccaactcctcctatgtttgttactgaattaagaggaacgaccgaaatttacgaaggccaaacagctcactttgaagcgcaggttcagcctatccacgatcctaacttaagaatagaattctatcacaatggaaaaccattaccatcagcttctaga

SEQ ID NO: 9536 - DNA, 823 bp, Diabrotica virgifera
  SmartBlast Evalue=5E-62; Info=Reverse transcriptase n=1 Tax= Bombyx mori RepID=Q5KTM2_BOMMO
aattcagattggggaacacctttagctttgttcaaaaatcaaatgggaaaatacgaatatgtggggattacaaaacaacaataaataaacatttagaagatgtgaaatatccacttccaaaaattgatgaattatggaataaactaaaaaaaggtcaacgtttttcaaaaattgatttacaactagcttatatgcagttctccttaaatattgaatcaagtaagttgttagcgtggaacactcacaggggtttgtacgcagttaaaagattaccattcggaataaaatcagcaagtagtatatttcaacgagaaattgaaaatctctttaagggcatgaaaaatgtaacaaactttttagatgatataatagtaacgggggaaacagcagaagaacatatgactaacttgagggaagttcttagcaaacttgaaaaggctgggctgacagtttgtaaagaaaaatgtgtattttttaaagaggaagttgaatacttggggtacaaaatatcaaaagaaggccttaagaaaacagatagtaaaattgctgcaataataaatgcacctaaaccagaaaatataacagaagttagagcttttacagggctagtaaattattaccataaatttatacctcgggctgcccagatcttagaaccaatatacaagcttttaaaaggtaatgtaaagtttttctggtcaaaagaatgtgaaagggcattcaatattataaaagatataatagcatcagataattgtttagtttattttgaccctgaccttccaataatagtaacaacagatgcaagtgacaagggtatttc

SEQ ID NO: 9537 - DNA, 826 bp, Diabrotica virgifera
gtcactgtagccgtcaaataccactgtcactgtaagcccgtaatgtctgctaaatggtagacgcttgtaataagcacttatattcacttgaactgaacctttagcactaaaagaaacagataatatgaacaggacctacggacaatactgtagccattgtttacaatagacagtctgttcttttttaaacaatggtatagccagatgtttttaaggccacgtggatagaggaaattcagtttgggactgattatcttttgaagaaatattttcagaatagtataatatattatataaaagagacacaaataggcatttatacttgtcttaagggccacattatgcatatacgtggcttatatgtgcatataatgtataaagtgacttttaaaatcgcgatatctcaggaatggcaactcctaggaaaaaattgcaagaacaacctttgtagagaatgtcaagatctacaactttgggttgagggtccctttcttgataaaacttaccgccctcgaaaaaaatccaaaaaatctcaaatttgacctttgaccccgaacaacccccgacgcacacatgggatcgataaggactttccaaacttcacttgtcatggtatgccccagctctccaccaaaacccggctctccggcaattctgccatttgccaagcattttgatgtctaagttgaccggattaacaggcgttgagctccaacaatccttgaggaatgctagagggaccttggccaatggagcagagtttttttctctgatgagagtcgaatgtgcttgtaaagaaatgacagaagatggcgtgtctatcaaa

SEQ ID NO: 9538 - DNA, 827 bp, Diabrotica virgifera
gttgggagaaaggatattaaaaacaatgcaaaatcattgacgcattattgtttttgatcgacggtggaaccaactttcctttttgataaatcttcacgcaaaggaatgaacacactggacttagatgggctggacacataatacgaatgccacacaacatgatggttaaaaagctaaccacaggatcagctaaaataagaagaagcagaagccgaccgcgaattaggtggttagatgaagttgagaccgaacagaatggcgacgaatcttagagcaaactaggatccagaaatgatgtcgagctaaagataataacgaaaccaatttatgtggcatattatattgtctaccaaacaattcaggatgatttttcagagcgtggttaaggcctacatacctcctcttaactgttattttaaactgaataacgtctaaatggtaaccgacggtagtacaattgaaagattctaaaggtaccggtgggggatggcgtctgtgcgcagtattaatctgtgtatgggagagaaactattcgaagtaatgaaattttataaaatgtataatttcagtatttcgaatactttctttctcatacaccgactttcaactgtacttgaaaaaaagaatgtgtgtgtactttgtacgcacgtaagaagttatacttcaacgaaataaaatactttaaacagtttatttttattttattaaactaattttaatacttaccactttccaaaaaatctaaaaattaaaaaaaaagacagcaattgtccgcatttgaacccgggacctctcgatctctagtcgaatgttctaccaataaccca

SEQ ID NO: 9539 - DNA, 829 bp, Diabrotica virgifera
  SmartBlast Evalue=3E-70; Info=Max-like protein X n=2 Tax= Aculeata RepID=E2AME5_9HYME
gtcatgttttggtaacattttgcgatttataatagttttgtcagttttgtttattatagatttaaatagattataaatgggtacattgcttacatttgattattttcattaacatatgtattttctaatagtgtggcgcaattatataattatcaaaagtacgatttatttggaaaatagtaaatccaaacaccaaatagcaaagatgcctcatgaacatattaaatacacaaattctgtatcttcggtaaataattcagatgaagaagaagatgtggaaagtaagacttctcccatgagctacaaagaacgcaggagagaagctcatacacaggccgaacaaaaaagacgtgatgcaattaaaaaaggatatgatacattacaagaactggttccaacttgccaacagcctgatgtttctggctacaaattgagtaaagctactgtcttacaaaaatccatagactatattcagtatctccaaatgcaaaagaagaagcaagaggaggaacgaaatgctttaagaaaagaggtagtagcgttaagaataatgcagaccaactatgaacaaattgttaaggcacaacaatcacaaccgggacacactgaaactagaatttcagatgaagtgaaattttcagtgtttcaagcaataatggacgaactctttgcaacgtttagtggagtttctgtgaataatttttctgaattatctgctggagttttcagttggttagaggaatattgtaagccacttaccctcaaagatactgtgtaccaagttcttagactacaccaccatacacatacgcgtggacagcaaaattag

SEQ ID NO: 9540 - DNA, 828 bp, Diabrotica virgifera
  SmartBlast Evalue=4E-57; Info=Thiol-disulfide isomerase n=3 Tax= Aedes aegypti RepID=Q1HR86_AEDAE
gcgtttccttggttccttttgataggagaatttttaggttcagaatcagagtctgaattagcagcatcccctgactgactagcatcatctacgagatcatctctgatatcttcgtcatttagttcattatcactgtccttttcatcctttttgttctgtgttaatattatatgttttggcgggaatataagatctattgcacacactaaaatcaatcctagaagggcacctaagataatggtagcaatggcaaaaatcaaatatgaagcaacagttggtaatccatagtcgtctgtaagcttgttatgaatttgtctgagtaattgagataatttgaagaaagatgatacaacactcatctgaattgaatttggagatttccaactaggaactggttctacttgctcccacttcttgtcttctacaaatgatgtaaatgaacttatgtctctgggacccttatattgtctgaattccccatttatgacatgaaatattgtaggcaaagctgtgaccataaatctaccacttagtcctggtgatgtagtaacatctacagctccaattttaatacctagacctggtcctaattgagctaactccttccatttctgtacaagagccttgcatgctggacaccaaggagcataaaattctaccagccattctcctttcaaaatttcgctccagttatcttcatgaaggtctatcacgatcttttgactatttgttacagcaacgaagctgcaaaataggaaaaatatacaaaatattcctttacaggccattacaattattcttcaattttttaagtaaaaatgacgaatg

SEQ ID NO: 9541 - DNA, 828 bp, Diabrotica virgifera
tttctttattccaaatcaaaatggcatattacaaaaggtaactaacaaaattttttctatactgaatttgttgctagagacaattgttgaaaatatactaacgagacactgttatcacaatatttataatagtatacttaagtcccacaaatatgtgcatgcaaaattcctattgcatgacaattttaatacgttatggactcatagattagtatcgttgcttaatgatggcatctgatatgcatttttcattcaataaattaaacactgtaatactgaacaataatttaaaaatttatttaatattcatattcgctctgtaaatacaagctgatgtaatcaaattgactagtactgaaatgagatagacttggataatctcaaatagctaagtaatttacagtattgttcaatagccaacaatagagattcgagaatgttcaaactgtatgcacatcacaacatccaagaatgtcccggctcaatatgagctagaaaaatttggctgaaaaacctatatccatttcaaagcaccaacttctgaaacctggttcaaaagttaagacttatagaaataaatatgccaataaattaaataacacaactgaaaagtgtcaacaacttaacatgtcgaggggtgaaaggtaaaaggttgtaacccacaaataaacctttcaggaagtagaaaaaacgttacatttaagtaatttgatgaggaattaacctaataaagatacttaatgcctggttgcaccaacagatcttaagttccagattagctaagctctacttataaatacggcttctttgagtatcacttacgtttca

SEQ ID NO: 9542 - DNA, 826 bp, Diabrotica virgifera
aaattcttgtctctggtcgcctacaatttactcttagcagccccctatgtagtcagcaatctcgcaacaaattattgcaagcctattgtcattaatgaccccctacagatgcacgtatctttcaaaaaacaatgctagccttttctcctctcaataaactgaatctatttctcgttccggcatgcaacggtgactcttggaatataagtagaacaatataacttacaatgctttacgtgatgagcctccgtcaggacacttatttcaacaaactcacagctattcatttatctgccttactacttcaggagactctcagagatcaccactattcgacttaacgatcatttaacaactatcatctagaatcacattcgtttaaaggccagcactaaacagtaacgttgaaaaaattattctaccgtaaaattaaattatgtaaaaattatgaaagtccactgacaacgattccaaagaattaaattcaaaattgtcaatgtcagattcaacaccaacttttcctaccattagaaatttcctaaaactaattacatgccaatcggtttttaaggagattacattcatttaaatttctaaatacaattgttccctaacccggtctcattgtccaaacacataaccacttccttatcatactaactgtacaaagaaaatacttaatccctatttaaattttgtttacctacggccatccaaagataattgactttcatttcttcgaaatgaattttggtatatttttattatatgttttaacttttctaaaatattaagatcgaaaccatattaattcaaattttacata

SEQ ID NO: 9543 - DNA, 824 bp, Diabrotica virgifera
taactatatggttccgtttatggttatatttaggtatattcttctgattcttctttagtttattggcctccacctacttgggtatttggccagctcgtcgtcggggaataaaggaaaaatatttatattctaatgacatttatcgtatgttattttaataatatataccagtttgttgagattggagtttgatatagttattgaagaaaaggaaagaaggtttactatggaaaataaaaccattttgtaaaagtacaaattttctatgaatagttcaaacgatcaaaaacacttgtaacgtcacataactgtattttctactgacgtttataatgtctaatttaaaattatattcaattttgtttactttgttggtgcaaaatgtaaacatatagctcgatgacgttacgatgcgttttgggctgagtggtataatttgaatttttaatcgtctttaggggccaaacgaaagacaaaacttttttatctttgatacatgttttaaattatgttctgttgtgatttataacatttttttcgaatttaaaattttatgcaaattccctattgaaactgtatctgacgatataagatgtttaaagcttgaaggatcaacttcattgaggcaacaataaaatgcatgtgttccactccctccaagcactcagatcgaggattttatgatgaagtatctaaataaagccgcccgttgtatcgatatataggaatttatacttaacaggatctacatccacataatattatattcaaagtaaatatccaaaaaatgaaaaagaaaaggcagtcctttgtttcctaaatgt

SEQ ID NO: 9544 - DNA, 824 bp, Diabrotica virgifera
tgacagtcaatagtatagtaataatagcatatcgtgtacagtcttcttacaaaatagtaattattgcttaaaattaatatatcttttgaaagaattatattaccaatgaatctattatttaaaatataccgagaattttggaatgttacacatattaaccatttttattatatacaaatatcacaaaacatgacacagtaaaaatatcagtcccgagagttttttatcaagttgctatgattagagataataaaattatattgtatcttcccttatttttaaagaaaaccactggtcaaggattaattcatgaatctaacgaagtgttcgatcctggattttgcatgttcgttttaccttcatatcttccctttggttctcaatcttttaacttgattattaaatctggttttactcttaagggtttgtctttgttcttttcaatacgtaactctacttttcttaaccaagttttccttttttcatccattcctattatagtttgtggttcgtacatgagatatacgaacatttgttttcaattttcacccatgagtaagtccttgtgtgcatattttagctattgtgccgttattgaaccttatttctttataatacaaaattattttatacagtgtgtctgcgtaacttggaaccatatgggaaactttcccaatatcaatttcacgaaaaaaagttattcttcataaagtgctctgcatagtccaaaaccaagatgcaatcatcagatatcaaattttatcaacaatatacgaggcacgtccaaaaatatgaatttcgctcaagaataaagtgcctttata

SEQ ID NO: 9545 - DNA, 827 bp, Diabrotica virgifera
aaaatcttgaatgatgttaaatactcccattctgtgggttgtgtgtgtgtgtttgagcattattggcttcggagtcaaggtccattctccatctgacctttttggaattattttgtattaatgaatgtcgactcgattcaattcatttcacttattccccgttagagggcgttctaaccatactgcggtataaatagttttattttataccgagaaactacggacgtgttgctgtaaatttgtcttctgcagagctttcttgacaacgggtagacctagaaatagtactatcgggggatggcagaagacaaatttgaatcaaaacaaaaccgtagattttctatttttattttgtattacttatgcggaagctctaaagcagtgcttcttgctttcttctaattctgtgggttaatgcttctattttttatgtaacatatagccaaaaatcatttatggagaagtttgccgcgtagattttaaaatcgatggcagatttgcttaaataaatcgtgaaaatgtgagtctggtaggtacaagtctgtctgaatagcagctaccactaatactcagcagtaatagacacctttgagttttgagatatgccactaaagaatgcctagcttccgatcgtttcgaatacacctgtccgtaaatgatctttgtttcctcaaagagttttcatcttccccgctgcatctcccaaaaactttcaacacattttacaccatgagacaaaattttcgcttctcaactttatcacaccatagaaaaatgtttgacttttgaagaaactcgttggatatagatgaaatcctgtagcgccc

SEQ ID NO: 9546 - DNA, 818 bp, Diabrotica virgifera
tttcctatcttcattcttctccttctactacttcctagtttaggtatattcttataaaggttgtcatatcttctttatttcctcttcatctgtattaatgtttaatccagttactattttccacctcattcagacattgctttgtattttctatttcatcttttattttctgttctgactttttaaattctgttgtaccttctttaaattctttaatgggtttaagtcgacaataccacatacagcctcctaaaactaagggtacgcgtacgtggatatcttggtaaaccaagatacattgatgtgcgtggttgaggtcgcggtcatggtggtttcatcgatgtcaaaacaaacgttcattttcttatgagatcgcatataccaaggacggttcacggtttacctattcattctcgcgacctatcatcgcggtttacagcgatgtcgatgccggaacaaaatagtttgttctgccacgatcgagctgttgatcgcgtggtaaattttaagtttattggtttataccattggtgctcagacttacactgcatgggatctaccacgtaaactgcaagcgtccagcgatcgactgctattagtaaaaaaaattgaaaataaaaaactttatttcacatttctatttgataaaaggttgtaattttacatggatgttaatgcacttaagtgcatggcacttcatattatccataagttagcgcagtctccaccttttccatttgtattttttccgtgaatcgcgatcgccttcaaaatgtttggcgatcgaccgatcgatcgcgattgaccctttgagcacc

SEQ ID NO: 9547 - DNA, 821 bp, Diabrotica virgifera
  SmartBlast Evalue=3E-61; Info=Nicotinic acetylcholine receptor a9 subunit n=4 Tax=Tribolium castaneum RepID=A8DIU7_TRICA
gttgtaaatgtagacgacttgatacctaacggagaatgggagattttgtcccattcgaccgttaaacataagggtgtttatgcatgctgtcctaacaatacgtacccttcggttgatattaacttcaccataagaaggttagctggaagtcatgctgccagtatggttattcctgtaattgtatgcgtcattttaaccttaatggttttgacactatcacctgtagataaagaaagactgattatgagttatgtcaatattttatgccacttcactcaagtgcagtatgtggcatggcaacttcccttaaaaggagataatatgccccttataattatattttcaagagatgcattgttgatgtcgctctttgcattggtatttactctaatatttagaaacatcatgcaaaggaaaaccatgccaccgggttggatatcggctatagtgtcgggaataattagctgcaaacctggacagatgcttcttttaagcgactattctgcaaaagaaacagcagccgctaaaggtgaagaagatggtgcaacaattgtaaattccaacacttcttccactgtaaatactcaagattgggaactcttcggaaaattgttggacaagatattctttgtagtgtacattctcacatattttattatgatcatttcatttttgccttgaatttttttcaatttgaaataaacaatgtacaggtgtgagtttttagctcccaatcaaaagagattttttgtttgaagattttttatttaagaacatataccttcttaaagaaaggtaggaatagtaaatctaatttctaa

SEQ ID NO: 9548 - DNA, 828 bp, Diabrotica virgifera
  SmartBlast Evalue=4E-20; Info=Heat shock protein beta-1 n=1 Tax= Camponotus floridanus RepID=E2A8U5_9HYME
gccaagtatatgtcatcttttattaaacaaatattacacaatagcatatgccacaataattttgtacttgatttcaataaaacaacaagagttatataaaagaaataagagtccaaacatacgagattaaaaataatttattcgtaaatatcctacacatgatacaatttgttacactacgcctacggtgaaattgctggttattgaacatcgaaccatagaccttcacaagaatttaaccaaacaattttacattagcttcaatttttttgtcacaaataaagttgttaaaaattattttcattgcataattaagctttgtgaaaggatgttaatcaaccttcaagtttacggccgccatcaagaagatagtcacaaatagtatgagcttttgaaccatccggcaacgatgcatgaggtttatggtgtatttaacgatttgtgacttgtgctgtgtagacagtaagtactttagagccaacactaaatttgtgacttatcctaaacaagccagacaacgttgccaggttttaaaaatgaaataaaataaaaattttgttagtcacatgagttgttacattttaaataattaatcgatgagtatttactagcggacataaacgcttcgaaggcttacaaggaattttaaattacttaatgttggattggaattaatttttcccctgaggtgatagctgggagaggtgcttcgacagtgaggacgccatctttacttaatgagctcttgatgtgttcgggatttgttcctttaggcagcaagaattccctattgtattctctgtatacggattttgattctgcccaaca

SEQ ID NO: 9549 - DNA, 827 bp, Diabrotica virgifera
  SmartBlast Evalue=3E-50; Info=Vesicle transport protein SFT2A n= 2 Tax=Formicidae RepID=E1ZZE4_9HYME
gccgaaagtatgttatttttgtgaattataatcaaattttaataaaaatcagactgatacgaggtcaattacctaaataccgaagtgaaacttatccacaggtccctaaaacctacatcgcacaaacttatttatagacaaactatttcaaagaaaacaaaatggataagctgagaagagttttaactgggaatgagtctccagatgaagagagtggaataatgtcacaattagacgatgctaccaccttaagttggtccacaagactaaaaggctttttggcatgtttcataataggcatattactgtcgtttttgggttcgtttgctttatttttaaatagaggtttgccagtttttgcagtattttacaccttaggaaacgtcacgtccctcctcagcacatgcttcctcatgggaccctttaagcaggttaagaaaatgttcgcttccaatagatatatagccacgattttagttttagttgcttttgttcttacgctgatctcggccttagtgctgaaaaacgcagtgttagcgctcttattcatcatcatacaatctctagcgatgacttggtactcgctatcgtacatcccgtacgccagagacgctgtcaagaaaacagtgatgacttgcatagtgtaaataaactgtgtcttaacttaagtgtgataaataattgtaaatgacggtggacaaggaaaacatcggtctattttcgtaagcctaaataatcacagaattttattcacaaattgatgccaagtattgatatctatatatgtaattatttatttaattttaatatacaatgttttatttttt

SEQ ID NO: 9550 - DNA, 826 bp, Diabrotica virgifera
  SmartBlast Evalue=9E-59; Info="Ankyrin repeat-containing protein, putative n=1 Tax=Pediculus humanus corporis RepID= E0VWZ4_PEDHC"
aatagcaaaaccaaagaacaagaacagactgctttacatttagcagcaattagaggtaatccagagtgtatcgaggttttactgtcaaagggtgctaatgcagactgtagggattacatgggacagactccattacatttagcagcaagagcaaaagacctcacatctgtagaattactggttatgactgggcgagctaatcccaatattgaggattacgatcaaagaactcctgttcatgctgctataggaaaatctgcctggtcgagtagaattattcaaacacttgtagaaaacggtgcatatcccaacgttgaagatcagtatgggtatactccccttcacatagctgccttaaggggtttggctgattgtgtcgagacgttaatcaattatggagcggacgttactttgaagaccaaatgtggtcacacgccgttaagtattatcaagaaaaaggtgccgatagcttttagtgtttttacgaaaaaacttgatgatgctgtgactttatataacactgactcattaagcaatgaaccagaacttagattagattttagagtaattttgcagcccaaccatgctggtgaaatgaattttctatacactttagttgaagaaggttataagacagttctgcttcacccaatctgtgcagctctgctgtacgtaaaatggcagaagataaggaagtattatctagcaagaatattattttacgctatatttatgttggctttatccttatacgtgcttacagctctatcacattactgctataattatggtaacaattttacagacatgaagccagaagatgtta

SEQ ID NO: 9551 - DNA, 825 bp, Diabrotica virgifera
ttagtgtttattgtaatctactgcaatccggctcgaaggaccaatggacaattcgatgtaaatatcaggatcgaattgttttgtaatgcccctttgtccgcttcttctcgatcgacgatgctaaataaatgtttgagtgtggagtaaaaatatggttttattgacagctactgagtattacactatagatgttgttcaggtaactttctatgatagactgcggcccaaaatagtccctttgtctaatttataatctcgtcacgtcaaaatatacaattcatcaataagttgcatgacaacagcaacgaactttgtaatctttcgaaagcttacaactacagtttattgaggaaactattgcaacatgtactaggaagaacaattggaaataccacgatttggcaatttatttaggttgcaaaaggttcaccgttataagatgtttgaaaactactcagtacctttctgcgcatggcacgtacaaatttgaggcatacacatttcagtactgtttattttgccgcataccgtataacaaacgatattagtgacagttggttacttttgggaggtcatcggtatctggaaggacagtaacgagttctaatgaccttcacaaaatctgtcaaatgttcccatgtacatatagcagaatttttagaaaatctggtgtcctaacagtattttattgaccgaaacacgacagaggagggtaagaagaacgtgattcatagtgtacactgttaaagggagcaaaataatacttttgtaaacatcttccatgttttaaatgtctgactacattctctagcactaatataggcg

SEQ ID NO: 9552 - DNA, 824 bp, Diabrotica virgifera
tgatacgaatttcgaaaacccctgtatgcaaaaaagtttaaggtacccatacataaaatttatgttaccacggttataggtttaccgtcaaaactagtgaaattaaatcgttttcaaaagctgttagaggtttggaatttacttaattgttacattttgtgataaagaatatgtcactgagtgcttgtatgggtaaaaacgtgaatcatactccaagcaaagcttcatattttagttagggtgtgtttagcctttgagtacaattattacagacaaatgatgaataaacattttaccatttcactagcagtatcagtggcaagattagcgttgaaatatacccagtagttcattaaaattgataatttgtatctctttacttaccagatggaatttaaagactgaatttaaacaaattgttttccagagagataaattatcatttttggataatcacacaccattataaataaaaaaaaagctaaaattcttgttgtctgaatgtaaacattagaaaacttatttatttaatattctaccatttagaaatctcatgtatcgttgatttatcagtaataaatagctcgtttttcctttatttgttcgttaattgctatataggacaaactgcgtttaacattacacacagaataccagtacatacagtcgcgattatattttcacaaatatttttacagcttttttgattatttatttgtacgataagactatctattaaaatatggagcattactttctgctatgagtggcagtggctgtagaaaaaaatataaacaaaaaaatacgttaatttgggttgtgta

SEQ ID NO: 9553 - DNA, 823 bp, Diabrotica virgifera
  SmartBlast Evalue=7E-78; Info=SCP-like protein n=1 Tax= Diabrotica virgifera virgifera RepID=D7EYY3_DIAVI
taggaatccaagatgttgtcgggcccacatagagctggatagttgggattaacgcctaacgatccacatgccgaagcaggaggaccaacttgataaacagattgtcctaggatatttcctccaaacgcatagttgcaacctatcagccagtagttccagttggaagcgtcagtgtaaaaagtcataccgcatcctactttgatggttttggcccaaacgaattgagtatagtgtccaactactttggttgtgggatagtttccataagaagcgacccaagtgttattgaaatcttttacttcattataccaggcgtagatactggcattggttgcagtcttctggtctccgacggaaccataatatgatctataggcaatgttttgtcccacccagctatatggagctgttcttctacatgcatcatgagcaaaggtgcagttgttggtgtgacattgggcaatagtttccaattctttactataacagaaagcattcatattagaagcagaaggttgagcaccagtagtttcttggccagaagcaaccctgtttctcaaaatgttgtggatatccaagatgaattttctatcggtatctgtcaacagaataggtcgatagtttggaccgcaagttggtcctgcaccgcagttcacattttttctgagacaaaccgtatggttcttaccactacagcttaattggcagtaatcagtcgtggtttgagcactcgacaatgtgtacaaaattgtaaaaatataactgattgtaaaaaaatagccatcttttccaatgaacgctgtgttcaaccacctatgagatc

SEQ ID NO: 9554 - DNA, 825 bp, Diabrotica virgifera
  SmartBlast Evalue=8E-39; Info=27 kDa hemolymph protein n=1 Tax= Harpegnathos saltator RepID=E2C9D0_9HYME
aagtttgagtatctttattgagaatttttgtttaattgtaaattgtttacaagcctacgaatccaactatacttctcttctttatatccttacaggcagttcgcttaacaaatttaaaaagtgcgtcgactatattagctggtgtagactctttacacttctccaattcagcaactacacaggtctgaacttgccccaaatcgtcgcatgtcttcttatcaatggccaatttaatggaaagttttgatatattatctggattaaattgaagagtttgatttaagcacttctggatgccctctgtcttggatttaatacagtctggtccgccttcagcaacaaacaatgcaagtctgtcgccatcctttgcacaagcaaaatcactaatttcggttaaaatgctataggtgaaattaagacctttcttttctgcttcgtctaagcatggttcaagggcatcataaaatttttttatacatttcctgacatcagggcgttttttgcagtatttggcaaatacttcatccatagatcctgtctttttggactcttcaagttcttcagtaaacttatcgatgtcgatcaggtcttcaatacaagtttgagtttcatctatggaagtctttatttttgcaaatgtgccatttcctcccctcttatcacattttgttttcagttcttcaaagtcatccaaatcaggtatggtcggaatggaataacagacagctgcaataagaattagcaaaaaaatttccaccctcatatttcttaaaaactcaaagacaaattttaaacgagataaacgaaagtgcttagtacccagta

SEQ ID NO: 9555 - DNA, 825 bp, Diabrotica virgifera
  SmartBlast Evalue=8E-57; Info="ADP-ribosylglycohydrolase, putative n=1 Tax=Pediculus humanus corporis RepID=E0VYH2_PEDHC"
ctatttgttaatgaatatttcaaggaacccaaacgcggatatggacagagtattgtagatgtttttcgtaagctgaaaaataccaaatatgaagatgttttcaaaccagctaaagaacaatttttgggtgaaggatcttttggcaatggaggtgcaatgaggatagcacccgtagccctttatttccatgataattacaaagccatggttgaggctgctacaaatgccacaaaattgactcatactcatatattaggagtaaatggggccattctgcagtctatagctatccaacttgctctgaaatgtgatccagaagccaagattgatgctgagaggttttgtgctgaactgtatagaaggatgagaaaagttgagagagtagaagaggacttggatgatattgaagaagatgaaagtgccagtagaagagcttaccaagataaaataagaattgtggagtacttaattggcaaaaggatgacgacgaattagacgaagaagttatattaactttgggaaacggtataagtgcctatgaatctgttcctacagccatttattgctttttgaaggccctgaaggaaataccacatatccagactgacaacatattcagaagaaccattcagcacgcagtgacgttaggaggtgatacagacaccatagcttgcatggcaggggcaattgctggggcctatttaggagaagaagccattaatccaattcttgctaaaaattgtgaattttctaaagaaatagttgaagtggcggaaaacctatatactgcaaaggaaggaccgccttaagttatgtatatgttgt

SEQ ID NO: 9556 - DNA, 824 bp, Diabrotica virgifera
  SmartBlast Evalue=1E-63; Info= Phosphoglucomutase/phosphomannomutase n=1 Tax=Glossina morsitans morsitans RepID=D3TNI4_GLOMM
gaccgtacaattttgatttaagataattttaaattaattatttatattttgtgtgataaagtactacatattttctcccagttattcaacatgtcaaacaataatagttacaggactgtgtacgcattcgccagagaaatgtatcctaagaaaaaggactcttttttgcaatatgggacagcaggttttagaacaaaggctacggaactgcaccatgtgatgtacagaatgggtttacttgctgtgctcagggcaaggtacaaaaaaagctgtagtaggtgtaatgatcactgcttctcacaaccccgaggcagataatggagtgaaaataattgaccctcatggtgaaatgcttgaagaaacgtgggagacttgggctacgaagttcgcaaatgttgttgacgaaaaattggaagacacgatcaatgaagttatcaaactcttcaacatcgacaacatgggcgacagggtggaggtagttataggaaaagacacgcggcccagcagtcccacattggcgaaagccgtccaagatggagtactagcattgtcggggaaaccagtagattatggtattgtcacaacgcctcaggtccattattttgtagtttgtaaaaatactaatagagcttatggtcaacccacagaagaagggtactacagaaaactgataaacgcttttctaaggataagaggtgataagtataataaagacaattacgataatagagtgatatatgatggtgctaatggtgtaggtgctaagaaagtaaatatttaagagaggtttgaagatagtcttcttgtcgaaatgtacaatgatg

SEQ ID NO: 9557 - DNA, 821 bp, Diabrotica virgifera
  SmartBlast Evalue=1E-35; Info=Nucleolar complex protein 3-like protein n=1 Tax=Camponotus floridanus RepID=E2AC18_9HYME
gataaacataaacgtgcctctctctcttttgtatggatataaataatttataacaaaattagaatggctgtgaagggcactttagctaaaagtaaaaaaagccacaaaaatgtcaaatttgctaaacatggccccaagaaacaaaagactttccaaaaaaccgaaaccaaaagaagtccccaaaattcagaaaactaagccagtcgaagacaactcggaggaaagtgaccaaggggaggatatgttgcagatggtagatgaagatgacattagttttctgaaaaatgctattgctaacagatcatataatttatttaataagataaaagtttctaaatcagaaggtccgaaatcaaagaagagaaaactaactgatgatgattctttagaaaatcaatatgaagcacagctcgatgaaggtgaatctgataaacaagttaaaaatttactaccaatcaagacaaaaaggggcataattcctatgcaaactttggaaccaatccaagatgaacaagatgaagaagcttcagatgtcaataatgaagaagaggtaattgaagaaactgaacctgaaggaaacaatttttctctagaatctacaggatttgatacaggtgaaccaatttcagcagctcagctattagcaaaaagaaacgaagtcataaacaaaatgaaaattcacattggaacattaagttctggtttattagaaaacccagaggagaaggtcttgaatttacgaacgttgctgtccttgatggatgaagaagctgcgcaactttacataacagttaaaaaattgatcactgtatctttgttgg

SEQ ID NO: 9558 - DNA, 824 bp, Diabrotica virgifera
aacaaaatctcttcaggataattctagagagagtttaacatcaaacacgaataaacggtagattattattagatcaaaaacatattttgacgggcagacacgaattgaggaccaaaatgaaattttaagcaagggtttacttttatacctgaaaaaatcgcacgaattgaggaccaagacttctgataatgaaatcattatactcaggtataaaatattattaaaagtacgattttaatatttatactttatgaaaacatgatgcaaattttacaaaatctattcgtctcaacaaaccgttattatattccgacattttggaagttaacatgtttaatcttcccctaacaattttgttctcactcattttgactacctttcaagacagctcaaaataactaaactaaataattttttattattaaatatttccttactcattaaaatctcgttaaagaatcggaccatcattaaccctaattacctaccttaatctacctacctacctatctctcgtatggtccgtaattcggtgcacttattttggctgttcaggtagcggtcctcaattcgagaacaccgattttgacaattcctatacagaacgataaagccatgttaagttcctgggaacaagctgcatagaaaggctaaaaaaggagtggtgagagagagttagataagacatgtgtgtgaacgtgattagtatttgtatgattcaagatataaataattaaaggtatggaattaaagaaaccgactccacaaagagatggaggcaaagataatgatgaacgttaataaagatagccgatacttgaatc

SEQ ID NO: 9559 - DNA, 818 bp, Diabrotica virgifera
ttggtttataatttttattacgtttttaaaattttaaaataaccatcacataaattcagactggatttaaaggtagttagattctttaacagaatcttgacatggagtctcgatagcattactgtagtcgctgaagaacttgttgacctttgcagtatttacacagtgctgtttaatagtgtctgggaaacattcggttgctggtacgaattttctgcaaaattctgccctagatgtaggaatattttcatcgtctccagttttttgagatacggtggttaaacatctaatatactcaacttgtactgtgtaccttcccaagttatttatgcaaccgacaatttctgaatctctaaatagatctttgtcatcgtacatatatttaaccatcgattttgcaagatccaagacgaattctgggaaatatttttggttgttagccaaacaagatttagtttctttaattgcgtcacgactgcaatcttccattttgctaataaattcatttctaggagtttcaaaaatttttgtgccggacatgcacgacttcattttagcgtatgtaacctgtagatcgtcagcgccttgatctgatagtccatttttcttacagttgtttataatattcctttcagtttgtgctaaaaatgaacctcccatggatcctagggcttgtctggtggttcttctgaggactgctctcttttcataaacttcttctgcactggctaaaccaagaagtacaacaacggttaacactatccacttcatcgtaatgcagttttggtactggtcactatcacagctattttcagttt

SEQ ID NO: 9560 - DNA, 819 bp, Diabrotica virgifera
  SmartBlast Evalue=9E-68; Info=Xanthine dehydrogenase (Fragment) n=1 Tax=Drosophila guayllabambae RepID=Q6UY85_9MUSC
tcgctgagtatgaatataaaagttcgcaatactttcaaatagtaccagaaactcaagataaaattgatggtcttcaaagaccaattgtccatatgtctgccttaaaacaagctaccggagaagccgtatacaatgacgatattccttatatagaaggagagttgtactgtgcttttattctgagtaccaaagcacacgcaaatattttaagtttagatccatcagaagcattagcaatgaacggagtccatggcttcataagcgacaaggacgtaaaaaacatttccccaacgtcaaaggtcccattttcctagatgaaaacatattttactccgataccgttacgtcagtaggacaaagaataggtcttatagttgctgaatcccaaacactagcacagaaagctgctaaaaaggttaaagtagtttacgaagagctaaaacctgttataatcagcacagaagaggctattagacacaaatcttttttccaacctacaccattgattgaaaaaggagaccttgctgctgtgttcaaaacagctccacatatactggagggagaatgtaaaatgggtggtcaagaacatttttatttggagacccagtgctgtatagctgttccaaaatcggaagataatgaaatggaaatattttcttctacccaaaatcctactcaagtttcgaaactaataagtcaggtgcttggtgtcccccaaaacaaagttatagctaaagtaaaacgtctaggtggggcttttgggggaaagagccccaaagcaactctggttgctgtacccgtagcaatagcagccaagct

SEQ ID NO: 9561 - DNA, 823 bp, Diabrotica virgifera
tttcttctatctagatgagcttataagtacctacatattcttgtggtttatttttcagtttaatttatgagttgaattagtctcttattgaataatgaatcataaacaacacatcaaacttattctgaaactatttgtgtgtcttgttatatttcattatttttgtggtgcaacaaaccacaacacaatgtcacaacctatcaaattcaatatatcaaaattggaaatgattgctttactaaattattccttccttcagataatgttcaacccccaggaagttaaaggtaatttttatatctaaatatcaagatgcaatttccaagtaactcaacaatcttttacatcccacaaaaatttaagctggatttcggcgtggaaataccaaattatattgtcgaaataataaagacgctaatcaaatttctaacttccaagaaaggcattgaataaaagttaatcctttgcctgttgctagtgttgctgttattctctttctctttgttgaaatacaaatttgttgcgtttgcattttttgttgacaattgatttcgaaataagaaagagacaagaaaaggcttccttctctaaccttaatgtatgcaacccgtcattacattacgaatttgaaaattgttcgtggagcgaaaaatcctgaacacgtccaggataagtttacgttcacgcctgcgccttggaaactaatcccgaacttactctgaatacgttcgggttatacagcgtaaatactactatagctagaatattccacagactgttgagaactttgagagagagacgcagtttgattggtacacctggg

SEQ ID NO: 9562 - DNA, 823 bp, Diabrotica virgifera
caagtgtttaatatattatttatacaaattaaaataaattaaagaattaatgttttttctctttgtcatcttcctttgattcatttgactcacttgaatcacttgattccttgtatttcttatgtttcttttctttagattcgccactatctttactttctccgctactttggtccttcgattcttcagacgaagaatcgtattttatgaagtctttcaagcccaacaattccggtaagccagacaagacgtcgttggttctatccctgtcagatgtgctcacattatgagttactctgacttgtttgttcgggaacaaaggaaagtgggatccctgcactgtgggagtaccatttttaagtaaattcaagtcgccgaagttggctggtagtaatccagtgatagagactccactgacgttggtttgaatcggtattgggatttgggataggtctatgatggagccgttgtgggttgggtcgaaaaatgacacgtcgatttgttcatgggtttcattgtcgaagttagtatcatttccaacatccgtcaaaattccaatttcataaacaaccgtttttatcacaaacaaatcctttccagtgccgttaaaatccgtcaaatttccttcgagaatgtcaatttcaccattttcaggactaaggggatccaccgaagagctagatgtgacctctttgggatcttgcggcctatctgggatgtagtcaaaatcatctttcagaacagctgaatcaagctcagctgaaaggatcaagagagctacaaacaagaaagaaagccgcaacatgtttagtggattttgtgg

SEQ ID NO: 9563 - DNA, 823 bp, Diabrotica virgifera
gttgctaagttaggaagttgactgttacatatttgtaacgctaggatgtaatgtaagcatattctccagttattttgtagcaatatatcacatgttttattttcattgtatggtatttttagtaacattttttagaagtatgtattagtattagtatacagtgtttatagaacttaagtgaatttacaaatgcagtatgtatctaagttgttttatatcagaggtttgatgcagttctccaaagagacccgactgtttatgaagctattaacatagcctttggagaataccacgagatagatgactctatagaggaagtttatatagcgccaccggatccggctactctgacggatgaggattccggagaagagtacgagggcggagatttggaaagtttgagctaacgtcagctactttccgatgcagaagttagaactgctgatggaattataataggcgaagatattcttattcaatagtcaaaatcgacagtatataatatttctttgacaaatgatatctatattatctacacctgctcatatggtatatccaaaagtttctgcagcccgggattgggtttcgggagatttcatatataacgagaaacgatttcctgaatcagattattcactgtttgaaaacgaatcagttgttgatatattcggaatgttcacagatgaagaaatcattttttcctggtacaggaaaccaatatgctactttcaagaacctacccgacccacgagtctcgccagaggaaatgaaatgataggatggaacacctcaaaaaaagaagaagtcaaaaagttaattaata

SEQ ID NO: 9564 - DNA, 821 bp, Diabrotica virgifera
  SmartBlast Evalue=1E-44; Info=Hormone receptor in 96-like protein n=1 Tax=Tribolium castaneum RepID=D6X2K2_TRICA
gacgagttttgaaaagtgtcatacaatatttgattagttctgttctagtgttattgttagtgacactcaccatgaagggtgcaaaagtggtagacttaaaagtgtgtggtgtttgtggtgacaaggctttgggatacaattttaacgcgataacatgtgagagttgcaaagcattttttagacgcaatgctctccttcaaaaaccattgaaatgcccattcaacaaccaatgtgatattacaactctaactagaaggttttgtcagaaatgtagactggataagtgtttatctataggtatgtgcaaggatttgataatgtcagagcaagataaggtagcgaaaagacagaaaatagaagaaaaccgtgccaaaagagagaatatggggaaacagaaacaaaatttaagaagggtaaaagggagtacgtagaaccagattcgcaaagttttgaaaatcagtcaaatacggattcagattcaaattatacaagtgcagatgtaacatcaccagcacaggttacgagtgattatacgaatttgtcaatagattctttagaagacagtgagtcaccgattgataggtataattcttctgacgactacacgaatacaaataataacacaccggaacctaaaaaggaagaacatgtctcacagtcgaaattagccgacattacttgctcaaatagcaatatctccagctcaataccacgtactaattttacgagtgatataagtaatcataatagccccgacagttgtaataccagtgttgatatatctcaggtcatacacgacgtccacagtgttcgatcagagg

SEQ ID NO: 9565 - DNA, 823 bp, Diabrotica virgifera
gtgcactggcgaaacgtccatgtaaccactgttaccattggtaacagttaaaaatcttgcaaataaatattttatgactactgtaaaataatttcattttattttttttctaatagaaatatgagttaatactaattcactaaaaagccaactagacgcacgaaaatatcggcaaatttatgcgactcggttgcaggttacattgttaccacttttaaatgtggatacaccatgatggtccatcggctatcgatcgcatggtcggagacggctcgtgtctgaaaattttgaaagccaaaggcgtgggagcgctgtggatattagtaggcttgttaccactttttggaatggttacaatggttacttacctattacagtgtgcgttcaattaaacatggacgactttatttttgaaatttttgacactatgactatccaacttaaaaataggttttgtaatttaaagccaaaaattttcagatagggcctctcatcaatttgtacagctatatggacaaaaatttgacacagtaaagttaaaaacagaagtttttataatgatccagattatcttttaaaaaatgtacaacaattgtatcaatatttaacgtcttcagaagttgataatggatttcaggaactttttaaattggcaaacctatttttaataatgccggctacaagtgcatccgttgaaagaagtttttcagcaataaaacggattaaaacatgccaaagaaatacctaattgcaagatcgaatgtcgtcattttctttcatttccattgagtaacgctttttaaaatgattaatgacagaaccc

SEQ ID NO: 9566 - DNA, 819 bp, Diabrotica virgifera
  SmartBlast Evalue=3E-11; Info=Endonuclease-reverse transcriptase n=1 Tax=Bombyx mori RepID=D5LB38_BOMMO
ggacttgtgtggaaatgtggacacgaagaatgctgaaaatatcctggacagacagaataaccaatgaagaagtactaagaataaaagagaacagcagggagatactggattccatcaaaaataaaaaaactaaaatatatggatcatatagcacgtggtggcagatatgaattcctaaaattaataatgcatggaaaagttcaaggaaggcgcagcgatacaggtagaagaataatgtcctggctgagaaacctcattggatgcagctgaactctttcgggctgtagtgtcgaaagttataatagcagtgatgattgccaaactccatcgcgcagatggtacataaagaagaagacaacatctacagttagttacgccccaacttactctagtagagtttgggacggttgagcatagagaaattttgccaaccggggcctcttgattattgccgccaggtgtgaaaagtgggcacgtgtgactcttgtggtctcttttttggtctgtcaaatcgtctattctttgtctaaccaatcgtcttttatctatcgtcaactatccaatagttttcattgtctgctaaattgtatttttctctccatctggtaatccgccttattcctgtatctgtagtagagtttgaagcggttggacatgggaaaattttggcgaccaagggaaaaagcgacatcttttgatcttttgtcagtggcctttgacgattgccgacaggtgtagcacgtatgcaagtgagttgtaagcagagacatgtaaagagaatagacttggctagggatatgccactcaatgcatcgaggt

SEQ ID NO: 9567 - DNA, 821 bp, Diabrotica virgifera
  SmartBlast Evalue=8E-42; Info="Dolichyl pyrophosphate Man9GlcNAc2 alpha-1,3-glucosyltransferase n=3 Tax=Gallus gallus RepID=ALG6_CHICK"
gtaaatttgtatattaataagattaatgtctttacatggattttgaaagatgtacaatcacgatacagttccatctgttatattatgtagtgttaaaatttatgcaaaggtaaacactaatggtacaatgatattgatcaatcatacttagtatattttacaaaccgtccaaaatttttaaaacgatgtacttcagaataagttccgagacgtggttggtaatttttggaactttgttttcaatattgttaagagcatgcactaatctgcattcccattctggtgaggccactcctcctatgtatggtgattatgaagctcagcgtcactggatggagatcactacgaatttaccgataaatcaatggtattataatacgactaacaatgacttaaattattggggctggattatccacccctaactgcatatcatatgctttatttgtaggaaaagtagccaattatttaaatagaaaattataacaaaattgcatgattctagaggatatgaaagtgattctcacaaggtattcatgagatacacagttatgctttctgatgtattattatacataccagctctgattatttattaccaaacttgtatcaaggatggggaagtgctggagaatggagtgatgaaaaagaagccccagatcccaaagaagtttacaataaccaaaccgatgagctcttcactttgtactgttcttggtttgttgtatccaggtgttattcttgtagatcatggacattttcaatataattccatttcgttaggttttacaatattggctataacatatatactaaaagag

SEQ ID NO: 9568 - DNA, 822 bp, Diabrotica virgifera
  SmartBlast Evalue=2E-24; Info=Isoform 2 of Armadillo repeat- containing protein 2 n=1 Tax=Mus musculus RepID=Q3URY6-2
gttccatatataaaattcactgtatatatctatacatttgaccaaaacgccttctaagactttcattcaggtacaattttttaccaagccgataaactaatattggtgctggaatccttagtttttagattattctcagtaggtttgtcatcgattgttatttggtcgaatgtgtccaaaaaatattcaatcttttccaacagatttgtagccacgttagcaaattcctcccaaatgagatattcttgtgttacataaacgtccatgtcttccatgtgctcttcaatgccaaatattttttcctcgtctaaataatctgccaacagaactagtaatttgtgtatttctgactccgaaaatagttcgtgtaagtcaatcgtatcaatgcaataattccaaaggacttggcaaacaaggtttcccagagaccagtcgtggtcacactccgttgtcaatattttgattatttttgagacgcctccgttgttcttgaagagaattcgggaacggttgtccgacataagattcacaaaaactcctacagttgtcttaagctgtgagtggtcaacggtttctaataaatctatgagaatctcaaaaacattcgtttcacatatgtagttccgggttacttttgatcgggataaattacccagaattctcatcgtttctataacgcattctttattttctgattttgcatactccgttataccttcaactatattaacttgtttgacatgaaagatatcaacttccacatcgctagtgtaataataagatagattattcagagtacttaatattgaaagcacgagttct

SEQ ID NO: 9569 - DNA, 817 bp, Diabrotica virgifera
  misc_feature (51)..(53): n is a, c, g, or t
  SmartBlast Evalue=6E-60; Info=Cytochrome P450 347A1 n=1 Tax= Tribolium castaneum RepID=D6WN91_TRICA
cgcaattcctagtttgatttgagtttgtgcgaatcgttgtcctaaacaagnnnggggtccatctccgaagggaaaataggtatacctcttaacctgattgtctaaaaaccgttctggtttatatttgtccgggtcctcgaaatattttgggtccatttgcacagcaagtaatggtaccataacaacatctcctactttcatgttgactgtgagaggtttataatcagaactggttggggtatacgtgtaatcttcggtgcacaccttggttagcatgtataccacagaattaactcgtagagattcacttaaacaagcatctaaatattgaagttcatttacactttcataggtaaactgatcattattttttttataaatctcaataagttgctctcttagttttgtttggacatctgggtttaatgctaaatcatacagcaagaaggacattacccgagaacttgtttcgtacccatctgtaaagaaactgacagcattagcaagaatatctatgacttgtgctgtgcttccgtcttcatttatctgattgcttataatatccaagaagtcatttcttacaatattgttctcttttctatattttagtgagcctttgactatgtcaaacaacttcgtttcaacttctttagtgactaattttatcttcaaatatttaaatagttctggaactatcgataagaccatccacataagtttattcgcgaagccctcaggtgagaacagattgtctgccagatctctaagttctgaacagggttcatcaaatgacttgccttccacaccaaaggcacac

SEQ ID NO: 9570 - DNA, 819 bp, Diabrotica virgifera
  SmartBlast Evalue=2E-57; Info=Transmembrane and coiled-coil domain-containing protein 7 n=1 Tax=Camponotus floridanus RepID= E2A103_9HYME
gattttggaagatgtgtgtgatccattacttcctactagagggcacggattgatctgcttaagtaaactaatagagaagaaagatccggatgtcatggaaagaaagcattacatccttaatatattgctgcaaaacttgaccaacaaagattcgtttatatatttatcctccataaacggacttgcagcgatggctgacgtatttccggatactgtactaaaagtattgtgcgatgaatattcagactgtaacagaaaagacgtagaggatagttccgaatctaggatgaagctgggagaagttcttgttaaagtcagcaagatgttaggcgaaatggctccaaagtacaaatcaaccctgttaaatacgttcctgatgggcacacgagacgaagacgatttgatacgagcatccagtttatcaaatctgggcgaaatttgtcaagtattgggatacaaactgggatcgatgttcaccgaggtgctgtcttgtgttcacgccgttatatcaaccgataaatcaccacaggcacgaagggcagccgtttcggtcatcagacaactcttcgtaggattagatcaagaaataatttcgtttttcaaagaagatatcttacccgtttaccggactttaaaacagatctacagttcggataaagacgatgtgatgaggctgcaagcgcaactggccttggaggaactgaacgagagtatgaagaattttgtctttccaaacgctcagttacattccgagaagaaaattgtgatgttaagttagttttgtttattgataataaaagttatatatttttttatttg

SEQ ID NO: 9571 - DNA, 822 bp, Diabrotica virgifera
  SmartBlast Evalue=4E-21; Info=Lian-Aa1-like retrotransposon protein (Fragment) n=1 Tax=Homalodisca vitripennis RepID=D9I3F9_ HOMVI
gccgtttgccaatatttgctggtgaatattgaatctgatatcaaacaggtggtgtcaggtcaggtatgggagaaggctgttaaaagtttgttcaactagaaattattttgttttcaaaatattcggcggatgtaaggcgaaggagcaaatgactttatgtctcgttgcgacatcctgtagaaatgattaccggcttaggagcataatcttgtccttgcccagggaaaattccaaaacatagtaagggaacgcatgcagtaggctcttaatattgtcaccaaatggactgaggaagaagggctgagagtcagtccttccaaaacagtcacaattgcgttcaccagaagaaggaagctggaggacttaaagcctctgatccttaatggtgaacaattggagctgtctataaagaggtaaagtatctaggggttatactggacccagaacttacctggaaccgacagcttgaaagagtaattaaagagcggaggcgacattaatgctgaccagacgcacacatggaaaaacatggggactctgtccgaaaatggcgtactggacatatacaacgatagtgagacccatgataacatatgcatccttggtatggtggacaaagatgcagcaaagaaccgctataaacaagataagcaggatacaaagacttgcatgcttgggaataacgggagcaataaaaacaacaccgacggcggcactcgaaaccctgttagacctaccccctcttgatatatttatcaaaggggaagcgaggatgggagcatacaggctgcaaggaaaaccaagggataaatacgagaacct

SEQ ID NO: 9572 - DNA, 821 bp, Diabrotica virgifera
agattaatatatcaacaaaagcagcgacattagatctgcggattaacaggggcctacataacctacctctatatttggctagatggcgcgacataatttcttgtttccgtaacaaatatactggaaatacgaatgcaaagattgcatttatctcaaaacttcgtttttggacttaggccactgttgctctgatatgctcaaaaatgataagggttggagaaaccacttttcaaataaattactccaagaccaaaagattctcagtgattacgttgattgatagtgtagatgtgttttgtttacagttgagaatttgttgtgcgagtaaacattagtaggaataagtatcagaaaaatatatattcaatatgtttacgtcttacataacatatgttaaatcgttgaaaccacgctatattttttctgatatgttacgtcagtatgagttaatgaatttcgttgtgacaatgatcaagtatgtgtcccatgtaatatataaattattaagtaattactgtactatctagagacaaattgacagataaggccattatgtgagaaagtgtattaaaatatagaaaaatctgctaccaatcaaacattccttctaagccgagacttacaaaacacataatgtgaatataaaattgatatccaaaatctgtttgtggacttttatatgcattttcgatagctttgaaaaatagtcgtgttagaattcaatgtccgagaacacttaagagaattagtgaaagtgatgcacggaatgtaaagaaaattttggcaaagacaggattttcacaagaagatagcgtatcatg

SEQ ID NO: 9573 - DNA, 815 bp, Diabrotica virgifera
caatctcctattttgctttgtatgtacgattacttactctttaattcaaaactatgtccagacttatcatatccatgacaacagacagagaagaagtaaaactaaaaagtcaaagactataagaaaaacataataacaggtaattatgtctttacaaaaaaaaaataaaagacccaaacgatttttctgttgagctgcagagatttaccaaaaaatctaaatagatctaggtaaaaatgcaaaattttaaaagtaaggctaaaaaatatctaaaacgtatttaaaaagatcaatgacataagacatacgaccaagaaacaccacaggtgacagataacaagtgaagtatgacagatgacaaaagacacgtgtcgtaatatgtgatgatgaatgaagacaagtgacataagtcacaattaacaaaaatgggatgcctaaaacgaacatactgcattacaaaattgaatcagaagaggtaagacagaattcgaataagtttaaggacgatttaccttacaaaacagattcaaaaccataattattgatgaaatgtaattttgtaattgatattttgaatacatctatctttttgttggtattgatcagtctggatagcgtttggagtgtcctctgcttctcgacctgtagctgtagtatttaatgctcgcctttatacatataagcattcagagaagttataacacatcagaaagaagcttattgtatattaatattgataagaatatgactacttagagaataagataacaatattgtttactcgattgtttatagaaatcagtaataaatcattt

SEQ ID NO: 9574 - DNA, 817 bp, Diabrotica virgifera
  SmartBlast Evalue=2E-48; Info=Gonad-specific amiloride- sensitive sodium channel 1 n=1 Tax=Culex quinquefasciatus RepID= B0W821_CULQU
tgttataccacagtctaatagttatataatagacaatttcagccgcagttaaaagagagaagccggtaaaaagtcctaagagtcctccgaagtttgagataaagtcgaatattccgtataactcgtttttctcggatggtaggaactgatcggagctgaagaagatcttcagcgaagagtagtgccatttatgtagatcgttttcgtcgtaccttaacgcttgttgcaattttttatgagcacggaaaaactctttccatttccaaggatatctggatgtagtggcttgatatttgagttgattgcaaagtggaaggcagttgcaacgggatttttcgccctttccaagaagggcgtctatttcgacgacttttatttcattttctgcgtcatcaaggcattttttgtttgagtttccacaaatgctagttgtattctcacgaggcatgaagaagtttacacatccacatttgttcaaagtataatttgtgagacattcgagaaaacaattttcctgagtgtaggttacgaaatattccaaattcctctcgtcactaaaaaagcattgtctatcctctatcttgtattttttgacagcgttggatgttgtgactaaatttggctgaagaatgatttgtgaatttgtgtctagtggaagaatatagaaatccttttttgtctgtggaatggtactcggtaaatggaccgatatactatatccaacatcggtattgcatatataatcattatcttgagattttgctaacaacatcactagcaatgcattatctgcacctgattgtagagctcgtcttgg

SEQ ID NO: 9575 - DNA, 818 bp, Diabrotica virgifera
  SmartBlast Evalue=2E-33; Info=Serine protease snake n=1 Tax= Camponotus floridanus RepID=E2A4P4_9HYME
agatcgttagtgataatgaggactgtgaatttgttgatatgcataatatgtgtttatttaaatatcgcaaatggaaattcccaagattcatctccaggggctaaagctaacgaaatgtgtaaaatctacacagagaatgccaagaagaataataattgtcctattccactttttacccccttaatatctcgtggccaattagcagaaataggagaatttcctcatatggtacaggtcggttacaaaggcgataatggaactgagtggcttgttagtggttttataattagtaaaaattacgttcttactgtagctcatggtgctagaccacgtggaaatagcccacctgaaatagtaagagctggagtaacagatcaagcggacctgtcaaaagcgcagataagaacaattgagtctatcatagttcatcctgagtataagccaccagtgaaatacaacgatatagctcttcttaaaattaaagaagattttgtatttaataagttcgttaatccaatatgtttacacaccagcgaagaaaatccagatgtaaaaggtattcactcaggttggggtgcaacaagttatttagaggacagaccaactcacatggttaagattatagtgaactttgacagtaacgaaagttgcaataagagctttagcggtcaacacaaaacacgagctttaccacaaggcattataaaagataaactggtgtgtgctggaggaaaccaaactgacggatgtcagggcgaatctggaggtcctttacaaattttccgataaagacgaatacgaacaaattgtatgtatga

SEQ ID NO: 9576 - DNA, 816 bp, Diabrotica virgifera
aactagtctatttcctggattttacctggacatttcagccccttttaccctaagaggttaatagtagatattttcgaggtccatgcttcgacaccatataagacaactgaccatattgtaacatttattaacatactagattaaattggctcagaaagttgaaatacattctgagtccctttacgtcaggcaaccctttgcttgcttgagtcagatgccacagtcgtcaaaaggcgttttgccctacttgagtcaggtgccactgtcgctttagagttaaagaggttcttttggtattggctccatactaaagtaattgactatatatagtaacaccaatactgaataactaataaatgagtggcagtattaatatagtgatgtatatagtgattaaggtgtcctttatattgtgattaagtaatagattttgggatgctattattgagaatagtgggatatagcgataattttgaataaatatcacaagaaatgccatgcagtacttactgatgtacattttaaagaatatttgacttaccaacaaggacaccttgagtacagacaagggcagactgagaaattagaaagacggcatatggcatccgcagcaaaagtgttaaaagaattaattaacgttcttcctaaaagtatactactgcccctggtgtggtaatatgtatcactagtacaaaatagcaaattttctattaaataaaaacataaaacaaagtcaacattttatgtggatattttttgttactgaaaacagaaaacaattgcgagtggtcttgtctcgcaaatagcacttgaatt

SEQ ID NO: 9577 - DNA, 822 bp, Diabrotica virgifera
  SmartBlast Evalue=5E-67; Info="Grb2-associated binder, gab, putative n=1 Tax=Pediculus humanus corporis RepID=E0VBD2_PEDHC"
gttgagttatactcgtatctttataatcaaacgagaaaacaggtgaactggatagtaaatgtcgaaaggaatatatctctaaaatggaaatacaagtggaagaacatcaacaagtggtgcaaaagtctcgagatgaatctgaacatgccgaatctccaagaccgctatctgaaactagtgaaatgagtctagaagttggtactttaaatagaaaaagaaaaccgataagtgataaacaaagaccgctcacaagatatcttcccattagaggaacagatctagatttaagacaacacatagaatcagcaggtcaccaagtggtattgtgtccccatgtcattataaactctagtgtttgcagaggttatctccacaaaagaggctcgaaattaaatggatggtctagaagatggtttgtatttgacaggcataagcacacgtttgcttactacatagacaaaagtgaaaagaagccaagaggtggagcttattttcaagcgatcgaggaagtatatttggatcatttaaatagcgtgaaatctccaaacccacatttgacattcatagtgaaaactcatgaacgtttatactacttaatggcaccttctccggaagctatgagaatatgggtagatgtcattttcactggtgctgaaggttacagggagtttgaagttgagacttaaattttgttgtaaaacattgcctaggcttaggcggaaattttaatcacgattaaatattttatctcatggtggtaaatatttgataacagtatatagatcttatggaattgattttataaagaagtatttactttta

SEQ ID NO: 9578 - DNA, 822 bp, Diabrotica virgifera
aacagaaaatatgaagctttatttttacgtctatgaaaatgtgaagacaataatttcggtaacgatataaattcagaaacatatcaaatttttgatcagtttaattccaacataacgtatgaattacgtcagtaaattgaagatttttcgagacggaattgtcagagtcaaacattatcaaacaaaagttactttaatcccatgtcatatattatgccacattaacacactttaatcatccttagaaacaattttccttttatttaaaagtatcatatgtgattatgtgacgtctgcagttgtttactaaccccagtatacgaacactggggttcagtctggtaggccctcccaggacaggctgaataggtgaaataacccaccagaatcgagaaatcccacgcctagtaccttctgccttatgcaattcaaaatcttcttcaatatagtccagcctccttcatttctataattttggtaagtcttatgcttatagtcgtataccatagtttaaacccataaattttggcatgattcgacttatatcccaaagttgattgaaactggcagtatattttctgagatttgaatttttttcggataggcagacatacggacgccatttttgtaaattatatttatttattttcaacatcattcgacaaataattattaaggacgcaggagaaaatgcagataatcttatgtgtcatgcagataatctcttattctccatcttgcactgcagaattatttactgcaacatatttcgtccttcaatacccatttttgatgtagttctatagccaaatttaggaagcc

SEQ ID NO: 9579 - DNA, 818 bp, Diabrotica virgifera
  SmartBlast Evalue=0.000000004; Info=Uncharacterized transposase- like protein HI1328.1 (Fragment) n=2 Tax=Camponotus floridanus RepID=E2A9E9_9HYME
tacatcctttttcatgtaatttttatttaaaatatatcatgtcttatttttaaaagtcactgccattatattacacgaaacaacaagtaatgagaaataagccacaatttaagttaaaaattaaagggcctagccgggtaagatgatgaaaagtgcccacaactcgattcgaattccatataggtcaccgtttagcggtgacatagttttatatatagtgaaactaactttctgaaatttttagccccctaggtggtcatgtgacccacctagagcctaattagggtttttatgtttttattttttatctcagccgcatcgagaactagcgaaaaactttaaataaaaaaagttgtaagctttgtcttacaaaagttttgtccgaaaaacaaacgtatgttatttatagaaaaagacagcaaatacaaaataagtgattgatgtgatcattgatgggtattctttcatttttctgactgtaggcaagaattgttggaaatcctataattgtttgggacaagaaggacttattcaccaaatggtcaaccattccaaccaatttgtcgatcctgagagaggtacacataccaacaacatagaaagactctggagggaacgtcaatccaccatttccaagtttggagtaagacaaaccattttgtgggttattaaaaatttatttttgggattttcattaaatttttagattttttaaaggttaaaactgtcaacaatgttaaatgtagagaaaatttaactttggctacgtccgccacattatttttatatattaacttgttcactgccagagtgttttt

SEQ ID NO: 9580 - DNA, 819 bp, Diabrotica virgifera
  SmartBlast Evalue=1E-38; Info=Solute carrier family 25 member 35 n=1 Tax=Harpegnathos saltator RepID=E2BWS2_9HYME
ctagttgcgagtgcctaacatttagacatttcgtttttcttatttcttactgacagaaatcaggtggcttaaaaaatagatgttttaaaagatttttaggttatggaactttagaatggagttttgtgattagaactattgaaaatattgcaggatgcaattaaaaatttctaggaaagtattaataccatgtatttaggaatagttaagaaataaagagtcatggatttcgtgatcgggggtttggctgcaagcggggcagctatattcagcaaccccttcgatgtggtcaagacacgtatgcaattgcaaggagaactacaagcgagagggaaacaccaagttttttacaaaaacgtcttccacgctggttgggtcatagcgaaaaatgaaggcattcgagggcttcagaaaggactcggaactgctatactcatgcattctgtcagaaacagtaccagactaggtatctatcaatggctacataagaaggaatacttgactaacgaacacggcaaaactatttttcaccgcagtgccttagccagcgccttttccggagcagctggagcatttttgggtagtcctctcttcctagttaagacgcaacttcaagcacaggctgctgataatatatcggtaggcacacagcacggtcacaagggagcctttgcagcgtttagaactatttatcatcaagatgggatatctggattgtggagaggtggcaatgcagtggtcctaagagcagttgtaggctcctcagcgcaactaacttcctttgctataaccaaagatatgttaagagattatgaagta

SEQ ID NO: 9581 - DNA, 821 bp, Diabrotica virgifera
  SmartBlast Evalue=1E-51; Info=Myosin light chain alkali n=1 Tax= Camponotus floridanus RepID=E2ALN9_9HYME
ctggtcttctggttagttcttactagaaggcaagttagcagttatactaacacaatgtccgatctaagtgccagagacgttgaaagggccaactttgtcttttccatctacgactttgaaggaaatggcacagtcgatgctgttaacttgggagacatgctcagggccctcaaccttaacccaaccttggtcacaatagaaaaagttggaggaaccaagaagaagaacgaaaagaaattgaaactagatgaattccttcccatcttcagccaagtaaagaaagacaaagaacaaggtaacttcgacgatttccttgaatgtctcaagttgtacgataaagaagaaaacggtaaaatgatggctgctgaactttcccacacactcctttctcttggtgagaggttagctgacgcagaaacagaacaagtcttagccgattgtatggacaaagaagatgatgatggcttcatcccttacgaaccattcctcaaaaaactgatggcgtaagatgtattttactttttttatttttaatcacctgagaagtgctgtcaaattgaaatggcttttcgaacaacagaaattgaacaccagaagtcaaacaggagtgtgtactaccaccaacattcataggcactgcctttaccaaccacatttcaaatacgctgaaatacaatgtatttatttttaaattattttattatatttaattaaaattataaaaactgtcctttattgttacgtaatattgtcattaataaatggtaagttcacagtgtactttgatatataattatgtacataattttccaaaaaatata

SEQ ID NO: 9582 - DNA, 819 bp, Diabrotica virgifera
  SmartBlast Evalue=4E-11; Info=Retinoblastoma-binding protein 6 n=1 Tax=Camponotus floridanus RepID=E2B1P9_9HYME
ctatctccgaatgtgattcatcatagtcgggctcgaagttagcttcgtcgatagtggttttgcgtttggccgttactaccgatctaacttcgtccctttcagtacttttcgattcttcgtctttctttttcgatttctcccgcttcagtttcttatcttttttcctatatttctccttcttatctatgctgacgcttctcgttctggaacgtttctttctcgatcttttttcttcagggcttctacttctatcgtcccttctgatttggtctcgtcgatgctccaatcttttatcgcctttgatgaacattctagcgtcagttttgattctgctcctgtctctactgtgctttctcgttttggatctgttccctttgtaatcattcatatcaattcttccagcgttgcgaccgctctctcctcgtctagaaaacggcgacattgtgtgtgatcgccctctgaggctgatgatattatctggatcctctacttttactcccaagcgatctttcaccgatatcctcaccggttttacttcagttttgacgggcgctactgccactgattgtacttctttctctggcaaatgcagctttactcgatccgaactctttttgatctctggtctgatagcgttgatagctttagcaaatatggcattttcagctcgttttaacacttcattggtgacctgtccgtctttgtcgacctgtagttcggagttactactgtctctaggactcaatcctccctcttcttcgacttcccatttcgatttctctggaaccggagccaaaatatccgttttttcaacctccg

SEQ ID NO: 9583 - DNA, 818 bp, Diabrotica virgifera
  SmartBlast Evalue=7E-74; Info=Twinfilin n=1 Tax=Aedes aegypti RepID=TWF_AEDAE
ggtctccttcatgtgtatgtttaaatttatataaatgataccgtccactgtcttttggaactttggaaggtaatttcgctaatgatatattttcggcagacactagatgaataatttcttcttcaatatctattctaaattgcaagtaatcatacgatccactagccatatcgatcagagcttgttttgcagtctcagttattggaaaagctacacccccagcagtctgttgctttgtagcaatattaatctcagtgtgcacttcagtttttctaagttcctgcattcttctccctcattgataaaggtgcaggggcagcaacagattttttgtgccttatgtatccattcagggtgatgtcactactgacggttccatgtatttcctcttttatctgtgcagtcccaaactcctgtttgagtgtggcttttgttgaggcatacagcattttctgccttactggtgctgtatctggtgaccaactgatcaatagccattcatgccctaaggaatctttagtatctaacctatatatgatgtaacaaggttgattttcttctaataatggttgtatgttagtatcaaagtcttttcccaattatgcttaacactactgcttgcatctagaactaattgctcatccttaatagatacttttaccaatctgaccataccttccttgcacttggcaaagaatttttttaattcatcattagctcgaatccctgtttgatgagacattttacacggttatttaaataattttaatttagacttttaaattattattattttttaatttaactttcagaaacac

SEQ ID NO: 9584 - DNA, 820 bp, Diabrotica virgifera
  SmartBlast Evalue=3E-93; Info=PR-5-like protein n=1 Tax= Diaprepes abbreviatus RepID=Q5I208_DIAAB
aattgtttagaattttattttatattagtatttaacaaatcaaacaacaaaaaataagaaaaaactatcttagactatcactttaagcgccaaatgttataatatatttcgaagccttacaagtaaaggtgctcttatgatcgtcgtaagcatagctgtaaccatctggacattgagatttgaagacttcctgaggatagttatgcggccaagttgagcttttacatttatctggagtaccataagcacctctacaacagtactggtctgtattgaaggcaagacaagctgatttgcatgctatagtgactccgttgggaccttttacttggagctctttgggacagttatcgttgaggtttttgttgcattgagcttttttgcaactgtactgacccccatctccttgtcctcctactggttcaaaactaatacgtaggttgaatccatcaacgaaagaaatgtcgtagtaatcaagtcctccagatcctttcaaggtgatttcagccaaagaaacgggtggtactcctccagctccattacactgtactttatttccacaatcacctgtcaaacaatggtttgaactgtcgtcacaataagatctaccccagaaacgtccagcccagtcatcgggagaattaactgttttcgattggccttgggccagtttgaatcctccattttccagatgctgcttgccagaatttccttggattccaacccagactggaccaccttctttgttgatgaattcaaactgggcagctgaagctgccacgatgacaactgctatacatacgaactgtaacatttcaaa

SEQ ID NO: 9585 - DNA, 819 bp, Diabrotica virgifera
  SmartBlast Evalue=5E-69; Info=Transportin-3 n=1 Tax=Camponotus floridanus RepID=E2ACK2_9HYME
gaggcttgaagttgagtatctcgaatgctctgttaataacaatactatcagaaagatcattcagactaatagctcctactgagatccaggacgtaaagcagcgtaatacttttacattgaactgaacatgctcttgccaattagtttcgtagagtttagaacaatgttttaaaaattcattcactgttggagcagaaattttcatctcttctaacacatctattcttctgttttcacctagcctgacagatctactttccaattcttcaggtaacacagtcaaaatttctagcaatggccatatattagtttgggagaatctattgattaggtctaacgtaggattctgccaggatggcatttgtagggctaaatctgccaaagcaacacacaattgtgtcactataacagtgttagttgcttcgttaatttggccaatatgttcaagtaatgaatctcttaatgacgtgtgcacttctagaggaagttcgtggaaagactggtggattttcgtcctcatagtttgagcagcaaagtaacatgattccaagtcccttttaaatgtaataattcgtctgctacagtccaggcatggacggatttttggagttccaaaagccatttagaagccctttccttctcactgctgttagggttattgtacaacgctgaaactgccgatatcaccagatctaaatctggtttctgatccataataataaaattcaactataaaattattaaaagtgtacaaaattattgcattggttaaaaaatgcattatttttaaatataaatagtcaaaacctcaaaatccga

SEQ ID NO: 9586 - DNA, 814 bp, Diabrotica virgifera
  SmartBlast Evalue=1E-121; Info=SMEK-like protein 1 n=1 Tax= Harpegnathos saltator RepID=E2BUA4_9HYME
ttcaccatctgtagttagggagtatacactacaacaggctagtaatactgatgaggatcaaatgcttctcaatattattattgaacaaatgatatgtgataatgatccagaattagggggtgctgttcaactaatgggtgtactaagaattcttctggacccagaaaatatgctagcttcagtcaacaaatctgagaagacagatttcctcaattttttctacaaacatagtgttcacatcctaatagctccacttttagagaataccatccaagacaaacctcaaaaagaagattacagaagtgttcaactattgggtctaattttagaacttctttctttctgtgttgaacatcacacctaccacataaaaaactgtatactaaacaaagatctacttcgtcgtatactagttctaatgaaatcgagacacaagtttctcgttctgtgtgccctaagatttatgcgtaagttaatagcgcttaaggatgaattttataatcgttatatcataaagggcaacctctttgcaccggtagttgatgcttttgttagaaataatggccgatacaacctactggactcagctattatcgaaatgttcgagtttatcaaggtagaggatattaagacgctgtgctcgcatgtggtggaaaattatgcgaaatgtctggacgacatttgctacgtacagacttttaagtctctaaagttgcgctacgatcaacaccaagacaaactgaagatagggaccgaaatagtttagatggtgtaccctccatattacgaaatactcgttaccgcagggaccaaa

SEQ ID NO: 9587 - DNA, 818 bp, Diabrotica virgifera
  SmartBlast Evalue=2E-44; Info="Ornithine cyclodeaminase, putative n=1 Tax=Pediculus humanus corporis RepID=E0VHW9_PEDHC"
agtggtcaatgtagacatcagcacggtgatacaatttttcttctacctcgctgtgatgtgttcttcctaggccaacagcatttatatgtgctcctgacttaacccaatcatccataattataggatcgggagcattagtaacagttattatgacgtcagctcctcgtacacactcttgattactgattacatgggtaaatatgttcgtattatgtttctcattgagctcagtaaccaatttacttgcttttttggacgttctattccaaattcttatctctttaaacttaaagaaatatttaaaacattcagcatgtgcccaaccctgttggccagctcctaatatggccaatatgttacaaggtttatttctattttcgtagatgtgcttagttgcaacggcagaagctgctgctgttctccatttcgtaatttcaaatccacctatcacagctttcactcctcctgaattttcatcaaacaacataatatttgccaacacactaggcattggcttgggaagatcattgtttacaggaaaaaatgataccaatttacaccccaatgccccatatttctcatcatctaaatatcctggcatcgtaaccaacatattcggtttacctattatttgagtcttagttctggcactttgtacggtctttttttctgagtattttttcatagctgcttccactgcatcaaatgttttatcccacgtgattaacctcaggaccacatcttcgcttatgtaaatcatttcttaatgtatacctatagaaatatgtgtttcttatttggtattattgtattatctc

SEQ ID NO: 9588 - DNA, 811 bp, Diabrotica virgifera
  SmartBlast Evalue=9E-19; Info=Endonuclease-reverse transcriptase n=1 Tax=Bombyx mori RepID=D7F173_BOMMO
gctgtcaaaggcacattcaaaatcaaccaaaaccatgtataggggtgtattccattcaaccgattgttcgattattaccctcacagtattattgtggtcgatgcaggaggattctgacctaaagcctgcttgattagctcgaaatttaaccttgtttgttaatcttttaagtatggtgtgaaaattttatttatggcgttaagcaggtgcatttttgcacagtgtgaggttgccctttcttggaaacttaataatgttacctcttttccagtccgctgaaatgcggtttgtttcccgcacctctcagattatggggagcaaaggtttcggttagatgcggatcagttttagaagtatttcggtagcaatgttatcgattcccggggacttgttatttcttagagatttgatagctgttattatctccgttttggaaggggcctcgccagttgggttagttaatttattgcaattctttagcaacgcatacatgctccagcttcatgcaatttaatcagtaacttgatgatgtgtgcgatcttatagcgctttttgttgaccaaatactgaaaagacgtaccggaaattcgtattatttatagtatactacaagaagcagttaattaacatgtacctgcttttttcgttcatttttagtttgtattgtttgtgtaatgatgcaaattttagctttgtttatttaatttatactttttagtgtaaaaaagtactgaaaacattttttttgtttttacaaatattagttacttaatactatggttccttgataattgtttcatgtagtgacaag

SEQ ID NO: 9589 - DNA, 819 bp, Diabrotica virgifera
  SmartBlast Evalue=1E-65; Info=Nucleoporin NUP85 n=1 Tax= Harpegnathos saltator RepID=E2BQ39_9HYME
cgacagcataccttgtactttacaaacactctgaacaacatgggttaactctctatttttggcttctcttaaaaccttctgtgccttagcttctgtgtccatgtgaattcgaggtaaaagtaactcgataatttgtaaaccgtcattgggacaatggtctaaatatgtcaagccaacttgccacaacgacttgtggcccatcaaacttgttccgtaatctaggatgaaggattctcgaagcttttctgctgaaaaatctggtacttctttttccaaatccactaatcgtccacaatgatataagagatctgttaagtggcttacaaaccaaccattatcatacatattctgaatctctttaatgacctgaaatatatcaaaatccatagcagctaataacaccttatccaactgcttcagatgattgttcatcctcaacttgttaatagatctcttcgcaaattggcctaactcaaatgacttgatagtgggttcagtaaagaacaaccaaccagccaaataagcataccaaacctcgcaatagtcttggatttctatccatccttgttcttctccaactataagcctagtcataagatctaaatttttttcagaactgaaaagtttggcatcgatttttgagtgtacatccatggtccaatgcctccactgcatgttgaattcgtttataggagtcccacttgcaccattaaatataggcatagctctcagaatctgatcaaccattcggaaagtactattgtcagatgcagaatgttgccttaacagtgccctcacaagtggaatacgtccctgcaa

SEQ ID NO: 9590 - DNA, 819 bp, Diabrotica virgifera
  SmartBlast Evalue=3E-26; Info=Muscle-specific protein 300 n=1 Tax=Tribolium castaneum RepID=D6X2J9_TRICA
gtaagatcactggaaaaactagtgagtctcaggatgtagatgacgagattgtaggtcctcaacctttagaagcaaactcgttaaatacgcttataaataatttattactagacgatggtttttggctaacaaagaaaatctatgacgaagccgaagaaaattggcaattggagttggcgatgcaacggaaagaacaaggttctggtgacgctgtggttctaccaagtggtccaccagatgacgatggtggttctgacggttctagcggtagaagctcgcctcgcgatcaaaccggagaatctctcagtagaacactacccaactctgagtacatgatgtacagcttacctggtggtatagctggttggaaagagcaaagtacttacctacctccagaacctttagtcgagaataatactctagtaacttgcggtgccatcgaacccctacccgatacctcctctttagggcctcaaatgcagccaacgaagtcgacgactctaggtggatccgggaatgacagacatctcaaaaaggagtagcacagacgaagtccaactacttcaaaaatccttggatactacagaaggaaccatagaggctcttcctttggaaagcttcgaggacatgattgcagctctagagactgtcactagtaatttgaagaaacatgcaactgaagcgatacgacttgaaggtcaagtcaactcgctgactgcagaccacgaaactcaagctttagctgcccaattggcaggcattcgaacgcgcatcgctacattattgtctcaagctgaacacggaagactcttagtagtg

SEQ ID NO: 9591 - DNA, 818 bp, Diabrotica virgifera
  SmartBlast Evalue=7E-19; Info=Uncharacterized conserved protein n=1 Tax=Glossina morsitans morsitans RepID=D3TR67_GLOMM
tcgtacagaattgccatcttgaacatcagatactatttttgagagatcatcgtaatccggataggctaaagttgaaagttttgaatgaactaatgtcccatttacagacacctcaaacgatcctacgaaataaaaagcaaagggaaaacacaagtttaaacttatactatgtatatagaccttataatataagtaaaatctagttcgttctcgcaattataggaaagaatttgtttttcaataattgtgctttactgccaatgatagataatttttgtaactgaaactgcactgaaaaagtctggtgttaatttcttatcaagggatttttaatcacatggtcatagccattgtattcaatttggtctaccaagaatttccggtgaaccctacaatccttgccacatttctctgattggcactttggacattcgaagaaacaccccacacagtcttcattcaagcaatcgcacatatcgacatccaagtgaatgtgtactccgctatcatcaaacaaagccccagcaggtctacgactactagtagtactagatgtagtactactactcattttcctagttaattttcttttttctcttgtcctaatctctgaatttgtcatattgctctccaagtcttttaggagtttgttagcttttcttgccgcttgtcgtctggtctggtatgcttggacgggctgggagacagattttcttgcagttcgattctcacgattagaactgggattatattcatcttcactactttcagtactcattttgcgtttattttttagatggatagattgtgaatttgtg

SEQ ID NO: 9592 - DNA, 817 bp, Diabrotica virgifera
  SmartBlast Evalue=8E-33; Info=Pyridoxal phosphate phosphatase n= 1 Tax=Culex quinquefasciatus RepID=B0WPC4_CULQU
atttggaaaattaaactgttccattataaagttagtaaaatctgatgatggtttagccatttgaagtggttttctgccgcttagatctttcaaactttcaataaagtaatagttacctaatactgatccatattgaggaaaaggtactgatttatcactagcgccaatgataaaataacagtcgcttcttcttagatacattaatgctttttgaagtttcatcatacttaaattgatatcgtagtcaataattactgctcctatttctttgtcgtcttcaagttgttttgaaacctcggaaatagtttcaccgacaggatgtggcggattttgcgcaactttaaatccagcctttttcaactcctcttgcaattcagtggaacccagtacaaacgcagttttctcaaaacctagtttatgtagtacagttatatacgccgtaatgggatttacaatatcctttgaacctatactaaatttatggttttgaagaagtttgtagatagtgtctgtagatatcgtaccattattggtgacgaaagagacagttttgcctattgttttaagactctgtacgcattcggcagttcctggaagcggcttatatcccacccatattacaccatccatatcggacaaaatgcagtcgaacgaatcaaagaaacatttctgctccgctcttgaagcacaagctaaatttttaattcccataaaatcgcacattttgtgttgatttagatagacagattgatcgcgcgatttagtacaaacaatccttgatataataatagctagtatgctaaccacatcgcaaacg

SEQ ID NO: 9593 - DNA, 818 bp, Diabrotica virgifera
  SmartBlast Evalue=3E-53; Info="Glutaredoxin, grx n=1 Tax=Aedes aegypti RepID=Q17G46_AEDAE"
taatttattagaaagaatgtcagctgttttgtacataatctactcgcatgtttaaaaactggaaaagggccatattaactaaatacattaatatgtgaaggaatttatgcatttgaaatggcttctgccaaatcaccagattctagcatttctttaacaatgtccaaaccacctacaagctcaccactgatatataattgtgggtatgttggccaatcagaatatgtctttagtccttgacgtacttcttcatctgagaggatatcaaatgtttcatatgaagcattaacactgttcaaaatatctataatcttcctactgaatccacatcttggtacatctctatttcctttcataaataacataactttggatttattaatcagtgcttttaatctttcttccaatggctcacttttactatcacccgaaccgctactatgtttcttaactgcctctgctatttttaaagtatcagccccatttataacttccacattcttaccagactgaaataggatgactgttggtacagcttctatattatacttgacagaaacttctgaaagctcttctgcggggcaagaatagaacttaatatttgaattggcttgttgagaagacaaagcttccagtaattcgtttacttgagcacactgttctgcccattcggcttgaaaatgtaccacggatagattagacccttttacggcgtcatcgaatgccttctgtgttttcaattctgataccattctaatttctgatgttttatagttttattatatttccagcaatttaaaaactaaggttagattatt

SEQ ID NO: 9594 - DNA, 818 bp, Diabrotica virgifera
agatataggattgtagaagatttaatttgctacattttatgtgtaattgaattttctgtaggattgctagtttgggagatacagcgcgaaagccctttgcaccacttttttcaatatggcggccgggggacaagggtggcgaccctaaaaacttgaacttgggcttctgctgagcgcccctgcacattgaaaggggtaaaattggctcctctaagaaatgcaaccctaaatgtaacatttcaatggactaatgagattcatggggtaaggtgttctcatgttagaaaatcaaagagttcacgcctcgtggagacgatacacccctaaccccccaagctgcctcatgccctccgcaatcgaggacataacgttggggaggctttactttattgatattagatgccgtgggaaacggggcatccgagaggcctttctacgatgatgccactttagtacgggtggcgttttgcgcctttctccttggtttacctttctttttgtgaaacctctagaattgtctcttctacaaatgtgtgtctgtccagcggacttgtttgttcatttcaccagccaactatcctatgggtaagaacaaaacaagtgggtcgcggtggaggtggaggtcgcggtcgatgtctacatccatgtaaaacaaacacattgtagtgaatgaaggagaacagagcaggtaagtcgcggtggaggtttagcgcgatgccattcaggaggtttacatcgatgaggttgttttacatggatgtctactgcgcggcctacatggatgtttccctgtaattggtccgtttgaagccaagttg

SEQ ID NO: 9595 - DNA, 815 bp, Diabrotica virgifera
gatggtatgtgaaaccatcaataactattgcattttttacacccacacgtctagatggtcttgaaacactttcttctgcaatttctattgaataaaatgaagaatcagcactgatatcaaaacttgagtattacgtaacacaaaagtattgataatatgtactatgtgaataaatagtgtataactagtggtggttatggtagtagtggtagttatattcttgtctagattttaatagatttcaaggaaatatgcttaaaaagtaattaagcagattctctggaagtaaatagtatttaaaagtgaaaaagttcacttaaaaatatattctttgaaattaaaatccaacaagattatttttgtaaagaaataaattatcactaatcatgtgatctaaattatccaaacactatctaactccctcacagatttcatctacttgtcacggcttacagtagggtaatatttctcttgatatattactttcagtaaactgagttgtatttacactttatggaaattatctagagctaatcttgaagtattattttatgaaatactccataaaataataaacagatttgaatctccttggtaaacaaactggtttgtgtgatacttgaaaaaaaaattcccactttagaaatttttccacagtatcactaatatggttttgattaatgttttaatcaaaaattaccaatgcgaaatgaataaaataccaaaaagattaagattttcttttggtaagtattaactttttttattatttaaatcttaagttatgtgtagttaatatttaggtctttaatatt

SEQ ID NO: 9596 - DNA, 818 bp, Diabrotica virgifera
  SmartBlast Evalue=2E-79; Info="28S ribosomal protein S35, mitochondrial n=1 Tax=Harpegnathos saltator RepID=E2C8E7_9HYME"
agtaagcaggattaaatgtaaaataattataaaataattttaaacaatgttaaactgtgtaaaaattatagaaaggtatcaactatttaatgttgagaaaatcctttgctgcagatatgcgaatacagatgcaaaagcagaaatacgagacgaattcagggcacttaacattagaaatcagaaaggagtacaagaaagaaggcagagaagaccaccaaatataataccacccagaaccaacgaaatgccagtagatcaagattggggcaatgtgtggccaggtccaagatcctttcatccagcatcagtccccctcccagtccgtcaaggctatacaaaaaaaggggcttctccagataaatatgcaaatgctgaactaatcaaaatacctaattttctccacttaacacctccagtaatagaaagacagtgtaaagcattgaagcagttttgtacaccttggccaaaagccttggatacagatgagaaatgcgaaaaacattttccttttgagcttacgtttagtgactattgtttctcttctccgtctataagaaatccattggctagaatagtaacactgaggtttaaattgaaatctttgaacttaaatcagagagcaaatgataagtttttaaggctagttggagataggtatgatgaagccactgatacagtgacaatagttactgataggtgtccacttaggaagcagaattatgattatgctttgtacttgattacagctctttatcatgagtcatggaatgttgaaccttgggaagaattgaaagcagaagctgatatgcaatattacg

SEQ ID NO: 9597 - DNA, 816 bp, Diabrotica virgifera
  SmartBlast Evalue=2E-23; Info="CG9134, isoform A n=2 Tax= Sophophora RepID=Q9W0I2_DROME"
tgttgggggaattcgcaatcaaggatagtagttggttatccgttatccttcttatttgcgaatatttaatttattgacaagttgtgtatagttttaaagaacagttgacgctataatgaattgtaaaattgttttaatctggtttgcgtgttatatttgcagtgtaaatctacaaaaaccgagtgagagtgcctttttttctcctattttgcaaaccaatcgaagaggtccaaattggattacgcataagggaaaaacatattatatcaataatgtgtttaggacaaacttctatcgcgcattacaattttgtagacaacaaggaatgcatcttttaagtttaaaaaatcaagaagagagtgatctgatcaaaaatcatattgaagcaaacgctggatttaaacacaggggctattttacatccggagtaaacctagtaggtgatgaccaatggatctggctatctacaggtctggatgtaacatatactaactggtatccaggtgaaccaagcggaagaagtggatccaatgttacagaaaactgtatggaaattcgagaatggggtggctttacttggaacgatttaaattgtctattagaagcttattttatttgtgaaagtgctagagagtgtcaaagagtatgatactcatggttgaatattagttataatgttttgatatggattaaataatttttgtatgcaattattgtttttaactgtgaggagatatatggaagagatacaaatttgctaaagcagtcaaaactatactattagatcagtaaacagaaatacttaataaatagaga

SEQ ID NO: 9598 - DNA, 815 bp, Diabrotica virgifera
  SmartBlast Evalue=2E-42; Info=Pheromone-degrading enzyme 2 n=2 Tax=Antheraea polyphemus RepID=Q2TIL4_ANTPO
cgctcctcatcataggtataatatgtttaaagtttggtgatttgttgaaaagatctattaaatagatactgtcatggtaacttcagtaacaaaatgagcgctacggtaaattttgttgtaggaatcagtgttgcatatattgcctacctttttatattcaatgactacgcaaatttagaagacgcaaatgaccatctagttgttcaattagctagtcacgaaggcaaagttaggggacatactcttcagagtaccaaagggaatacttattatgctttccaggacatcccttacgctgcaccaccagtaggcaaactacggtttaaggtacctcaagcacatccaggatggacgggaactattaatgctacaagcaatacgagagtttgtcatcaaccaattcccactgatttacctcaaagtgaggattgtttattgattaacgtttatacgcctgtgaaaccagatccagatgctaaattggcagtatatgcatggatacatggcggtgggtatgttgtttgggacggcactattcatcgatatgggcctgcccatctgattgactacaatatcattgtagtaacatttaactatcgtcttggtgtcttaggctttttgaccacaaatgacggcgtaatacctggtaatttgggacttagagaccaaaatttggctttacaatgggtaaacaagaatatccacaaattcggaggtgatccagataaagttactattggaggagagagtgcaggctcaggatctgttagcagtcaaattctaagcaaaatgagtcgaggtttatttaggggagc

SEQ ID NO: 9599 - DNA, 814 bp, Diabrotica virgifera
  SmartBlast Evalue=1E-108; Info=Proteasome subunit alpha type-4 n=1 Tax=Camponotus floridanus RepID=E2A3M2_9HYME
aactcatttaacaactttgcaaatttattgaaagtttcgccggaatttatattttaaattttctaggctcagtatttttagctatattgagtatcaactaaaactatggctcgtcgatatgataccagaaccacaatattctctcctgaagggaggttgtatcaggtggagtatgccatggaggctatttctcatgcaggtacttgtctgggcattttagcaaatgatggaattttgttggctgctgagaggcgtaacactaacaaattattagatgaagtttttatttcagaaaaaatatacaaactaaatgatgatatggtttgtagtgtggctggaataacatcagatgctaatgttttaacaaatgaattgagacttataggtcaaagatatttatttcagtatgccgaatctattccttgcgaacagttagtttcctggctttgtgatgtcaagcaggcatacactcagtatggaggtaaacgtccatttggtgtttcaatattatatatgggatgggataaacattatggataccagctatatcagtcagatcccagtggcaactattctggttggaaagctacctgcataggcaacaacagttcagcagcaatttcaagtttgaaacaagaatataaagaaggtcaaatgactttgaaggatgcaaagacgttagcagtaaaggttctggcaaaaacattggatatggcaaaactaacttcagaaaaaagtggaaatggctacacttacccgcaaaaatgaataaaaccatgattaaaattttaagcggcaaggaagtagaagaact

SEQ ID NO: 9600 - DNA, 814 bp, Diabrotica virgifera
caggacggcatatctggattcatttcgcattatgtgtcccgaagtattgtaacgttcgagacttgatggtggtcagtacctttctttattcttctgaggaccttctcatttgcgactcggtcagtccacgggaattctgtgccttttcaatagtacctagacgtgaagaagccacttttttaaagctgttttgattttgtacatttcctcgttctcatctgtcagtttttcagatcttgtgattggtttttattaccgaatttaattgttcaggattatggtgtaaatatctgttagtatgggttggatttcggtatcctgtatatcctctgctttcgtcttctttttttataaccaacacatctaagaatggaagttgttgggtattctcgggttccatggaaaacagtaggcagtagacagtactaggagatgcacaagtacagaaccatagaagagaattgatagacgaaaggacgcagcagcagaaacagccagaacaacagcaaagaccaaatcagaggcgacaactgagaggcaggcgagttcaggtaacaagagaagccgagccggccgtttggatggggatgattcgtcttctagcagcgacacaacgtctactgagtccgacagtggacaagaagacgccgaatgagaggacaactactactacaacgattgatatgtttatttcttgctgctctccgatctcatctaaaaaagttctacgctaaacgcaaaacaaaagtcgtccctcatcgatttcttgtgttgccatatttcgaatgtggctcatgccgaatcattgcaaaaa

SEQ ID NO: 9601 - DNA, 814 bp, Diabrotica virgifera
  SmartBlast Evalue=4E-78; Info=Heartless n=1 Tax=Tribolium castaneum RepID=D6W6I2_TRICA
gtatgagatattgaatgttaacttcatcaagatgaaggatggtatgcctgctttgcgtctaacagtctcggcacaacagtgtctagagcttacattaccgtagtcgatgaacaaccagatgtacagacggaacaccaggagatacctagaactaatgtagggttaatcattgctataattggaactgtggggataattgtcatctttatcatatcattcatatgtattcatttccgtcaaaaaataaaacgtgaaaagagggagaaaatgatagctgtagaaacagcccgggctgccattgttactcagtggaccaaaaaagttattattgaaaaaatcagtaactcctctgaaaacatagcagaaccgttgcttatgccagtggttaaaatcgaaaaacaaaaacttcaagttaacaacaatgatgatggcaaagtttctgaatacgaattgcccatggattctgattgggaaatacgtagggaaaatttgttattgggcaaaaatcttggagaaggggcatttggtagagttgtaaaagctgaggccagtaatattgtcaaaccaggaaactcagttattgtagcagttaaaatgttaaaagagggtcacacagacaacgaaatgatggacttggtatcagaaatggagatgatgaagatgattggaaggcatataaacatcataaatcttttgggatgttgcacgcaaggtggtccattgtatgtaatagtagaatatgctccacatgggaacttacgagactttttacgacagcatagaccttcatctggctatgaactagctgtcggag

SEQ ID NO: 9602 - DNA, 816 bp, Diabrotica virgifera
  SmartBlast Evalue=4E-33; Info=P23-like protein n=1 Tax=Bombyx mori RepID=Q5CCL6_BOMMO
ggtgaattgtggtttatcggacaaatatttccaatagtccttgtagcaacaaaagtaatccaaaaatgactgaccaaccactaccacctccagttatgtgggcccaaaggtcctctattgtatttcttaccataaatttagaagatgtcaaaaatccggaaattaagttcaataaagattctatatattttaaaggtacaggaggtgtagaaaaaaaggattacgaagtaacaattcccctgtataaagaaattgatcctgaacagagtaagagcttcaataaaggaaggtgtattgaaattattgtaactaaagcaaacacagatggaccctactggcctacattaacgtctgacaaaaagaaacaccattggttaaaatgtgatttcaacaaatggcatgacgaagatgattctggcgatgaaggtgttggaggaatgggtggtggagattttgatgaaatgatgaggcaaatgggaggtttaggaggtggggctggtaaacctaactttgacgatattgaaggggatgaagtaggagattcagacgatgaacctattcctgaacttgagtagtttaataagttaaggattttttttaaatttttgtatgttaagttatatgaataaaagtgataatttctaaaattctcttttggacaaacttggttatttttccgacatcggggttcatgggaataacaaccatacaccaaatatgtagctgcggtttctacgtgtttcgaaatacttaggtatataagtaaactagtgtgtatatgttaagatttttaattataataaactatattgatct

SEQ ID NO: 9603 - DNA, 816 bp, Diabrotica virgifera
  SmartBlast Evalue=2E-61; Info=Mitochondrial carrier protein n=2 Tax=Aedes aegypti RepID=Q176S5_AEDAE
agtacccgcgctatgggtccagctgttccttaatggaatgaggttgggagtataccaagtagcatccaacaatggcattttgcacgacaaagacggtaacctaatattattcaacagcgccatggtagctggcatcggtggcacaatgggacagatcatgagcagtccgatgtttctgatcaaaacacatcttcagacacaagctgttcaaaacatcgcagtaggatatcaacataaacacacagggacgtggagtgctctaagaacaattttccaaaagaatggagtacggggtattttccaaggagtaacagcatcaatgcccagaggatttgttggttccacttcgcaactcctggcttttgactattccaagcagtacctgttacggtacgactatttcaaagataagaaattgttaacagcatttatgagcagtatggtaggaggggtagctatcagttttgctatgactcctttcgatcttatcatgacaaggctatataatcaacccaccgatgccaaaggcaaagggacgatgtacaatagttacttggactgcgtgaggaaaatttacaaaaccgaaggtgtatctgcattctacaaaggtgtcggaccaatgtacctacgattaggaccacacactgtattatgtttagtattttgggatgaactgaaccacctctacgccaaattcaagacttcagaactgaaaataaactaaggaaggatttaaaccaaagtcaagaatttagaactatgaggacactgatttaattaattttaagatatgtaaatataagacaagctcaaaac

SEQ ID NO: 9604 - DNA, 816 bp, Diabrotica virgifera
acgatatataaatatattacacacgtttacattttttatttccagacatttaattttgcaagttatttaaattttttaaagtttaggcagtaacacagtcggatatcttttgcaaccatttagctcctgcgacattgtagatatcaatattgtcttttccacaattgatagtgctgttaacgaatgcgttccattgatctgaaactggcttgatgtgattgtgcgttttaattacgagagtcttagctacatcgaccaatccagaaacaacatcgagaacgcagagtgctgtgttataatcatgtccatcacaatcgttaattttatcagctgctcttttggcatctacctgaacatcagtaaggtcttctatcaaagctggcaaagatttgaccaaagcaataaaatcatctccactgcagacgagtgtgtggttgataaaatccattggtacagcagcagcagcatcattagcgtcgattaggcaattagccagtttttttccagcgtcagttgtattttctgaccaagtccgtaatttatcattcactaattcaaaaatgacatcataaacactacttgcaatatctacctccagcacctcaaagtcagaccaaatgtcttttatttcatcaattaattgtggagctgctttcagaaatagatcaataaaaatttcggtaatataaacgattgctttaattgtatcaatgcagtcatctgagtcatctgacacatttttagggtatgagtaggctgatgccaaaataatagcgcagaagaagagtgtgagcttggtcatcttgtttcaatatt

SEQ ID NO: 9605 - DNA, 815 bp, Diabrotica virgifera
  SmartBlast Evalue=5E-22; Info=Novel protein n=1 Tax=Danio rerio RepID=UPI0000E4EBD6
ctctcaaatccttcaccagaaagttctgacactgaaaattccgaacaactgcaatagaacttttcatatacatcccttccttttcctttaataaatgtaaaatgtaggtatcctaaaggatgcttagcactagcttgacatttaacagccatgacagacttggaaactctctgtacaaacactccttctttttcagagttgaaagaacacaatttttccttaatatcatctgtaacatttaacgaagtgagaactgaaggtttaagttccatggggctagctttactctggctttttagagcagacctaatatgagtacagaagagaagctttttagaattcgaatcggttccttcttcatggcactttagaattgagttgtcgaaggagtttttacaagaatcgacaaaacaaagagctacatcagagtaaacgtgtgggtcttcgttcgaagaagattgcagaagtggtagttgtacaaaggctctataattaggccccatgtcccatattttcacagaatacagctgcttttcagtgtttgttaatagtttcactgcatctacgtttacaacattgcagtttttgttcttacacactgtacttcgagtaccattgaaggtgccacatcgaggacactttttaatgccccgttttgttgattttccaaggcctgaaaggagcttttgaggatactcagtaaaatcctctgacattgttaataaatttgtatacagtggtctcttttgactaggaaacattttttttgtaaaataaatataaaattacttatttaacctatattataataaata

SEQ ID NO: 9606 - DNA, 808 bp, Diabrotica virgifera
  SmartBlast Evalue=2E-46; Info=pentatricopeptide repeat domain 1 n=1 Tax=Acyrthosiphon pisum RepID=UPI0001A48FCF
aaggaaattcaagaataccaccaccaccttatgaaatacaaacaacagaatctacaaactccaatgaaaaccaaacacttcaagttcaaaatcatctagtcgatattgtagactcgagaccgaaccttttagcgaaaattccccatatgggcaacataatcagtctcaccgaagtgaaagaacccgaacatcgtcttttgctgttaggtggatgtagaggattcctagaagaaatcaaaattcgaggatgttctccagatattaagacatttactcaattgttagactgcattccagatactgtggccgccgagcaagaacttttgagttcgatgaagaagttttatgtcaagccggatctagattttttcaatatgttgataaagaagaggaatatgagatctgatagtaatgcggcaaaggacgttttgaagttgataaagaaaaacggttacagaccagacttgattacatatggagttttggcgttaggttgcacaactgaggaagactgtgtacaactcataactgaaatgaaagaagggtgttataccttaaacaccgaaatcctgggtgctatgttaagccaagcttgctatcacatgaacattaaatacgtgatgtacctcatggacttatgtttgacagaaaacgtgcagcccaataagaaatttatcgagaaattgtcagaatttaaagcaaatctttataacccaaacatagagacgtcatcttttataaaaaataaagctctgtttaaaatccaatacaaaaaatggttaaacgaagttagagtagacgattctga

SEQ ID NO: 9607 - DNA, 816 bp, Diabrotica virgifera
  SmartBlast Evalue=1E-89; Info=Proteasome subunit beta type-3 n= 1 Tax=Camponotus floridanus RepID=E2ALH3_9HYME
cgtttgtaatacgtttgcagagagtgtattagtgtattgtattttagtattttacaattctttgaattgcagattatttagcggtttagtacaaaaacctgaagtaaattctataacggaaagtgcttaaattttagtggtaaaatgtccattctagcttacaatggtggtgctatggtggcgatgaagggagaaaactgtgtagcaattgcagcagataggcggtttggtattcaagcccaaacagtagctacaaatttccaaaaaatctttgaaatgggaccacatttatatgtgggtcttccaggattagccacagatacccaaacagttatggaaaaactccgtttccgaaaaaacttgtacgaacttaaggaaaatcgaaaaatatctccaaaagtatttgcctctatgatatcaaatatgttgtatgaaaaaagatttgggccattttttgtagaacctgtagtagctggacttctacctaatacttatgaaccctttatctgtaatatggatttaattggttgtataaaccaaccttcagactttgttgttggtggaacagcgtcagcacagttgtatggtatgtgtgaagcactttgggagcctaacctaggacctgaggatctttttgaaaccatctctcaagctctcatcaatgcctttgacagagatgccatttctggttggggagctacagtgtacatcatagaaaaaaataaggtgactgtaaaaaatttgaagacacgtatggactagttaaatcttgttttttcatttacatttaattgataaaataaatgaaactatttg

SEQ ID NO: 9608 - DNA, 815 bp, Diabrotica virgifera
  SmartBlast Evalue=4E-69; Info=S-phase kinase-associated protein 1 n=11 Tax=Arthropoda RepID=D2A297_TRICA
tattaagactttattctaacagtagcaaaaatgaaacactcctacatacataactttatcaaaatcacttatttatttaaatgacatgaaatgcagatctcaaagttgaaaatcgagcatatttcacataaaatttaaagcatcataagtagtatatctaaattataataaacacaaaaatattcacagtaaatactgaacagtcccttaaattacttttcctcgcaccactcattctcttttctcacttgttcttcttcagatgccgtgaagtcattcttgatgttgaaagtctttctgatttcttcaggagctttacctttgatcatattagcaacagtcttacatgtgacatctaagagccccttgatatccagatagttagcagccaaaatcaactcgaagagggttccttggtcgactttaaggaagtctgcgtcccatgaggaaatatcatctgttcttttttctttgttatcgtcatcttctggtggtggtggatcatctttgtggtaagtcgcccattggatgactttcctgagtatggcggaatttacgtttggtaaaggaaccacttcttcttcttcttcgtccattcccaagtcttctaacatagttttgatagtgacggagcatttagcaatttcaacatcaatttcgaaggtctcgccatcagacgactgcaattttatatttggcattgctgtatctatttacaaaaagttcagcgagaaccaaatccttctttgtgtttccactctaattttgataatcaatgccttttgtattgtaaaatggcgttcgctttcggtaaa

SEQ ID NO: 9609 - DNA, 813 bp, Diabrotica virgifera
atacacagttgaaaaaccatacccagtacatgtcactagaactgttaccgttccagtagaaaaaccagtatatgtaaaagttccagaagtagtcaggatcccagttccacaaccctaccccgtaccagttcaacgcagagttgctattaaagtcccacacccagttgtagttaaggtaccagaagttgtcaacgtacaccatgccatccaaactgttaaacaacccgtagaatttgtccaacaaagagtctcagctccaattgtctcacacacatcttcaggtgtagttggcggacaatcaggtttttcatcaggagcattctcttctggtctttccacctcatctggtttttcatctggtgctgatgttgtttcctcctctggtttagaagcatcctcaggtcttttggctggaggtcaaggtttcaacactgatatttctcaaggatactcttcttccggtatcatttcatccggtatccaatctggtggtcaagaacttatttctggtcaatcaggattctctggattggaatcggcaggtcttcaatcaggattacaatcatctggtttccagacagaattccaatctggtggaatccaatctgctggagccgattttagttcatcaagttcattgtccggtacatcccaaggtgttgctagtgaataccttcccccatgcccattgagccacggacacaacatctcagcacgtaaagcagaagaaaagaaggttgatgaaaacaaacattaaattgttattgttgtctataatatagtatataaaatgttgatattcgacacgatttg

SEQ ID NO: 9610 - DNA, 813 bp, Diabrotica virgifera
  SmartBlast Evalue=9E-36; Info=MAX dimerization protein n=2 Tax= Apocrita RepID=Q14VH3_APIME
caatggactatactggcttggggcgtgcccacacccttcttttgttttactttttttgttttattttttcggaccggtctgtctgcctacataacgtccatttccgacaaagtgagacggcaagtggacatgatgacgccactatcacttgatgcagattggacgctggaatggtcgtctgtatcgctctgggtactagtgtaaccaatgacgtctacttcatctgattccgaaataggtgaaggagcagaagaaagcgacgtcgtagaataactactagatatcgtcgaagatgaggaacattccgatacggaacgtcttttcgacatggcaaaatctaaagaaagttggtctaacctcctcttaagaaacctttgttccctgcttaactgttctttatatgaggcgtgctttcgttctttatcttcaagattttttataaaccttctttgcctttgttaatagtcctaacgtcgtatgcctagatgcctcaggccccaaaggtactatatctttaagtttctctaagcagtttcgcagatgtgctcgcctatttttttccaattcgttatgagatgtcctgtttccctgagattttttcgttttttggccgtttcgacacactcctgagatcatccggaaatcgcaaggttgaagcgtatccatgttccgcttctctttctcgcctggcaatgtactcggcagcttctagaagcgtttcaatggggttcatattattaaataattaattatgtactaagagaaaaaccgcaaactctcgccgtaatggtaacagaggcaacagagcaccac

SEQ ID NO: 9611 - DNA, 815 bp, Diabrotica virgifera
ggtacctaacaggcataagtaggtttcctaccgcagaggtcaaagtagtactactttcggatttaaaccgcgcaatttagtgtgtttactaaagtgttgagttggtgtttaaaaatgaagtttattattggcactgtggtctttattgctattttccaaaaagccttcagtctccgttgttggagatgttcgagtgacattgattcatcctgcagagatccctttaacgactataattctcgatccgggtccaattcatacgtttcgcaacaaagctatcaacaaagaccgtacgaaaatcaaaggcaatacgaatacaataacagacaatatgacaataataattataataggcagtatgaccctaattacaacagacagtacgaccagaactataataatggcggatataatggaggatatcgaaatgatttaaatagtagaccgaactacgagacttgtgacgacaacgaagcaaggaacaggcgaatgaagaatgtttgtctgaaggaaattgtaagaggaagcaactacgtaagtgttgttcgacgatgtgaactggttccgtatgaacaaacaataggaacatgctcccaaagcgtcagccgaggactaaccctagatttctgtgaatattgcgattgggacggctgtaactccgccaatgggcacaaaactaacctcttagttggaatgatatccttaattgctgtctttttatatcattagatacttacaagattaattactttaattaattaagcagtgatggtgcgaaaactaccggagggactcttaaatcatcacaaaccatc

SEQ ID NO: 9612 - DNA, 812 bp, Diabrotica virgifera
  SmartBlast Evalue=6E-15; Info="Slender lobes, putative n=2 Tax= Aedes aegypti RepID=Q17H17_AEDAE"
atgttaatatgataacgaaaagtcttgagaaatttgacaaatccgacaatatcctagattaccaaactaatcttgacgagattctcaagaattgggcagctgtatcaatagaataataaacaccattaaggaacagaaaagcaaatatactgaactagaaaaacgtttacaagatatatcagaagaaaaaaacacaattttagcagaaaagaatgaagaaattaaaaacctgctggaaaaatctgatgggcttcaacaagaagtatcagctaacgcacaagcagcaagagaattcgaaaacgaatgtaacgaactcgcaaaaaacaatgaactattgattaccgagcttgaagcatacaaaaatcatccaggactacaaacgatatctgaatccaatgaagacaacatgattcttttggagacgcaacttgaaaatgctaacagaagaatcgaagacttggaaaagattattgacgacttagaaagaagccagatgagaaaagatagtttggaagaaagtggcagtgatttagaaaatgctgtcaaacaacttagtgttactgaatcagaaattaccagcaaacagaaagaatatcaagatttgttaaacaatttcgatcagctgcaagttgagtatgaatcgttgaaaagagaattagaagaagttaaagaaaatttagtattcactgatgaagaaaattccgaactaaaatctgcaaatgaaaaactaaaaacagacaatgaaaatatggaatatcagcttagtgaacttaacatcaattctgatagtatgaaagatgaaatacaggaat

SEQ ID NO: 9613 - DNA, 815 bp, Diabrotica virgifera
ccctttcattgggtaaattttgtaaaattttgattttttattatttggtattcaattacgccctctagcggtagacctacaattatttaaataatttccaggcttttcccgaggcaacttttgtcataaatatttttctcaaagctgtactataaacggttcctgagatatggccgagagccattcttattgggacacccggtacatatctccttgaggttgtaagagaacaaaactatgtcgtctgcgaatttcaaatttgttaatcttctaccgtcaatgttcaggcctctctcttcccagttaagttttttacaagcatattctagtaggcggtaaacagtttaggcgataaggtatcgccctgttggactcctctggccattgggatatgatccgtgtttttaaacaatattcaaaaatatagcaattcaaaatatcgcaattagagacatgaaaataagtaaagctcctagggaagacacatcaaaatttaaatgtcaaaaggagtgaataaataaaagataatctatgtcttcaataactgtttgtttgagagaccaataccgtaatagtgagaaaactcaaatacaattttgatacataaaaaaggaaacacgtcagagttagttgactgtacacctatatctctcatttcaaaaatatattaacttttaccaagatgataccacacatagattaatgagttgaaattctcaagagggtcagtcaataaaaatgatctagtagtagtaacagaaagtctagtacagaagtagtataaggagagatataatttcataatttggtgatga

SEQ ID NO: 9614 - DNA, 814 bp, Diabrotica virgifera
  SmartBlast Evalue=3E-26; Info=Golgin subfamily A member 1 n=1 Tax=Camponotus floridanus RepID=E2AES8_9HYME
gttgtcaatttacaattttattaacattttattaacacaaaaatgaactcctcctattctaactatttataacgtacatatgtgaaagtgaatgataatgacttttaccccttttaataaataaaccagtgaacatgtttacatcactgaaaacaaaattcgcgaagaaacagggagtgatctatccaaactcacagctaaaatcacctcttcaacggtgcaaaagatcgaatctttaagaggaagatcaacgcaaggctctacttcaagcctaaactctatagtttcttcagaaggcgtcaaagaagatggtggtattgagtcagacgacttcaaaaaacggttgatgaagctagaggcagaatttgtgaaaaaactggaccataaagaaaccgaatggcgcgagttgttgaaagacaaggataagaggatacaagcgctggaaaaagatagggaagagtttcagagccagctagggagcctcaaagaatctttgagaagtgctgaagaattcaattcaaagatactactgcacaaagaaaacaatgaacagctagaaaatctccaatgccaagaattagctaaagtaaaaagtttagtcctgttacgagatcaagaaattttagaaaaatccactgccctcaaagatgccaacactcaattagataagctacgaagtgaagtggtgcggttaaggaggcaagaagaaatactaagtgatgtgcagaaaatgcatcccttgaagaagagaaaaatagataatgtgtacataatatatgttgtgtgtatttcgttatatatgggaatcaactgc

SEQ ID NO: 9615 - DNA, 813 bp, Diabrotica virgifera
  SmartBlast Evalue=1E-67; Info=Endonuclease-reverse transcriptase n=1 Tax=Bombyx mori RepID=D5LB38_BOMMO
tgaaattccaactgaaatatatgtacaagcttataaatgatagcaatgttttagtttagaggctataacttcgtttttcaataccatttataccagcggacaactacctaatggttggtctaattcactgtttatagctctacctaagaaaacaacagcaaaaacctgtgctgattatagaaccatcagtttgttaaacctttattgaaaatttttataaaggtaatacatggtcgtatctacaataaatgcgaggaatacctggatgacacacagtttggtttccgtaacgggtttggaacgagagaggcactgtttggaatgaacgtacttgctcaaagatgtcgagatatatctgtagacatatactgttgttttattgacttccaaaaggcatttgatcgtgttaagcactctatattgatcgaagctctaaaagacattggcttggacggcagagatgttcgaataattgcaaatttatattggaatcaaacaacatcagttttagtagatggtgtggaatcacaggctcttaatattaaaagaggagtacggcagggatgcctcttatcgccctgcttttcaacgtttactccgaaagaattttcagaaaagcactttctgaaaaacaagaagaaatacttgtgaacggtgaagtcatcaataatttgcgatatgcggacgatacagtactcctagcttctagtcaagaagatctgcaaacactacttgatagtgtcgttgagagttgtagggaggcaggtctggatctgaacatacggaaaaccaaatactcgtaataagtaaaca

SEQ ID NO: 9616 - DNA, 814 bp, Diabrotica virgifera
  SmartBlast Evalue=3E-99; Info=Uncharacterized methyltransferase WBSCR22 n=1 Tax=Harpegnathos saltator RepID=E2C601_9HYME
aagttcatcaacgaattaaagctacttttaattaaaatgtcgagacctgagcatctttcacccctgaaattttttataatcaagatgaagcccgaaagtacacccaaaatactagaattattgatattcaagttcagatgagtgaaagagccattgaattactgttactaccagaggataaaccatgttttcttttggacattggttgcggatcaggtcttagtggaagtgtgttagaagatcaaggacatttttgggttggcatggatatagcagaagctatgttagatattgcagtagaacgtgaagtagaaggggaccttttgttgtctgatatgggccagggatgtccatttaaagcaggaacatttgatggtgctatcagcatatctgccctccaatggttatgcaatgcagacaaatcatttcacaagcctgtgcggagattatacaactttttttgcactttatatgcttgcctgactcgttcagcaagagcagtcttccagttttatccagaaaatagtgaacagatggaactagttacatcgcaggcaatgaaggcgggattctatggaggagtagttgtagattatccaaacagtacgaaagctaaaaaatactttttagtactgatgactggaggtagtgtacctttgccagccgctttaggtaccgaacaggattctcaaggtgtttcatataccgcaaagagggataaaatgaagcaacagcgcggaaaacctttgaaaaatagtaaggcctggattttggagaaaaaagaaagaagacgaagacaagggaaagaagtgag

SEQ ID NO: 9617 - DNA, 810 bp, Diabrotica virgifera
aataatcggaaataaaaaacagtctgaattattttaataccccacaaaggtttcaagcaattttgttaaatgtgcaaaaaatatatatttgtacctatacaacaaatatttttaaatgagtgggttacattttatattatacagatttaagccatggggctcttagtccttttaaggcgaaaattcactcatcccatatccccacggtagacttttgctgatatttggagcagtaaacgaccaagtgcagtattgacaaagatataacttcgaattatgccaacactttaatgaactagacgtcataatgttcattaaacacagcgacttcgatggactggacacataatacgaatgccagaaaccacgatcgctaaaaagctaaccacagaaacatctgtaagaagaagaagcagaagccgactgcaaattaggtggttggatggagttgagaggggatggacttagggatattaaaaattagaagatggcaacaggccaccagatactgaacaatatggcgacgaatcttaaagcagtccaggatccacacaaggttgttgacaaaacatgatgttgatgatgatgatgagctacctccggtatcaaaaggattgacctctgttgggactctccgtattatcgagccctagaatatgtacctaaaacattatgttcggtttgtagtaaacaactaccaatatattttgcttcactaacacatgcttcataatctaaagagaatatcaataattattgaaaattataaattgatgaacagaagcgcagaaacatgaacactagaaagcc

SEQ ID NO: 9618 - DNA, 815 bp, Diabrotica virgifera
  SmartBlast Evalue=1E-117; Info=Nadp transhydrogenase n=2 Tax= Culicini RepID=Q16LL0_AEDAE
ggcatccttcctgcaacaggatgaatagcaaatctaacgtgctttcctgcttttttcaatttgctgaccatttcagcaattggatattgtgctttggctacacaaagtccatatccaggtacaataattatatttctggcatttttaatagcttctacagcagaatcaatgttgatttcagtgtgggttccagtgatttccattggtttgccagtacctgtacttgatgtgccataacctcccaaaataacatttgctagagatctgttcattgctttacacataatgtaggataaaatggcaccagaagaaccgatgagtgcacctacaatggtcatcaaattgttgtttaacatgaatccttcagcacacaacgcccagccagaataactgttaagtactgtaataacaacaggcatatccgctcctccaatagcagcagttaatgtgagacccataactgaagataaagcagctgtggttccaagagcgctcaaacctccaaccatggtaggatcgtagaacaagtaaccgcctgcagcaatattagctaagagaagaccactattcaaagcatgtcgaccaggtagcaacaaggcgtttgatttcaaaagaccttgtagttttccgtaagccactaatgaaccgctgaatgtaacgcctccaatatatgttcctaagaacaaagctgttttaatgacattggctgcaggatcggtggcaaacgttggaaaatcatggataaatgtagcaacacaggtcagtacagctgccaaaccaaccaaactatggaaagctgcaacaagttgtggcag

SEQ ID NO: 9619 - DNA, 815 bp, Diabrotica virgifera
  SmartBlast Evalue=2E-65; Info=ZNF403 n=1 Tax=Culex quinquefasciatus RepID=B0WWT5_CULQU
ttggagggatgtgtgggagtgcatgaagccagagtgtaagaaagatgtctgcttaatcaaagcatctagtcttcatactacattggaaacatatttgcgtaagcatagattctgtggtgaatgtagaacaaaagttcttaaagcttattctctgttggtggaagaacccgaacctacaaaagaaaagggttacgtatcttcattatatgcaggtattaagagatgcttgcctagtaaacatctccatctacaagctaagactgatatcattactaagttaatcagtcgggcagagcctgaactattaggaagtcgtagagagagacatgctaaaactcttgaaatcgcccaagaggaagtactgacatgtttaggtatttgcatgtatgaacgtttgcatcgtatctacatgaggatgcgtgaagaagaatgtacctgtcaagtgttcgctgccgttgctgttcacacgttaagccgtagtttcgagactgctgtagaacggataaggggcgtatcgcaattagaattactctatgcggagttcgaacgtgaagaacaacagaaacaaatcagaagggaacagaagaagatcaaacgcaagcgtaaaaagggcaaggtagtagataaagaaggcaaggaaaattgtaatgattttgatcaggatgatgatgacaaagaagatacagacaaagagtgttcttgttccaaagacaaaatgagcgaacatgaagattctttaggatgttacagctgcgagcagttgcaaccggggggctgtggtgataccaaagttccaagaaatttcgaatatgaag

SEQ ID NO: 9620 - DNA, 811 bp, Diabrotica virgifera
ttgctaattgaataatttcatcacagaatgcatacaaatcccatttaactttcaacaagaattcaaattcaacttccggtctccagttacgtcatcaatgcgccaactcggacatatttgagctacgggaagataccatctcgttatttatagtatcatgattttacctattttaagtaaaaaagttttaatatcaataacaaatctcaagccaaaaattaacgaaaattggacaatatttgaggttgcattattttacaaaatgtaactaaacgttataatagttgtagcaaatgatttttttacatcctggtgacgttatgcaattttgaaaaacttttatcttatactccaggaaacgaaacatttaaaaatctaaaaatactgccccatatttttcaactggaatatctgaaggaagtcaatagaaaaagcgtaccatctggtggctatcaaaatttttaccacatcgtggtttttaaaaaatattagcaaaaagcgactttttttttatttatttcaatattgtgaaaaactgcgcattgtaaataaaacattcaacaggcgactttcttgaaaatacttgctctttaaaatgagatgttcgaaattaaaaaatgtttataaaaaaagttgcaaatttaacccaaaagtaagcatttttatatagaattttatatacagtgcgtccacaaagcaacggacaaattccattatttcgcaaaccggcgactttaaggcaaaatcccgaaacaggtcgattctttattttaatttccgacccttcggcacacatatcacactagtgacg

SEQ ID NO: 9621 - DNA, 814 bp, Diabrotica virgifera
  SmartBlast Evalue=2E-83; Info=ABC transporter G family member 20 n=1 Tax=Harpegnathos saltator RepID=E2BHE8_9HYME
tgaagataaatcaaatgaaaacatcgcaactttccttacaagagatatgctgtatggattcctcacctttatatctgaatttgtgaaaagttgtggatataatgaaaaaagtgttggcgttcctattcgatacaatgaaccaatttatggataccaagacccagattttaccgattttgcagcacctggagtagtcttgactatcatcttcttcatggctgttgccctcacgtccggttcaatgatcatggaaaggaacgaaggaatcttggaaagatctttggtcaacggcatcagcggaacggagctgttgttttcccaaattatcacccagttcgtcgtcatgttgggacagtctatcgcagtacttcttgtcgctttcattctctttggtttaacgcaacgaggagattggacgacagtgacaaccttgactgtactggccggtatatgtggaatgtgttttggtttcgtggtagcctgcagttgtgaaaatgaaagatctgctacctacctagctatgggcagtttcttaccgatcgtaatgttgtgtggcatcatttggcccatagaagccatgcataagtacatatcgtggatgtcggtggtactacctttgacccaagccacagagagtttgagatgtatactagcaagaggatggcccatcagtaatcccacagtttacaacggttttatatcgttgaccatatggatctttatatttttgacgatcagtattctgttacttaaattcaagaagggttagggggtgtattttccattaggagtttttaattttgtacttaatttt

SEQ ID NO: 9622 - DNA, 815 bp, Diabrotica virgifera
  SmartBlast Evalue=3E-97; Info=Thaumatin-like protein n=1 Tax= Dendroides canadensis RepID=Q4TZV4_9CUCU
gcaacacctatataaagacctgcaaactgcaatgcacttaaattatttgatttttttgataatgtttcgatacatattgctcgtagcagttttctcgtcagcttttgctgtcgaatttgaaattgtcaataaagaaattggtgctgtatgggtaggaatacaaggaaacgatggcaagaaagcgttagcaaatggtgggttcattcttgaagcaggagctagtagatcactgcaagcgccaaaagattgggctggtcgattttgggcaagaacatggtgtgacataaatactcaacattgtgacacaggtgattgtggaaatagaattgaatgtggaggcaatggaggtgcaccaccagcatccttggctgaaatcactctaaagggatggggaggcctagactactacgacatatccctagtagatggctttaatatagccgttagctttgaacccgtaggtggaaacggtgacggaagtcagtacagctgtaaaaaatgtgcatgcggacgtaatttgaatgacaactgtcctgcagagcttcgattgacaacagaacacggtactgtaggatgcaagtcagcatgtctggccttcaacactgaccagtactgctgccgtggcgcttatggtactccagaaacttgtaaaagtacggattggcctgtgaattatccgaagtacttcaaatctaactgccctgatgcatacagctacgcttacgatgacaggaagagtacttttacatgtaaagctgagaaatacattgttaaatttggtgtttaaataaagacaataaaaataattatagata

SEQ ID NO: 9623 - DNA, 806 bp, Diabrotica virgifera
  SmartBlast Evalue=5E-19; Info=Endonuclease-reverse transcriptase n=1 Tax=Bombyx mori RepID=D7F158_BOMMO
gccttccgttttctattacctgctgcagaacgaatatattatcagcgcacgatcttcctgcacgaaatccactttgttcttccatgtcttcgtattctgattctattcttttctttattattcgaccgtacaacctccctactgagctggtaacagttattcctctataattagagcatatgcgtttatcccctttcttgaatactgagctgatgtatccaacattccaatcatcagggatattttgtccttttaagcatttattaaatagttgaaccaacatctcatgtaatatgtttggtccgtactttaccaactcaattgggatgtctccaggtcctgctgctttaccgtttttagatcttttgagggcctcgcttaactctccggttgctatctcaactatttgtgtatgttcggataattcttccatttcgatctcttggaatttacatctatcttctgtcagtaaaatctcataatggtgtttccactgtttaagatctattaactttatgttagatttttcctttccttccctctggagtagactttattaccttccacgcttgcccaactcttgttccacccatatacctatccacttctgcgcattttcggtcccacatctcatttttacttttcactacttctctttttacatctcgatttaatgctgcatatctcttgtgatcttcctcctttcttgttgacatccatttctgataagcagttttcttcttgtttactaacgtttgcatattctccgaccaccattctgtattttttatttcatgtttgtattt

SEQ ID NO: 9624 - DNA, 814 bp, Diabrotica virgifera
gtatattctcgtaccgaatatactaagtatattcgtgtacgtaggatctcggaatattcgtaaaagtttattcttagaatatacctttatcgaatattcttaacacatacttataagtacattcttaacacatacttataagtagatacttttaaaatatcttaaaaataatttgtatgtataggaagtataatattagccttatagattatcaacttcgttattttttagaatacataattaataaaatttatgtatgtaggtagtattggacgaatttcatttcaaaattgttgtagggtaaaaaagtttaaacattaattgtattaacgtttacatagatactattaaaaattcgttttcataattgaaatgactttaccatttcgagtttatcatgaatcattagtagttttacatccttggaatttgaatttggatacattaaattcaataggccatttcgcagaaccaaaacgtgccaaactgcacaaccaaagcaaccaaaggctttggcgttgccaaccgtcgagtaagctttttccgtcaacttactttaaaaattcccacttttataaaaaaaaaacttccctcctgtttacaaaatctgagaagatatgttgaattattttcaaatattttgattttttcttaatattttacaatttggactggaacaataattcccttttgagttaactttttccctttatcaccttttatgttgaaaattcccgcaaaaagggaaatttctctccgtttggcaacactcaccaccgattttgttattccacaatacattcataaccccccc

SEQ ID NO: 9625 - DNA, 814 bp, Diabrotica virgifera
  SmartBlast Evalue=8E-81; Info=Putative ATP-dependent RNA helicase me31b (Fragment) n=4 Tax=Apocrita RepID=E2AXW4_9HYME
attttagtttcattaatgtaaatgaaaaagcagagaaaaagattttctatctgaaattcgtgttattaaaacattaaaataagttctaaaaggtatttggctgagaaatgtaccaagataataagaattcaatgacataattttgtttaacaatcagatcagtcaagtccatctgtgtattgggattaaacaaatattaggcttatcctacatattgtagtgtaattttgggttttataaacccagactttttatattggacagtaaatatgacagaaaccataaaatcaaacaataatcaccttatgggacttcccaacacagtggattatgacaataaggtggatgacttgggatggaaagcaaaacttaaaattcccccaaaggatcggagaattcaaacaagtgatgtaactgatacacgtggcaatgaatttgaagaattttgtttaaaaagagaactacttatgggaattttcgaaaaaggctgggagaaaccatcccctatacaggaagcctctatccctatagcactgtctggaaaagatgtacttgctagagcaaaaaatggaacaggtaagactggtgcttacagtattcctgtgttagagcaaatcgaccctaaaaaagactgtattcaagcactaattatagtaccaacgagagaattagcattacaaacttcacaaatatgcatagaactagccaaatacctagaggtacgtgttatggtgacaacaggtggaacaaacttacgagatgacattatgcgtatataccaaaaagtgcaagttatcatagcaactccagggcg

SEQ ID NO: 9626 - DNA, 814 bp, Diabrotica virgifera
tacttctttttctacagattctttcttcttgaatactccaaagaaactggaatctttctcttttttatcttttatttttttagttgaaggttgttcttgatgatcagatatagttttagatacttcttgtgaaattggtttcatttcttctgtgtactcaattattgggcgcacatcatgatacatctcaatttcatcttttaagaaattattgctattctccatgtttttaatcgttacatcagataaaataatttttccaggagacttgattttagaatcaacccttggcgatttgtctttctttttaaacatacctccaaacaaacctttttatgttcttcttcatcggtctgtttggatttttctggggattttatttcttttgtaactgttttttctgtaacaagctgctcctgtggctctttttgcatgacggaggtagtttccttaccaactgtgaatgcaccagcactagtctcaacagtggtctcgacctttttggttacttttttagtttcttccaccatcgtaattatcttagtagggctattttctcttttttgctttatgatcggttttacatcatgatatcgatgtatttcgtcttttaggaatatttcgcagtcattcatgtctcttatagtatcagcagataaaactgtttctggtttatgtttttcagcatcatctttctttttgaaaacatcaaagaaaccagatttatgttcttcttttgatacatctgaaatttcttgaggtgtttgtttaaccactgttgactgtagctcagcttcatgttttggacttaagg

SEQ ID NO: 9627 - DNA, 814 bp, Diabrotica virgifera
  SmartBlast Evalue=3E-31; Info=Gamma-interferon-inducible lysosomal thiol reductase n=1 Tax=Harpegnathos saltator RepID= E2BTM9_9HYME
tttcagaacaaaatctaatctttatttttcgttatttctgttttctctagcagttaagtttcttttacaaaggtctagaattttaaagaaattaaagagtatttttattactttatattatattttaagttaaaattacgtttatgtggtcttctttacattcgtttggcccattgttcaaggtcttgcagatcaattttctgaagtcactaatagcgtcgtcctgattttgctgactgaatttgtcgtttagcactatggttggaatgaaagaagtatcttcagctgctctagtcttttctccattttgtataagatatttaacgtattcattactaaagtaacaatttttaattgttttccactccagaccggctttgttaaggcactgttcgataatttgaagactagctggatcctctgcgctcatagaacagtagacaaagttttctgttttgcttttgtcggaatttagagcaagtacacaggagtggaaagcgtttccgaaacattcagcagggccatgttggcaagtaaatgcccattgtccagttatatttgtttctgaggcatgaccatatggcacaaattctacatcgatgtaatctttgagatccttataggtaggatggaattggtccttaataaaagcaatgctatctgggcaaagtgtctcataataaattgaaactttcacttgtgcctgttccgataaccaaaagcacgagaacaaaactagaagattgatgacttttcccttcatgtttggattgtatctataattgtgaagtaaagttataacaacactttaaat

SEQ ID NO: 9628 - DNA, 804 bp, Diabrotica virgifera
atttatttgttggctaaaaattgcttcaaattgattacaaatattacttgaattaagatttttttcccaaaacaatgatttctcatttcgtcctctcttatttgtctatcttttattttccatatcgttgtattattctaagaataaactatttataagaaaggcggtctagtctgttactgtgccgtagtagggataatattcgttctcatgtttcattgacaatattgtggtatttgtataaaatactgtgaaactacaatgtagtcttaatttggtttcaaagttctggtttctctattgtttcataatgactgtatccacatatcctagtctatcatattattcaatataattatccataaataacaagttttttaattacaatgttaattttctgtcaaatgttttataatcaaaaacataaaaacggtcatagacgtagtaacaatattttttttctatagtgttacctaacctaacataaccacattttcttgttattgtctggtaaatcataaaacactaaatacagtagacaatagtagacatgtctatatttgatttatttgtttacctacatcagacaaaatatttttcttataggtacaaaggtaacttttttcggtaactgccatttatgtaaataataataacaaatactcacactgtaccactactacaaagtattgacaaaccagcccatggctaataaatctagttccagtattttgtaaatttgttcaaagttacttgtcattacagcgattgtgcaatacatttgtgcatgtgcaaattttagca

SEQ ID NO: 9629 - DNA, 810 bp, Diabrotica virgifera
gttgaccatagtttgctgaggggcacactgtcatatgctttttgtaagtctacgtacaccagatgaacagacatcattttaaaaatatgtttctctacgaaatatgatatgtgttacaaatcctgatactggttggttaaattaataaacgtaattccaaattgtaactgtaataaaagttagtctccacgttaacaaaaataaacagaataattcaactttgacattacgaattgtgctagttacgaattgtcgatgttacgaactgttgccgttacgaattgatggcgttaccatttgtgaggttacgaactgtcgcgttacgagatgtttcgtcacggaaattatacacccaggctagctctggcgatcagtgtgttaaaatgcaccaactataagagtactttgttattttaatttatttatcttgttataatcgttttataattcttattgtattgttgtgtatataggtatatatttatttcaaaaatatattttactaatcttgctcatagttactaaagcgcgaatgggaaatatgataaagaagtaaattatttggagaaataatttaggatttgaaagaagatactaattgataatatttgaataaatgaactcctaaaaaaagtctgttaaactactgactgtttatacacggtggtcttttagtaaagagatatggcaactacgtacctcttccctaaagtatctttataaacgattccctaaagtagaaaataagatagtacataatttatttaaagaaaaatattatgttatctgtattggcttatcgtgtagtgg

SEQ ID NO: 9630 - DNA, 807 bp, Diabrotica virgifera
  SmartBlast Evalue=1E-25; Info=Nucleic-acid-binding protein from transposon X-element (Fragment) n=1 Tax=Camponotus floridanus RepID=E2AAM3_9HYME
gtgctttttcgttgggatgttgcgtatgataagttgtaaatcgtggaatattgatgtggtttttggatgtaaaatgagtttctgtaatcagcattatgtctaattttttgtgtgttaataaatagttttaattcttctacatgttgacttaagccattggcgttccataatactagctttagtaactgagtcatttctggttgagaatcatggtcaggaggttgagcatagtgctcatttgttccgtctagtttttttaacatgtctttcagttctgacatgtctgtgtggttattagtttcattggtataatatgttgtgtagtagtttggttggaggctggctggttatctgcttgcgttgcttgtgcatatgttattccaggttgcacgtagttgactgttgtagttctatcttggtttgtcctcgcgttgtgtcgtctcaagttagggaatttaagtttttgtaattgtttgtgaacttcacaccctctataatttgcggggtgattttcaccacagttagcacatttaacattactgtctctggttttccttggacattctttagtgtaatgaggttctgcgcatttgacacagcatggttgtttattgcagaagctttttgtgtggttgtatttttgacatctactacattgcggaatattctcttgacatgcggtgcttcgaattctactatggaatgcattacttgtttaatgttatagatgtccttgttattatcttttgtttctagatcaatgtagaacataggcaacgtattttttgtttggttatgtagtatatt

SEQ ID NO: 9631 - DNA, 811 bp, Diabrotica virgifera
caagcagtgtttcagcagactagttggataaccagcatcaagtacaaaaatggagtgaggtttagaaagaaacaaaaaacaactgaagaattttgggaaattacttttccattgttgccacaaacaatgttgagcgttagctacttttcccagcatatcttggtgtattcagatatactggttcgactgaaggaatataattatgtcatctggttactctttggtaagttattgtcttcctagaggatcttaaaccaattttcgttccaacccaaggaataccgcaccaccaagctactgacatttctcctttgaaatgacatagattgctacggcaagtgtttttgttttattattggcttatagttatccgagtttatcttttgtagtgctgcctggtccacgtagcggatatcagtgtaaacaggagtttatgtaacagccctcacccttttgggagcgctatatacactcttacagcctttcggcataatcacagtgacgctttgaagagccatctacagcacagcttgtctagaactacaacttacaactaatagtccgtaaactaggtaaattgctttaatttctttaaaatatcagcatttatatccttaaaacctacatttacagtataaaaaattaaaagctatataacatgcattaagtcaggacaagtcgctctaacatttttgcaaaactaaacaaaatacgaagaggtcttaatcaaagaacagggaaagaaaattcaataaagtgttgaaagaatttggttagtacgttcatttaaatgttatagaagatatcgtta

SEQ ID NO: 9632 - DNA, 813 bp, Diabrotica virgifera
  SmartBlast Evalue=7E-13; Info=Titin n=1 Tax=Harpegnathos saltator RepID=E2BM23_9HYME
aaaaccaaaatagaaagaaaagagatacaaagagaaaaattagaagatgtaacattaaaacctttattgcagccatttaccgaaactgacgatacatctctattatccctatcagaaattgaaagggaaaaaattagtcaacaggaagcattagttaagaaagactggcgtaaagaacgtagacctgaacaacatttgcaacaacacctggaaactgaagatagtactacgctgtccttaagcgaacatgaaaaagtacaagccgatcaaacgctcacgcaacgagactggagacgtcagaaacaaactcttgaaaggaaagtacacgaagaagactcaacactattaaaattagacgaacgaacaacggaaacgagtcaacaagatacagcaatcaaagattggcgtaaacgcagagatagaggagacgaaaaaattaaagaagatttaaaagaggaaactcaaactctggaaactgaagagaaagttccacaggaaccagttccttggaatcagcaagaaattacattaaagaaaacacctcgacaacgtaaggaagttcaaaaagagactttggaagaagtaacccttaaaccattcagaaaatcatctgcaactagtcagacggttgaagaaacaactactgttactacacaaagaaaacctgataaagtacacactgaagaatcaagtctgttaaagttaactgcagctgaaagcattgaagaaactaaaaaacaagaaacgaagggttggcgtaaacctagagaagaaattaaaccagtggagaaacagctggttactgaagatgca

SEQ ID NO: 9633 - DNA, 814 bp, Diabrotica virgifera
  SmartBlast Evalue=2E-85; Info=Cytochrome P450 9Z4 n=1 Tax= Tribolium castaneum RepID=D6WWU4_TRICA
gcatattttatttatttaacttcttcaaattaaaccaaaatccgccttctgctgtaacattgaattgtttcttggaaatttttaatggtacgttaagttttgccgaaggttcaattataaaattagataaaagataaaatagcactactttcgtttctaatagcgcaaatcgcgatcctatacagtttctgggaccaataccgaaaggaagatatgtgtaagggttgatttttgacttgttttcgtcgttaaatctttctgggtcgaacctgtctgggttttcgtagaatgccgggtctctatgtatcgcccatatgggaaaaagaagaagtgtgtccttttcgagaaaaaggggtttttcttctggtgttgtaggaggaatggtgtaagatctggtacatattctgtcagccattacagcgattggccattttcgtaaagtttctgagacaaccatgtccaagtacttcattttcaacagaccttcgtacgttagcttgccgttgcattccctcaaagtttcttctatttcttctctcaacctattttggatatcagggtttactgctaattcgtaagttgtaaaacacattaaggacgatacgccatcaaaaccagcaaagaaaaataccatagcatgagcagctatatctatgttggtgatttctttggcaacctttgccatttcctaaatctacttcttctactacagcgaatccagtgtctataaccttctcttctttctgctgaattccttttttagcctccattagtaaatggatcatatcgggacgaacaattcctttctcttctc

SEQ ID NO: 9634 - DNA, 811 bp, Diabrotica virgifera
  SmartBlast Evalue=9E-67; Info=THO complex subunit 6-like protein n=1 Tax=Harpegnathos saltator RepID=E2BKD8_9HYME
aatcttttttatttaaacatattcaatacaaagataattgttggttcttatacataaaattactacacaaatcaatcttcggacttgaacctgccaaacacaatattttggagggttcttcttggtatactgcgctatatatagtgactgacgatacaggtatttcagcaactatttctcccccaaaagtcatttgaatgaacagcttggaccttccgccagctagtattttttccttgtggatatcagctacgtgaatacctctgtcatctattggaaagacagtcgaatttgataaaaagcggtagtgccacaatgacaacctaggaccacctccacataacacataatcttcattggcactgacagatccaatccattttcctaattctggccttgctaccttttcatttttatgtggctctatcgagtgcgccaccttataggttttagtatcccatatgtttacgacaccatcctcagcacccgaaatgaagtcagagcctatgtttgatatacaatgaatatagtctgtatgatttgtaagagtcttcaataactttccataattcaaatcatagacatatatattattatcaccacatcctacaaatatatgattcttctctgcgtaatacttgattacattaacatcagcactctcaaatgtatctttctggtttgggagatcaatagtccaatcaggttgaggatttgtgtttttgattgacttccaactgtaggctaatatttctccaacaattccaacaagtaaatgggattgggtagtaagtaagctattgatttgatt

SEQ ID NO: 9635 - DNA, 813 bp, Diabrotica virgifera
  SmartBlast Evalue=2E-82; Info=Armadillo repeat-containing protein 8 n=1 Tax=Culex quinquefasciatus RepID=B0WVZ1_CULQU
tcatcatatctgtgtgggtacgtggagatactaagtttcttaaaagtcccaaagttttcattaacacctttgtatcaggatcagctagcagcctaaaaatttgatctgtccccaatgtttgtaaaatttgtgattttagcctctgttctgcttgaaatgcaagattcatcaatgcccaaacaccattcagccgaagacttgggtccgactgtgaagtaatagtggctagtaattggacgactccttgttgaatcataggttctttagcgggcgagaattccagcagcaaattacagagagcggacgaagcagccgtcaggagttcattgcatggagaatctgttagtaaagtcattaatggtctccacactgaatgatcttgaaaagttgtccgcaactgctggactgacctgctcaaagagtgtaaacatcttacagctgctaaccttatttctttattgtcatctcctaatccatccacaacacgatccatcaaacatttggtgtcgatgatcctttttctgatgtcctcgtcattggctcccaaagaagcaaatgccctgaaagcagctccacgagcagcaacactgggacatttcaatagatcgactagagcactaactaactggttactgatagctgccacctgctgaagattgctgtcaacctctgtcaaataagccaaagtatctgctgctgcagctcgatgagtttcttgatgttcaatctggcacaatcgtactagacatggaagggttctataggtaatgattggatcatatgctgatatggcccagctctatacaaatttgt

SEQ ID NO: 9636 - DNA, 806 bp, Diabrotica virgifera
tttcctgatttatgtctctaaatcttcccatatgaatttcatattcttcttcagtagtgctatttcttagtgcttcttttatgatgttttcgagctctaggactttttcctctatttcttgtggattgtcaattgtaggaatgtttccaattcctatgctcactaggcgtttgaagttagaccacttggttttctttcttttctttgttgttttgttatcttcttcccatgtacctatttctatgagtatggggttgtggtctgctgatccttcgtttaaggttcggatgtctgtttgtagtcctaggcttttggccactactatatctaaatgggttggtagagcatttccaggaaagtatgttggttcgatgggcccaatcaccatggtgtcttcgttgttcactagatacttattcagtattctaccgtttctgtttgtagctctatcgttccagttaggggatcgggcgtttaagtctcctattattatggacggttcttcggcgttcaggaacgtattcaggtcgtcgtcgtttaaaggatctgttggccttacatatgctgaagtgatccttatttcaccttgtctcatctggacttttattgttgttgcttccatagtgtttagtggtggcgtatgttgtaatgtatgatttattccttttctcactagaatagcagttcctcctgaatttgctctgtggtcttcctgtagatgtcgtatcctggaaacttgatattgatggtatgagttagtttagttcttgcaatgctacgactatccattcatatctattattaat

SEQ ID NO: 9637 - DNA, 813 bp, Diabrotica virgifera
ataataagtaaaaacatttgtgtaaatattttgtttaattaattttggtcaattatgtatttcacggagttaggcaattttcttttttaatactgttgttgttttttggacatggcaagttccacagtgttttgtctctcctgtaaaattttcgatttgtgacttaggcaatttgcttattagaccgacgttatgtagaaatattgcaccagagatgtcacgacgtaatctgagaggaagtagagagagatgggattcaacagttgagtaatcatggttaactatagttagataagatttgaatgcgcagtaacgtaaaaatttatgttggatcatctcgaccgtatcgatatggttttgatagtaagggcaccaaactaccgaacagtactacaacaaggatctaacaaaaagttaaattatgacttttgtaatcgcaaaacataacctgccataattaacatatcgtcatatcccggtgagaagtcactaactaacattttattgttatggagatatttgaaggtaaatataaaatcttcactataaatcaggtttttaaaattttctatcacaaactggtttaaggtgtatttactgctgttatatttattaatctgaagttactaatactttgaagctactctactatgtattttgtgcaatactatcagttagtgatcttttgcataaacaacaataatgaattttggtaataactatttattacataatacataatataattattacatattattatatttattacataaaacatcgtaataagttaaaataaaaaaaatatcaaaa

SEQ ID NO: 9638 - DNA, 808 bp, Diabrotica virgifera
  SmartBlast Evalue=0.000000003; Info=Putative uncharacterized transposon-derived protein F52C9.6 (Fragment) n=1 Tax= Harpegnathos saltator RepID=E2BUQ3_9HYME
ggcccggtgcaagaggaagacggcacatggagaatcaggagaaacgacgaagtaatgaactgaatgaagggtatgacattgcaagatttgtgaaaagtcaaagactgtcatggctgggacatgttcagcgacacgaaaacgacaaagaagatgttacagtggaagccggtaggaaggcggaaaaaaaggaggcccaggacgagatggggaaaaaaaggaaggccaggacgagatggttggatgacgtggaagacgacctgaaaaccatgaatataagacaatggagaagaagggtctaagaaagatctgaatagccagccaggcaaagacccatccagggttatgatgccaaaggaagaagaagatagaatctaggacttggtctggaataaactggtgtctgataggcctatggaggagcggtacggcaagggataagggcttgcgacttggtgatactcctccatagatccctaccgaagggcgttgcacttaaacgacaaggccgtacattgtacggttttcgtaattagttgatattactaccactttcattcttcacacatgtttatatagattttctgacgttctagacgttaccagacatttctgggctattccatgacatctagaacattctcgtacgtgactactttttctttcacgtcaagggactttttctatgtaggatcaatctactacaatctatttatgacattcctggaatgtcaattccgggattccttctcacaatgtagaaaatagtataatgtggaaaagagaggaactaaatgaaaaaatattcatg

SEQ ID NO: 9639 - DNA, 812 bp, Diabrotica virgifera
  SmartBlast Evalue=2E-65; Info=Stromalin n=2 Tax=Tribolium castaneum RepID=D6WLF4_TRICA
aaagtttgtttatgtaaactataattcttgtgttctaattattatttatgatatagttggtgaattttgaatgattattttataattaatccaaccaaaataacaaaatgcatcggcggggtggtaaaagaatccggatggacgatccgcctcccgaatatgaaaatcctatgatgactcctcacttggagcaggataactatggagggaattacatgcagcaaaatctttatggtgataatagttatgcagatcaatctgctgattttgaatcgccccctacacctggtatgcgaagggttactaggtctaaagctagaggtttaaacaatcctcccccagctcctgttatatctccttcatattctccacctagttcgggcacaagaggaagaggtagaggtagaccaccaggcagaaaaaatactgtaggggaaatcatacacagtagagatgatgacgactcattgtaccatacaatcaaaaatagcaaaaactccttggctcatatcgttgatgactggatagagagctacaaactgaatcgagaagctgcactgatatctcttatgcagttctttataaacgcttctggctgtaaaggtcgtattacccagcagatgcaagcctctatggaacatgctgcgatcatcagaaaaatgactgaggaattcgacgaagaaagtggcgaatatcctctgattatggcgggacacacttggaaaaagtttaggcaaaattttttgcgattttgtacaaacgttggtgaaacaatgccaatatactataatatacgatcagtttttgatgga

SEQ ID NO: 9640 - DNA, 811 bp, Diabrotica virgifera
  SmartBlast Evalue=5E-22; Info=S-adenosyl-methyl transferase mraw n=1 Tax=Culex quinquefasciatus RepID=B0X4T2_CULQU
ctaggtgatctgtgagattaacctattaaaatatttttacttgagtttttttcttagtttttacgaatatctttttggaatggttttatatttataaataccaaatggcatcttctgccggagtgtataaacgaattttatcgttattggaaaaatggccagtagataaaaataaacttggtggaagagatattggagaacatttgagacattacataaacacatcatataaagaaaataagtttgaaacaaaccattcctactgggacaaacagtatttagccattcaaagattagtaaataatacccacaaaaataaatacaaaagaaccctgaatacttccgcaacagggctaacagccgaacagtgcaacattgctttatcgaacgaatatctagacgaagttaatcagaaagagcaatcatttttccgtaaattgatatctattaaaccagacccttaataagtagtaaatattttaacccaaatatgttagctagatattcaaagatatttagaaatattagatatatgagtacattagccgaacaatgttcggatgtaaaaaaagttcctcatgtgccagtcatggcagaagaagtattacactatttgaaacctaaaaaaggagaattgattatagatatgacctttggagcaggcggtcatagtcgtaaattgttagaatgttcacctgacattaaactaattgctttagatagggatcctgtagcttatggatatgctgacagtttagctgaagaatttcctggtcaagtaataccattgttgggaagattttcggagtta

SEQ ID NO: 9641 - DNA, 802 bp, Diabrotica virgifera
aataattgtatttttcgtacttatttgtgataacttattaatctacgcgatatagggtctacaccttatatgtgtatgtatatttatatacatacatgtataatacgtatttaaaaaaaataatgtgtcatttatacataatgcatttccaattgctatatatgctgttttcggtgtcttttgttaagttattttgatgtctttattctgaagaccactgaggtctccagtcacggacggttgaggatggttttccaaacagagtatgaatatatgaaagtatgaaaagaaagaaagtaagaatacgttacaaataagtgtatcaataatatacaaacatcaaatattaataatttattatatttgaattattcgtaaaaaagaactcacgaatggacgaatggaggtatgtatgtacatattttcgaaaatgaagtaaaaaattacttaagacttaatcaatatgcatttgtagtagactcggaattcggctagataatttaaacctaaaataacaaaattcagtttggcaacattgtgtgaagaacaaaatgcttcaaattccggtaaagtgaatagcagattatttcttagtaaatacttgtccatataaacaattacgttcgtaatagtatattattcaacgagcatttaatgatggtcattatgatgcgagtatgacggatttcgtatagaataggagcttcataatgataattaaatgcaagttgtatacatgatattttctatgatcgttcacgataaaaatatatattcaaacatttttcttaaaaatatttaa

SEQ ID NO: 9642 - DNA, 811 bp, Diabrotica virgifera
ccgttaagctattaacaggttttcagcctgctattaatcaacttttttttcgtacgcgggatccagacctataataggcagatatcgtcggcgtattctagatcgcttaggcatgtggttaacgtccattgtatccctcttgtgtcggagtctagtttggagagaacatagttttaatgttttgaagttatttccttgtgaacttttacttttatcaaggctttacaatagggttaacctcgaaattataaggtcggaactagtttattgacgtatcgacttgtacgctgtaaactatacatcatgcatataatagcatgacaccattaaattcaatttctaaatacatataatagtatattcttccatataatatggttttgaataggatcgtatccatcttggtgtctatgcattttggatttatcatagttacgcgtaacgttgcaaccttgagagaaatggtggtgacatctggtgactgtctcaattagaatcaaatagatttattcattgcgttgaccaactattcttttttaaacgatggactaggtgaagatcggtgcacttaatggtgaccttaattgaactcatcgagaagtttatcaggttgatttttgaaaatacacaatcatcagtctagagaggatacagtatcattttcataagaataaaaaaatcacagacacattggttatagagtgatacaaatgaaatagtttttgacagcatgttatatatttcaaaccattttgtgctggttgcttttcttcatctttatatatttcctgtattttatctaaaggatgga

SEQ ID NO: 9643 - DNA, 804 bp, Diabrotica virgifera
ctcggaattgcttgtcttacttcagtcgctacatttggtaaagaagacccagacgatgcatttgtatcggggaatataaacttcaatttctcttcaattagtattggagagtattcataaatatgatcataatttagctcttctgaataatttaaatttgctaatttgttaagttctaccttttttaagtcaggagatactgatagattaatatttccatcttctaaaatattgttattatctttgtcgcttttgttgatcttgttgatatttttctgcaatccatctgttggttctatattattgttagtactcgtatattcaatattatctatttcaccaccaatatcatcatcaataacatcagtgtcgtcgtccttaataaattatccatttcatattcgcaactccttcatcaaattttcttaatattttctttcttcgtttttcaatttcggttgatgtttttgtagcaattaaacttggttcttcagttgatgacgacctgcattttgagtctattttatcatccggtaattgtttatatgtttctattgatcttgtgaccaattttccattaaatttatgtcttcttttcttcgaatctgcactgatctctccactttcaaacttcttgcatagtgccttcacgtggccctgattttccatcaggcaaaatacacacttttcccaatttattggcactatttatcaacacatgtaaaattttgttaaactagttagatatgcctatatatcgtttaaaataatcataattatctaatcaacaaatgcattcatccc

SEQ ID NO: 9644 - DNA, 810 bp, Diabrotica virgifera
  SmartBlast Evalue=1E-59; Info=Nucleolar complex protein 3-like protein n=1 Tax=Camponotus floridanus RepID=E2AC18_9HYME
tatccaagacattgactatgtctacataatattctaaatttatacaatgtgcgtactttgccaatccttctagacatacacccaaaatttttgtgtcgctggaggtcttcaagatccgaaaatagacattgaatattatttttgttatttccgtcaaatttttctgtttgacttgtttattttcttcagctttggtttccataagttccttctcaacctccttcaactttttctttctttttctttctttttttgacatctgcaataacctagatttatgtgacatcaactttttctgcttcatatcttgctctttttcttggtccaaattaacatctcttaggtttaatactaagaacacttcaagcatatctacatgcacatgcagatggttctttaagtagttgtttataattctaagaatcttcaaagttatttcatcttttttatcttctttaaatactgtcttcacggatgttttaaccagttccctaacagatttgtcgcggttatttaaaaatggaactactgcttgagcaatattctgcgaaaaattaaaatacggatgtgtaattaataattcgcacatagcttgtattgctaatactcctaacgttaattcttcttctgatcttttgcgtgtatctcctcttttcttaaacaacactaaagcatacttttctagtttctgtaagaactttttgtaatataacaggaggttttcttcgtatttttgcagctttaatgtgtcctttttcaatttaactccatctggcatcaaatttttgatctcatatgatggtaatatat

SEQ ID NO: 9645 - DNA, 811 bp, Diabrotica virgifera
  SmartBlast Evalue=3E-84; Info=Proteasome subunit beta type-6 n= 1 Tax=Camponotus floridanus RepID=E1ZWG1_9HYME
aaatattgcattgtaggattacaagtgtaatttttctaagcttgtattcttttcattaaacttgtaaaaaatgcctcttatgactgagtatggtgcaatgactggtcctaatgattggagagatgccgctcacagtacaggaacctctattatggccgcggagtttgatggaggcgttgttataggagcagattctcgcacaactactggggcttacattgcaaaccgggtagcagacaaactcaccaaagtcactgaccatatatactgttgtcgttcaggatctgcagcagatacacaagcaattgcagacattgttgcttatcatcttaattttcatggtatggaacttggtgaagaacccaaagtacaagtaggtgcagccattttccaagaactttgctacaattatagagattcgctaatggctggtatactggtagcaggttgggataaaaagaaaggcggacaagtatattccataccaattggtgggatgtgtgttagacaagaagtgtcaattggaggatcaggttccagttatgtttatggttacgtagatgccaacttcaagcccaatatgagcaaggaagaatgtgtgaagtttgtcacaaatacattggcacttgccatgtcaagagatggttcttcaggaggtgtagtcagactggggatcatcactgaagctggtattgaacgaagagttgttttaggaaatgaattgcccaaattttatgaaggttaattgattattttttaagctttggtatgttttggtatatattaaaataaaaaaatcagttttacacta

SEQ ID NO: 9646 - DNA, 812 bp, Diabrotica virgifera
  SmartBlast Evalue=2E-34; Info=DnaJ-11 n=1 Tax=Bombyx mori RepID= C7AQZ9_BOMMO
aagtcaattgagtaatttaacaacaaaacatatacataacaacagaccaacaaaaggaatttgtataaagataacaattgaactaagtttactcatcagatgtaatcaatctttcgaaggccttttgtaaagaacacctccaaattcggattgatcaaaactgtcagcagtagtgtaatacatacataagagaaccaaggccaataaggaaaacactactttttctaatttttgagtatgaattgtttgttctctagtgtctctataaaaatcacttttgcgtttattctccatttgcttccggaaagtagcaccataatggttttttgcccactcgtcaaagtcatagattggtgtgcggccatgtggaggtgggggccttgatcgggtttcacgggatttatggaatctatcagccacatcgtcagtggctacggcgcttctaaaatagagacctttgtcatacatttttctagtatttacattgccaagtacttcatatgcttcagtaatagccctaaacttttgtaatgaagcttcatcattattcttgtctggatggtaaaccatagacaatttataatatgcgccttttatttcattttgagtagatttgggtgataatccaagagcgtcataatggctctttcttgctgcactggtggatttaagacgtatatgatttaaaattagtctaaatggaaaggacttgaagttcatgttaaaaaatcgcttgcctattattatgttaaaagatttagcatgatttattggaattttaaaaactttacactgtaaaattgaggtttatg

SEQ ID NO: 9647 - DNA, 811 bp, Diabrotica virgifera
  SmartBlast Evalue=2E-24; Info=CREB-binding protein n=1 Tax= Camponotus floridanus RepID=E2AQY6_9HYME
tgagacatttggaggtgattggagatttggactcttgtttcctaatggaccacttgcaagcactaatgtatttcctgctaagcctttgttactttgttgcaagagatgattgagctgcatttgctgtcgaaggctactgtctgtattatctatcccattttgtaaactaccaggaccaggaccttgagcaggtggtttactacttgtcatgttatcagataggctaccccatggcgaagatgacataagttcatctggaagatcattttccaagtccagcatattagacaatacatcggatgaatccgatggaccctgaaaagggtccaatttttgccttttggcattaggaggcccatcaacaagatgatcggccatggcaaaatcggtgcactctgctgtttaccaagccaaaaccgagcactggcccaatgctacggctgaccaaactagcagcactgtaatccactatttactgtaactgaagtaacaaatacatgatttatggacaaaaatatgaaagaaacatagccaaacagtcgatgtaccaagtgttcgacagtcgatgcatctcacaaggcacatatttatcgaataaaagtcacccatcagccattatgagtattgactaatgcgagtggtcgactatatttcgcgactgcctttctccatcttccatcggaactgcacaatgatctctaatttaatcgagcaagttttttcacttttcactaactattatgaaccgtcacgaaaattaaaacactataatattatctaacactgattttacaaaaacgagcctctataa

SEQ ID NO: 9648 - DNA, 810 bp, Diabrotica virgifera
tacactatttctgggaacgataaactttgacgtgatcggaaaaatcgatcagggatttaaaaaatatatcatcacaccattgatcgaggtatattaacttacaccctaatagctacataaaatggcctgggttaaatatgtgcctattatatatcggatcataatatatagacgttgaaaataattaaaaactcattggtttgattttgtgatttgtaatgatctactaaatgaactacagaaaatgttattcatagtttaaaaaaattttaatgctgtcgactgcgccagttcaatattatccccttttatacatttagtactagtaggttggagttaaataaatgttatagtatttaatagtgtagataaataaagtaaagaacaatttttttatcaacaacatcgaactccatggtttcatctcgacagaacttcaagttttttatgataatttatcttatttttatttaaattatatcattgttgttttttgagatcagaggcggttaattcgctaaacgtcttaaaaggggctgagagatctcatcccgtaccagccctcgaagagaaccctgcggcaccccggtcacttcgcacaatttccgtctctcggcacccatctgacaagtgttgtatatgttgttttacggtgtcttgttgagagccactctattttttctattgttcttagacgtccttggatgggtaccttgagaaacgggaatctcagaacgacctcggtgcaacatggcgctcagtttttattactgcatttttaaacttgttgttattattatattatattac

SEQ ID NO: 9649 - DNA, 811 bp, Diabrotica virgifera
  SmartBlast Evalue=6E-49; Info=Cerebellar degeneration-related protein 2-like n=1 Tax=Harpegnathos saltator RepID=E2B9J9_9HYME
ccttgagactgaatcagggtttctattactgtagtaggttcagcttgagagatagatagctcagacatagtggaagatacaacactttgactgtcgtcatctgggaaatcaggaagttgatcaagtgatggtgtaacaggaggaactttaggtgtgagttttacaggagtaaaatcatctaaaagaggtaggtcgtcaccttcatccttattttccgcggcttttttaagtacgttaaatatttctttaaatagattttgatattccggtctatccctgaaccttgagtcgatagggcttgtatcatcgtaaatactgaatttgcaatcttctccatcggcgatggtgcacaaaaaggatccaactcgaccttctgtttgagtacatttgttactagtctcgtcttggaatccagaggagctagtttcggtttctgaaaaatctgtaggagtagaaaacgttttcctggttttcttatgctgcaagctatcaccatggccactttcttcgtcggtgtctttggtacttgctgagttgaagtccccagacatttgcatctcttcgtgacgagacataggagaggccttgatgggcttgctgtgtacttctaccaaggcttcgtatttttcaactaacttcttgtagggattagccgacttactttgcaatggtgatggttgtgggtatccctgtacgtccatggagaaggaagaatggtactgcggctctatcagaccttccaacatactcgagtcgtcgtctccatgcatgtcgctcatgtcgttctgctccatgcttcgaagacagcggc

SEQ ID NO: 9650 - DNA, 811 bp, Diabrotica virgifera
aaccaatagtttagcaataattaaaatgttaattaaaaaatttcggtcgaaataataaccagaaagattatgatacaccagaataactatgattttcgtataaaaaagcactatacctattcaacgtactttacagaattgaaatggggctatttgagcggtctcaggaatgttataaagaaacagttttttggctcacaaacaaatagaacccctcagaaaatattagattaaattaaattaagttaacgctgttgaaaaggcaacggcttgttcaaagaaaaataaattgaattgcgtagagtggttccaggtataaccggtcaaatttgaccggcatttgcgacagagttatcaacaacaggatttcaatctttgaaccattacctttttattccggtcctctttgtacatacaaattttcatatcttcaagacactcataacaggaaagatttatatgtcaccaagttatttaattgttgataaataattgcttccctaaaattttagttgaaaattaaagattttgtttggaaaacccgaattttccgaggaaaatttccgccgaaggaaatcggaaagaaatatctatgtggagaattgaattacagtgaatttttagatgagtgtttttggtttaacgttaaaatctcccgagttacagagcaataattgaaaaaagatttcggagcgctaatttgtttataaaccaaatagcacactttctgcggactctgcatagctatattaccaatatatgaaatctaagatttgattccagcatgtccagcaataaaatagctggtaca

SEQ ID NO: 9651 - DNA, 810 bp, Diabrotica virgifera
  SmartBlast Evalue=7E-51; Info=RNA polymerase II subunit A C- terminal domain phosphatase n=1 Tax=Culex quinquefasciatus RepID=B0WCB3_CULQU
ataatgaaactgaaagcaacagcgaaaataaaaattcggataaagaaaataaaaaaggacaaatcggacaaatcagaaaaacccgaagaattgatcgatatagacgatcctgatgattatttaatttatcttgaagaaattttgaaacatattcaccaagaattctataagcaatacgatgagcttgaagctggcgaagtacctgatcttaaacaagtcattcctacagtgcgaagcaatattttagaaggttgtaggttagtttttagtggtttggtccccacccatattaatttagagcagtcaaaagcgtacctggtcgctagaggacttggagccactgttacgcaagacatcgaggataccacgacgcatctggtggctgtcaggccgggtaccgctaaagtaaactctggtcgccggaagaaaaagttgaagattgtaacgccagattggttatggtgctgtgctgaaaggtgggaacacgtagacgagaggatatttcctttaaacagcaaaggttcgaaaaataggcatccgcccccacattgcagtagtcctgagcatataacgtcttatcctgaacacggcatgcctgataccagaaagaggacacccagtgggaaatttatggatacaattaatccgttaatgtcgttttcaagtgatgatattgctgatatggataaagaggtagaagacattttggaagacgacgacagtgaaagtagcgaggaagacattaaacaagactttggcgaaaagatgatgtcagaaattcttagtaaaacgtcgaatgaaagcagcagc

SEQ ID NO: 9652 - DNA, 809 bp, Diabrotica virgifera
ctgctatcgccattgtttagaatattgtattgtccatcattaacacgttgagtgccaccattgagtaccaccgttgagtaccgttgagtaacacaaataaaaagatcccgtatatcattttatgcaaatcgtgagaccagagtggcttcgtgcggccctatgatcatctagatgatgttgtctcatatggcactcaacgtgtaaccgtaaactttctatagtttttaatagaatcatccaaaataatggctttaaattacacattttttcgttgattcattttacacattagatacaaaataaaacaacaaaccacacatatatttactaatatccggaattttagcctttttagaattacatataaacttttcatatcttaagtatacctgtgtgacgcagtcgttgaggattctgtatttataacaaaaaatatagggactgtgacgcaatgttcataaatatttttatagtttagtgacattgactgcttttacaaagattttcgttatttttcttttgtttttttcttaaaagaagttggcaaccaatatctcttcctcttctattatccatttggtggttatgttgttaaatcctactaattcataagttcgcaccaaagattataaaaaatagagaactgattgatttctcttccagtaaattaatgaaaacggaacaagcaattaatgatggaggtacatgaacgaaaacattaaaagaaacaaaaagcaaatattggcaacattaaagaaataacacatgatatgaaaaattatcagttctcattcaaacacgtagtccaa

SEQ ID NO: 9653 - DNA, 805 bp, Diabrotica virgifera
  SmartBlast Evalue=2E-40; Info="Ubiquitin-protein ligase BRE1A, putative n=1 Tax=Pediculus humanus corporis RepID=E0VCZ0_PEDHC"
ggccttctaactctcctttgagagccaaagttattttttcatttctttgcattaatctgtcaaaaggcttgaataacttttgccactgccctccttgaaacttgcaccctattggcaagtttgtcatttaattcatctttatcccacgtagatagttgcatcaaaaaaggaagtcgtcgcttcgttttcatttttcgtttcagattcatctgccgtttcggcatcgaatctttgtaataaaattcgaatgtcttcattaagttggttccagtatctgttgacgacgttgagcatagcatcatcttgggtctgtcttttttcaagttgttcaattctttgcctcagctcttgttcagttctacatctctgctcaattctctgtgctaacttcttgttctggaattgaagaactttgatatccatctcttccagtgtcgaaaccggtccaatcaaatgaggctcaaagtgaattttttaataggtggctggctgccgctagccgcctcttcggcatgtctttttgacattatcaggcaaattttaaaataaaagcgattaaaatatattcaaattaatttcatttgggatttatttgaagaaacttgcaagaaaataggagttatgtttgcaaacaaaaaaacgaattagggttaagtagcttgaacagtgtggtaaaagtaaatagtacgtatgaatggaagaacaatagcgtaagtggttaaaatagtttggatttgggataaaatgtcttttaattggatactttaaaaaaaattaaaaaaccgaaaaacgctccacaactttt

SEQ ID NO: 9654 - DNA, 805 bp, Diabrotica virgifera
acctggcccagttagaagaatattgaacatttgcattggtggaaacaatatacatatacgtatttagatgtattatgtattgaggcagtaaggtggtttaacctatctcaataacttgtatatgttgaaggtaggtgacaggaaaataaaacgtagttttaacccttagtctcccgacggtacttttaagtaccaccaaattcgggtacccttatatcccaagtgttgaagtagatttttttacaaatgttctgttaaatatcatttattagttatcagctgatgcttaatacttcaaatgtcattcaaacgatttcgtgttaaatacacaataagatttataggtactctaaagtgtctaaaggatcgttggaaaaaagccatgcttttagcttattttaaaaagttatgactgaaaaaataagttcttaaaagtaccgtcgggaagtaactgtcaaaaaaatctaaaagtgatgggagactaaaggttaaagtagtcgggccgtgggttctggccctaaacttttaaatataccaaaatgatgttcaggtgactgcgccactttacctttcacagccgcaattaataaaaaatgtacttaagacttttgaaatttgtcggtacggatatatggcagttgacttctgtgtttaacaaactctaaataactatgtattgcccgcatttgttaattgaagggtatttaaaaacgaaaagaaatatattttgagttacggtgattgtcaacgtttcattaatgataatttttctggaacaaacttcggttctaaagattctgaaagt

SEQ ID NO: 9655 - DNA, 802 bp, Diabrotica virgifera
  SmartBlast Evalue=2E-50; Info=Aldehyde dehydrogenase n=1 Tax= Culex quinquefasciatus RepID=B0W5G6_CULQU
aagcttttaggatttatggaagacgttattaaggaatttttttaatggttcagttaaaacgtcaaaagattatgccagaattattaactcaagacactttgatagattagtaggattgctgaagaaccagaacattgccataggtggtcatctcgatgccgacgagcgctatatatctccaactattcttgtagatgttcatcctgaagatccagtgatgcaagaagaaatttttggtccaattcttccgtttattaatataaaggatgaggaagaagctatcaactttataaattctagagaaaaaccattagctttgtatgtttttaccactaagtctaaggtaaagaagacctttatggaacggacttcaagcggagcaatggttgttaacgacactgttatgcatattataactgaaggtttgccatttggtggtgttggatattctggtatgggttcatacaagggaaagaaaacatttgacacatttagtcaccaaaaatctgttttatcgaaaagttttaatgttatagcagacaaaattgaatcagtgcgatatcctcccaatactaattttacgacgtcatttttaaagggagtactaaaatataacacgacgattcccactcaattactggcatacgtatttagttttgcattgggagtagcagttaccgtttcaggatactacataaacaagtcaattcgagaagaataactatagttatactttgtacataattaaacatagggattttttattggctttagagcaacaaatgatataattttaagttta

SEQ ID NO: 9656 - DNA, 807 bp, Diabrotica virgifera
  SmartBlast Evalue=1E-69; Info=Serine/threonine-protein kinase D3 n=1 Tax=Harpegnathos saltator RepID=E2C538_9HYME
aataatatacatatactataacaattatatatacgaaaagtattgtctttttttaatttcgtgattctatccaagaatgagctttcctgctgtaatattaagtatctttataatttataacactacccaagaaactgctgatgttgaccaggccgagtagattagaagaatgaaaagttcttgtcggttagtggatttgtgatgtaggagcaatattagtcgctcaacaccggtatcatagatagctcaacgctgtggattgtagacgttggacagttatcattcactttcacgtggcagtgtttgtggcattttatcaaacaatccctacactcgtacccctgtttaccgaatcttcttgctatactcttcccacaaacttgacatacggtgccaccttgtaaatgtttggcaacaaacgtgtgatcattgaaaatatggagtttggttcctttttttctccatttattcttctgtgctaatgacagcggtacgaggtagtgcctcttgattccgttttctacagtttctagcaccaaagtactggcttcgttgatgtacgtcctcgtggacgcactgctcatccccgaagcttctgaaagactagacctcctggaagtctcgtccattgatcgctggccaggtacgttgaggcgataactttcatcatgtcgccctcgatctgctgacacagacctattcagggaatcatcacgtcctagatcgttttctggaccagcagattttgatctgttcatcgacttgccaagtcttctcttaatcgttccgaagaagtctctacgtttc

SEQ ID NO: 9657 - DNA, 808 bp, Diabrotica virgifera
  SmartBlast Evalue=2E-63; Info=Endonuclease-reverse transcriptase n=1 Tax=Bombyx mori RepID=D7F164_BOMMO
gaaatttagaatagaacgtggaattagacagggtgatgctatctccccgaaattgtttacagctgttcttgaatatatgttcaagcaaatggaaggagaggatatatgggaatcaatataaacggggaggatctgaaccacctaagatttgccgatgacatcgttttaatatctgatagagttgataaagctacaaaaaatgctgcacacgctctataaagtgtcaaaaacaattggtcttaaaattaacagctcaaagacaaaatttatgaccaaccttgtagtcagcgataaaattcagattgagagtcatagcatcgaccaagtaatagcttacaaatatctagggcatgagattcgcttaggccgagataaccagacaactgaaatacaaagaaggataggtctcacatgggctgctgccttcggtagattaaataacattttcaagtctaatattccagtttgtttaaaaagaaaggtttttgaccagtgtgttttgccggttcttacatatggtgcagaaacactaactctgacaaaaagaacaataaataaaataagagttacacaacgcgctatggaaagatcaatgttaggtattaccatcagagataaagtaccgaacctagaaataagaagaagaacaggagtcacggaggcagttgaaagaatagccatggctaaatgggtttgggcaggacatgttgccagactgacggatgacagatggaccaaaaagattctggaatggcgaccaaggcaggaggcatatcgaagcagaggacgaccaccgactagatggacg

SEQ ID NO: 9658 - DNA, 809 bp, Diabrotica virgifera
  misc_feature (22)..(22): n is a, c, g, or t
tattgtcgttttctgtactacnggattgagaacttagtttgtatgtttacaaccctcttaattaagctaactgaatgtccatttcgggtatacttaactcacagaatctatttattcgttgacagtaagttatattcttccatcagtaaagatccaaatgtctcgagaactgggtctcttaaataattcagaatcgttgaaaatctattggttcgttggcaatcaactctatttttatgactttagttccatcagtaaaaagccaaatgacccgagaccctagtctcttaaattattcacacctgttgatctagaccttcaaaaagatccgtgtttcacatgactagtcagaacagtcattaggatatgatagtcaaaaaagaactggtcttttttaccaacgcagtcgacatgaaagatattttgtatatatgcttgctatacctgtatttaactcagcgcaactgttttaaaacaacagttcaaaactagtctcattctcatctgcaatcggtttacaacctaaacgaaacctgtcttcgctcacgggatgaatggttctggatcagttgtttatttatttacatgtttagttccgatgaggacatgattactataactactgagggttttgtatagttcatagagaatactggatccatccctactttgaaaagaatgcaaaatctcgcctattcgtagcagtaaaagaacagtctcatactgattcattgcatttatagaatctagacatatttacatcagctgcccacttttttgagaatttccaaactacactcataatatac

SEQ ID NO: 9659 - DNA, 810 bp, Diabrotica virgifera
  SmartBlast Evalue=1E-45; Info=Angiopoietin-like 1 n=1 Tax= Tribolium castaneum RepID=D6WEJ6_TRICA
gacaacatacgtagcaaatgttgtctttataccaccatcctccctcaaaagttttagcacaatctccagcttgaccatccagatccacatctaaagtagaaaattttgcattgagttgtcctgatagtgcatcaccaacatttcctgaatatgcaccaagtttagtcaagttgtacccatccttttcaccggctatagcaaacgatgcataacgggcatatcctgttatcccttccttgtcagtaagttctattaacagttcatactgttcagatcctgtcatctgataaatgttgtgtaatcccagccagaactctccatttaaagttccaaagccaaacttgtaagctctccacggttggtaaaaatcttcacgtccattgaaccttctctgaactgttgtccatcccccgccttgaatttccatgtcgcaaaggacttcgaagggttctttgctacccctgggcttaattacatatattccagatctattaccaccactttgtaggatatcactacaacttctaggataataatatggtgtagatgaatccacagaacataaagatggcttgctggttcctactaaatttctacatccgtccaaagcattaggtctgtaggttatagtaatttcttcaggttgtggataccatcttcgccggattgcaggtctactttctggggtaagctctaagagttcttgcgtttcactcagagcaattttcaaattgctacacaatacgagtacagttattactattactaacgagtacatggtaacgtaacacaagtaaaaaatttaacgag

SEQ ID NO: 9660 - DNA, 809 bp, Diabrotica virgifera
  SmartBlast Evalue=1E-109; Info=Cyclin dependent kinase 8 n=1 Tax=Bombyx mori RepID=D2IGZ6_BOMMO
gttgtgtatttacttttttcaatcaaagttttaactattacattctttataattataatcgttgtttactgtgtttttaaaacattttgaatccatttcattatacatattgttttagcacttcattgaagtgcaattttcttctatagacaaattagaatgacatgtttgatgatggattatgaatttaaaatgaaaacacagaatgagagggtaaaggtagaagacttatttgattatgagggttgcaaagttggaagaggtacgtatggacacgtttataaaggcagacgaaaggacggaagtgatagtaaagattatgctttaaaacaaatagagggtacaggattatccatgtctgcctgtagagaaatagcattattacgagaattaaagcatgctaatgtgataaacttaataagagtgtttttatcccacaatgatagaaaagtgtggcttctatttgattttgcagagcatgatttgtggcatattatcaaatttcatagagctgcgaaggctaacaagaagccagtgatggtaccaaaaggtatggtcaaatctctgctatatcaaattttggatggcatccattatcttcattctaattgggttcttcatagagatctcaaaccagcaaatattcttgtgatgggtgaaggacctgagagaggaagggttaaaattgctgacatgggatttgcaagactctttaatgctcctttaaagccattggctgatttggatcctgtggtggtaactttttggtatagggcaccagaacttcttttaggtgccagacattatac

SEQ ID NO: 9661 - DNA, 804 bp, Diabrotica virgifera
gagtatgtcaactaaaactgtcactgtcacagtggtagttgccaaactcgcccaatacgtctagaggttggaaggaatcaatataatgtgaatttgataggtttctgtcgccaaatttcccacctctactagtttcttctcttttatctcacaaaatgaaaaagtattgcctttattgtatgcagggctaagtagctcgtatgtgggtgcacctgcaagtggtgcgaatgatgagagctcgatttccactacagataaaacgaaaaagtattgcctatgtcgaagatctaacaaatcagttctctatctattttgttgtcattggtgattgttgctcctcgatatttaaattatttaaccacttcgaagtatgagtccacacttggtatgagctcttccaatttctgaaacaaacggactatttttaaaaaaggctattgtagtacttatcatactaatggactttgttttttatattgtcacgatcaggcgttaccaataataacgattttgacggcatcaaacagattgttggctaaagagacacttaatatgctttaaaactttacgtaatactaaaccatatcaagaaacttattcgacttataaaattatatctttcaaatcctccattcggattagccgtattgattagctttcaaaaaattgtttgacggatgtttttatttattgtaaataaaaaacattttcaagtcgtgatcattttcaatcttagataaatgtatagctaataaaagttttatttttttaactgggcactaaataatcacttgtaaactgacc

SEQ ID NO: 9662 - DNA, 797 bp, Diabrotica virgifera
gattaatatatttgtattattatcttccttaaacatgaatcacaacaacggtaaaaataattttatagtataaattcgttataattttagataatcactttttatatacagttatataaaaaattcaaatataagttaatatacgaatcttaaacgttacaactgttacaagctagaaaatttctactaaataaaaaaggggtataaaaattctacaaaaatatgagtataacctgatcaaatactaaggtttagaagtttcctaccacaagtaaggcttcatttcatcacaatcctagtaaatattaaaaaagattctaaataaatatagggtacaaacttaagtatataaaataattttaaaaaacgttcaactatcaatcagacacctctaatgccgtcaatgaacaactcagtctctggtagctttgaactttgaaagacttgatttatatgtaagaaaagttagtgatacttgcgttaagtccatgatagatccctcagagtagaatcaaaatattattagatgcatattggtcaatatgaagagttcttctgcccttctacggaaatctaccaaaaatagacttaaaaaatagactaaaagataaaaggatacgtacttaaaatttggagttggataaagttttattgacataacaagtgatattataattattcctctattgaataataatgctagtcgggaatccaaatttaaaatatttaatacataatttctaataatattttccttacctatatgtagtttccttgcgattctgtgactattcttt

SEQ ID NO: 9663 - DNA, 804 bp, Diabrotica virgifera
tgatggtccaccgtttgatggccgccgtttgatggcccgcagttgatggtccgcagtttgatggtccgccgtttgatggcccgcagtttgacggcccgccgtttgaagatatgccatttgaaggtaggccccggtttgatggtccggctggaaggtttaatagaggcgagccacctcgaccatggggaagaccagagaggcctgagagagaaggcagagaaggtagaagaagtcgatggggaaatgactctccacgatttgagggcggagatggaagacatggagagtataatgatgttcctccaggtgtagatccaggtgaacaagagatgcaaggaccagaaatgatggaaaacaataacgatttggacgacaacgaacaaggaggtcaccaaggtagagaagaccacgaaggagaggaggatgaacgtgaagtaggcgatgaagcttacgaacaagcacaaagagagtacgaagaaggtggcgattgcgaagaagacggaggaggaggagaagacgaatacgagcaagaagcaggacagcagcaccatcaagaggactacacagaagatcgtgcaaatacaccagtggaagacgagatggcacatccgggtgattctgaagagcagtttgaggaagcagagcaaggcgatgcacctgaagcggaagaggggggtgcagaagaggctgatgcagccgaatgatatgtttatatagacacttccaaaagacttttgtgtcgttggtaaaagtagagtgcccaaactgagaatgaattttaactacactttatattatttattc

SEQ ID NO: 9664 - DNA, 808 bp, Diabrotica virgifera
  SmartBlast Evalue=2E-45; Info=DJ-1 beta n=4 Tax=melanogaster subgroup RepID=Q9VA37_DROME
catttcttaattgataactaaaccacaaaatgttttaaatcattaaaaaatagtttaccatgatacaagcattccgttagctacttccttagctttttcttttcctacaagcttctcgactaatgccaacccaaaatcgaaagcagttccaggtcctctgctcgttattaatttatcatccacaaccactttatcttctttatactgataaccttcactgccatccaataaatcttttttaacactaggatatgaggtcaagttctttcctttagcaattccatgagctttgagcgctaatggggcagcacatattgctgcaataagcctaccgctagattcttgttccttgagtagttctccaacttccttggattctgacattgctttggtacctcctagaccacctggcagaacaattacatcaaatggtcctttactactagcatcttttatagcaatgtctgagtgaatttgcactcctctgctacattttactagttgattgtctgttagactggctattgtaacatcaactcctcctcttactagaacatcagctgaaatcacaaattccatctcttcagctccagatgctaagaaaattaaggcttttggtgccatgatgctgcaattggaataaggctttttgctcaagaaaacaattggtaacaaatttgacttttgggtattactcgagtaacaagttttgaaattaaatacattcactaatcaactgtacactcaatatgacaatcaatttttttaaaacaccagccgtaaaaagaatgaccttatttgttatgac

SEQ ID NO: 9665 - DNA, 802 bp, Diabrotica virgifera
  SmartBlast Evalue=1E-74; Info=LISH motif-containing protein n=1 Tax=Glossina morsitans morsitans RepID=D3TPB9_GLOMM
ttaaaatattcattgtcacaccatccataaaatatattaataagaatttcatttatttatgatcatcaatctttgctgaagctagatctaccatttttggatacttgacgttcctcttcgttaacttgtcctgtccccacaaaatgagtttgagaagtgtagaaacctgtggtgcggtgttctcctgatgttccatttttaaaatagctgcatttacttcactggcaaccttctgtctgtgtgagggagctaacaaatccccaaatggagatgaaagaggttcttcaaatgctaaaagagctactgttctttctaattctgagagtacagatggatcttcttcgccggcttcactgagatgactttgggcaaaggccagggcctcttctattctattatttctaattaattctataagatgtagttgttgtaaatgaaaataaagatatctatcattgtccaataactctggatgcagttgatttatcaatgctgtagcttcctgaatcttcccagtcataatggcgtctcgaatcctaatcctgtcatccagagaatgaagttctacagaaggaataacccccgactcctgttgaaacttctcagcggcttctttgaacccctctgtgactagataattcatgataagtttgttcatgctgctccggccgagatcgttgtcctctagtatcatcaaccagtcttcctttgttggtggtgtgtcgtgtttgtctgtgttgtagctcattatttttcttttatttattttattttagataaagtacgaaaacatttataagtc

SEQ ID NO: 9666 - DNA, 803 bp, Diabrotica virgifera
tttttgtacactttactgttaccatagtctgagtgtgattagccgttttttcaaaaagatatatgtgattatttttgtatcccgtcaattgcaatgttgctgccttacaacatttcgtttgggacctactaagcagccaactaacggaaaattacatgttgcttgatagacactccctattttggtaatggttggttgtttggtcggcgttttttaagttttgaaagacacagtgatgtacaacacagcaaagctgaatcataagagtatacgtttccaagaatgtaatgtcttctgaatgaacattgatctataggagtcatcttcttcatgtaccatgtccttttagaacgttagttaccatcataactaccttaattttattcactgtcaccctaaataatccgcttatatcaataccacaccatatcgcaagttcttcaatcatgatgttcttcttcgtcctggactgcgtttgcctgctatttttccttgcataacatttggtagcaacctatatttgggacctctcattacatgtccgaagtactccagctttctctgcttatgctttttataatttcagtagtcttgctgagacgtcatgcatacacatacgttcacacttatactcaaacgcaaaatcacattacatatattatactattaacgtagtaaatatatttcttctacgaccgtttaataacatgctcattatttactattttgaatagattagaattactttacctgtgagtaatagttcattacttacgggttgaagttaggttcaagtggtacaa

SEQ ID NO: 9667 - DNA, 807 bp, Diabrotica virgifera
  SmartBlast Evalue=3E-82; Info="Protein phosphatase 2C, putative n=1 Tax=Pediculus humanus corporis RepID=E0VDQ5_PEDHC"
atttggaaggtgttacaatttgttctttgtcaattttaagaaactcttattagtcatcgaaatataataaaatggtgtaatccacttttctattaaaaagaaaataaagatacgtatatcaaaatgggtcaaacgttgtcagaacctgtgacagcaaaagatacgtcttgctgccaggatagttcttttcgtgttggatcaagttgtatgcaaggatggaggataaacatggaggattcccacacacatattttgtctcttccggacgatcccaatgctgcattttttgctgtctatgatggacatggtggagcagagatagcagactatgctggaaagcatctgcacaaatttgtagtaaaacgtcaggaatataaagatggcgacatacccgaagccatgcggcaagcctttctcgaactggacgcccacatgctcgaagaggagtgcatatttagcaaaccttccggatcgacagcaatcacaacgctcatcaaaggcgacaagctgttctgcgctaacgtaggggattcccgggcagtggcgagcgtgaacggcagcgcgagagctctgtctgaggaccacaagccatcgaaccaggctgagtacgacaggatcatagctgctgggggatgggtagatgccaacagagtcaacggcaatctggccttgtcaagagccctaggagactttgcttttaagaagaacggcaagatgccagcagagcagcagatcgttacagctttccctgacgtcaccgaacacaccatcacctccgactgggaattcatagtgctcgcctgcgac

SEQ ID NO: 9668 - DNA, 806 bp, Diabrotica virgifera
ttaatgaagatgaagtttattactcacaaatgatttgcttgctcatattttgacctttagaaaaaaaaatactcgttatgaggtcacaaatatcttaaatttcgtttcgtcttgtacaactctgaacaacctttcgctaaattttgaataacctggtctaatatgttttgaaatgtaagtatcatctctagttttatagccattttggttgacttttttaaatgtgtacaagatggccagctttttcaaattttattggttaacttactatacattacgttcctcttgatctgttcaaattcttgtccttttctttatttaacaattttgtatacgtactgtgaacatattggggaatcgaaataaagtttactttaaaactttatttgtgataatcttagttgaatctatattatgaattttaattgtttcaaagaaatatactaaggaaacgaatatgaaaaggtatttcagcattctacaaaaaatactaatgtgatgtttttaatttttgtatagtgtgtttatttattttttattgttttaccccgcctgaatgtctgaaactacctttatattcgattatacacacgcgcttttaggcatctgtcctttagttttacgtgtcatttgctaatgtgattcgtttttaaaactggacatcttgtatgtgtcctttaataaacttttttgaacgtttctatcccttttattggtctttgttttatttttgtgtggtttaaattctgagtttcgccttatattttaaacctgaccttgaataaagcaaaatgttcaccaaagtt

SEQ ID NO: 9669 - DNA, 808 bp, Diabrotica virgifera
tttggttagttaatatgtattcatataaattaacacccttactgtcctacaaagtgcttggcacattatcctggtccttcgttcaaaatttgtcaataccacaagctcattttttttattagtaactgtatgacaaaagtatcacgtgatatattagtgtctttttcaaccaaataaaacaatatcctacaagaaaacaggtatgtcaccagtcgacaagaattgtttttcggtttcttatttataacacaacacataggtatttcttgaaatctaaataactaatatacgttcaaaaatctgtatttttacataaacaaaaaactaattttcatcaaatcaatctccattgcattcgctactagcatcactcatcttcatctctccctcctgtattgattcattttgttcattagtgatatctgactctgtaataacatgaaaaaacttaataaattctacttcaagtgccatctccgcgacggaggttggcaatcatcatagctattcggactttagagacggctgctctgaaaagttcatttgatgtacatccgtaccattctctcaggttgtacagcctcgatattctacccctccctatgcttatttttccttgaatctttacctgaataatcaattggagcaagttgtccgtgatcactctccacgtgtaatacgtccgagatattcctaattttttttgttttcatggtatttaagatttctatttctttattcatgtttctcaaaacctctttgtttctgacgtgttctgtccacgatatttttagaattcttctgtaca

SEQ ID NO: 9670 - DNA, 807 bp, Diabrotica virgifera
  SmartBlast Evalue=2E-49; Info="26S proteasome non-ATPase regulatory subunit, putative n=1 Tax=Pediculus humanus corporis RepID=E0W2X9_PEDHC"
aacagacaaaaactgtgttttaactttgtttttaaaatttgaaagtcatttttaaaacattttaatttaaaagtagtatttttaagatttttcattttcacaccagttcataatggcatctggttcaatatacgacgctgcacataagggagattttgaatatgtttcccaaaagattgaagaggatccactaattataaaagcaccagactctagtaaaaggcttctaattcattgggcagttctcagcggaaatgtaaagcttgttactcatttactggaacttggatcttctgtgaacccctcggatgatacagatatgacaccattaatattagcttcatcggctggccataccgaagttgtcaaattgttattaaaaaaatgtgatgatgtcaatcataaaaatgcacagggtcattcatcacttcagtatgcagcctccaaaggttggaccgagatctgtgccctattacttgaaaaaggggctgacgtcaacattaaggatgaaagaggcagcactccactgcaccgagcagcctctaagggtctcctgtccgttctaggacttttactgtctagtagtgacattaaagtaaatgttaaggatatttatggtaatactccccttcattatgcttgtgaggaggatagaaaagaagcagctgttatgttagttgaccatagagctgatgttgaaatcaaaaatagggaggataagtcgtgtttggatttgtgtacaccagttttagctaggcttctaaaaagtaacgcaaagtgttagatgattatataagattaataaag

SEQ ID NO: 9671 - DNA, 809 bp, Diabrotica virgifera
taatactttttcataaaatatcaaataagtcgccttgtataattaaaacaacttgtaacatataaaatgttttccattctaaaatacgggtaaaaatgttctaaaaaaatttcttaaagaaagaaacctaaattttttaatattttaaaatgaaatacatatgtcaagaactcaagaactactcttcaatgctgcatgtaattgcacagggctctattcgaatccgctatgcactattgactattgtgataataatgtcaacattactacactactcccaagaaattaacgcaccacctccacctggaaaatatgtcatttttgatgtctggaatttcctaaacttgtcgtccgatttaagtgattttttgaatgtgttataaccttattctttaacaatatcgctgtaataatattaggtttgttctagcattggtttcaaacggtttgaaaccatcagcgaatagcggaccagcgcgagtagaggggatagcactggtgactggattatgttctctcactgaccaactatttgctgacggtttctgactagtttgactgttaatttattgctctaaaaccaggagatatgaaaatgaaatttggtgggttttaagaggtagttattgcgcatttttcgacatacaattaagaattttatattcaccattggtgtgcatacggctaatatgacccatatgcgcaccaatggagagcgctatatgcagcactgaagatatcttggtctatattgagagactagcataaagaataaactatatttcatatacgtaataagtcaagaagac

SEQ ID NO: 9672 - DNA, 809 bp, Diabrotica virgifera
  SmartBlast Evalue=4E-57; Info=Nascent polypeptide-associated complex subunit alpha n=1 Tax=Camponotus floridanus RepID= E1ZW25_9HYME
tgtattttataattttatttacttatatatactgaagacttaattaactgcattatgatcaactggagcaatttttattaacaaaaaaacattcaaggttacatcgtaagctccattatagcgttcactatgtcattttggttattcttgagcgcctttactgctttagatcgactaacatttgcctgagacatgaccaactctacatctttttcctctactccagattcgtcaacctcttcatcttctgattcttcagctattggtgccacagatgtggttgttgtaccagcagcattatctccagcaggactgacttctttgaatttctcagcagcagccacctgcgcttgttgtgacagatcttcaattttagcttcaccaaatacgatgtaggtgtcacttacagggtttttgtatacatctggtttgtttatgacaaaaagaatattcttcgacttcctaattgttaccctgtttactccttgtacaggtttaaggcccaatttggacatgatcttccttgctttcttctctcctctggactgtttggccttggagaccatatccatgggcaaacctgcagctgcagctccagggaatgtagctgaagcggcgcttgcagttcctgcatcttccaactcagggatgtcttcatcggagtcactgtctgttgacgattcactttgttcaggttttgtctcttggatcacggttttgtctacttcagtcatctctggcattctttataactttttcggcttttgttattgcagatcaaaccgcttttctttgacaggacaggaagg

SEQ ID NO: 9673 - DNA, 805 bp, Diabrotica virgifera
gtaaagatgaagtgtttatgttttatttttatatgtgttatattggggatatcccaaaatcagtatggagttcatggtgaaggccgcccagtaacaggaagagttacaagaagcgcttttgttgaaatgggtctacattttgttgaacttctcaagttaagaataatatctaactgcgttgcaaatggcttttatattgaggatgagttaaaggaatcatttaaagatttgggagtatgtttaaacaaagaaaaattgtatgtatctccaagagaagattttcttaggaatcttaaagaatgcagcgttgaaccaattaaattagtaaaatcatgtttaacaagggaacaaagttattttcccgatttcctgtataatatggctaaagctcaaattgacttaatatacgataatcgtgacgttatatcgatttatgttcctgtatgcagaaaaatgtttgaaaacccggaaatcaaacgaaattatctgaactgcctaacaaaatctaataagaatcataacagttctacagaaattcctccatctgttgaaacttattgcgagcgatatctgccgagaacccattgcctcacagacattttttataatgaatgttcacacattccaaaacttaggcattacgcagatgaaagaacaaaggctcttcagtatccttgcagtcaaacatatgaatagtttcacaatttttattacagttattttttcacttaaaacgtctacccttctagatgctatgttaattaaaattactttatacttatttgcaaagcaataataataactt

SEQ ID NO: 9674 - DNA, 807 bp, Diabrotica virgifera
  SmartBlast Evalue=1E-109; Info="Splicing factor 3B subunit, putative n=1 Tax=Pediculus humanus corporis RepID=E0VUC3_PEDHC"
aatagtatcataatccaaaactgaagtacatgtaatccatcgaggatgtgtatcatctgcaaatattatcaattgattttctgctctcttataccggaccataaaaacagattcttgaacatcggaaacgaaaatccttttgcctatagcttgaatattaacgatggtgttcgggatatgtttgttttcacattttctcaacaatttcttttttccccaaatcatataatctcaacatctttccgacaccaaccaacaaccttccattataaccacaaagagcatttggaacctcatcgactagtgtcctatgtatcaattcaaactcttttcctgaaggatccaccttgtatgtgtccaaatatcccatattacactgtcttggtattaattgaaggtctttggcaataccaagaatcaggaaccactgatgttcaggctgaccatggaactttagcaacgctaaagacattgcagcttcgttctgttctaatctgatcaaattgtaagtggtaccctgaacaggatccataacccgtaaggttgatgcccacataccatggccagctttaggtgctgagaatatactttctggtagatcttcatttaaaaacgcttcagccatttctttggcaagctcttgctcatcttcacctgcagcttctctcatttcttcggccatctgtaaacggcgttgtttctttgtttcttcagtgtaagcgttgtgttcagtttctaggatcattaagttactggattctggatggattagaaactttctaggagtgtactccaaaggaaatgata

SEQ ID NO: 9675 - DNA, 805 bp, Diabrotica virgifera
  SmartBlast Evalue=7E-14; Info=Caskin-1 n=2 Tax=Formicidae RepID= E2BHT9_9HYME
cgtagaggaacaagagcttatcaaaacgttggcgttacagcacagaaatggctctgatgcaagttttaagtcgagttccagcacagaatctgattctttgccgttcgccaacgagaacgccggcaccataagaacgagagcaggagccggcggtagacaagccgaattctcgtctccgaaaccgacacgttccggcctgcccccgcatccgtccccaacgcctaaccgacaacagccgaacgttcgaacccaaagagcggagccggctgatgtcttgaatgatataggaaatatgttagcgaatctcaccgatgagttagatgccatgttagaagaagaaaaaagcagcagtaagttttgtttgtaagttatataagactgaacatcaaatttgttttaaaaatttgttaggttattttcggcaactagaatttctctcttaaagtttatcaatatacaatctacaataattcaatatttactcattctattcctagtgtgaatttttggctgggtttaacattagtctcaagaacaaatcagtagcaagccacttgtgcgcactttgacttattctttttatgtcaaatgtcaaataaatgtctcgttttatgccaaatgttacatatcatgtgacatttgttgacattttgacataaaacgtggcatttatgtgacaattgacatgaaacgtgacacttgacataacacgtgacattggacataaaacgtgacatttgacataaaagcggaggtcaaagtgcgctaagtggcttatttactactcagatatttatattagatt

SEQ ID NO: 9676 - DNA, 808 bp, Diabrotica virgifera
  SmartBlast Evalue=1E-122; Info=Titin n=2 Tax=Culicini RepID= B0WJM7_CULQU
aaccttacaaagcgaccagatatagatgaacctgttactagacagagaccagtattcacacaacctcttcaaaacattgactttatcaaggagggtcaaacagcccactttgaatgcagacttattcctgttggtgacccaactcttaaagtggagtggttcagaaatgagaaaccactggaagatagctctcgtattaccaaaatacacgattttggtttcgtttctttggatatttctcatgttagagccgaagacgaaggcgtttacatttgcagagctactaatccacttggagaagctgttacgactgcatctatgaaaattagaactgaagccagcatcctattggaaacccaacatcccgaagctcagagaagaattgctcagcttgaacaacccttggcttccaggccagatgagcctgatcgtctattcgaaaaaccaatatttacacaactccttactggaccaactgaactttgggaaggccagcatgctcactttgaagctagagtcgtaccagttggtgatcctgatttgaaattcgagtggtatgttaatggagtagaactaaaacttggttcaagatttaaagtaacccacgacttcggatttgttacattggatatcatgtctaccgttaaagaggattcaggagtatacatgtgtaaagctatcaacaaatcaggcgaggctgtttcttctatatctatgaaagttaagcctaaatccagtattgttggtgaaccattgcaacctgatgcctggcagaagattcaacttaaagaagctgaaatgaacaaag

SEQ ID NO: 9677 - DNA, 807 bp, Diabrotica virgifera
  SmartBlast Evalue=3E-85; Info="Muscle-specific protein, putative n=1 Tax=Pediculus humanus corporis RepID=E0VLI9_PEDHC"
cgaaatttagtaaattatattataatgtcaatataaattcttaatacattcagataagtttggtagtcaaatcaggtaaacattttatttgtataatcaaattattgtaaatttcaaacaagttattttataggtacataacaactatttttatagattcaatatgtctcttcgaatgtttgtttattttcccaaaatgatttttctagaagcaccaaagttctgcccagcttgagtggcacctctgttttggccagcttggagtccaataatagcttcaccagctcttaattgttcgtcgctgaagtctctcctgttttcttcagatggtctgggtcccaagaaaggaccgcgccattcagggtgtttgtaacaggtgcgacctagagcaaaaatggtagttgtgactaaaacgatgtttttcctgtcccacaggtcagttgtttggaaaagatctacatcgggaacaccgtatttcacacaagctttttggaattggttcaagttatccatcattttatagtctccaccagatgtgttgattttttggatgattccaggtgccaaacggttcatcaatgtgcaaaggagaataccgtccctaaggcaatcttcgtatggaactcctggaggaaacctcattcctgtgacagcttctatccatgcttgagcttcgcgttcttgttctggatcacgctttccggctacttgccacagaggtcttgaagggcctggcattttttctggatatttaattaaacactgtcacctggcactaccggttaatattcaggaatacaatcccaa

SEQ ID NO: 9678 - DNA, 807 bp, Diabrotica virgifera
  SmartBlast Evalue=4E-65; Info=E3 ubiquitin-protein ligase MARCH6 n=2 Tax=Formicidae RepID=E2BZ79_9HYME
ttacaagttatattacccgctttgttggaacaatcacacactagaatatggttgaaaggtttggttcgcaattggtgccgtcttgtagcttggcttttgaatatacattcatatttattaggtgacaatgataaaaaagagaatcaagaggaggatcagaatgatgctgaccagcagccaaatcaacctgaagttggtgcagggttaggggcggtccatcaagctcttcttatgatggaacctcccacgggatttcaaccctacgtacgtccgtcttttttcataacaagactagtaggcctactgattagcatctgcgtgtcattagtactatctagtctggtagcactgacagttccagtctggctaggcagaagtgtaatgtctctttggctcgtcggagctcctcctccagctccccagatctccaccactgatgcacaaacagaagttaaagtacatgaactgtacacagctgcttgcgggttgtacatgtgttggttaactgcaagagccttaagtttagttcttggttggttaccacaaggtagagcagccatggtagaaagacttaagcaatggtgtattctaggattaaagactattttagctagtactattttactaggggttataccacttctatttggattgctcttagaactagttgttattatacctctcagggtacccatttatcagactcccattttatttatttggcaagattgggcattgggcgtgttatatacaaaaatagcttgtgcgattactatgatggggccagactggttcttgagagcggcc

SEQ ID NO: 9679 - DNA, 808 bp, Diabrotica virgifera
  SmartBlast Evalue=1E-100; Info=Ferritin light chain 1 n=17 Tax= Murinae RepID=FRIL1_MOUSE
gtgtttgaacggaacagacccggggattcccactgtactcgcttccagccgcctttacaagtctctccagtcgcagcctccgggaccatctcctcgctgccttcagctcctaggaccagtctgcaccgtctcttcgcggttagctcctactccggatcagccatgacctctcagattcgtcagaattattccaccgaggtggaagctgccgtgaaccgcctggtcaacttgcacctgcgggcctcctacacctacctctctctgggcttcttttttgatcgggatgacgtggctctggagggcgtaggccacttcttccgcgaattggccgaggagaagcgcgagggcgcggagcgtctcctcgagtttcagaacgatcgcgggggccgtgcactcttccaggatgtgcagaagccatctcaagatgaatggggtaaaacccaggaggccatggaagctgccttggccatggagaagaacctgaatcaggccctcttggatctgcatgccctgggttctgcccgcgtggaccctcatctctgtgacttcctggaaagccactatctggataaggaggtgaaactcatcaagaagatgggcaaccatctgaccaacctccgcagggtggcggggccacaaccagcgcagactggcgcgccccaggggtctctgggcgagtatctctttgagcgcctcactctcaagcacgactaggaggcctctgtaccttccaaggggctcccccctctgctctgcaccagcccgccctgggacctccacctgaatgaacctctcaagccactaggca

SEQ ID NO: 9680 - DNA, 808 bp, Diabrotica virgifera
tttaaacttaactacggagtgtggacaattatttagttcttttaatgggtttaagaacattttaaaacagtacgaaaaagataagagactataaattaatatatattttttttagttataaatgaaatagtatgtatgaccgtaaaagattaaaataaaaagaagacctaaagctttcacaataataattaacttgttctgaagctattatccttgtggcatttttgtaatcaactgttctaaatggagaactaagccacaatttaactaaaaaattgattttattaacgtttcgacgtctaaaccggatgtcgttgtcaaaatacaaaatattattaaattaaacaaaaatgttgttgcttagtaaaaaatgtttctaataatttatttaatctgactaatttttgtattttgacaatgacatccgatttggacgtctaaacgttgataaaatatttttttagttaaattgtggcttattttgcatttagaatagttgattataataattcacttacgtataaaaattattttaacaatattttgtacctacatgtcatgtcaactaaatacatataattattttgctaacctaaatatatacttttatatatacattgatttattacaattaagtttgaaacatctgaatagttctgcttcccttcccttaacaaatatttttctatcaaacaaacactaaacatatcaaaatagcatgtaccaaaatatatagtcactgcgcaagctaaataatgacgtcactggcttgatgaagtttaattcgcgtctacctaacttttttatt

SEQ ID NO: 9681 - DNA, 805 bp, Diabrotica virgifera
  SmartBlast Evalue=2E-50; Info=Phosphatidylinositol-binding clathrin assembly protein n=1 Tax=Aedes aegypti RepID=Q16HY5_ AEDAE
accgtcaatatttgacggttgaagaacccctcctaaggcatcaaagttggtcccttttgattccgaggctccaaaacagaagcaaattatttcagtcacaacaacgaagcgttcggcatgcccgaagtatttcctggactcagtacgctaaaagcatttccatttgccatccaaatattgttctgctgaggtatttgaggtgcaaaggcatttgcagcatttgcattggaagggctgaaggcgtctgaaaaaggatttgatagttgcagcaaatcgtccgatgctttcaggttaggcggtgtctgttgctcatccgcaaatagatcgaatgacggagaacttacgaactgagatgaagagctactgttggatgctgacgatggagtgttgttcaagaaaggattgttgattgtggttgttggtgaagataccttagatttaaattggttgatcgcagcttcttcttcggccagaatttgtagtttcatctgttcgtctattccattggcatcgaatttggcacttgacactacatttccaaaagcgttactggttgtggagagagccgttactccagatttgatgtttttctggttactggcattacttgattgattagggcctgttggttttttgccttccatataatttaaatgttgttccaaagcatctagtaaactacttggcgcttttgttaaatctggtatgtcgcctttatcaattcctacattctctgcaactttcaaaaattctgctaccctatccattctaactaaaaatctcttataaatatctaaagcttctc

SEQ ID NO: 9682 - DNA, 802 bp, Diabrotica virgifera
  misc_feature (33)..(33): n is a, c, g, or t
tgaaacagtagcggtgcaatgtgtccaaataantattctaactatactaaatttcataagccaatgcagtgcatgtaaacaacgattttcgttgtttaagatgttcaaaatttatgtactcgttccatagcaacagtatattattaaaattactttatcacttttttctctttcctcgattattagctttttattgtatagtatataaattattgtaatcactgaatatatagataatgagaagataatcctattaattaaattaatgaataatttaagcgattatacaagtaactgttatccaaaaatatttaaaaactgaacgaaatggcaatctttatgttgctgatgacgacatcgctatcaactaatgtttatatctcctgcatagcttatgtgaataaacggtaatacttaacagtaaataaggcttcagagattccccgctgaattaatttccatattctgatcgcctctgagggtttgatcggtcggatgagtccgttaatttgtggagaaaataaatcattccgtggatatcactataaataacgtttgctgtaattatacttttagctttaccaactttataaggaaacacccctgccagacttcattacaatacaaagattacaatgggccggacatgtgacaagaatgggagaagatagactaccaaaaagagcacagtgcgctagaatgcagggaaagagaccggttggaaagccaagaaagcgctgggaaaacacagtaagcagcgacgcacaagcccttttagggccgtgtatggagaagagcagcc

SEQ ID NO: 9683 - DNA, 807 bp, Diabrotica virgifera
atcagggtcggctgcgggaaacatataggttattataacagatgtcagtaccacacagaaaatttggtttcggcctggaggggatctgtcacgagaaaaatcttatttctctggactaaataaaatattaacattgcaatagcaatgaatactcgcccatcactttctttgcaaccttgttaccagacgtaattagagatcctaagtatgttaagatttttacccccttaatgttcctcctattattagattttgtagctgccatatttctacgtttttacttgcaggcattattttaagcagattgattttaagggtttaggcgcaaatgtcgcctgtcacaattttcaatgtgttttaaatgtattcattatttttttaactctaagaaaactaataagtatttttgaaaaatttgaacacagaatgaaggattgcgttattaccgagagccaaaagtacctgaaaacttctatattgtttattttaattagatacaggagtggaacaagaagagaaaatttagagtgacctttaatttcaaatatatcatccaaaagaaaatttttggttattctaagggactttcggcactctctaataatgcagtccttctttctgcgtttgaagtttttcaaaatatttatcagttttctcaggaatcgaatataatgaatacatttaaaacacagtgaacattttgacaggcgtcattttgcgcctatgctgttaagctattttctgcatcctgttctattttaattgaatgcctcatcattcctcttcatttcatttctcgtcatcatc

SEQ ID NO: 9684 - DNA, 807 bp, Diabrotica virgifera
  SmartBlast Evalue=4E-65; Info=Succinic semialdehyde dehydrogenase n=2 Tax=Ctenocephalides felis RepID=B0JFD6_CTEFE
ggggcgttttgtctattgctggtaatgacgtttatgacaccttttggcattcctgcttcttctgcaagctgcgcaagtgctaaggccgtcaatggggtgtcttctgctggttttatcacaactgtacatccaactgctagagctggactcgcttttcttgtgatcattgcgtgggggaaattccatggtgttatcagtgcagctacaccaataggatagtgctcaattaaaaactttttcgatggattggaacttccaatgatctctcctcgaacattcctagcttgctcagaaaaccactcaacaaaagcattcccatagttcacttctcctagggcttcagcaagaggcttgccagactccgcagtcatgatcttagcaagtctatcttgattcttaactaataaattgtaccagtttcttagcaaggaagatcgttctttagctgtagtgttttccatgattggaacgcattggaagcagcctcaatggcttgttgtgcgtcaaccacatccatatctggaaccctatcaataacgctgccatccactggattaataacttcaaacgttttgttacttactgcagaaacccattctccatttatgtatgttttaccacttagatgcatttgtctcgatattaagtgaaatctcactatgtcacgcactttaactctttgaaataacatgtttatataatcttctattcacgtgcttttaattgagcaatgaatatttaacataaatgtaaaaaataagtaacaaaatgactaagaactaagcaggatgcacttgcagtctcgac

SEQ ID NO: 9685 - DNA, 804 bp, Diabrotica virgifera
  SmartBlast Evalue=2E-72; Info=Histone chaperone asf1 n=3 Tax= Aculeata RepID=E2AKG5_9HYME
tggcgggtaaacaattttgacgctggtgcacagatttttttaaggtatttttgaagaaggcgttttaataaaaactcgtattttatattttttataacatttttgaaagttgggtgtgtattaattaatcagtgcttctataaaataatggctaaggtccaattgtgtaacataaccgtgatggacaatcctagtcctttcttgaacccatttcagttcgaaataacttttgaatgtatagaagaacttagagaagatttggaatggaaaatgatatatgtaggctcagctgaaagtgaagactatgatcaaactttagactcagtttttgtaggacctatacctgaaggcaaacacatgttcgtctttcaagcggatcctccaaatgtctcacgtattccagaaaatgatgctcttggtgttacagttgtactattaacgtgttcttatagaagtcaggagttcattcgtgtaggatattttattaataatgaatatactgatccagaacttaaagaaaatttacctagtcctccacaatttgataaggtaacccgaaatattctagcatccgaaccaagagttacccgctttaaaatcaactgggaagaaaccaaccccacagaaaataacacaaactctgaccaaagtggagcatcagcacccacgacatcagaagctggaccctctgctcctgtcgaagtacctgcttttaatgaaaattccaattcgtgggctaccatggaatgttcataatattgttgatagttaaataaattttcagcttttccgtactttacgtta

SEQ ID NO: 9686 - DNA, 808 bp, Diabrotica virgifera
  SmartBlast Evalue=1E-64; Info=Myosin light chain 1 protein n=2 Tax=Bombyx RepID=C0LZ19_BOMMA
agtaagtaatttttttattctataccaaataatacttataataaaactgtgtaaacaataatacgaccaaaacggtcaacactgaaaagttttcagtctatacacctgacattttcaaaaatgccgtcaaattgtaaatattttattaacttaaagaataatgactacaacataatatgtcaaaccggttttagtaagagggtataaaattggaatggagttgcttatacaaaatttataaaaaaagtgattaaatgcgatattttaaattaaatttatataatttataaaatgtggatgacagctgcattatataacttaaccggacataatcgctttgacgaaatcttcataatttacatttccgtgagagtcttcgtggcccataagcaattgttcaacctcatcatcgccaagtttttctcctaatgatgtcagaaggtgtcgaagttccgcggaactgatgtaaccatttccgtctttatcaaaatgacgtaatccttcgatgaaatcctcggcggtgtcagcgctccgggtttttgaaatttgctgataaataggaagaaaaacttcgaatgagactcgctcatcaggtttgtgttgttgggtgtatttctttacatcagattctgtgggattctgtcctaaagctcttaaagcatctccaatttgggcaacatgaatttttccatcaccccgattgtcgaacagttgaaaggcctcttggaattcggccatctgatcttcagaataatttgccatattagtagtttgattactcaactgtcaaaaataaaattcaaatgac

SEQ ID NO: 9687 - DNA, 787 bp, Diabrotica virgifera
ttttgtatttgtcactgtcacatctttgattggattattggatattggatttatttttatattttggatatttggatctaagttggttatgtatgtcctgttttattcattaaaaaggatcctaaataaaagtttattctcagatacagattatgcatggtttgacccaaatcaatatgaaacaaggacatttattgaagctataaataattttaaactgttaattacaagaatcacatagacattctttataattattaatttagacatttttgtgtagaaataaatatttttagtaggtatagatatataagatgtaatttcaattaatttgaatgcacaaatatgcttgtgaaattgtggaaaagcttaggatttgttaaaattctggattaaaaagtacagttcaattcaacagattaacataatatatgtatggcattaacaatataaacaggttaatacaataaaacaaaggtttttggaattttaatcctttattatttagatatagggcctgtactttatgtcccggttaaacggccattagctaaccgggtttaatcaggacagaaatgtatgcatagcatagacataaacacaattgtacttattattatgattaggagtgcgaaattggaaaaccaaggtgagggataggaagctgattctggaacaggtcaagacccaccatgggttgcggagccagtgatgatgatattatgattatacatgatattacaacgcaagaggcccaaagaggtacttttctgtcccgattagctaa

SEQ ID NO: 9688 - DNA, 807 bp, Diabrotica virgifera
gggcatgttcatctcggggaccaatttatgtgttcaagtaagatagaataagaatagtgggtcgaatctaagtattaccatttattttatgtaaatttttgatgaaaatgttataataattcttttctaattttaaaattacagccaaaaagtatttcaatattagaatcaataattttaaacataatattcatagacgaaaactgtaaataactattcatttaacatgatgtttccttcattatatataaatttcattttgtgaataatatcaaacgtagtacgctcaacagtttcacacattttttccgaagtcttaacatcaatctctgaggcagtccctttcgcaacatccactagcagttgttcatacattttagtcatttcttccaacaccatatcagccattaccttgatggtttcggtgtttttcttcacacgatccattttgttgttttccatggttttaacgaattcgccgaagtcttgcatttttagtttgaagttgtctattttattattaagcttctgaattgtaatttgaggttcttcttcgatttcttccactgtgggggttgttactttgactaattgctcaccttccattttgttttgttaatgtctgtatgactgtatgggccaacaactgctctataaatcttccacaaattattagtagctgcgtataatattctgtattacagtttattaatatatacttgaaatattatctctgattatttgaaaatatcaaattcacaacacaacgaaatttggatatcacaactatgaatcattccacttttg

SEQ ID NO: 9689 - DNA, 804 bp, Diabrotica virgifera
  SmartBlast Evalue=5E-78; Info=mRNA-capping enzyme n=1 Tax= Harpegnathos saltator RepID=E2BXL6_9HYME
acttacacatcttttgcaccattctttgcaattcggttgcttttcctctacaaagtgggtaacgttaggtactccctccataaatacggcttccttgaagcgaccctttttagcttttggtgaagtatcatcattatttgaagaagttgaagctactcgttttcttgtatcttcagtaaaatcatcgaaatcgtcaaggccattcccttgtccatcgtcactttctgtacaccaatcaggaagagatggtggaggtggagcatcactgacatcatcatatcttgcatataattcttgtatatagtcgcctttatagatgcctacaggtcttgactcggcaaacaacgttaaggctctcccaaggtcacaatccatcctctcaatcaaataagaaacaataaggaagccagttctattgaatccatgtgtacagtgaacagcaatactttctaatggttgataagtgataaattgtgtgacaattttaataaatgtagaagtttgttcaggtgatggagtttctccatgacccctacactgtaatttcacatatttacatccatattcctcaatatctgctttgttgtagaatctagaagtgtttgttaaatcaatccataatccaaatttaatctttttagatttggctatatcaaacaccatttttgggtgaaatcggttctcgggtggtacttggtcgtcaaaatccgaactcaatggtgtttttagagccataaatttatccgcaatgagattttctgatttcctaggacaatgcagccatctgggaggtacaggacccgg

SEQ ID NO: 9690 - DNA, 807 bp, Diabrotica virgifera
  SmartBlast Evalue=2E-44; Info=Cytochrome c oxidase polypeptide IV n=1 Tax=Bombyx mori RepID=Q1HQ98_BOMMO
aaagaaaaaaatctttattcatacttagcaatctatatcaacatcaacactaaacattgtatcattatatcacggaaaggtataaataaggttctagatgattatattactaatatttattaaaaagaaaggatagctagtggctgtcaaacactagcaatccttttacatgtaatgtatatataaacctttaaattatgtctacttcttccagtcatccttttcgtagtcccatttagaagcaagaccttgcacaggatttacttgaagatcaatcatacgtctcaattgggcttctctgtgctccttgtcgaaagtaataggtagagggctgtacacaaatcctttaaagaaatagaagatccaaaaagctccagatactaatactaaacccaatccaacgactgacttccattctcctgttggggctttaaattcagcaaaagtttggcagaacgaagctctgtataaagctttcttttcttccatacttaaatttttccaatcacctttctccttttctctcaaagcatttgtgtcggctgagggttctctccacctaatggctggcattgggaaatctgccctatctgcataattaggttctccattgtatccaaaacctactatttcccttttgccaattaaagtgcgggcataactgctcatagcagcagcttgtccagtagtttttggaacatttctgattgctcttgcagtaagagcaaacaaagtggatgccatgttgatctccttaattcactaaattatcctcaataatcaagatggtgccgacttaaatgacag

SEQ ID NO: 9691 - DNA, 803 bp, Diabrotica virgifera
gagatgcttttattttggctctcaaactagtctgaagcatagtgatcgtagtagatttcatggagaagaggctcttgtacacttttttttattaatttattcctaaatctcatgttttccaatgttttttcgtcaaaacctactacatcgctaatctcaaacaatttttgacatttatattgtatctttaacgttaatcaccatgtgttatgagagattttgttgaaacattgattggctacgaggaaaatttcacatgaccaaaagttaccaagaagaaacttgagtgttgagagaaatatgtcctgtagacctacaatgggccaatgcctttatatgcaatatgttttgttgtatttgatactaaaagttgtgcattttacctttaatatagtaagccagctggtgaatacagataaatactacatagcagcaattttttgtgtaaacttttaatacatatgtaacacaaataaatatgtacttttttctaccctctgtcgacacaaaaaattaaaaaaacttttaattcaaaattttgatatataaaaaacatgttaaaatatacattttgtatttagtttgcattttatattgtttctacaatctaaattaaacgctgatcttttttttgcctttgatcaggaatatcagaatctgattaattctatcagatttatgaaccgaatttacatcactacttactatacactttaacaaacacaacactgctcattttaatttaatttaaccttcgagcgggcgcgttgtcgtaaattttacgacgaaacacgtgatctgac

SEQ ID NO: 9692 - DNA, 805 bp, Diabrotica virgifera
aacggtgtagtcatgtgcgtcgttaacgctatagacacatctccttgctctacaaacaaacaacttaagtgtactacctcaacgatatcatgtgagggcaattcttcaccagaatgtagacagaaatcatcgacatctgtgtccataccttgcgtatctactgctaccattccagcaggagtcggagtcagagataatagtctggttgtaacagaccctaatgattcttcacttaaaacattctgtgttacggtcctagccacaccaactaacaatgaaataaaatctggtagaaaagaccaatcagtgacacagattaatgaaaacttccattatactacaaatcacactggcgttgacttattaggatattacttgggccacaaattgcaaaatttagttcaacctagtttttcttttctaaattatgaccaaaattacaacttcgttgaaaagttcgatcactacaatgtattccaatattatcacgacgctaacgtcttgcccaaacaagtagaaattaaaccagatcagatcatgagctgcgctggagatagtggtacattctgtccgcaatacatggtatctttgtgtctgaatgacggtgcagttatttgcgtaactgacaaaacatctacagcgttcagtaatgaacttcaaactgactatacaaacagctctataccatgcgatcaacttaaatttccgttttgtgtgcagaatcctaatgcagctgttcctgttcaaatcccatgtttttctacagccaaggtttatgcaaatgtcagcattatggtaagaagtt

SEQ ID NO: 9693 - DNA, 805 bp, Diabrotica virgifera
gacacgaaggtcaagcttcacgtgaatgtctggaaatatcgtcttgtctcttaatatcttatcagaagccttcgtccatccgtgaaatacataactgcatttagcgacagctgtagaggccaaaagtaagtcatttggcagacaaattttggttctacattgtcagaaacactaatattcaaacagaagatcattgcttttttataagtggccattcttataatgagtgtgtccaagactttgatttgatagttaaataagaaaagaacctatatgtacctcaacactggatggagctggttacttccacaagtaacacacaggtaatacacagtatgcaattgttacattttcaacaggacaaacctttaaccctgttttacaataaaacagctggaggtagcatatataagagtttagtgatctatctaacccgctcaagctggcaaaaactctgccgttctactcaactacgtacctccaatttaccatgagtttttcataaatctgcgacatgatggtcaacaacattgagaactagcaaactttgaagaagcagatgtcgaaaatgacaatgtggatcaccattacgatactgttgtcgatgaatcagaaatcaaaaataattatatattagtgctatggtgaagaataaacaacacatacaacatggtgtacaaaagcgttatgatatttttacattttttgcctttatgttgcatttcttagaaataaaagggtacaagtgctacttagtatcctaaaaatagctccaaaatgagtagccaataaaattatgattttt

SEQ ID NO: 9694 - DNA, 808 bp, Diabrotica virgifera
tcccttttgtaaatgaagtttttatgtttaaatgattaattcaagaatatggtcaatcatcattgattagcccgaagtttatacataattaatttggtccttcgagccggataaagaaaatttttgcagtaaataaggtttacacgaggttacgacattcagtgcgaaggaagccgatgtccatttgaaaatttataatttattgacgaatgaaattattagggattgtatctatcctttggatttcataattaatgtaagacatttagtcaacatttaaaaggttttaacctctgtattttgggttgctcagcatgtcaagcctgtaacactgatgatgctctttttagagaacgaaaacgttgtgtgatatgtgtggcccttttaaggctttttaaataaatacatataccttttataaagaaaaaatttttaagaaataagataattttaaattaataagaaataattttacatgctaaagtacgttccagaactgaaagaagaatcatttctaatatacattttaaaatatttttaaatgtaacaacatgcacatattgagcttgtctatttaaagattccgattgagcgataaaattactatactaaaatcacaataaagatgcactcggaataaacaaaccaagacacattaagggccggttgttaaaacgctaatcaaaaatggaatcaactgatcattatcaaatatttaattattgtcaccaactgtcaatggcaactttgattggtttgctgaaaacataattgattacaattatgagattaattgattagttatgtt

SEQ ID NO: 9695 - DNA, 805 bp, Diabrotica virgifera
atttgtgtatgttactttacaccctagacactttttgcctgtttttattaaccatacacatgtacgaataggaacacaatagtttttaaacagatgttcccattcaccccactttgtggtgaataggaacaccaggttttgattattttgtgattaaagtattaactttttaatttattaacatctaaatatgaaaagaggaaggtaagacccaaataacaatgcataaattttatgtttgcaatatgtgttagtgacattttttttttcagttgaaagttgaaaaccgttcctattcaccccattttacggtagccaatgtattgtagtttttatgtatttatttcatacttcatcaagtttttatatcgtctctactaaaatgtgtatcaaagttaaggggaaaatcattcgagtattgtagcgatctctggtcgaggctgaaaacctatcaggccataccaaaaaataaacaatatttttcaaaaaagtgcattagacgatatatgtacaatggtagctaaaataatattataaaaagtagagaaaacatctaaacatagatcaataccgtagagaaaacatctaaacatagatcaataccgttgactaaacagctatattttgtgtcaaaatctaaatgtaactaatattagagtaagtatgtttgaccattgtttcaaagattcgtttggtatgttgtttatatttgtttttaggttaagttttgtcgttatttatcgtaacctaaccttttggtactttggtatatcatgaatgtaatgctatgtcataaataaataat

SEQ ID NO: 9696 - DNA, 807 bp, Diabrotica virgifera
  SmartBlast Evalue=7E-75; Info=CG5023 n=8 Tax=Drosophila RepID= Q9I7J0_DROME
gaatctaaacgtatattgaaaaaattaacaataatattaagaaaaagttattttagaaaaagttttttacatacgtttaaactttaattacaaaaacaatacataaataaataccccatttacaccgaatatattaatttaaactcgaaagagctaggtagcatgctgattgttatgatctctatgatttgattccaaatactgctaacactcttcggagttgggtctctagaaaattttacatatggcgagtgtttccgaaacctccatgtccagattgagaagcacccttgttgaagcccatttggaggttgagttgtccttcgtgcgccctgagttgttcctcggtaaaagtcctcttgttttcttcggccatcttaggtcccagtgtagggccattccattctgggtgtttttgggtgatacgacccaaggagaacaatgaaatagcaacctgtgcgatattccttctttcgaagagatcagcagtctggaaaatttcttcttccggtagaccgtattttttggcagcagcttgaaacctttggatgttttccatcagctgaaagttggtccctttggattggattttcttgatacatccaggtgtaagcttgttcataaggttgcacaatacgacgccatctttaagtatatcttcgaattctcctttgggaactggttcacccaggcaaccgaagatccagttgaggacttcggcttcgacatccttgttacgtttagccatgactgctgagctcgtttatatcctggcgtcgggatgctactgagacgccgattcacaag

SEQ ID NO: 9697 - DNA, 798 bp, Diabrotica virgifera
tactaatagagagtatgttatattaatatcactgaattgtgggttcataaataatttcttaacaataacatgtttactgtggttaggtatttatctaactggatatctaacaacaacttgtttacaagtggttatttatctataggagttggagtttataaaattaggatattatatttccgaacaaattttacaccaaaagacgatagcaaagttttttaacactaactgaaatactataaacaatcttacacagaaattataataggccttttcatcaaaaattgtattcgccatttttttcgtattgttgtaaacaagcttgttaggttagtaatgcaatgtaaataacagtaaagtatctgtaaacatataattaagaaaaaaaatcttaataaagtttagttattgaaaaaataattcgaaaataaagaataaagtgcctcaattagcaagtcaattgtttactccatcgattattattatgatacctgtacgaaaaggaacaactaaggtgccgttacggagtatgtaaaaatgatacacgctataaatcatataaaagcaatacacagtattattttagaaattttcaatagccaaaaatttctttatacacaatcttgtgttataccatacctataatattttatttgtattaaatactattcagtaggtacctgtatttgtcatttttaaccgtaatagttatttatgatataagtgttaaaagaacacgtttaaggcacgcatgtatagcgagttctgcaacacgcatgtatagcgagttctgcaatt

SEQ ID NO: 9698 - DNA, 806 bp, Diabrotica virgifera
  SmartBlast Evalue=8E-57; Info=Kinesin-associated protein n=2 Tax=Culicini RepID=B0WM84_CULQU
cgccatcagacatccctactagtcagaaagaccttgccccacgtagtgctagcatgtctgaaatacctcgcagtcgcattccagaaccagttcgtccaaaatcaggaaatttctccgatagtaacataagtcaaattatggaaggaagcatttacgatgatctcaccacttccatggagggtatagacgataggaaactaacgggcgaacagaaactgaaacggttccgaactctagtcaagaaacaggagcacttgcttcgagtagctttctatttattactaaacatcgccgaagacgaggtagtagaagagaaaatgtcgaaaagaaacattgtaggtcttttagccaaagctttagaaagagaaaacgaggatttgctcattctagtcattacattccttaagaaattgtcgataatgcagtgcaacaaagaggtgatggtgggcaatatgtgcgtgatcgagaaattgccccgaatgttgaattctagtagtgccgatctcgtccatttaactttaaagcttttgtttaatctgtcgtttgacaataaagctagatataagatgatcaaagccggacttcttccaaaagttattagtcttctaagtgacgataaacatcaagaggttgttcttaagatactctaccatctgagttatgaagatgaaatcaagcatcactttgtggactgcattggactaatcatcgatatgttactattgagcgtcggaaatgaaaacgacaaaactatggtagctctttgcgtaaatctgtctacagatcagtcaaatgctcagcatatt

SEQ ID NO: 9699 - DNA, 787 bp, Diabrotica virgifera
  SmartBlast Evalue=2E-10; Info=Endonuclease-reverse transcriptase n=1 Tax=Bombyx mori RepID=D5LB38_BOMMO
cccgtgtgcgcgccagtgatgaatgtaaaattcttctttaacctctaaaggaggtcatttttaacatttgttgtagctctgcacctggttggaatcttgttagtaatattttctgttgttgttccggtttagtgttattgtattggatatttcttgataatgcattgaaaatgaaagatacgcgtcaggatgttttgtttttctgcataggggcggtgcacgatacgaaaaaaagcaagaaaataatttttaattgtggcgtactatatttttctttaaaataattgagacaaaaattcttggttgtatgtcggaagatgcgaaatagctatcttctagaactcaccaagtatcattttcatagctcaactggtcaagcaataagtaggttggcagtttgaaatgggaatttcaacacctcgtgtctcggaaacgaagcagttgctacttatttactaacaccctgtatatgtatacatctcaaaggcatctattctcttttctgtttcagagtccattgtccaactttcacagccatacagcaagacagaaaacacataacaactgatcattcggattctgagctccagactagggtttgatcttgtaaaaaatgttttcatgttcttgcgtgttttcctcacttgttcgattcttgataggatttcctcttttgggttacactggctattggcatttgctcccaaattattttatgggtacgtttacttactctattatttggtctttcttgtttctgtggcttagtagtatccattctataatc

SEQ ID NO: 9700 - DNA, 804 bp, Diabrotica virgifera
caatctttgttgacataagtcagtcgaaaaatggatcttatctgagaacattttcgagcaataattgtttaaaaattttggagagaattatcccaacagcaatgtctgtggtgacacgctttaattactatttttgctaattttaatttttaataacttttttcaaaacgaagtaatataggtcatataaaattcacatttaatatacaaaccagatgctaagaagggtccgttaagttttacgaaacgaaatgtatccgtaaccagatgtttttggtgtgttcagtttaactgaattctccataaattaattaccttatcagaccttatgtcaatgttgttctgaagctatttccttgtggcatttttatgattaattatttatatgggaaataagccacaattaaaattttttcattttaattgtggcttatgtcaataactcacttcggaaatgcattcgaagacgtttcttaaaactgcagaaatgtttaaacttttaaacgccagatctaaataatttatcgcctttctggccagatggtagaaacacaaacatattagcgtttgtggtttttttcagccacggcagtcgatacacaaccacgagtcgattcacaacctcccgtcggcagccacaccccagcgggcgtcggtatagtcaaaaacacacccttacgagatataagcaaaacacgtctttttaccgattaaaataaatatattattgaaggtttgttgtgtttaaatttattttaatttcatttaattgattccgtaaaccaccaacggaacatctcgatg

SEQ ID NO: 9701 - DNA, 805 bp, Diabrotica virgifera
  SmartBlast Evalue=3E-63; Info=CG9752 n=5 Tax=melanogaster subgroup RepID=Q9W2I2_DROME
gtaggctaggtctaagatataaacataacctataaattgtaataaacattatcctgaattttccaatatttccatttctgtacatcttatcttactactattaaaatggttttaaacccaagagagtcagcgaagttaatagcttctaaagcactaatggttaagataaatgaatatggcatagaaaagcttggtgacattttagtggaagagatcgaatctggaaaattatctccaagtaattttagtcaaacagatgttcatcccaaatccacggataaaaatgctattgattggatatttgttgtggatacattgaatttttgtttttggcactacaaatgggaagaaggctgggttgtaaatggtttaacatgttattttgccctatgtggagtcataaatcgagccgttaaacaggggatagacatcttgaatccaaaattttattctaccattactaaggaaaagttggcagaaattctcaaaagcgacaataaagtggaaattcctctgtttgatgaaagattgaaatgtttacacgaagtcgggaatgtgctgttggaaaaatttgacggatcatttgaaaatgttgtaaagaaagccaatcacagtgctaagactttgctaaatttagtagttgagaactttcagtgttttaaagacgaagcggattataatggacagagagtatcattatataaacgagctcagattttagttggtgatatatgggcttgttttgagaataaagatcttggttactttgaagatatagaagaaataacagcatttgcagattacc

SEQ ID NO: 9702 - DNA, 805 bp, Diabrotica virgifera
  SmartBlast Evalue=5E-11; Info=Endonuclease-reverse transcriptase n=1 Tax=Bombyx mori RepID=D7F170_BOMMO
tgggagatgatgaaaatgactctaattttctaggaatgaatgtacattttaataaacccttgggaaaaattgaacaattacaaagaaatctatatttcgaaatactatttctgcgaaacacaaattaattattatcctaacagccggtttccgaaaggacgatcatctcaaaaattatgtaatcgatggttaatcgttgatcaaatgcattttgagtttcaataacaccagttaaacgggagttcaataacagtcgatcatatgatttaacaaacgattaatcgttagttaacagccgatcataagtgttttgagtttccgaaacgctgattaaccaatttcgcatgtcacacggcgaccaaaaggaactgtcacctaatttgaggttattggttgattaaagggctgttaatgtttataaatagttgtttagagttattaaatagagttttttagttattatataggttaaatagttattaaataaagggtattttagtgtttacttaaaattattagtgagaagaaccaataaagaattggaagaactatatcaagagccaacgattacgacgacgatcaaagcacagagaatacgatacttggggcacatagagagaatgggaagtaaacgaatgccaaaaatggtactttcacgaagaccaatacaaaagaggaggaaaggcaggccaaggaaaagatggaaggacagtgtatatgaagacttgaagaaaagtaacattgagagatggaaagaactagcattggacagaaggagatggagagaggttgtgaaggagtgtat

SEQ ID NO: 9703 - DNA, 800 bp, Diabrotica virgifera
  SmartBlast Evalue=1E-18; Info=RNA-directed DNA polymerase from mobile element jockey n=1 Tax=Camponotus floridanus RepID= E2AVN7_9HYME
cctggttcaaaccaaatcaaaattatacatttaaaggttataatgtaattcgccaagatagatatgacgggtatgcaggtgttgcaattttaattaaaacaactataccatttcgtgaaataaatattagaaacaattttaatgagggaattttagtttgcggtgctatcgttaaatgtaacacaatagaattaagttttttatctatatatagacctccaaatattagtacatccaaaaacgattggataaatatcttctcacaaatcaaatcaccttttttaattggcggagatatgaatgctcatcactcactatggggctcactgcgtaatgatccagttggtaaccaaattgttagcagtatcgaagacctagatcttgtaattttgaataatggagaacctacatatcttcctagatatggtactcaaaaatctatgattgacatttcactctgcacagctaatatagccagtaaattcacttggtcagttttatctgacacttaggctcgaatcattttgctataactatgaatttttcaataaccaacacctcacaagaaataatttatccaaaaagcaaatggaatatcaagaaacccaattggtccttgtatttatccttaattgaaaacatgttttccaactacaataactctttcaatacttataaaaattatagttttctaatagattgcattaatgatgccgcagatagatctattcctcaatacaaaatttttaaatcctaaaaaccgatcgcctacaacatggtgggacccagaatgcgatctg

SEQ ID NO: 9704 - DNA, 797 bp, Diabrotica virgifera
  SmartBlast Evalue=9E-49; Info=Probable RNA-directed DNA polymerase from transposon X-element n=1 Tax=Drosophila melanogaster RepID=RTXE_DROME
catcattgatgaagggaatgttgaggtctgcatgaagggtttggtttgacacataccatggggctttagctaacatacgaatagtttttgactggaatgtctgctagtattttggtgttggatggtttgctacagccccacagctcgattccgtatgtccacactggtttgagtattgttttatagatggtcagtttgttttctaatgaaagttgcgatcttctgttgattagccagctcatatttttaacttttaggtcgaggtgtcgtcgtttggctgcaatatgtgatttccaagtaagtttttcgtctagatgaaggcccaggtactttacttctgtttttattggtataggtgaattatttaggtgtagttgtggacatctaattcttcgatttgtgaaatttacttgacaagacttgtttgtgttgacgtttattttccagcatttaagccagtcttctagttcattgagatgattttgcaatttgttaaatgctaatatttcgttgatgtctgatgctagtataccagtgtcatccgcaaatgttgtcattagtgtattttcgctaataggaatatcagcagtgaagatttggtaaaggaatgggccaagtacactgccttgaggtactccggattttatttggtggtagttggatagagtaccttcgtatttaacttggaagtatctgtcggacaagtatgatttaaggaggaggtagatttggtcagttagctgagtttttattttaaagagaagaccctcgtgccacactctatcaaatgcttgctg

SEQ ID NO: 9705 - DNA, 792 bp, Diabrotica virgifera
ttagtatatttgatagtattggatcttaaattcaggataattgggaatatgacattgtgaattgattttttaccaacgtcttaatgtaatctatagccaaaattaaactgaagtctacaggatgatttgtattgattgattaattttctgttatttaaaacaatattatatttatctacacaatctgccattaaaataatattctttattaacacatcattacatgcaccatgtttgttagcaatttgctgcccgttagcaatcgttagcaatttgccgccttctactaaagtggattaaaattaaccaaatattaaattgtctaaattctattttcaaaagtcttttagtgttccgaattagaattgatattgttctattttttccttgtatgtgacgggataaatgatgtgacgcgttttgaggctttttgtaactgcggcatattgccgcgggtgcgtctaatgacgtgttaatcactctgcatacagtatggtgcagatgtttggaataaattcattatttcgaaaaccagtaagaaaaatcgtgaaacgtcgatttttgtttttgaattttgattttttgacatatgtcatactagtgacgccatccattcgggaagtgatgacgtaatcgattgatttttttaaatgataataggggttgtgtgcagggcgcgtccaagaaaaataattttcaattaaattgattggcacagggagagaagtgtatgtaatttatttaattcaaaatactttctaatactgtcagaaaacagaaaaaatgtttgtt

SEQ ID NO: 9706 - DNA, 805 bp, Diabrotica virgifera
  SmartBlast Evalue=2E-35; Info=Leucine-rich transmembrane protein n=1 Tax=Aedes aegypti RepID=Q16N44_AEDAE
cttaggaatgttactattaactcagagacattagtgtatttagatttatctgacagctttttagagagtgtaccacatggtagtatgcgcgaacttaaaagcttaaatttatacggaaatatgttacgagaattaaaaaataacaaatttataaacactccaaacctcgtaacccttaatttgtctctaaatgcaattacctctatagataggaatacatttaggggtttggaatacgttaaagctatagacctgtcatttaacaaactcattgctttacctgtaggcgctttcctcgctaccaagagcttaataagattaaatgtatcccacaactatttatcttcaatagataatttgcacagcgtatcattgaatggtttagatgccagttattgcgaaattagcactgtttcacaagattcattgtccagactgccaaagctatcttacttatcattaaaaagaaattttataactacattgccagactattggacagctcaatatctccgctcattggacttaagcgactgtaggatcaaagctatcaacaataaaactttctcagaaatgtcttctttgcaagaaattgatctttccagtaatcgtctaacaacaatccactataccaattttcctcgaaatatactaataatatcaatcacagataacttatggagatgtgattgttcagtgttgaaggaaacctacgaatggttgcagcttcatggttctttcgtcgatgaactgatctgtgattctcctgaacatttagatgggcaaaattggttaatggcatgcc

SEQ ID NO: 9707 - DNA, 803 bp, Diabrotica virgifera
tgtgcagatggaatttggtaggttttgagaggtggttgttgcgcattttttggcatacaattgggaattttatattcaccattggcgtgcatacgggtaatatgaccgggtaatatgacctagagatgcatcaagtcaaactagtttgattttattcaacaaacttgacttgacttgaaaatcaaacttttgttgtaaaaaagtttgacttgacttgatttcgatatctttaggtttgacttgaaatcaaacttcttcaaacagtttgaagtttgaatatcatattggcaacttatttatttccaattctaattgagagcgtacggattttgttgtgacttatttggataggtctgaatctgtattctgctagtccgcaaattagtttgtagttcatatttagacgtccatatttggcttgtttattacattcgttttgatgtgtgtggctttgggagataatatctgaacttggatatttttcggttcagaataagtaccagaacaaattaaagaagacgaagaagaagaagaagaagaaggagaagaagaagacaaattgagtctgaaggtattttcactgcaaaaaattaagagaaacaacctgtagtcgaagcagtattaattaagaaaaataaatatactgatttatttgatgttgtggcaggtgatttcaaaacaatgaaaattgcaaagtgcatacattcttctattatgtaaaaataaagaacagcgttataaaatcacaaacagtgaactaattctttaaaaggacagcgtcatgcataactcgaccaagcgcc

SEQ ID NO: 9708 - DNA, 798 bp, Diabrotica virgifera
  SmartBlast Evalue=2E-44; Info=Endonuclease-reverse transcriptase n=1 Tax=Bombyx mori RepID=D5LB38_BOMMO
ggcagttggaaagataaatgtagatcaaggcgtgctttctcttgatggcgaagagatagaacggttaaaccattttaaataccttggcagttggttaaatgcaaattgcgactgtgatgaagagataatacaggattgaaatatcacgtaaggttttatgacctggaaaccagttttatgtaaccgaagcctgtcgatgaacattcgcaagaaggtgctaaaatgttacgtgtggtctatattattttatggttgtgaaacatggacgttaaaaaccacaatgctaaataaattagaagcattcgaattgtggtgttatcgacgaatcctaaagatatcgtgggtttcgcacacttccaatgaagatgttctccaaatgattaattcagaacttctgctcataaacatgataaagaggagaaaaacagaatacttcggccatataattagaggacctaaataccatctacttcgcattataatacagggaaaggtggagggagatggattggtcgaaaggaactttcatggttgcgtaatattagacaatggtgtggttccacggtagaagaattatttcgctcagcagccgatagagagaggtttcaggaacttgtaaacatgatgacagccaacgtctgaatacggacacggcacctgaagaagaagaagttgttaccaaaaattggggcaatgacagattgtgagaccatttctttggggcgacagtaccaaatatttaaggaccaagttactgtcaaaaagatatgttttcctttgatatcaatagcggatttc

SEQ ID NO: 9709 - DNA, 805 bp, Diabrotica virgifera
tagatacattttcaaatcaaatagaagaaaaactgatgttataggcgcagttaactgaactaaaatgctggaatggaactggcaggccatgttaccagactcagagatggaaaatggaccaagaaaattttagtatagagatctagacacgatgcttatcgtaaacgaggatttccttacaagatggtcggacaacatcaagtgcatcaagaaccactggattaattcaaagtgctcaagaccgaaagcaacagaattaactaagggagcctatgttcagcagtggactcaaaattgctaagaatgaataataatggatgatgaattgtagaatattcattctgccagttgttataaaatacctatgtgaaaaacatattaaaagtaaaggttttaaatcaggaaactatcgaacaaattacagaaataagtatactgaaagagatatgtttgtcctgaaatatttttaagattatggacagaaaaataatataccagagaaagaaaaaagttgatttcttgaattagtgaaacactacatagtgttatgtgacatacctacagattttaaacagtttttttttataatcattttgttgtaaaacgaaacaagagccgtcttatatttcagtttgttcagagagcttcagcaccctgaccggattcaatcctcattatgatatcatatcagagagtgcatatttgattatctctgtacaaattaaaattccggctgctggtatcgattcataacgaaataacatgatggtgtggatgtcgtggcgacatctgctaaagacaagcg

SEQ ID NO: 9710 - DNA, 802 bp, Diabrotica virgifera
  SmartBlast Evalue=1E-91; Info=Eukaryotic translation initiation factor 3 subunit K n=2 Tax=Formicidae RepID=E2AR48_9HYME
aaaataaaaatgtggtttatttacttaacggcatgatgccataatagcaccaacattttcaaaatctatcttctcgttgatgttcttagtcttaatgttttcatcctggttcgcaatgaaaatcaaattgccagtcatgtccttccagccatacttcttcacccatagtttaagtgtgctgtcatccacatcgccaagaagttgtgccaaatgagttctctcgatggtttggtacgttataccaacaacgtggcagacaaattttcttatggaatccacgaagccggtaatgttctggaacagttctggcatggtgtgaattcttgtccagaaaagctggaagtcacattgttccaagatgtctgccaagtatactatctggttgattggttcttgagacaactgtttatcgtaaagcagacatttgcacaagataaagtctgtgtgaggcaaatttgtaagggctttgagtaaaatttgacaagtaatatctatgttgaaactaagagggttgaattgatacaatttaagcactgctaaattggcctccaagtcatacgaattttctcgagattggacttcaacgtaacgttctagagttggtaaattgtcgggattgtacctttcaatgccttttaacattgtcccgacggtctgtttcattgcttcggccatatttataattgaaaaactatgcaagatggataaataagtcttaaatcaattagttaacctagccagccagcctactacacctttttataaaaagaaaaaagaatttaatttacagtcaacaaaacac

SEQ ID NO: 9711 - DNA, 804 bp, Diabrotica virgifera
  SmartBlast Evalue=1E-102; Info=Basket n=1 Tax=Tribolium castaneum RepID=D6WV90_TRICA
ggcgccctatagtatctggtaacgacgtaaggggtcatcatgaatgttgtacctgcggttcttgctaaaccgaagtcgagtatcttaagagtacaatctgatttcactactatgttgctgggttttaagtccctatgtataattccagcggaatgtaaatgtttaatgccacataacatctgatagagcaagtagctcatcctctcgtgatccaaatccatctgaattacttgacagaggttcgcgtccattaactccataactaggtaaacatcttggaactcctctagtgtccgctgtggcgtaaaagcgttcaataaaccgattatattcttgtggttgactagtttcatgagtttgaattccctgtatgctcttttggcatgcgtgacgttctggaacggtcgactgagcttcttaatagccacattttgttgagttgctgtgtccaatgcagcgcaaactatcccttgagctccagatccaatgggtttcaggttttggtatctctttagaatggtaaatttcgtgtcgcccacctcgacggtgtaaaattgggacaatcgtgacatcttttgtctttagccttgttcagtcaaggccattgtcatgaagaatccatatcaaatccttgtggtggacggcataaacaaaagtttgaagtaaatgttgaagatttattttacaaacacagctacacttaagtaaattattaaaactattttaattcagtcgaaaacattcataaaaacaataaaatctaacataataccggacaacatcggaaaaagttatggttcacgg

SEQ ID NO: 9712 - DNA, 804 bp, Diabrotica virgifera
  SmartBlast Evalue=2E-35; Info=Microsomal glutathione s- transferase n=1 Tax=Aedes aegypti RepID=Q16TR4_AEDAE
attgtgaattgtgaagtgtgagtgtgaagtgaattgtcaattgttataaacctgtatctggaagataatataagtgataagtgatataatagtaatagtaatagataataattgtaatttgtaatcagtgtgtaaggtacataaataatttctatcgatttaaaaagagtgtaagaacagtacgaaggtggttgccctatttgctatcctaaggcagtacaatggcgcaagcagttaattcaaattcttcttccccattatctttggacaatgaagtccttagatcactgcttttctactgctctattcttgttcttaagatgatgttgatgtcctttttaactgcttcaaagagatttaaacataaggcatatgctaatcccgaagatgccaagctagaaaatctcaagccacaagtaaatgaaaatgtggagagagttcgaagagctcacttgaacgacgttgaaaacattccactattcttcgtgattgctttgatttatactttaaccaatcctgcagtgtatttcgcaaaaacgttattttttgcatatacactggcaagaatcggacacactgttgtgtatgctgttgttccgattcctcaaccagcaagagtattgtgttggatggttggatacggcataactggatatatgggcgttgtcagtttgcttacctttaaataagcaataattgttagtaattttgtgataaaatatttctttaaaagacagatttttatagttttgtaaaagattcaaaatctaaaacataataaaggaattggttttattcttcaaa

SEQ ID NO: 9713 - DNA, 804 bp, Diabrotica virgifera
  SmartBlast Evalue=1E-114; Info=SCP-like protein n=1 Tax= Diabrotica virgifera virgifera RepID=D7EYY3_DIAVI
cttaacagtatcagaagcaacacaatggatagacgtattaagctgttttatttgcttttcgtactttacactgtggaagctcaaaccgattattgtaaattaagttgtggtaatactttacagacggtgtgtgaaagaaaaaatgtgagctgcggagctgctacagattgcaaaagtttcaaacaactaggattgagtgatgaagacagacgatacgtgttagaccttcacaacaaatacagaaataaagtggctctaggacaggaaaagacaggacctcaaccacaagcgtcgaatatgaaagctctgagttatagcaaggaactggaatatatagctcaatgccacacaaactcatgcaagtatggccacgacctatgtagaagaactcctgaatggggacatgtcggacaaaacatcgccttaaaaggaagataccatggagatattttgcctacacgagaatttatagattgggcgatgaatggtttttattccgaagttcgagactgggatccatcgtgggtttcttcatacgatgaccatggaaaagagataggccattatacaaatttagtgtgggctcgaacacgatatgttggctgcgggcttactttctacgtagatgagaataataatgatgtctattacctaacttgtaattatggagaagggggtaacatttacggatggtcagtgtacgaggtaggaccaccagcttcaaagtgtgatggtttgcccaaaaattcgaaatatccaggactatgtggacctgacaatctttagtcaactgtatacagctaa

SEQ ID NO: 9714 - DNA, 790 bp, Diabrotica virgifera
agcgattcggaaaatgttttatgttttttgttatttattaataataatttctggcacacctggaaaataaaaacatacatttgaactttgaaaaatatattagaatcgaataaaaaaaggttgatagatatgcaaaaaaaaatcgatttatgttctgcttatggggggtaaaccgctcgcctacttgccacaattagggaggctaaaataatatgtataagaatcagaactgattcagtgatgtgttgttttgaataagtttaattttttgcacgtgtttttcataacttggtaaacaaaataatgaatacttttacttgtttgttagcttttgaatgacattgaattttaatcgtttctacaaaaaaatgtagcaaaatataaccatatgtttatattgcaaatattggaatgtctacaaactattgaataagtagtgacaactgtgttgctaccccggttcctggtatacatataggagtggtcaaaattctgaaaacttgacaagaattgattttcagtaacactcatgttcttatcatgtttcatgatcgtgaattatatagtttatcaatacaattacattggtattgtattgttttatatttctccttattttatctatttctcactctatttatatttacataattatttaataaaatgtggaaacggaaaagagatttgtgaatgacttgtgagtctgtcaatgtataccacgagtgacatgatttagtcgtccaattggaagcacattcgtgcgacttcgtgtttattagtgacttcgtga

SEQ ID NO: 9715 - DNA, 798 bp, Diabrotica virgifera
agtaacattaggcaagtagagtctgtctgatgtgaacgttgcacaaaaatatatttccaggtaaaattatctttctaaaaaatttctaggttaggttaggttagataattaatatttatggcatagatatataatactccagaccgcgccctacgatctcaaaatgggtgacggttgcgacagagataaatgagcctacttggtcggcagtctctttccaattcaaggggagcatcgacgacgtcactatcctactctgtcgtcgagtattttagatggtttgacagttcgagcggatggcgacgagaaccggtcgtttgtcttcggacgtggataatcctggttcgaatcccataccaatcttttcttttccatactttttatttaatcaatattgcgtttattagacattattacatctctaaagtaaatctatgcaaagaaatatataacaaataagaaaaactgtgtaggtacctatagatttttaaaaatataaaagccaatgttatttttttaataagttaatggtagaatagtataaagtaattgttaaaatattcgtaaaaattaccaataattaatatcaacataatgtaccatcgatttattaattgaatcggtcatttcaaaaacaacaccgagtcacatattcctaattttacagaagagcaaagaaaactaactatatagtcgaaagatggatgaaatggatgacatcaaaattcagagttatattgtagttttgttcctaatgtttttactggactggtgtcgtttttgcacacaacgtttatc

SEQ ID NO: 9716 - DNA, 802 bp, Diabrotica virgifera
aacgaatatacactcatatagaagccatgtcaatttgggagaaagggtcacagttagtatacttcaaaataatcctgtagatgtcgaccacataaactttattaggtatagtataatgaaaaatttgaataagtatattgtttatagttctaagaaagattcacttattaaaaagtattgaaagttaaaataacattttactttctacaaaaaatctatggtgcatcagtaggatttgatttttaattttataaaatgcaaaaatttaaagctaaacattcccagcctcactcttccatattttggaagcagtagtagcttgttgaccagggatagtgaggtggtgaaggggaatcacatgagcacctcctggtgttacgggaccagaagtaaaagagtcaattgttcctattataggataggaaccctaaccagcgcataccaaaaaattacgttaaagtgtgcttctatatgcgtctatattggttaataaaacgtatgaaggctgtgttattcccattgtgtttgtttaagcctatgtgttaagatgcgaatatatcactttacaatacatcacattttgaggttagaaaaaaaaatcaaacatttttaacattagtaccaaattttgactggtagaggaactctcacttatacaaattccccctcccccccatttgctcaaacttttcagataagcagatactctgtatgctcatcatcttttcagtattaaactaaatacacaataaaatagataatttttaatacgttgtaaaaaacaactactagacaactagac

SEQ ID NO: 9717 - DNA, 803 bp, Diabrotica virgifera
  SmartBlast Evalue=1E-36; Info=Bitesize n=1 Tax=Culex quinquefasciatus RepID=B0W228_CULQU
ggccctcactgtcgctacccacacttccatcagaatctcttctttctgctgtgaatcccatgaaaccactcaagaaatatttttccagtcttgaggatgcaagttctgctggatctgaggtatcgttgggtgtatggacttcttcgcttcctccaagcgattccattccttcgctgtatatactacttgtttcagagaaagcatcttctctatttgaaggtagggatgatgctaacccgtccccaaggccaaaaaagaagtatttctcgagatcagtggcggaagttggtcgttcttttcgtttcgagatacattgttcgacttcactctcctcacagctctcttctacgatagtgtgaagagtgaagtcgatagcagcacgatggtaacctctcaggtcctcttcttggtcgatcgccgctgagcaggttagcgtgacttcttctccggaggacgagtccgttccggagtttgtggcgaattcgtcttcgtcctcttcatcgtggctgagattctccacccaggagtcgtcgtctgcgaggccttcttcgaatgctgacaacgtgtcgccgcccgttatgactgtcacgctttctccttcgtggttctggttatcgcatattttttggtgtcttttgtgatcggcctcttgccagttggtgtgcctcaccacaacgtcgtttccaggcaccaaggtggtggtatccgaggtgacgacactcacttgttgataatcgggggcgggctcttgcgttatcatcactagactcgtgtatcgggcagcatgccgcgctaaaccttcg

SEQ ID NO: 9718 - DNA, 795 bp, Diabrotica virgifera
gacgagaagtgttgaccatggctgctctatcatatctgttgatttatggcatgattcaccaatttgtactggatgattccatgtatacaggaaaatgtactgttgctcaatttgatgaagcatcaaaggttagagaagaatgcttgaaatctataactggtgctgcggatctagttaacactaaagaaattccagtagcatcaccaatcagttttgccaggaaacaatgtctgcttaaaactcaaataaatggttgtgtagagaaggccaatgaagtagttaaggattgttttgatgccactcaaaatcatgcgattgatgtctggaagaaaatagataccgaaatatacgactacttgtgtggtaacaagggacgtgtgtcctttacctactacagacgagagcctagctgttggagggacggtgtaggtaacgcatctgaaacttgtatcaaaaatagcttcaaatctaaagcaccactctatgatatagccaagcttcaggatcactgcagtgaattcagcgcttatgagaatgcatgacagaaaacaaacccaagagctgccctcaggatactattgctatattactaccgattataaaatctataaagaatggcatctgtaacgacattgtaccaggtgcagacgactacaaacaattctttaaacaggccctgtctgccgattttatgttttagatgacgtcaaattcaaaataaataaaggttgaaaattaaataaaaaattaattaactaatgtagagtttaatattataataataaatgtagacag

SEQ ID NO: 9719 - DNA, 794 bp, Diabrotica virgifera
cccggctaattaataatataaagtttgcacaagtctaatatgacaatacagaatggagaagtttcgtaaataataaaaatcggcattataaaactgaaatctaaaaatttaagtactactgattgtctagtcaggaagacaataaaaatatttaatttaaagaagaatttataataagagaaacagtgctttgcaaataaaataacctttaaggcttcacgaacaataaaataactggaaggaacatattcattattaatcatacattactaatcaagacgttttattcagaatacaaaatgaagaatagctgctaaccagaacaaaaacagccaaaatcgaatacttcggtcagagtatgatgaacaccgagagatatggactgctgcatctaattttacagggaaaagtagaaatcaaacggggaccagaaaggcgaaggatttcttggctggaaaatctatatacatggttcaacacaacaaccactgcaagattgcagattgccatgatgatcgccaacatccgaaacggaacggcactacaagaagaatgccttctggtataagtaaaattaatgcgggccgcccccccagcctattaaactacccaatgcgaagtcgagactaaaaaatcgagacatataatattttataaaaatattatacatcagacaaatcttcggaatactaataacataaacatcaatatacgatgaaaaataactaaggcttcatattgtttcaattcataactaaattataattaagactacaataaaactgtagtgttta

SEQ ID NO: 9720 - DNA, 802 bp, Diabrotica virgifera
atccgcggcatttcgttctttgcaattcggaaaggcccaaagcatggtacctggggaaatcggagagaagagtatatgggactactgatgaggaggaaaaaaacctccgaaaccggtatagactcttcctgcactctccgatttaaccagagtattatgcagctgctgcattttcgtgttgcaaagaaattgaaaatgtttatacatttttgaaaaataataccccttaatgaaattatacataaagaaagacggtgcaaacaattataatgttaaaacattaaaccttaatgcacgattgaaaggtgataaaagaaaatgaacgccatgaatgacattttttcgactttacagtacagccaactgcacagtaattagctaacgataattttagcattatttttaatagtatgtattatatgccaaagtttagtactcaagaaacaataatttacattatatatcattgacaaaatagaaagacttcctatttaaggagtgcagatgacaatgaaaaactttcactccttttgatatagtctttatatgtatcattaataccatagttttgtgtagtataaacaaacttataatactgtcaataagcaattattcattgtatttctatcaagaaaatgtcaaataactgaataatagtggtaagaaagttgtatcttgattaattaaatatttaaaaaaagagcattataagtaagaatacactatctttagaaatatgaaattggcttagaaatacaatgtgttttatatttctcttttttattatttattaacttctatt

SEQ ID NO: 9721 - DNA, 803 bp, Diabrotica virgifera
  SmartBlast Evalue=1E-22; Info=Helicase domino n=1 Tax= Camponotus floridanus RepID=E2AE36_9HYME
atttaatcgtttcaaatttaggtcacactccaaattgggatttcgtagcagattacgtcaatacagtctccatagcgtatcgcactcctaaacaatgccgccagaggtacgagaatcatctcatgcaacgggaagaaggtaaacagcttagtctggacaacttcatgaagaagaaaaagaacaaagccgggcccgtccaaaagtatccgatgcccacgaagtccagcaggtcgatgaggacatcccagatgtatactcaggataataactcatcgtttagtcaaataatggcggataggtttgaggcgttgaaggcgctaaagaaagtaccacctccgaagctgggggttaataatcccttattgaataagaccaaacatgccccatcgcctgttttgaatgagtgtggtatcgatattgagcatccagttttaccagttgacgtcgcagcaaggagagcagagagaatagccaaagaaaagaaaaacatgacgcccgatcagcagattgcggctcgccttcaaattatgaaaaacctcatggcgaaccaacaagccagcgtagcagcatcttcgcccacagcacaaggaacaagtggaactagcactccttccacaacggcccaggtgataacccaacagaatagttcatcggctgccaccactacggctccggttgtcagtactgcggcgactcctccaaatgctttaagaactcagcgaataatcgcttctccgatccaaacaccaacggtagtctcggtttccggcctcagtgcagctcaactacaagctgcaactcag

SEQ ID NO: 9722 - DNA, 788 bp, Diabrotica virgifera
  SmartBlast Evalue=9E-13; Info=Transposase n=2 Tax=Danio rerio RepID=A9X5I1_DANRE
aaacctctatatctttaattaatttgaaatctgaagaacagactctactaaaggagagcatgaaagagcacttatgtaagttgcaagaagggataactaaatactttccctctgtcttgagtgctaactgtgaatggttgattgcacttattgaagtgtattctgacacagttttaatatcaaaattttgagaagtagctccggatgttttttggatttcagttaagaatgaatatccagaattagcaaagaaagcagtatcccttttactgccgttttagacctcgtaattatgtgaatctgcattttctgcgatgaaaaatataaaatctagctaccggtctcgactacttgatgtggacagcgagctgagagtgtgtatgtctacaattcgtcctcggatagatatattttgcaaaatcatcagggtcaaatttcacactgattttatgtattctttctgttttgttttttacttgttatgttcttacgaaataaaaaataatatgcttaatatattcatctgtacttacctaccactagcaaaaatttgtacatataagggtgtcgcgaatctgtaaggagtacgttagtgcgtcgctgagtaaaaaaggttgagaaccgctgctttagaggaccaaggataatcatttttttcaggaatttttttctcagaacctttattgagggtgaacatggacctttttgcgtattaatatctagctcttggagagtacagaagtgtatgattttttcatttgtgcacgtgcactggtattgtggagggc

SEQ ID NO: 9723 - DNA, 797 bp, Diabrotica virgifera
  SmartBlast Evalue=2E-19; Info=Histone-lysine N- methyltransferase SETMAR (Fragment) n=12 Tax=Harpegnathos saltator RepID=E2C6C7_9HYME
ccgcccacgaaacatgttccactggtatacaccagagaccaaggaacagtcgatacagtggacgtcaccccgcgaatgttcttcgaagagggagaaaactgtccaatggaccggaaaagtgaatggtgaaaaaggccaccattttctaggattcacaaggtgtgttatatgttaacttcctggaaaagggcaaaacggtcaaagggctttactatgccgtattattgggccgattcggcgccgaattgtagaaaaacagcctcgattgatcgaattaggctacgaactgctgttctatccactgttttctccagatttgacactgtgtgacttctgtttgtttctaaacttgaaagtcgctcgcccgggcagacatttaaatcgaataacgagttcatcatcgccacggaagcctccgttgcagacctcgagaaaacgtatttttcagatgagataaagaaggtggaacatcactgggtcaagtgtattgagctacaagaagactacgttcagaaataaatcaccacttttccaaaattttcgtttttcttttgaaggtagaagtacttattagaccgccctagtatgtatcccagaggccttagttaaatgggatggcatgtaggaaacggatttatacaaaaaacactgaattttggaactaaactaaaattatgagacataagctaattgtagatgaatgactgacagatttttcacacatcatataggtatgatgtgctatatcacagtactacgagcaatatgaaagagatgtggagctaggaatcttcgac

SEQ ID NO: 9724 - DNA, 801 bp, Diabrotica virgifera
  SmartBlast Evalue=1E-55; Info=Vam6/Vps39-like protein n=2 Tax= Formicidae RepID=E2BU92_9HYME
ttctggaacctcggttccttgctgttggggcaataaatcaggaaacaatcgaataacgtcgtatgcgtcggtttctaatttcagaaattctttcatgctttcgtgaaattgtttcttgtgaaatagatcatacgccagcaatgtttggatgtgatggattttttcctgcttctcatcttcagattcctttgacatttgagtcagttttaatgcaagttggaactgttttgcagcaacaaggctttctctttgtttctctatgtctactgcttgaatactccatatttgacttatggaagccgcatacaatacgcctcgttgtgcggaaacgataaatcttactttcggtagatcactcaaagtttggactagaccattaggttccaaagtaagcacctctatagaatcgtttaaaattcctaaagcgtaaggttcgtcccaagctaacgtcattggaatatcagaccatctcaaagctttgtttctctccgtttcgcctttcacattgactagaactgtttgagtttctctacacagtgcaaatgttgtatcagaaactcgagtcatgcacggctcattcaatcgagtactgctagttggaaacagtgaagattgtttaccatttagttccaaaagggcatattctcctttgtagccaatacaaatagcttcttgacaccaaaccatagattttggtatatcatttaaatttatgtcgtccattaattgcaaaaattcattatttttaaatagtacagttgtatttttcttttccaacagcaaccgccatacgaactaaag

SEQ ID NO: 9725 - DNA, 802 bp, Diabrotica virgifera
  SmartBlast Evalue=1E-38; Info=N-acetyl transferase (Fragment) n= 1 Tax=Tribolium castaneum RepID=C0KZ08_TRICA
attactttttcagcaaatattttacattattgacattcggcttgacttcccccactttaaattaattatattacagtttatacacaaatagttgcactgctttatggggatgagcaggctttagtactacttcaccattaactttgtagttttcgtaatccattgaccatattaactcgtatcccaaagatttggccacagcagctgaaaagaaactactgcattccagaaacatcatttgggctccatgttctttggccagttgttttgattcattggtaagcttctttgcaattcctttgcctctaagagatgcatcaacagataggacaacaatagagagtattttattaacttcgggaaatctgttgaagagatcacctttcctttctgcgtactctaacattcgtaagattttttcaaattttttgtccgttacagggtattcttcgaactcatatttatctttttccaatagtgcagtaagacaaactcccacaatccgtccattatattctgcaataagatttaaacctttattaaaatactgtagtgtatacgactccaaatcgggacaaattggtcgttcttccgttactactccaagagatgcacaagtaggttcttgtttgtaaaaggatgctcgaagatgatctcgaactgcgttttcttcatcagcacgcgcccgtctaatcttgatatcttccttgtctaccataatgttacagctcttgtatattcacaatctaataaccaaccaaaaaatattttttaattgtatttgaaaatatatacctactcg

SEQ ID NO: 9726 - DNA, 803 bp, Diabrotica virgifera
ctttaagtgaaagttataacaacacattctcatggcttccaataagacaatacttctgcttatgctcctgctgtcggtaggcgtcgtttggggtagatcctccctagaagaagaccgagactatttccagccctttcttacctcttcgcagaaacgtcgagtatgcgtcgagctctgtttatcagggttgggcggccgcacctgcggagacgactgctccgacattctcccgcaggaccttcctatccagtcccgtgtgggcgacaggacagacagcgatactgagaaaaatgtcacgcgaagcgactcatgcacttttctttgtaacaataatttgggggatccattgtgtgcttgtgataacgtgaacgttagtaggaagccagaagaagtggactttttgcaaatttgcagccagttttgcataaaatacaactacagaattgctggttgccaaaaatgtaacatctacaaagaagtattttcatcatcagggtctggatctacaagattttcttcgcagagtttacaaatgaatacttatgctggagtcgattggtacgcctggtgtacgcgcatgtgcgctaaaggtgatggtggagcagcttgtgcctgcgatcgattaccaatataatgacgatatggcttgctgcagacaaatttcgaccataaattgagctagcattccaaaatatttgaagaatcgaaaaatatttttatatctcatgtaacatcatttaaatcacgatactattttttattccaacctatttacaataattaaaacatcatagataaagtct

SEQ ID NO: 9727 - DNA, 803 bp, Diabrotica virgifera
aaaaaagaatttgttatcttctaataagacgatctattgtaatttttgtgtaagaattaaaacattaataaacttaattcaagttaatagttttaataataattgacccagatttgcttactttggaattgttttatatgttgatttttgtaaataatattgtcagtatttcggacgagtcgagtggaattcagtatgttttttaatatatatagctgtagaatcgactatcgcatcaatatttttacataattatgatatatcagtatgtaataattgttgcataagcgcagaaacagacgaaccattctgcagcgctactctgtggcgccgcaaagtagcttccgatgattagccgtaaattgttatgtaaattaaacgtgccattccagacgagcgatagtggccagccactatcgtctgttgacgttaaaaaaatcgttggcgctacaaaatcgcctgtctatgccactccgtggcgccacagagtagcgctgcagagtggctcgtctgtttcggggctaagtcagagttcgtaatgttgaagcctgttgagaccgaagaattgtagtttaaagtgtataaagatgtctgacacctgcgattatttcaaacgttatatttgcagttgtcatttcgactaatttcgctggggtacccgtctagattggccaatataggtacataaaatatgttaaagtaaaaaatattttatctgtaacttaattccggatgtgcctttagagcaaatgtaatgcctttttattttacactgtttgggttgtagtaaaataaaaaaggcg

SEQ ID NO: 9728 - DNA, 802 bp, Diabrotica virgifera
gtacattcctatctcaccttatacctgggtttaatatatctcaatttaccaacggtgccaatctgcaaaatattctacaagggagaaactggacagaactattctctaatagttctaacttccaatcagctctgtcacatattccaatttttggacaaatagcgaagcaaatttcttcagcattcggaggcgatagtaatctttccagatttttcaacgccagtagctttcaaaatatattttcaaatggatttggtgatgttattaaaaattttggaaatccccaaggtggtggtaaccctataagtggaatagttgaaaatatacagaagagcgttgggaacataattccagggaattctcttaatcagtccacatctactgaagctggaagtactacagaaccaagtacaactgagaaatcatcagcaaatacagaaactaccgagcatgatggttcatcaccagcaatagaaacgactgagcatgatggttcatcaccagcaatagaaacgaccgaggccagcaaacaatcaccaagcacagaagcagcaaaatcaacccctccaccaattttagcagatccatttgctggtggtgtacccaatctatttggactgagaggaaaccttgactttaacattggcttggatggcagaaatgctcgtcaccaaaatcgacttaaacgcaatgtccaaggaacagcctaattaagtccccgatggaaatatgctgtacttgattagttttaatttatattcattaaaaagtatattgtacatacatttgtttttaataaaat

SEQ ID NO: 9729 - DNA, 792 bp, Diabrotica virgifera
  SmartBlast Evalue=4E-11; Info="Myosin light chain kinase, smooth muscle n=1 Tax=Harpegnathos saltator RepID=E2BM21_9HYME"
atttgctcttctatttcctctgaatcggaccgttgccttttcatcatcatttctcgcttttcttcgggacttaggttagatttctcaagtgattcaataatagtatcaccttttacatcatcataactcttaagactatgtcttctcgtccaaagatgctgtgctgttccaccagataatcttctttttatcgaatttactctttctaactcaagtttatctttcccggatttatcgtgtcggtctttggaatttatttgaattttcggaatctctatattcagtcctctcatctcgatggattttcgtcttctttctaactcttgttcttctgctttggctgcttcgtataatcgattcattgctctttcatgcaataactcagtggaactggcagaggttttgattggggtgaacatgggtgcttcaattccaagttctggtgctgacaacgacattggaggtggcattgagtcttcgaagtctaaatctgattgacccttttgattttcatcaggataaagaactaacataaactccgaactttctgttaagttctcgctattatctcttgataatctagactttcgtaactgttgaggacttggagagagattcttgtcgtttcgaggtggtttctcaattttaactttgtatactttgtgatcactaattttctctgtactaggactgggacttctgcttgatcttccaccagaactacttgacatattagatgccagatgttaaatagtttgaagcaggtacttcttttttaagcttaatatcagg

SEQ ID NO: 9730 - DNA, 801 bp, Diabrotica virgifera
  SmartBlast Evalue=1E-21; Info=Interferon-gamma-inducible lysosomal thiol reductase n=1 Tax=Pinctada fucata RepID=D0EFL7_ PINFU
tgaagattttgttgaaatttgaatatcctctctgaagtccatatcactcaatggtccatactacatactgcactcaagtgtttgtgtttaaaggttagactctgatcacaatcatatgcatctaatactaggaagtaacagctaaatatactataaaaagtagttttactacagtatttacaatattaaaccaagatgttcctatcaaaattggtattgtttctcgcagccactgtgtgcgtgtcatccaacgtgcaggatgctgatctgactcttaccctgttttatgaaggtttatgtcctggttgccatcaatttattctaaatcagctatacccttcatacgagaaattggcaggtagcttaaaattggacttggtaccctacggatggagtcattctcaccgtagcgctgacggaaaagtaacatttacttgtcagcacggtgacgaagaatgttatattaacagaatacatgcatgtgttcttgatcaaaatccatcctcattagattacgttacttttatatataaacatctgtctgctaccgaggaacgtcgtcgtaacgaacaagaagaattagaactggccaaacaattgatgccaagcagcgtttcctgggacaatgttaatgattgttatcatggtgaacgtggaactgaacttttattgtcatctgaggaaaggcaatcaaagcttaatcccgcattaccttgggtaccaaatctaagatttaacggagtgtatgataaagctatagaagaagaagctacaatagattttacatctaccgtttgcaag

SEQ ID NO: 9731 - DNA, 802 bp, Diabrotica virgifera
tgtattgtttggagagatgttcattattcaacgtacgtttgaatttataataagttcaataattattcataataattatttcacagattaagtactacgaattagtcaaagattgtcaatttcaaattacaatttcctgcaatactttgactaaacatgtcttccaaaccactgattaccaataataaaacattttttagggtgaacgaaccttcttttataaacattgttgtatttgtaatttaaaaaaactgctacatttaatgattttctggaagatagtgccaggttgatggtgaagtgcctcgaaacgtttatcgtttaataagagattgtattgaaatatctctaaacattttatgaggactaataataagtttagttcttcatgtattagtctaccttgcactaggttttaattataaataaagcgcgatagtgtccttatactgaacgttatagagaaaatgtactgttttttcataacgaggtagtaaaaaggcacaaaggcattttacacaacaaattctcaagtgaaaaaatttgttctgtctagaattttacaggtatgaatctgccagtctagattgcatcgtattttagaaagtatttatacaaaataatgaaatttattagttttagtattttaagagttcgtttttaagggataatgaacaccgcatatatcttatggaaaatataatgtcactcaaatgcaataaaatttacatgaatagattcgtctcgaaattacaatgatttcatatcattgcgccaactacgaattttgactaataacggc

SEQ ID NO: 9732 - DNA, 802 bp, Diabrotica virgifera
  SmartBlast Evalue=4E-45; Info=ADP-ribosylation factor GTPase- activating protein 1 n=1 Tax=Camponotus floridanus RepID=E1ZUZ6_ 9HYME
actgtttataacacaattttcgtgatatttttacctgtcttttaatctacatacttttctcattgttattgttagtacttgtggtttaaccccttttaggtttataatcttagagctaaaatcgacataattacaaatagaccgtaagcggcatatgtcactccagcgccattgtttccactgcaaaatttgttgatgtcacagtctctcactagatcttgatacttccgttgtactgtcgaccaattgcagagaccgaccgagcaatctggaaactctacagggctttcattgaggaagaagaccactctgtatttttcatcacggttacattcgtaaagtgtagcgaccaagttagctgcaaaagggctgatcgtcgaggtcttccagttccttctggattgttggaagaagttttctgaattcaaaggggtgtagtctttggcaatgcctaatgctacgagtgttgataagaaagtttctgtctgcgtaaatatgaaggatgccttatttccatcattattaccgtttactgttctttcaaatctctcgtaaaagtctttaagaggattgcatccaattcgttctgccatcctgtttccgtatccggcttcgaagtaatatttcagatcttctgcgtactctaaaactttaagttggtttttgttgaaagcaacgcaccagggagatcttggttgggggttccaggctttttcgtatctgcacatattatagatatcatctattacagtggagtttaaggtatacctatatcccaattttctaaatacatctctcatca

SEQ ID NO: 9733 - DNA, 796 bp, Diabrotica virgifera
atggtggcactctgcggtttttcgtatatagaggttcattgaccatgtgaaataataaaaccctgttaacgttgtagttcctttctatagcacataatcaatagcctatcataggaagtttgctgtatggttggacatttaaagttactagaatgacatcatttcattcttatcgttaaaaaactatacgccaatctaacccatggctttaaaatctccgctggtatgccatcgatctctggggatttttggtttcttagttagttgagagcctcatctacttatgtttttgactctctaattgcatgtctcttgtgttttgacactgatgcatcttttgaagtgtctttgtataattctgggcagtaatttgtccaggtctctgcaatgctatgtcagtttttacttctccattatggtcttgaatggcttgaagttgagggttaaatggcgggccaaatatttaactttttttaaatagtttatgactttcctgacggtttgcatgttgtgtgacgggtacgtctttcagaataatagattcagtaaaacacaggtttatatcatcattcagccttctgcatccaaagttgaacataggcctcccctaatttcttccagttttgtcgatcttgggcttcctgcaaccaattcccagcaatccttttgacgtcgtctgtccatcgtgtaggtgatctacctctacctcttctgtctgctcttggtctacacactgtaattttttgggtccacctctcgtccttcattctgactacataggtctacttactctatg

SEQ ID NO: 9734 - DNA, 800 bp, Diabrotica virgifera
gttaagataagctcctacggtgtctttgataaatttgtacgcccatttaaaacatgtttgataacaatttttaaagtaatttcactttcccatgaaaggaaaacaaatttatccttatctcaacgacaaaatcctgtaattttgtcgttgagacaaggaaaactgttctgtaaagacaatacctccccttggaatccatattaacctgtagttcgcatgtacatttgactgatgcaatccaagtagaactggtacttgaatcagacatcatgtttgaactactcactgagtatgcaaatacgtatacccgtatgtccaggataacccaggcctactcaaaagctattttaataaaagccaattgataaaataccttgtaaatgcatacatttttatctcgacgaagcctcaagactacaaagtgtaaggataaatgagtatgaatcatacgtaaaaacaaagactttgacaggcgccaactagaacacctaggatatcaaaatacacagaggagtccgccagggctgcgtgctgtcatcaccacccttaaatggacaataataatttaaaataataaatatatttcatttaatacagaaataattatattaaaacgctcaatcttttgctcagttcaaaatggtcttatctgtttgaacgttcagtcaacctctctgaccatgacccaaagagtaaatgtcaaaaatccgttactgacctctcaagaccgctacaacaggtgacttccggcaggtgaatccatcttggttttgtcacgtttggaggcttaagtcgcattg

SEQ ID NO: 9735 - DNA, 798 bp, Diabrotica virgifera
ttcattgtcaaaatgcctgcttcaatgcatcttttactatttgtttattagtttttctaatttagcttctttattgatcgtttttgaactccttacttcgattcaacaaaatcatgttataataaaagtgttgaaattatattaatttcgtttaatattgttatcaactcctctcataattgctttattaaacatggaaaaaccaattttaggtagttcttgaatattttacacattttgttaccttatggcatttttataggaccagtgtgttcatatcattatttatcatgtatgaaatatgctgtatcataaacttttcgaagataaggactgcttcaaaatcaaaatgtcgtgtgcaattttgtcatgtaaagactatcattacaaaattagttgaattctgagttaccatttttctatctaaaggggatatgtataaaatcttataataaatattgatttgttgttaaactgaatttaaaaaaaaattccaaatacatttctttaatgtaatttcaaagaatatgttaacatgttcactgtgttacagaatttattactttgatattaactgcattacatatctttgagaacatgtaagtagtgatttatttgacagtgtcttgtatttctaaagtaaaattttcttttaaatctcttgtacaaatcttcaattcatttgtaaatatatcattagctcatatagttatataaatgacaaaggagtaatgattatattattgcattattcgtggtgtgcaagtacttggaggcgatacgagaaacgatcatgcg

SEQ ID NO: 9736 - DNA, 797 bp, Diabrotica virgifera
  SmartBlast Evalue=1E-50; Info=Ring finger and transmembrane domain-containing protein 2 n=1 Tax=Camponotus floridanus RepID= E2A8W2_9HYME
ttattattgattttaaaaaaggggaaaaatatatttattcattgaagcaatatcccaaatgtaccgaagcattgctaccattcaaccttggctgtattacttacttgaatcctaccagggacccgagaagatagtagccgtgttcttgtctgcattttatatgatttctaagggatcagacttgatgtccagggttaagttactcaaagtggcttgtctgaagctcctacagaatgttagtataggttcatctcccagcaaagatcaaatccaaacagctggagaccattgccccatctgccatgaccaatacgattccccagttctactccaatgcagacatatcttctgtgaaagctgtgtcaccacttggtttgatagggaacagacttgccccctttgtagagcaaagattgttgatgatccatcttggagggatggttccacctcatattttatgcagctgttttgagtctaattggtacatacatacaatgggatgtggtatggtttttattaggatttatggggactatagtgttttttgcactattttacgatctgttgtgtggttttattaagcaacaatggggactatagtgtttttgcactattttatcatctattttgtggttttattatacaacttagtaaatagtgttatattggttcactgacatactaaacagtaataaataatgttatttttggataattagtctatcagtcacatcaaaatagacttattctattagagaatgccaaaaacagtatagtaacccttcattaagatctat

SEQ ID NO: 9737 - DNA, 798 bp, Diabrotica virgifera
ccacgccttgattttttatttggtatttaactgtagggtaagaagaaagtaataataaacaataaacagtaaactgctctaaaatgaaagtaatacaggaatatagaaaaaaattaaaggaataacatgtcttcttcttattgcgccgtgttggcatgaaatgaaagtaatactggaatatagaaaaaaaaaatgaaaggaatgacatgtcttcttcttattgcgccgtctgtcttcgaaggttggcgacccaaatggcaattgtagctttggaaactgctgcacgaaaaatttctgagggtgagcagtcaaaccatcttctcaggtctttcagtaacgggttctggcgttttctactgatattttcacctgtactcgccactttgatctcaagaagtaggtaataccggcagtacgcaattggtaattcaccagtggtggatgcgggttttccctgttaaaagccgtacgtttctatgcggctagcaatgtgagagtggggcaaaagcgactgccaacattgcgcggtcgccatgcgcgaccaaagattttacttccaatttttcggagagtggttctactgtccctctttaaactgtgcccacgtattgtttttttcctttctttgactattcttagtaattctttttgtttactcatgcgccgaagtacctcattgttagtaactatttgtacacatggacttctcagcatccgtcggtatatacagggtgtttggtaaagaatgggccacagctcaacctcagattcccgagcttaaaataggtcgatctaagc

SEQ ID NO: 9738 - DNA, 801 bp, Diabrotica virgifera
  SmartBlast Evalue=2E-54; Info="CG7530, isoform A n=6 Tax= melanogaster group RepID=Q9VFG7_DROME"
aatatgactgttacattggcggccaaacatgaagtagccattgacgataatgacaatgaaacatgttgtacgaatactaagaatggcatacacgatcacacgcaatccttattagaagacctacccacctctgaagaaaaagaagagagcaaaaagattgttgatgattccgacagcgatgatgaatacgatgaaatttactaccagaaagcaagacagctcttaccctacgaagaggcccccgaatatttacgacataatccgtatatattgacaggatatagaaggaatcttaaaacaaatttatgtatatctagtgtattttggtggaccaatgaaacgataaatatttggtctcatatatttgggttattcctttttgtggcattaacagtgtacgattttatgattttacacgtgcaagcaactctatcggacaaaattatagtttctttatttctaggatgttttatgacatgtatggcattttctgcattataccacacattttcatgcagatcagaaaaggattgtgaaaaatatttatcatatgatctttttggtatagcgttgtctttgctagctatttatacatctggaatatattatgccttctggtgtgatacagactggcaactattctataccataacagtgactgtgatatttgctgtagcaatggcattacatattcccgaatttaatgtggatcctaatgtcaagacaatagtgtttgtagcctggggtctctacggtgtcattccaactattcattggaccattaaaaacggcggattggac

SEQ ID NO: 9739 - DNA, 802 bp, Diabrotica virgifera
  SmartBlast Evalue=1E-51; Info=Jun-related antigen n=1 Tax= Tribolium castaneum RepID=D6WV99_TRICA
gtcattctagaatttctacaacacaaattgataatagaattatagaatagaatagtttatttttttattcaagacaaagaaaaaaatacacactggaataattaccagaataaacattgttttgtttaaatataacgcatgacaagtttatttaagacaataaaaaccttgtatggatataagtgacaatctttactacagtcttctgagccttgtaattcttccagtatatttattcttcactttgtggagttggttaggttgggaactatttaaaaacaactgaagaatgagtcaagatctaaacttatcgttcaaaaacatgaaaaagaaccttacgcttgacctaaaccaaaagaagctaactttgcctaccacaagtggtctattgtcttcccccgatctcaatctacttaaagttgatactccagaattagagagtatgattttagctaatgggatgactaacacaccaacgccatcattactgtttcccagagctgttacagctgaacaagaaaaatttgctggtggttttgtcgaagcattaagtcacttacacaacagtaattcacagcaaggttcagacagtaatagtagcacaatctacaatgattcgtttatacctcatatcaaagaagaacctcaaacagttcctaatatgaatcaatcacctccaatgtctcctgttgacatggaataccaagaacgaatgaaactagaaagaaaaagacaaagaaatcgtcttgctgcctccaaatgcagatcaagaaaactggaaaggatttcgaaattggaagac

SEQ ID NO: 9740 - DNA, 801 bp, Diabrotica virgifera
ttttcttttgacattaaaaatacgaaataacctaaccaacaatttatgcttaaaaaacaataaacatatctgtgaaaaaataaaataaaattatctgcaaaaatcgcaaacgtaacagtctttttcagctccggaacactgttcatgtgcccagagattgcacattaaacattgaacccacgtttctcctctagtgtcatcagaaaactgttgttcacaaaatagacatgtggcgtcattgctttcaggagaatactgtcctatctgttctacgtcaaggtcttcgtcagcgggcaaaaattcctcttcctcttcttcatccgaactgaatttggttttgatctttctcttgggtttttttacattttctttcggctttagcgcagaaactattcgcttcccctttccatccttggtctttacattttgttttgattcatctgaaaataccgttctcttcccctttccttcttttgattttcttatattctcaattgataattcaaggtctgatttatacggagatgaagttataacttgagaacgagaagttttccttcctcttgaagacactcgcttcgtaactgatgggacaggtgaaagaacgaatggacccatgaatgtttttgaacagtgttctggtacggtggctgcgttagttttgttccttattggtggatctgggtctttagaacagcttggttcttgatcttctgaatgaactgttatattttcaatcgtttctccaagttcccttgtcaatccttccaaattaatttcggatgagttacaggttttctc

SEQ ID NO: 9741 - DNA, 799 bp, Diabrotica virgifera
gtacaaaatgctaattaacataacatgctatcttttctacattagtttcaatgcaaggtgtttgttgcaaacttattaaatctgaaaattattttaattaaatgcacatctgaaaagtactcctatttaacatatagtagagaggaaatgaatataaaaaaatgcacatgacaattttatattgatagcttacttaatttcaaaattaatgattagtaagtataacaataagggggaaaactctttacaaaattaaattatcagagagaaaaatgacatttttttatgtacaacctgtctgaagtttggagtgagtttagtgcaactgagtctcattagggagttgagatattcatctgttaagtgagatctctaccgatttttaataaagttcattcttgataaagcggcttcgcacacataagttgagccaaacatatagtacacaatttcatggccaaatattttcaaaattgccaaacactaggtatattctgaatttattgacggtccgcacaaaactagctcacggtccggatgcggacagcggtccgctaattggtgaccccctgttctagactaccactcgtgcaggtgaggttgacttttggatcgattgatgtattgttgttgagcccgattccttacctcccatcaagacacaaagagccatatagcaatgctaggagtaaaaagcgaaacaattggacaagtcaaattgtcccgagtcaagttgtcctgcgtcaaaaacgcaggacaacatgtagccaggctaaaatgaagtttcacaggtcatagc

SEQ ID NO: 9742 - DNA, 799 bp, Diabrotica virgifera
  misc_feature (28)..(28): n is a, c, g, or t
  misc_feature (33)..(33): n is a, c, g, or t
  SmartBlast Evalue=4E-62; Info=Fatty acyl-CoA reductase 1 n=1 Tax=Camponotus floridanus RepID=E2AK99_9HYME
accagttgatattgagtaaatgctatgntagtnagcactctggattaccacatatatgtggggtccgaagaatctataatttaacaagctctgcagaatacaaaatttcatggtcagaaattatagaaataggaagggaggtaattgaaaaaagaattccattaaacaatgtagcctggtatcccggaggatctatgaaaaaatctagattcgtgcataatatttgtttttatctgtttcacatgctgcccgccatattcgttgatgcactattgatgctgttaggatataagccaatcttgatgcgagtccaaaaaagaatatcaaaaggtttcgaagtattcgaatactatgccaataatcaatgggacttcgataacgatggttcattaaaagcacgcaaacttttaaaccccagagagaaatcaatatacaaattggatggtgatggaattgattatgttgactattttactaattgtgtacattctacacgattgtatatccttaaagaaactgatgatactatcccagcagctaaacgacatatgaagttaatgtggtttgttgacaaattgttcaaatttacctttatatttggtatggtttacttgttatggacaaggattatgaagcctattatggagtggtagtcgccaatatggacgaatacaatatatatgtttcaaacagcgatctaagcaaaaactattattgtagacctgataattttagtattatatacatatggtttttataagtatacacctttttttgtacaacaataaatatttaatct

SEQ ID NO: 9743 - DNA, 801 bp, Diabrotica virgifera
  SmartBlast Evalue=5E-22; Info=Diamine acetyltransferase 2 n=3 Tax=Murinae RepID=SAT2_MOUSE
atcgaagaggccgagcgactgacaggcggttaattgaagccaaaattaccacatacacgcagttatcgtaaaggcgttgccacgctcgatcacaaaactgcatgtgtgtggcgtctcaactgcagttcaataacttaactactcaaataacggccttcagtcctggcctgcatgccatggcctcttcgatatccgtaagtgagtggccagcaatatagtttacttgctccattagagtttgaacaagtaatttaaataaataatttatttaaattttacaatggccgaaagtgatacaaaagatacaattatccgaaaagctgaagtaagagacatggtgcaagtattccaaatgataaaggaacttgcagaatatgaaaaagttcacaaattaagaattgatcaaaaaacattggaaaaagattacgcagaaaactctccagcctttcagtgtctagttgcagaaacgtctgatggtcaattgatcggatatgctgtatattctgatatgtattccacttgggacggcaaatcagtgtatttagagggattgtatgtgaaaccagattacaggggtggtactattgagaaaaacctattcctaacagtactgaaaaatggtcatgctagcggttgtaaacgttcattttttcacgttctgaactggaatccaatgatcaaagtataccaagagctaggagctactaatgttactcaaatggatatgttcaatgtttttagaatggaaacggaagctttggataaactgttcgcctaaattagtaaatatagtgttacaga

SEQ ID NO: 9744 - DNA, 799 bp, Diabrotica virgifera
taattgtatttgcttgcagtactgtattttaataattaatttattactacatacaattatttacctttaataacataacctaaatcttacttttttcttataattttttttgagctacggccttgacaattatccagcaaccgggaccaatatgattggccaatataattaaaagtgcgaaaatattgccgagctatgaaaccaggtgtcgcttttccgaacttgtacggtcccaatagtagtatttgtatgatattactttaagtaggaaatatttacttagtgagaggaggcggttgttggaattttgtatttgattttgtattcagccccagtgtctgataaggtcatgcgaggccaaaatgatgttaaaatgctgtgttgtttaacaattcaaacatagagactgacaaattctactcctatgacatatactgtcatgtgttgatatactcctacatatcgttcttgaaaaaattatgtagcagaacatgataatatagttaccctttttagagtgttcttgtgcgaaatatgtcttattcggaaatatatacgaggcagacagaccgggcagtagacaaattagtatttttttatcacaattttctctgttaagtagttgtcttttgaaattttgatgaaaaactcatgccatttcctgagataaaaaaggcacagtttatataaatatcaaaaggaatttattaaacactccaactttttcaaaacattggtaataagaacaaaaatcagtattttttaattaattttttgttttacccagtaaattatataa

SEQ ID NO: 9745 - DNA, 800 bp, Diabrotica virgifera
  SmartBlast Evalue=6E-26; Info=5'-3' exoribonuclease 1 n=1 Tax= Camponotus floridanus RepID=E2AEG9_9HYME
attgttgtcaaatggataaaactgattaggcacagtatttccgagattattatgtacagttggcatcctaaatgtgttgtttgatgagaaatgagcaaacgctgaattaggttgattacttggtaatataaattggggaggaatcatgcatgattgtgcctgattttgctggctaaaccacggttgaacttgaggtggatggaatatcgattgcggttgtggtttgattaagttattaaacgtgttgttatggttaggttgttctaatcggttagagtttgtagcttcggcttttgcgattagctcatctggctttccagtcttttccaccatcaaacgttcgccgtaagatatatttataaaggcagtcttcggcagcagatatcctctgttttctgaacaatttaactttaagccatctcgaaatggattatcgaatacaacttcatacatagtgtccctttcgttgttagtactagaatttcttattgcagtaactgtccctttatgcccaaatggaactgagtacccatgccttacgttaactattctatctagaatatcagtttcagtttttggatccggttctatagttgcggtttgaatttcaggcctatacaaaaattgtggttttatttggatattcctatgttttacaggtgcgtctttataagcatctatagttcgttctaaagcctcgatagtttctggttccaaacttttactattacaatctatcctatctatggaatgagtaggtaaagattttaaccactgctgtaattctttatatcgttctt

SEQ ID NO: 9746 - DNA, 792 bp, Diabrotica virgifera
  SmartBlast Evalue=5E-20; Info=Endonuclease-reverse transcriptase n=1 Tax=Bombyx mori RepID=D5LB38_BOMMO
aatatatacgccatagttgaaatccaaattgtgtccatggtacttgttattcgctatattctgccgtgtatcacaaaatgttttaagtaagtggctcattaggctgattgttctgtagtcttcacatgttttgaaaaagctaatctaaagagataacttactaaatccatccattctcttaaatctctggaccttgatctattctatatcttcttccgatacttctattcaacactatttttcccttgtgtgcatcaggtattgcagatttctttcttttatttattgatatttcttttttattgttcgtccgctataacttttcccatgcgtcacgattcattttctaaacaaattaagtcataacctaaagtgaaacgaacgtcgatgtgtatatacattttgtatactgtatactatatactacacacatcagcgtacgtttcactaggttttgactcaatttgtgtgaaaactaagtcgtgacgcacgggaaaagttagagcggacggactatatctaagagtgcctgtaggtcttgtatattctctgcaattagtatagtatcatcggcatatctgatattgttgatggttctgccgttgacttttattccaattgttatatattcgagtgattttttaattattgcttccgaatatagattgaacaataagggggagagtatgcaaccttgccttacgcctctttttatctctacttcctcctaaagttctttacctactctgactttttgcacatatagtaaacataaagattcacattgtgaaa

SEQ ID NO: 9747 - DNA, 801 bp, Diabrotica virgifera
tctatgtgtcccaacaaagatagtatatacgtctaacagtccagatagaacatcagctataaaatccttaggtgcagattaggtgggagtggcaaaaagtattgttcgcggccggaaaaagctagataaaatataaggctcgatgcacatgtgcggctttgcaagctgctttttttcaagccaagtttcccgtcaacacacatttgagcggtttctcggggggcaatacacgccagaaataaacagctctgtatctacgttgaaatccatcgcgcggttaacgtgtactcactgattgcccagtacagactgctaaaccgcatgacttgttttcaagccgcgtgcacgtggcggcgtagcagaaacgggcgtgctctcggtccacgcggcttgcacgccacggttcagctcgagtgtgcagtaaataaattcaactcacgtactgctgaaccgccagctatcgcacgcagcttgaaaaggcgcaaatgtgcatcgagcgtaacccttactgggaaaatatacccggaaaaacacatagcaaaatatatattggacggatatgtgttaatagggctgaagtagtgcgaaaaacaaagatgaatcagctcagagtcatgacaggcttccttactggacatgcgccagtcaacgaatacctgcattctataggattgtttcatggagacttgagagctagactctgtagcagaaaatctgaaacagtcaacaggatcttgcatgaatgagccatattagatcgcaggcggcaaatattttggtgacaagcaagtgacttcaaaa

SEQ ID NO: 9748 - DNA, 799 bp, Diabrotica virgifera
cgcccagatgggtgatgttactggtgtgatatatacgccgaaaagtcgtggtttggaagtggaaattgacctgttccggcatttttttccaaaatcgtccgtttttgagaaaatgaatttgttcccacctttgcgtgctcactgtatatgaaggtgtacacacgatcaaagaatttgatatattgattgcacgaattaattacaataagttaagagaaatggaaactactgaatggtgtccaagcctgttatggccgctaacttatgtatatttcccactacagtgaccaacatacctttttagtactcttaccatcgtcaactatcttttgtggaagaaaatataaacaatcttatatctgtcagaatctttcagaagcacgaaacatcatttaaatcaagtcctcagattgtttaactgtttcaaacaaatctccttttcctacttttttctcctttgctctcctcatatattcattatttagcacatttcagtgaatttatatttgttgagcacatttgcaatttgtttttgtctttattgtctttagtgggaaattagcttaaacaattattgtattttaagtttttgagtattttttttaaagtaacccttccccgcgttttttttctcaggccttataatttgctgtatatcgattatacaccacatttcaatagatcaaccttggctgattatttcaatcgtgttttatgtgataacaacacctatctagtgagaagtctgggccatttttaatagcccaaataagagtttctatcccgtgatgtgatatgt

SEQ ID NO: 9749 - DNA, 799 bp, Diabrotica virgifera
  SmartBlast Evalue=0.000000001; Info=Reverse transcriptase (Fragment) n=1 Tax=Aedes aegypti RepID=Q4F8Q4_AEDAE
aagaatcaaaactgtgtgagggatgggatagtgggggaggcagcaatgaagttgaaaagaaatgcaagttgagatatgtgttaatgggtgattagtatggaaagagaagactgttataaactagtggggtagtgggaaaagagggggagggggaaatggagaataggagtataggggaaggggggtgagaggaaaaatgagagaaaactagggttggattaagggaatagttgtcgatggataggagtgaaaggacgatttaaagttgtttgacgattaacgcaattggggctggtcctcatgtctctggaaatctcaaggtcctcgtacaaatccaggcgtagattgtttctgtcttggatgttatgaattaatttaacaccatcagggatgtcgagatgatgattattaactttcaaatgatgggaaaaagctgatgtagtgtctcttttagaatgttcagcagatctggttgagagtgatctgtaagtcctgccgatgtaagaggcatcacaatcagagcaagtcagtctataaacaccactacgattcatatagtgtattgtatccttagtatttgtcaaaaagtggccaagggtatttccaactttgaaagaaatatgtatattctcagaagagttagatacaatacgtttaatcttttcagatagatgtgggttatgatatggtagtgacctgtaaatagcagaagaggaagatgactgatggaaagcagaattttgaagcaatttagattctcttttacggatgagtttatctattatagagggatcgtaac

SEQ ID NO: 9750 - DNA, 798 bp, Diabrotica virgifera
  SmartBlast Evalue=9E-37; Info=E3 ubiquitin-protein ligase Hakai n=1 Tax=Camponotus floridanus RepID=E2AFS9_9HYME
attcgttgttgcgacaatccaaaacagtcgcatattcatggaatatattttaaatttaaactcgcatcactaattaacatcatcatcatttaaaactatctataatattgttgattattagtccattgtggaggggcagtgttgtaatcgtacggctgtcgagtctgcacctgcgcaggcggggcgtactgaccaacagcggtggttgttccagtatacgcgggatacgtttgagctgggctgtaagccggaggtgcagcataatactgggcttgctgttgttgttgttgagggggaggaaggtgcatcggaggcaaagattgggagtaacttgccggttgctgatactggttatagtacgtctgggttgtggggacactttcgtggattgtaggagccgattcttgaatgggcacagttatgaggttagtccgtacaccggcagactgcataggaacagttctagatcttacattagctggaacaccacctcctgatcttggatcgttggcagttttagtacgcacaggtaaagttctttcgggttcaactacttccattggtggagcatttaacgataaattagacacgtgtcggtggttaatgtgtgcttgtagatcgcgttgtgacagataagttctacgacaaccactttgaccgtaacgtgtaccaccatgagtacacataaatacagtccctagtccagtttgttccactcttgtaactttttctaaacatcggggacactgtttctgttcttgtttaccacatgctagacagaagatatgtttgcaagga

SEQ ID NO: 9751 - DNA, 799 bp, Diabrotica virgifera
ttacgtcggtcaataagtcccgtacctaaccatgagattgcgactctaatgaattttccatattattatgacatttcggtagtcctaaccttcaaacgaaaatatggtcgtttgtacacacagtcgatgaaaaaatggtaaaaatgcacgaattgagctttaaattgcttccgcaccctccctgtagtccagatctgactcctagcgattgccaccttttttcggatctaaaaaaatgctacgtggtagcgaaactgaaagtaattaatcgcgaaactgaagcctatttttaaggaaaagataaatcgttttacaatggtggcatcgaaacattaggaaactgttttaatgatttgtatcgtcgctaaaagagattattttgatgaatgaagaataatttttgccaaacatgttgtaggtatctactacctaatcagatcaaggacttaatgaccaacataatataatagctttatttgggtttcctttaatggtattttttaaatggatcattcatataattttggaactgttctagggttatcgcaattataaatattatcttaaaacccgaacataataaaattacaacatactacaataatataccttcctacttaactatagcctaaatactatttttcttttcttcttcacaaatgtttgtaatattgttttagagtttagtaaccaaaaaataaatgtataaagtacctacagaaacggataatcccaaaacagttcttaagttattcccaataaacctcaatggaaacgcagacataatgtctcagactca

SEQ ID NO: 9752 - DNA, 798 bp, Diabrotica virgifera
ctaagaatcaggtcattttcagactagaacatgctaaaaatacgacaaacctcgtttgattattttttcccatttggctcaataaactaaatgtaaataaagaacgacttttcatttattatttccatttttctaagagcagggtcatgttggccattttcacaccgaataagatcacatgttaagcacataacatcatttaaatatgataaataacgatttttgtttccctttattgtcccaatttaaatgcaatcaataacgatttttgttccccccttaattaataaaataattataattaatttcatattttttttcaatatttattattaataaagtattttataaaattacaaaattaattttttagtcagcttcctttatagtatttcattgcattgctcaaatgtatggtggctcaaattcagcgtttttcatgaaaaaatacaccagctaacgcgttttaaactaaaatcttatgctattgtattttagggtcttctataagtgattattaactgatatctggtgtatatttttttgataaacacgtactataaatacatgcgtggttttatgcaacaattataacgtaacgatagatatttttgttcattttttaatttaattaaattaagtttatatattttacttaagcgtatcttatttaggtagatttttttaattaaacatgtaatattttcaactgtttactttagagcagtaggtaatttctacaggtttgttcataaagcatggactatctctagatcgtccattcttttatgaaaccct

SEQ ID NO: 9753 - DNA, 799 bp, Diabrotica virgifera
  SmartBlast Evalue=2E-36; Info="Protein takeout, putative n=1 Tax=Pediculus humanus corporis RepID=E0VZK3_PEDHC"
aaaagtggcagttctagttttttgcttggtttgtcttgctgatggaaaattaccttcatacttcaaggtctgcaaacgttcggaccccaatctagacaaatgtgttacggattcagttatgactcttaaacctcaacttgcaaaaggaataccagagttagaaatcccaccattggaaccattcgatttagatacaatagttttaaaaagtggaaatgctggagtcaggatagacgcaaatttttctaagcttattgccacaggagcgtctggatttgaagtatatgatataaagtgcgatatacccaaaaacgtatttttatttaagctcaaaataccacatttagaattcaatggtgattacgacattgatatgaatgtcttggttttaaagtacaaaggtagcgggccaatttccggaaactttaccgacctggacgtacaagttagattaaaaggccacataaaaaaaattgatggtaaaaattaccaaacattcgaaaaaattttaatactgttgaaagttggaggttcgcacttaaaactgggaaacctgtttcttaatcaaaaaggtttaggagatgccacgaatcaggttgttaacgacaatgctgatatatttttaaaagaaatacgacctgccctagtagactctttatcagacaaattcactttaatagcgaataaagtgtgtagaatgtttacttatgacgagctgttcccaatgtaatctctattaaagtgatacatgagtgatattttttgttttagatagttttttaggtaataaactgtaatg

SEQ ID NO: 9754 - DNA, 800 bp, Diabrotica virgifera
  SmartBlast Evalue=3E-40; Info=Heartless n=1 Tax=Tribolium castaneum RepID=D6W6I2_TRICA
aaggagttctgtggttgtagcaataagtgatcattaaccatgagggcctacgcaagcctgcttctgtgtttcctactagttgaattagtaacttcagagataaccttcatagagggtaagtttagacgaggtcctgtattcaaacatcacagaagtcataagaagcatatagtaaaatctagtggctctacgttgaggctcagttgtgacgcttctggaactccaacacctaatataacttggtacaaagatggtttatccccactcccacgtagacttacaccaataaaaacttacaaatggactttggtattagaagatatggagaaagaagacgcaggaaagtacacttgcaaagtttgtaatgaagtaggttgtaaagacttacaattcgacgtagaagtaaatgagcgtgaacaaaatacaccacgtctcgttaaagagcttcacaatatgaccgttgaaatcggagacagagttcaactcaaatgtgagtttgattcagaaaccaaacctttcataatgtggatgaagacgtcagatagccactgtactttcggagaaaaagaagaatgcgataacgtcgatatgctacagaaatcttacgatggtagaaagaaccccgaggtttacgaaatctcaagagtccgccgacacgatgaaggatggtatgcttgtattggatccaacactctgggtgctactgtttccaaggcctacttgaaagttacttcataagaagaaatggaaatgcagtcaaacttttgtaggaatcgatatgtgaacctaaatacacaacc

SEQ ID NO: 9755 - DNA, 784 bp, Diabrotica virgifera
tattcaaccgaaaagttagtgtgtgattactagaaggtattgaacgaaacaagtgataacatcaaaaataagcaataaacactaattacaacacctgcttataaagtctatcccttctgatagctctaatattgagagaaagcggaatttctccataagcgcaatacaataataatacacaaattcaaattggcttgttgctaaataattcaaaaacgagacaatggaaataaaggtaattcaatttaggtcaagcttaccccgtctggctggagacacaacgatcgaaaaacaaacgaacgaattcactaactattacacgtctgtacacattcgagttttgcaaggcatctcgttccttatatcataggggaagaatgtttggatctcaaatggtaagcgtcccatcctcttcttcgcgacacatgtgaatttcgatagcaaagaacaacaccggcgtcgacaagagaaaaaagggcatgatttcgaactatttaaacaaccaaatcaattttatgggatttccaacagttaggaaaaactgtaaaaatggagtgaacgatgataaatatattggcacacgggactctgtgaatgtctttctaggtattatgtctaaatagcacacctttctttagattggatactgaaaaatggagtttactctgtcgaattcaaagtcaattaatttatgtatttctgtgtcgataataaatttatatttcctttagttcattaggtattttgtatgtcaaaagtggaatactatggaactcttgttctt

SEQ ID NO: 9756 - DNA, 798 bp, Diabrotica virgifera
taaaaactcatacccctattaaaaatacaatctaaaggaaacaggctgaagaattcagtgtataaaacaataagagacaataaaagctatatggaacaaaactgttcagtaaaaatttcttaaaaatagaaaatatatctagatgaaaagagaatggattcagattacactaaaattcttgaaaaatatacatggatgtatatctatataggctgcttggatgaggtattttaattttaaatttcaacagatcagtagcaaatattgctacaatcaatagtcagaaaatcattctttaaatactggaatattatcaaatgttcaattaacgtcacaataaacaaggaaagaggaatcaccaccctaaagtatatatttaggcattaggtatatcattaaaattctaataattttggaattattattgcatttatatgttctaaaagcagatgattacaaaaaataatgatttaacttttttgtaagttattaaatttgttagtgatggattagttatcacaaatgtgtttaaataaactcagacttaagttggtgcaaaacaataagaccactaatatattcaaaatttgttactttaacataattaattattaaaatctaacttcatgcaaaagaatgtggacattcccaaacaaacaactaacctagctaaaaaggcataacatattttttgagcttctgcaactatagaataatttcttgaaaattgagaataaaaaagagcattaatcataagtacacttttaaagtcggatgatttgggccatagctatggtc

SEQ ID NO: 9757 - DNA, 800 bp, Diabrotica virgifera
  SmartBlast Evalue=1E-64; Info="Rab6 GTPase activating protein, gapcena, putative n=1 Tax=Pediculus humanus corporis RepID= E0VTD1_PEDHC"
tggaacaacaaaattttttagtggagtaaatactcaccaatacgttatggaggatagtttaagcgtaaaatctactgagtcggtagccactagtgaagaattcgattttattggagataaacctggtgtttccaaaactcctaccttagatttccagaacggagacttaaatgagttaacgaaagcattgaaagaagttttacaagaaccagattctgcgatgagcaccaccgaaagcgctgaaagcgaagagaaaaaaattggacagagcacattctatggcaaaccagtacaactaggaatggacccattaagtcaaggccagttctctccaattgatcattcagactccacaaggatagattccggcagtgaggaagaatgtagtatttcagatgttgatcaagattgtacgatattctcgggagtaacatatctgggcgcagcagcaataaatgcccccaaatctgaaacggagatccaacggaatatagcaattttgaatgagcaaagtgtggaacaagggattaaagttgctgtatctgtgccctcatcctctcagggacttgttgtgttatacgatgcattgagcaattcagtgatatcccgatatgagattcatcgtattctgttttacgcacgtggaccagccgatagtcccgaggcgagttgtttcgcttttacatggtcccatggagagacccaagaatcggccatttttcagtgtcatgtgttcagatgcgacataggagaggctgtttcgcgcgtttcgtcttgtttcgcaaaagctttccagagag

SEQ ID NO: 9758 - DNA, 799 bp, Diabrotica virgifera
  misc_feature (19)..(19): n is a, c, g, or t
agatatcaataatagtcgnttaaaaaatgatttgtccaattgtaggcaattctttctttattttcttgccttatttctatagctaaaactttctttggcatttctttaattatgtgttcagatgcattttgttgctatttatattactaatctaatctacataacatgttttattacaaaaaactgtacgaaaaaaatggctaacactagtttgtgatgaaaaggtcaatatggaaatgatgttttatagcgtttttgatgttactgtggaacatatccagtgatccatgccagtacgtcaacagtgtcttttaagatattgtgaggttgacatatttttgaaagtagtcgaagttgagtagaaagtttacagtattttgttgtttgaagagcgtagactttaagcacaagcgatacgattatttacgaaatcattcatctacgaaattctgtaagagaatacaaaaatgtgttacatttaagtgatacctttatagaaaatgtacttactaaggttcaagatttgaccactggagcattagatacttaaatattttttgttattttgcactgcgtattaaagaataacgcttctaaaatcgattgacactaaatcgggccaggtacgagtccctgtatgttctatttcaaatttcatgaatgttttctaattcaggagaagtctcatgtcacgaaagagatattattttgctcccgttgttaaaccaaactcttgtatatctggaagtacagcatcttatcgagaaaattgtaatcgccaactcatacacatttcaat

SEQ ID NO: 9759 - DNA, 796 bp, Diabrotica virgifera
ggcctatgtaacagaacattatctacacctttatgaatatgtctacaatacctacaaaaatcacatacaatcttacacactgcttaggtattagaagaaaatgtccagtgtgcagattttgccaaaatgtggatcaatctatgtagtagatagaactatgtgttacatatttgttatttaacagtttcaataggtgtcttgtgggtatatttaaagtctgtaaaatatttttttcatgctactctcttaatgttgaagactttcatacaaacggcaatgcaggagaacattgcagcaggagattcatgaataaccattctaaattttctaggaaaggagaggagtttataacgagtttatttaccacaattaaaatcgacgaacaaatgacgaaaattgacagcaagataagccgcgtacccaatttggaaaaatcacacgtagtatagtaattgcacactgtgaaaagtgatatgtaggtaaataaatgcgaaaatgtgtaaacaagattcaattttagaaatttaaatttttacatttaggaggaaatgatgcaactgcgtcaaggcgggttttatcaaagtgacacaatagctgtattcgctgagcataccccgaaatgagtaagttcgggattagtttcccaaggcgcaggcgtcaatgtcgacaaaaaatgccggaatgggacgtttcgatgccgccggtacatcgccggccgtttcgatgccgccggttcatcgccaggccatttcatcgccgtcatatctcgcatttcctagaattcctaattaatact

SEQ ID NO: 9760 - DNA, 799 bp, Diabrotica virgifera
  SmartBlast Evalue=4E-68; Info="Dihydroorotate dehydrogenase, putative n=1 Tax=Pediculus humanus corporis RepID=E0VQ82_PEDHC"
gtagaatgtagaggtaaattttgttaattctcaacaatataagaaaaagtgattaattaatttaaatatttatgtgattcaattaatcaacaaactccgtcagtatgagattcacttctgcacggaaattaaaatctctcatcacagttgctttgggtggatatatcagcttctccgcattaacttactacaaaaatagaaatgccttttatagagatatggttatgcctttggttcatttactagatcctgaaagagcgcacaacctagctgtattcgtaagtcagtatagattactccctaaatccaattatgatgatccatcatctttaaacgtagctatttttcaaaaagaattcactaatcctataggtatagcagctggatttgataaagatgcgaaagctgtgctaggacttaaagatatcggatttggattcgttgaaataggctcagtgactcccaatcctcaaccgggtaatgagaaaccacgggtttttagacttccagaagattctgcagtcataaacagatacggctttaatagtgagggccatgatactgttctacaaaggattcaacgcattagaagtagtaaggaaaatgttatcataggtgtaaacttaggtaaaaataaaacatcagatgatgcagtaggtgactatgtaaaagggattgaaaaatttggaccgttttgtgattatttggtaataaatattagtagccccaacacaccaggtcttcgaagcatgcaaaataaagacgtattaaaagcacttttaagctcaaccatagcggc

SEQ ID NO: 9761 - DNA, 799 bp, Diabrotica virgifera
  SmartBlast Evalue=6E-78; Info=FK506-binding protein 4 n=1 Tax= Camponotus floridanus RepID=E2A2F6_9HYME
ctttggatgaaggctagagcgctaaacatttttcattcttcaaaaaccgattttaataacagtattataaaacttttccagtaaatattccagaaccgcgttgttaatatcttgcagtagccgtagtaaattaaaatttgatccaatggcctctccggtagatatttcaccgaataaagacggaggtgtgttgaaagaaatactccaggaaggtactggagaggaactaccaccccaaggaagcaaagttacagtacactatactggtaccttaactgatggaaccaaattcgattctagcagggacagaaatgacccattccaattcgatttgggaaaaggtaatgtaatcaaagcatgggatattggtgtagctaccatgaagaaaggggagcgggccatgttgacatgtgcccctcaatatgcttatggtgaaagtggcagtcctccgactattcctccaaattctactctcaaatttgatgttgaagtattaagctggaaaggagaagatttgagtccgaatagagatggaggcatagagagaatccaaatcactgctggcgaaggatattcgactcctaatgatggggctcaagttgaagttcatctcattggaaaacacgacggtaggatttttgatgagagggatgcagcttttgctgttggagaagcatcagaagctaatgtaatctcagccattgacatagcgatacaaaaattcaagaaaaacgagacctctagacttattgttcatcctaaatatgcctttggagctaatgcttcacaagaattcaac

SEQ ID NO: 9762 - DNA, 799 bp, Diabrotica virgifera
  SmartBlast Evalue=3E-72; Info=DnaJ-like protein subfamily C member 11 n=1 Tax=Camponotus floridanus RepID=E2AEG0_9HYME
gtggaccagcattatcttttaaaggatttaggacactcactcggaggtttttttggaatggtggtacaattttacaatttactccagaaggtattagacctggagtaatgtcaactttagcaatgcaagtagataagcattctgttggatacctatcgtatcaaggaggtgttagatctgctttcaccacacagatcattagggatacagagagaaatagatacaacttttcaatacaagtgggtttaccacattcttttgtccttttacaatatacaaggaaaattttaagtcaggaattaaaacttaggatagcaataaaagcaggcacatttggaggagttatagaatatggggcagagaagaagatatcaaaacatagtaatctttcttttgctgttgtgtgtggtgtgccttccggagtcaaactaaaaattcgattgacaagggcatcgcagacctactcctttccgatccatctttgtgaagaaattatgcctgcgcctgtattttatgccaccatagtgcctttagtgatatatgtagtagttaaaaaggatttgtggagccgttcttgcgagaagaaaagaacaaaaaagtagaaaaacaaaagcaaaataactacaataagttgttggaaaagcggcgggaggcaatggcagctcaggatcttatgcatgctacttacaataggataagagacgaggagagtaataagaaaggattggttattattaaagctatttatggaaaaataatgagagatcgtggtgatactgaacaagcagatgctgagatg

SEQ ID NO: 9763 - DNA, 798 bp, Diabrotica virgifera
gcgaagagaattgaacttaaaatacaataaaaagttatcatatatttttaaaatgcattcttgtattatgtgggattttataatagctgaagctgaggtactaaaaattacattttgcgtttgttgttcacattttgatttcccctacggaactcgttttcaaaaaataggaaatttctgaagtggaagtcgaaacataaaaataaatgtaaaatgtaatttttatttcaataaactgtggtttaatcccatataaaaacaatgctaatgtttacctaagttataatagaataaaatatatttagtgtagaattgctaacagaaatataataaaaataaaataaataataaaaaacctaataataaaaatagtaagagacagtgttgtcaatggaaataacaaagaatataattattggttatatcatgactttagataagtccttttttctttttccatataatatgtactttatttcctttttaaaaacatgtgttccatcggctggaatgatttttcagaaaaaagtttatttttaaagtttattggaataatatatcgcaagtattaaaaaaatattttctgcactgggaatatgttatctattcggatatgtaacaattttcgaactgtacatcactcaaaacgtcaaacaaactgttttctattgcatttatatttatatttctgcttataattacctcaaacaagttttagttttttgttaaggatcaatcatgatcgaatccaacaaacgttaataaaaccattttttggcaaaattgtggtttatttcc

SEQ ID NO: 9764 - DNA, 798 bp, Diabrotica virgifera
  SmartBlast Evalue=4E-89; Info="Ssm4 protein, putative n=1 Tax= Pediculus humanus corporis RepID=E0VYX2_PEDHC"
gtgtaactggatttttttttataatatagtacaagtttaataagtcctacaatttacttcttacaatctttcttaacaattagaaccttatcccaatggctttactttttacatatttgtcccgacattagtatcataccatacttatttagaaggccaaaagtgtgatttgcaatggaagaagtaaccaatgctgatatatgcagagtatgcaggtcagagggactatctgacagacctctatttcatccttgtatatgcacaggaagcattaaatggatacatcaggaatgtctcatgcaatggatgagatactcaaggaaagagtactgtgaactatgtggtcatagattttcatttactccaatatactctccagacatgcccagaagattaccagtcagagatttagctgcaggactattatcatcaattgccactgcagtaaaatattggtctcattatactttagttggaacagcatggttgggtgtagtacctttaacagcatgtaggatatatagggcattgtttgctggtactgtcgatgctattctgtctctgccatttgaaatgttatcaacagaaaacattacctccgatatattccaaggatgttttgttgtgacatgcactctgtttgctttcgctggattagtttggttaagggagcagatattacatggtggtggaccagattggctgcaaagagaaaatgtgatacaagaagagcttccacgtctgttggagaatattccagaggaattggctgatgatgtagaagagaatggacaagcc

SEQ ID NO: 9765 - DNA, 796 bp, Diabrotica virgifera
aattaactcacctgggcaaaagcgaataaatttcttaactgacacgtttctttgactaaatacctaaatgaaaagtcttgttttgtcacaaaaaccacgcaaacaataaatgaaaaattccttatgagtgtttaaccttataaacaaaattgtttggactcaaatataagctcctcccaattttgtgacgtcaagatttaggatgtccatttgtccactgtacccgcgaacgcaactactactacttgtaactgacagaataattttcatggcataccttgatttgtagagaacaaggtttcaaatccaatggtatgcataggcataataaggatagacaaggcatactgagcaaaatagcgtaactctcgggcagtcgatcggtggtccatctatctctttttacaaagcgatctcgcgcatgtgacacaaaatgtggctagatggttacacctcgatgtacagagcacccataccttgcctggtctaccctttattatctctatgatggtatgtattaataagcaaatgtttcaaattttgaaacatttttgaataataatggagttccttagccatttttgatgtgtgtatttaccttgagtttctgcgttgacaaatttatttgaattttcttgtggacatttaataggcttgagattcttgattaaaaggcagcataacgcagctacaatgtccttcaggtattggtacaataacatggaacatacgtttggtagtagtaaaccagtaaatctcgaattttgtaatacaaaatcattcgatcgtcatttgt

SEQ ID NO: 9766 - DNA, 791 bp, Diabrotica virgifera
  SmartBlast Evalue=2E-23; Info="Crossveinless c, isoform C n=2 Tax=Drosophila melanogaster RepID=A8JR05_DROME"
atgagcgcaactgtttaagatttgtaatcttctaaaaagggaaagtagaacatcttcctccaatagaggatggtcctgagaaacagtagatatgtcaatcggaaactgattgtcctcgtagaactgggcatattgcggaaatcctgttgcacgtaaccacttacaggcctctgctgcctcaatttcagccaggtgtcggtcggactgtgaacggcactgcttgttcaccttatcatatttagttttcaacaccggcgtagaggaaaatttcgatccaatattgtttcctttcgatgtttttcacgaaggttggtaattgagacggggatggagaaagactattgatttcttcaaaacagtcgctgtcggattcagatgctgaggtaaaacacggcgaggaggaataatctgatgcccatgtgagactcgtgtgactgggggagagtgaatctggtgatgtttgggtactgacgtcgtgatggacggtgcggtggttttctgcaatcagttgatttttcgatgatccacgatatcttcctaacggtaaaacacatcgcgctttatgaaaagaattcgaaagactacagggtactactatactttcgttaataatgctattgttacagggtactactatattttcgttaataatgctatcgttgtatttttcgttctgtcggaattcgtttcgagctagcaattccgtcacatccgattctattttttcgtttaattttattaaaagcctaatttcgttgtcttctctaaccgtttcttcctcttcttctttc

SEQ ID NO: 9767 - DNA, 798 bp, Diabrotica virgifera
  SmartBlast Evalue=2E-36; Info=Small heat shock protein 21 n=1 Tax=Gastrophysa atrocyanea RepID=Q3LGX2_GASAT
cgatagtattccagtgcgagtaagtgaattattattaaaaagtttgaagtttgtttctcgtttgtgcactttggaagaagtttcgaaaacagcaagtattaaaaatggcttttattccacgtatgtttcacgacaacttttggggacctaactgtcccagacgtagaccatgttctggaaatgtagcaggaaacatttcagaagatatcttaaactccatcgcaatagcacaagccatgtttggtccagaatatggcagaaataatcaagaagtgaatacaaattctcaacatagatcctctgttactgttgacaagaataaattccaagccaacttcgatgtacagcattttaaacccgaagaaatcactgtcaaggtaaatgatgacaaatctattactatagaagccaaacatgaagagaaaccagatgagcatggtgcaattttcagacatttcatcagaaagtatgtattgccagataattgtgatgttgacagggtagaatctaggttgtccagcgacggagtgttgacgatcattgcccccataatcaatgacaatgcagtaggacatagaacgatcccaattataagaacaggagaaccagttaatctccaagaaagcatatcaaatgaaggaaaggagcaagtagaagacaaagaagtaatggaaagttaaaagtagaattttgttaaatatttttatacacattaccacattataaactactaggatatgggattttatatctattttttatatacctacttcttatcaaagtttttgatggtaatag

SEQ ID NO: 9768 - DNA, 794 bp, Diabrotica virgifera
  SmartBlast Evalue=2E-12; Info=Titin n=1 Tax=Harpegnathos saltator RepID=E2BM24_9HYME
cagttactgtcgaagaactcgaagaacccgaaaagccaacatacactgttgaagaattgccagaagaagttcaagtgacggaggtagtgaccaaagatggagacaaaaagaaaaaggtcattaaaaagagagtaattaaaaaacataaagatggaaaacaagaaaagaccgaaattgtgaccgttgaggaagaaggtaaaaaaccggaaacaaccgttactgtcgaagaactttccgatgttgaggctgaaccaactaaacccaaagtggcaggccgaaaagaggtttctgtactaatgcctattgagcgcaaagaaatcaagccgcaaaaggtgaaaatagttgagggcaacaaagtagcccttttatctgatgttaaactaagaaaacccaaaattttaccaaagaaagataaggctggaaagttgcctaaattcttattgaagagtagaataacatttgttcaattccctcctcaacccgaacaagaaaaactacctcgtatttcactgctggaaccagtttacagagaaactggaataatatctagaaatgctaaagaagctgagaaggttgttaaaactaagaggaggagattgagggacaaagatattgatttatcagaacttgaaaagcttgaccttgaaatggacgatttgaaggcgaataaattggaagctgttgatgacgcatttaagcataaaggaaaaccaaagaagaagccttcgcctgaagaacaaccaaagaaattatctattaagaaaggaaagattccaaaagaggaagaaacggac

SEQ ID NO: 9769 - DNA, 775 bp, Diabrotica virgifera
atgtggatagatacttgccaaatagcgttgtcaaaaaatataacttactttacttttgagtcgattttttttctcgcaagtgtagttttatttactaagtatttaaatacactaagcgccaaaatcaacgcaccacctcaaaaacgggacacccccaatgtctcatatttcccaaacctgttgtccgattttagtgattctctcaatatattacagatctattcctcaagaacatcgacgcaataatattgttgctaaacagataagtgtcattgtacaccgggtgcaacaatgatagtgtgttccatcctcaaagtttggaacaccctgaggaacattccagcgcatataaaatattgaaattacaacccgactgcaaccttaggccactttattaacattttgctttgattcattggccttatgttggataataaaaagagttaggcactttaacaactagacatgttgttcatcaatagagggtagttccaaataagtgcaccaactttaaggagtataattttgcatgaaaaaatgatgacagtttgcttcataaacatatgtcctcaaatgcttcgtttacgagatacgggatgatgattttcttattacaaactgacgactattcattgctctaaaaccggccgagacatgcaaatgaaatttagtagattctaagaggctgccattacgcagttttgacgtacaattaagaattttacattcaccactggcccgcatacgggtcatattagagttgcacaagtttgac

SEQ ID NO: 9770 - DNA, 797 bp, Diabrotica virgifera
  SmartBlast Evalue=1E-146; Info=Pre-mRNA-processing-splicing factor 8 n=1 Tax=Culex quinquefasciatus RepID=B0XAY2_CULQU
tcaatcggagaagtctgttaagtagagtcaaatcgatcttttcatatagtttttcaaacttagattccagtaacacgttacactccccttcattcacatcccacacatcttgtaaattgttaatgccttggcaccatttataaacaagtaatggaggaggttccgtatcagctggtttgatccacggaggaaatagtcgtcttttgtcagcttcataccaaagatattgatctaagtacgcatcagttattttttctagcggttctacatcatacacaggtatcaaatgactgtacaaatccatgaactctatccctacctctttgaaagctctttgtgttaaaagatgacgttttatcctcgatagagcttcgtgaggattatcataagcctgctcaattagacccaattcttctctttgactctgattcagacgcgattttacactgtaagcttcttttaatctttctaatgccaaaataagcagcttggtgtcgtgtttgtatgacagaggtgggaaaggtatcggtgcaaaccttctcgattccaaccaatggacagtggtggtgtaaatggcaacagcttcttctggtgaaatgtacggaccgtccttcaaatagttatgctgtctttcttgttcggcttttagatataatctagtaagccgtccaagatttttcttgcaaactgttttatcgacagttgctcctctacggatcctctcacgattgtaatgggccgtatttgtccaccaatcagccttcatctttacgtatcgaagaatcatgtttcgtata

SEQ ID NO: 9771 - DNA, 796 bp, Diabrotica virgifera
  SmartBlast Evalue=9E-56; Info="Lipoamide acyltransferase component of branched-chain alpha-keto acid dehydrogenase complex, mitochondrial n=10 Tax=Eutheria RepID=ODB2_HUMAN"
ggtcgactcgcatcgctaccatgttggctgtgaatacttttaaacaaacatgtgtaaatcaagcgaaatatttacatatctatcgaaatttattacgaaaagtgtcttttaaattatccgatattggtgaaggtatcaaagaggttacagtgaaagaatggtacgtaaaagaaggtgacaaagtttcccagttcgataatatctgtgaggtacaaagtgacaaagcttccgtaactataacaagtagatatgacggcgtgatttccaaattgtattacaatgtggatgataccgccctagttggaaagcctttgatcgatgttgaagtagagggcagcgaacatatagaaaaaaaatctgaagaggaatctttacgagagatagaagtgtcctcaagatctgacattaccgcaaatagcctttgcataccctcagtaagacgattagctaaagaacatagtatagatctaaacaaagttcaaggaactgggaaaaatggaagaatccttaaggaggatatcctcaaattcttaggaggatccatagataatacagaattaattgaccaaagggaaaaagttaaatgtgaatcgacagaaggtgataacatagaagtaattaaaggatttcaaaaatcaatgataaatacgatgactgaagctctaaaaattcctcattttgtatatggtgatgaaattaagataactgaggtatccaaattgagaaatattttaaaaaataaacacgataggcagatatcgtcactaccattttttgttaaagcaatatctaattc

SEQ ID NO: 9772 - DNA, 797 bp, Diabrotica virgifera
  SmartBlast Evalue=2E-70; Info="Cysteine protease ATG4A, putative n=1 Tax=Pediculus humanus corporis RepID=E0VF88_PEDHC"
tgcaagccactaacatatataggattgatttcggtgagtcctaacctcaagggaacaataagtagtaatggtttccattcgtaagttgttaaatttgtaccatcgagttttctttttaaaaaacataattcctttatatcagaaattacaactgtgttatctaaagctacatgaattgctaatctactccattcatcatattttaccagtttcttgagaacttgtgcaatagtattgggtccaaaccactcccccacttgtttgcctagagatgcccccatcagtgctatttggtgtatggaataaggagcttgccgacgatcttcaaacttcttgagaatctttaaatatgttaaatccttggattgaggatcccatagccaatctcttcctaagtgaagagacactagagcttgtgccaggaccatttgtccacatcttaacatacaaccccatcctttgtctgatgtaagcccttcattgcctcctatcggaatgaagttttttctgtaggtgacccatagtcttgaaactatgtcttgtcttattttgttgatatcttgaacagcattgtatctttttccaagtatccatactggctcagttgtttttgggatatcatctggctccagtgttgcttctaaacaagcttcgaacatacaatccattatatctcttgtagccacacacatttattattctagttcgatttctcttatatgtaaagaatttatttcttatgcatttggaagttattgttaaatctcattgtttttattttaacaaatcatacgtca

SEQ ID NO: 9773 - DNA, 789 bp, Diabrotica virgifera
ttctgtagtattagtttaaaactacttagtcacagtcgtacttaatcagatcatacaacggaacgtaacagtttgtcgcaactctatatatttttttagtcggtgggcttgtttatgattatttactataagtttgttcctacagaagtttccaactgtcaccgactgtcagacgcatgcgcaataataatttcgccgtcccaataagattttctctgattactagtcaacaaagtacactgttccatgaaatatttaatcagtttgagattaatttctgacagtttgaaaagtttccgaactttttgcaaactgttaatcacggacatgcgcaattagtataattttgattcactcacatgctcacactaaataactatttatatttatatcaaataggtacctttacctttgttttggttattttgttgatttaagtacattattgcattttagtgttttatacttttgttataatttatgaaacaatgagtgatagcaaatactatggactgtccatagtatttgttaatgatgtgctcgttgctcgtgttgtggtgtaaagtagtaaggttaaagttttcgtttccctcgttttccagaatgctttcgtcttctttcttttcttttctctgggcactgctcttaggcaacttgccagctcggtagaatattgtttcaacaaaaatcacaaactagttcgcggctggttgaattcgcacatgcatattgtgcagcagtcagaaactgtcatgaactagtttgtgactctttgtaggaacaaacctt

SEQ ID NO: 9774 - DNA, 795 bp, Diabrotica virgifera
gtttattcggttcactcacgtcgtacaaatcatcttgtatagacgaatctaggtggatcatcatctagttaaaatcgaaactatttttgtagcttgtatgggatttatttaaggatggattataggattaataaattgttctattgatgtatgcgagcaatttgtgtacctaaatattgtatttgtatcccacgttttacttttattattatttactgttttattgctctgtttacatgactaaactcggttacagacattggggtgacatttattcgagattttaaaaagatattcatgtttcccatgactagacagataaagctaaatactaaatattttatttgtgctatttttagtatacgaaactttaacgacataatatttaaatagtttaaaataattacgctcgcactcgtatttaggataaacatgtaggatataaattaaacataattcgaaatttttaactcgatataaaattagaaaacttcaatattgataacaagtaaaatcgaagttacaaagaagtggctgaagggaatattacagataataatttgaacagaaattaacactacatagttgatttcttgactacaggtgcaaaatacgaatatgatgtacctctagtactctcatttatcgacatattatactgttctatacataggattcgtttaattatttttttaattttaatttttttttttttcaatttatgttaagtataattatagtaaaattgcgtttttccacaaaaaatgtcaaaaaattaaacaagctgttaaacgt

SEQ ID NO: 9775 - DNA, 794 bp, Diabrotica virgifera
gaggacgcattctgcttatggagtacccacccacatgctagcggctgctcaacagagcagtcattctgcaggtcaggttacgtctcctgaagaaatgcttgcggaaagggcactagctttacaagatagagaaaggatgtacagggaaaggcaaaaccaggaaatggaaagcagaggagaaagaaaggatagaaagggacaagcaggagagggaaaaacttgagcgggaaaggcaggaaagagagaaagagttggaaaaagaacgacaagaacaggctttgcacaaccattttgaaaagtctctacgagcagctcagccaaagagggaaccttggaatcctattacgggtagacctactcaacctaggacgtctagtatgtctgaagatgatagaaaacgtgttgaggagatgcaccacagagaacagcaacagaggcatatgtccgttagggataaccgtgatcataggtcatattatgctcccattcaaaggacgaccaccagtataccacctcctccccctgcacatcgaagcgtttcatctaaatctagcatagagaaagtccccgccatatcagtacatcaaaccatgcctaaaactgaactaaatatttatggatatcacccatcccttcactcacaaaatacctttttgaaccaaagataaaatccgaaatgcacaaaacacagacgggaggtttggttgttaccaaaactggtcaattagacagagatggtacagcgatggttagcgaattaaaaattctgtgattgtcaaacatgaagcaaagaa

SEQ ID NO: 9776 - DNA, 796 bp, Diabrotica virgifera
  SmartBlast Evalue=0.000000002; Info=MKL/myocardin-like protein 1 n=1 Tax=Harpegnathos saltator RepID=E2BV92_9HYME
ccataacggtactgcgatggatcctgatggtccggaggccactttgggaattgatccatccgatttactagagactttagataatttagaaaatatggatttttctcagttagtgatggaactagggggtcaaaattcacaagagaacaacaacttcaacaacgaccaccaacaagaagaagacattgccatggacaccgacgattggttagaatcacttctaccttctgagacggtctatcacagcaataatagttctaattcggctcctttggccactcaagagaccgatctaggaggctatgatccattgatgggaatcgctcaggatccattcgatcccttcaatttggaggaatttagaacgccagctgacttgacggcttctttatcctgggataaaatagactacgcggcgtagttgacgaggggtttatccgtatgtgtgattgtcggtgcagtgtttagctgaaacttcccatctagaagagtttcccatctagaagaaaataaatctaatggactaatttatggacaccataatagaccatcgcgcactgcttattccaatgatgtgaaattccactcggttacagattgacattccacaaaagatggccgtcgatttcgccttccattggcggaggcgcgggaccaggacggcccaatcggccaagggaacacatcaacataaaatgaaacaaaatatttattgtaacattgtatatatacgttatacataccttatacatatgtactaatttgtcttagggttacacacaagaggtaaattgtt

SEQ ID NO: 9777 - DNA, 796 bp, Diabrotica virgifera
  SmartBlast Evalue=8E-46; Info="Histone deacetylase hda2, putative n=1 Tax=Pediculus humanus corporis RepID=E0VZV0_PEDHC"
ttgagaaatacagaacatctttcctgtcataaaacatttgttgtgttgcttgaccatgatggacatcataatcaacaatcaagactcgcttggcatggcctgatgaaagtgccatttcagctgctatagctacattgtttatgaaacagtatccgcaaaattcgttactcattgcgtgatgaccaggtggacgaaccaaggccaatccatttctgaggttgccagtcattacttcttgagttaatgataatactgattcggcagctgctattgcagaatcatatgtttgctgggtaaaatacacagcatcatatttagacgagaatgttcgtaaatcttccccagaaagttccttagttgatttgagcttttctaataattcaggtgtatgtttcttcaacaatacttctgtagaaaaatgtaaccttggtactagtacacatcgatcttttaattccaaggcattaatccttctttcagcacaagcaactctttcaatgttttcagggtataaaggatcccatatacaatagtggcttgagctttcctcttgaataaacccagttttacttggagcaactgttatacaattgtttgccagttcgtaaggatctttgagcgatgcaactggttgcccaagttcaactttcctcttccgtttttcagccaagaattgtgacaacttttgtcttcctccaggtgatttggttgctgtggaagctcctggatcaccaccacttttatctgtgtctcccattataaatatttaaaatcacattcagttttatcacacttg

SEQ ID NO: 9778 - DNA, 795 bp, Diabrotica virgifera
  SmartBlast Evalue=8E-14; Info=Folliculin-interacting protein 1 n=2 Tax=Gallus gallus RepID=FNIP1_CHICK
cgaaaaactagaagacctaaaaaagaccaatgaagttaggaagacagaaagaaaattatcaagtaatacactagatatatctgagcctgagaatgcagataaactgaatgttatcaaatttcctctgcccgaagagaaacctattggtgacctaatagaggtgttaccaacatcttttcttcccgaccataatgctttagacgaattagtacctgataagatagttcaaggattaaatgttcctaaggccaaatgggaaagaatcctaaccaatgacctattacggaaaaagtcatgtttgtttacggatagaatagaagaaaatgtggcgattgtagcagatgttgactcttgggatgtacaagttttatctagtgtgaaaaaaaggatggcaaaaagagaaatgggtggagatgtagatgcctctcctatagtagcaagtatgttggatactgtcctgcagatgtggaaacaaaatatgtcaaaggagcagtgttctaccttcttggaacaaaaactaacagaaatttgtctaaaggcgaatgcattatgccaatttttgttgacgaccgatttttgtacgatggacacattggtcaaaacgctgaagataaatttagtggacgtgccccttttgatggctgtgggttctcatattaatccaaaggttttacaaaaatacgggctgagctaccaatgagtgattttatacgttgtgagtttattatttataggcgtgtgtgtatttattttatttattgtattttatgtgaatctcgaataaaatatttattt

SEQ ID NO: 9779 - DNA, 796 bp, Diabrotica virgifera
  SmartBlast Evalue=1E-14; Info=Er lumen protein retaining receptor n=1 Tax=Aedes aegypti RepID=Q178F0_AEDAE
gtttgtttgatgggagatgggatttccaatttactgcattgcatactatagtgatagttcaatagttgcactgcaaaatactcaaagaacaagtaaaatgtgaagtgcttttggtatgaaaaatagtaccttttgtatattttcctttattgatagtctgttttaaataaacatgttatcgttcttacaagatctggattttgttgctgtaggcgaaggcatccatacgttcgcagtgtcatttttgttctttagtttatattttaataaaggatcgctgggtgtttcagctaagacccagatactgttcctagtgtcaataatagccaagagctggtatgtcattcaactggggcattacgagccaatctactggtggcttcagttttcgcatatagcattcacctggggcactcttcttttcttatttatatcgaggactgctaaccgagaagatgatactttctggtccgaattggtcattttaccagcaatatttacgtcggtactggccagtcagtctttgcttgcagtggatttgctgtacaccttcagccagttcctcaaatgcgtagctgtgatccctcagatgtacttaatattaaagaccaaaaaaatctcaaacacaatagccatttacctttttgcgatgggtttccaagactggatagccaaatattctacactaggtttcaaccaaactacggatataacttcctttatttacttgggcgtttacactgtttctgtaatgatcatgctacattctggtgttcaaatgtacagcagtgatgat

SEQ ID NO: 9780 - DNA, 795 bp, Diabrotica virgifera
  SmartBlast Evalue=3E-96; Info="SEC14 cytosolic factor, putative n=1 Tax=Pediculus humanus corporis RepID=E0VKH0_PEDHC"
gtccggtatcaaatacttgcacagttcttcttctgagccgacaaatgttaccttgctggtagtattttcgtccagccatcctttgatcactgcccagcaactagagaacaaggatgaagagtttatgatcaagcacactcctaatctttcgggatagtgccgacttagcagccatatcaagttcttcactagttgataatccatacaacttactccaaaatcttgaagatcaaatactatacacagattgtctactacttcttcaaaacattttttacaagcatcctccaaacaataaacgatgaacttagtcagctcgtcaatatccctattggaggcattatgattcttagctggtatatatatcacaggtctgccaaacatatctctatgtcgcaagactcgagccttattagcatccaagttgcttttgacttcaggggagtctgctgttaggttctctactccatattctttcctccatttgttcgtcttgagaatggccttgaaagcatcgtcaacagttttaaaagctcgcaaataccgcctcaaggagaaatcattatgatattgtgtaggatcagcttctgctattaatttcattcgacttttcaaatcttgaaaatcagcttcgtttactggttttaattgaacttcagacattttcactttgtttaattaattattaacaataatccaaagttctttgtttcctaattcactgcaacgacacgttatgaataatacagtataccagttttattaatcttatctaaagaattcactacatatcta

SEQ ID NO: 9781 - DNA, 792 bp, Diabrotica virgifera
  misc_feature (766)..(766): n is a, c, g, or t
  SmartBlast Evalue=2E-60; Info="Aladin, putative n=1 Tax= Pediculus humanus corporis RepID=E0VE24_PEDHC"
attagatcatgctttactatcactccgtagatgatggtttccgtgtttgttgcgaacagtagggtagtaccacaatttgaccaacaggcagactgaactcttccgctgagtactgtccatctttcacattcccaattgcggcaatcccaaactctaaaaacaagactattggaacaagtaaacaacttttctcctgtaggcgaccatttcacaagcaggttccctgaaccccctgatcttttaagagtactcgtcttatctaattctatatcccatactaaaatagactggtcacatgctgctacagatactagcttgtccccattgggagaccatgctatactcattacaggtctatggtcaggtctttgtaaaataattgcgttactaatggagggtcgagatatcatagaatttggatctatatgccaaacaatgattccattttcatagcctacagcgatctcagtatttgacattggtctccaagcaacacaagttatatgtttctgcatcttgcacctcaagatcgacgaaatggcattaggatccccattgaagatcctaacactatcatcacacattcctacagcgactttttgcaataaggatgccaagcaatgcatctcacagttgtatttagccagtttcgtgtttgggaataggtagctattaaactagagccactgtgtcgtaagtttggatttaatattagctaactttttaatatatttcaatatatctaaaataccctttgcagattttnagataaatacatggttgtaggatgct

SEQ ID NO: 9782 - DNA, 791 bp, Diabrotica virgifera
  SmartBlast Evalue=2E-35; Info=Serine/threonine-protein kinase RIO2 n=1 Tax=Camponotus floridanus RepID=E2A459_9HYME
attgaatcatgtacaagaagtcgaaaatattgattcactatatgacgatctaatgaaccttattatacgatttgcagattcgggtgtaatacatggagattttaatgatttaatataattttaaatgcagaagagaaacctattataatagattttccacaaatgatttccactgaacatccaaatgctgaatatttctttaacagagacgttaactgcgtcaaagatttttttaaaaaacgctttggctatgaaagcgagctctacccacaattttcagatatcaacagggaggataatttggatgcagaagtagcatgttctggatttactaaagaaatggcaaaacatattaataaagaatttggctatgaagactctaatgatagtagcgaggaagaggttgaaggggaaacagaaaatgaaaatgtaccagagagagatgatttctttgatgcgtctgacaagttagaacataaagatggtgtacaagatttgggatcaaaatccaacagttcaacaataaattacatatttgatcaactaaagctgaagagtaaatttgatgatacagcacaaaaatagaagatattcaactggattcagatgattcgtcagatcactttgactctaggagcatgctctcaactacatctactatacctccagaagaaattaaaaatcgtcttaaaaaacaattgctggtcaaagaaaaaagacaacaaagaaagaaatgtgtagctaaaggcgaaagtagtgcagtgacaagaagcagaagagaaaattccaat

SEQ ID NO: 9783 - DNA, 796 bp, Diabrotica virgifera
  SmartBlast Evalue=7E-61; Info=Sugar transporter n=1 Tax=Aedes aegypti RepID=Q16M29_AEDAE
tttagacggtcctaccatttcaaggcctataacataagccactagaaagactccagaagtagtcgctccgatgataagtctgagaaatgtaaaagtccataattctggtgctaccgatgccaataaaccagctaccaactgaaggacaagtgatacgaagaaggttaatttacgaccgtacctgtcggacatttctccaaataaaattgatccaagcattacacctaccataaaaagggcattcgatgttgctattaaataggccgagttacacgttagcccatactctatcacagacgtatatccatatatttcatgatcaaaaatataagattcacatggttttgttttgttatttgtatcataaatctcgcaagatgagtattttttgtggagagtatctctcggataatacagagacaacgtcgtctcatttaaatgataactagaattatctgtttcatttggtaatttacatctataatttggttctgctactaaaaacacgttgcctaacttgtgaaaggcacaaagaatggcaggcaaacatagcaaaaaatagattttcttctgatacctaccaaattctccaagtaaagatataacatcgtcgtaactcattgtcagttattttttgtctttgtaattttatatcaaagaaatattccagcactgtaaaacgcggtttttactactaataacagttaaattacacctcatctacttgtaaataagttaactaaaaacgtttttggcgtaaacgaagcacatgcgttcccatttctacgctctgaat

SEQ ID NO: 9784 - DNA, 790 bp, Diabrotica virgifera
  SmartBlast Evalue=2E-34; Info=Endonuclease-reverse transcriptase n=1 Tax=Bombyx mori RepID=D5LB38_BOMMO
gttaatgttgagtatggcataacatcgcagcatcagatacgccgatgatatggtgttgattgcggatttcgacttagatctacaggaagacgtctcatcgacaggaccaactcggtctgtgagcaattcgacatgaaaataaacactaagaaaaccaaagtaaggtcaatgcgacaaaaccagaatgtatctcaacattgcacaataaacgggcacattttagaagaggtcaataaatttaagtacttggggtattggatcaatagcagcctaaatcctgatctagaaataagatcgagaatagaagaggccagaaaatctttcgaaaaaatcaatagactgctatatgattctcgaataaaactcgaaactcgactatctttatcaaaatgctacgtctggtcgagtcttctttatgcagtttaaacgtggacccttaaaacagcaaccgtaaataaactgtagtcgtttgaaatgtggatctaccagagaatcctcaaaatttcatggacattgcatacctcaaatgatgacgggcagcatagattaagcaaagaacaagaacttttcaacacaatgaaaaaatcatcatacctaggacacatacagagaaacatatgctcaaaaaatagtgaaatgaaagatcgagggaaagagaggactaagaagataaagactgccgtgactaagaaacgtccgacaatggacagggctaaatttgaacagctaataataacagcagaagacagacaagagtttgtaattatagtagccaacctccattgaggag

SEQ ID NO: 9785 - DNA, 789 bp, Diabrotica virgifera
gtttagcatttataatgaagtttttaatatgtatgtgttttcttgtaattataggcttaagttcagcagaaaacgagaaacgaccggctttaaaaagaatagtaagaagtactctcgggcagattactactgcagccactgaacaattaaaaaccctgatcataaaaaattgtgtagaaaatgggttcgccgatattgaagacgatttaaagcaatcatttagtgatcttgaagcatgtgtttccaaaagaaaaatttacgtagatggtaaagaagattttataaataatattaaagaatgcagtcaagaatctattaaaaaagtcaaaggctgtttaactgaaaagcagagctactttcctgattttttgttaaatttggcaactaaaaatgttgagttgctctacgacgaagaaataataaccaccgacctggtaccatgcatgaaggtttttcaacgatttgacgtatcctttggttaccttaagtgtatagtaactacttctaaaaggacgaatgataccgcaacaattccagattctcttgaaaactattgttcacgatttttaccagctatacactgtttaactgatattcttgataaagaatgtacccaatatccaaaagttaaaaagtatagtgaagatcatcttcgtgcgaatgaatatccctgtgagcagaaatatgaataaaaagtttattttaaaattcaatctttaccactaaagttttatttatgaggagcagactaataacaagtttttattgtatattgcgttatcaataaat

SEQ ID NO: 9786 - DNA, 585 bp, Diabrotica virgifera
ttttatctgatggttggatattaggtttgtatgcagaaatttgtataaaaaataacttttgttcgtaaaattaataatcaaaaaagttcacattatgtggtcaatttaagcagacacgctgtatatttatgtgtgaatattagttttcattttaagcgcgcacaatttgacttaaatttctacctttataatatctttagtatatatttctagcaagtttcattagtaatggtagaaggttgatacaagcattaaatatttgctaacacatgttagctcttgtaactgggtttgtttagttgaaagaatgtttataatagctgtcagaccgattcctatatacgaataaacaaactttcttatgcacctgcgataaatattgtaccagagctcttataatatttataagctcgaataattaataaacgcgttgatgcgttctgtaatttgtggccacatacaacgtgtctacttaagttggcaacatatgaaaaactttcttgttattcattttacgaaaaaaaagtactttactcttgagcgaaattcaaatatgttgacatacctcgtataggattaataaaa

SEQ ID NO: 9787 - DNA, 795 bp, Diabrotica virgifera
  SmartBlast Evalue=8E-97; Info=Phosphoglucomutase n=2 Tax=Culex quinquefasciatus RepID=B0WVX0_CULQU
ccccgcgagttcgtacacctttttaacgacttcgtttgttaatttgtcggcttcttctactgtcgctgcttcagcatacactcgaattatatcttctgtacccgaagctctaacaaaggatcttgctttggaatatttagacactatcgaattgatttcgtcttggagtccatctggagagacacatatccgttctgcgtccgttgtggttacgacgttacggtccttaactgtaactttcatcaatctattaggtaaatctgtgtaacattcttcccattgcttgacgttccatcctctttcgtgaagaatcgtttctaccaataacatatcggatattgcatcacctacagtctcgttaattaaatctattaaatttaaaagtttattgcaagccgctttctgttcactagataaactatcacttttcatagcagcaaccagagtttttttcgcctcattactaaacacgacagtaccgtgtccatttgcttcaaaatatacaccaatatcataagttaaagctagtctatgtaaatgttttactcctgtggatgcacaagctacaggtacgtttaaatttttagatatgtattcagtcgacgctccgttggcgtacgcggtttgaactaaccctattttcaagttcaaaccagtcttttgtaaaatttccttaagataagaagcagccaaggtagctattctgtcaccgtctaggagatggaatttttcgttatcgtcaaggtaatagtagacaattctatcggcgtcgccatctacagaacagcaacgagt

SEQ ID NO: 9788 - DNA, 792 bp, Diabrotica virgifera
  SmartBlast Evalue=2E-20; Info="Fetal alzheimer antigen, falz n= 1 Tax=Aedes aegypti RepID=Q16LL8_AEDAE"
gtggctgagtatgagtggacgactgtaactgagcttgcgcaggaaccaactgggactgctgcggttggttttcggctacttgttgtttgacgtgttgcagtagagctgacgtttgggcttgctggccgtttactagtatctgccgcacgtgggaaggtacatcgccagcctgttgcagtatctgcttaacgggtgtttgtttcggagttacgacagtagggttgacaacttgctgggaaacaactggctgagcgggagcggtggtttgttgtaccggagccaaaggcgggggatttgttgatgtagtttccgttgactgttctgtactgctgggctgcaccgcgagatagatcttggtgggacccaacaccccctgcttgccggttgaagcttgagctttaagtagctgttgtttaacttgttgttgaacagctgctagctgctgaggtgtaaagtcagctccttgtagaccctgtagaacgatcctgggaccttgctgagtttggataacctgcgcggtgacgcatttaatgactgttccgggcggctgacctgtcattaactgatccatagtcgcctgatcgatctgactatcctgtgccggttttgttggactctgtaaagcttgctgaatggcttgatgtgtcgaagttggtggctgttggacaggttgcggctgctgttgtacttgtggttgcggctgcgcttgttgctgtggtagcgactgcgcttgctgctgaggttccgcttgacgaacaacctgtttaaccggagcctgtacttgtggtactg

SEQ ID NO: 9789 - DNA, 795 bp, Diabrotica virgifera
tgtatttgctatggcttttgtacaatataacatcagataatatcacaggaattaacgtaaagtgtaatgcaactacaaattttgttccgcaacaggaatgccacaaagatacaaattccgaacttcgatagccttccacggagatgtcggtagtgacagtcaaaactacaccctcagaaaaagggaaggagagtcaacgtccctcccctcggtgcgagcgcgaagacccacaccgggaacccgtaagaagttttatcatggacgtattctttatttatacgtccatgagttttcatacgtccatgagttttattcatagaggggtaactttttcttattgagtagtagtagtagtagatgatttaagatttatatctttttcgccagacggtcaaggcactctcttgttctgaggcgaaactcgccaaaacgaacgtcgcccacaaaagaagaatgtgccttgtgtgttctgggcacttaactcattcgcggacatgtctgcatatacagacacttacaaagagaagttactgtctgcataagagtacataagacctgtccacgaatgtgttttaacgtgcattggactgttgttgtttgccccggtaagccctgcccgacacagttgtcaccgtatacagcagaaagattaggcctttgtgccttcaggaagcattctggattactttgattaactgaattaccaggataaaatgattaactgaataaccaatgaccaggataaaaaagagtcatcgttctggggccgaaccgcgaaactgcgcgcaaggctcc

SEQ ID NO: 9790 - DNA, 795 bp, Diabrotica virgifera
  SmartBlast Evalue=3E-60; Info=Diapause-associated transcript-2 n=1 Tax=Leptinotarsa decemlineata RepID=Q8IT92_LEPDE
cgttcttcgaagtcaacagatacaaacagacacaaaatgaacaagtacatgattttagctgttcttcttgtaggcgctgtcctcgttcagggaaaaagcgtccaaaaagaagataaaaaagaggacagttctgaagaaaatgtcagagaactagcagaaatattgaacaaaaaattcaacactactcttcttctcgatatgatcaaaatggccgaacaaaccaaagctaaatgtcccgacttggaagaaaaacttgacgaagtttccgagaaaattgaaaaatgcgttgatgatgtcgaacttggatcagaaactttctgctcactcatcaacaagaacttggttaaatgtactaaacccgccatagacctaattgcttcttgtttaccagaagaatccaaagaccttccagtaatgttagagaaaatgctcgctgctgttgtcaaacaagcttgcagttctacggttgaagaagttttggaattgatgaacccatgtgcccttgaaaaagatttcgcttcgtacccagcttgcaaagaaatcaaaacagttatcgatgaacacaaaaataaacttccatccaagtcactcatctgctcaaccatgcccaaggtaaggaactgcgctaaagctcacattgaaggtaactgtcaaaacacaatcaccagacaagctgccttgaaattccacgatgccatcgatgctgcccttaaagacgactgtgatgcccttaacaaagcctaaataatttatgacaaaatgctccaaaaaattaataaaacatttttctagtta

SEQ ID NO: 9791 - DNA, 794 bp, Diabrotica virgifera
  SmartBlast Evalue=1E-83; Info=Ribosomal protein L13 n=1 Tax= Chrysomela tremulae RepID=D1M823_9CUCU
ttttgataacaaatcctttattatcttatataaaaattatacattaatttactttttggatttcttttctttgcctgcagcagcttttgtcacatcctctgggttttctgcagcatccttaattctcttagcacggatacctacaagtcttgcatcggcacgggccttcctcaatgttacatatgcttcaaatttcttttcctcctcagttggaactctagcctttgttctgagacttgactgtttgatagggagaacttctccctgtaattgtgaagctattctacgttcttcttcagtggcttcaccagctctaatcttcttcttttcgtggatggggaagaggattaatttggatttgtattctttaagacgttgagcgttcagttggattgattctactgatttgtttcttcgtctgtgatctacagcaataccaacagtccttgcaaatctggggttaagacctgcagcttttaattcctggagggtaaatccacgtccagcgcgtactttagtatggtacctgattgatggacaccttacgacaggccttaaaggtccagcagcaggcctaggggcaatagcacgagccttcttaatacgattattccttctgcgaattttacgggcaggctggttaaaccaagtcttgacgaatcgttgccaatccttgtggaaatggccatttggaatcatattattacgtttgggagccattgtgcttgttttttactataacagcaccgatttcaccgacacgtgctgtaaacgaaatggaaaagacggaaacg

SEQ ID NO: 9792 - DNA, 792 bp, Diabrotica virgifera
  SmartBlast Evalue=1E-126; Info=Probable elongator complex protein 3 n=11 Tax=Drosophila RepID=ELP3_DROME
ggacacacagtgaaagcagtatgtggcacctttcatctagctaaagacgcaggttttaaagtagtagctcatatgatgcctgatttaccaaatgttgatcttgaaagagatattgaacaatttattgaattttttgaaaatccagcatttagatctgacggattaaagatttatcctacccttgtaatcagaggaactggattatatgaactttggaaaacaggaagatataacagttaccctccttcggtacttgtcgatcttatagctaaaattttggcgttggtaccaccatggacaagaatatatagagtgcagagagatattcccatgccactagtaagctctggtgtagaacatggtaatctaagagagttggctttgaacagaatgaaagatcttggtttgaaatgtagagatgtacgaactagagaagtcggtattacagaaattcacgaaaaagttcgaccgaatgatatagagtcagttagaagagattatatggcaaacggtggctgggaaactttcttgagctatgaagatcctgcccaagatattcttgtcggattgctcaggttgcgaaaatgctctccggagatgacgtatcgtccagaattgcttggaggctgttcaataatacgagaactccacgtttatggtagtgtagttcccgttagtggaagagacgataaaaaatttcagcatcaaggttttggtacccttttaatgaattgggctgaggaaatcgctatcaaagaacacaattctataaagatagctgtcatttctggc

SEQ ID NO: 9793 - DNA, 794 bp, Diabrotica virgifera
  SmartBlast Evalue=3E-70; Info="Elongation factor Ts, mitochondrial n=1 Tax=Aedes aegypti RepID=EFTS_AEDAE"
ttcctttaccgggggtataggttagttttagttttacttgtaaattaagaaaaattagaaaataaaatgttattcttcagaagtgtgaggcatctgtacctaaccaaacgcaattttgctgcagaaaaatcattgttggctactctgcggaaaaaaacaggttacacctttgccaactgtaaaaaagctctagaaatgcataacaacaatttaggagaagcagaacaatggttgaaacagcaagcccaagctctaggttggtccaaagccaccaaactggaaggaagacagactacacaaggacttattggagtggcgatagaaaataacgctggggtgttggttgaagtgaattgtgagacagatttcgtcgctagaaataaagagtttcagaatatggttgaagaaacagccatgagttgtttgcaatttgccaaaactcaacaaaattcagcaagtcagtataatacaaagatatgtttggacagtgagcagctgaagaatttgaaggcaggtgatggtaaatctctagctgatagattagcacttatgattggaactgtaggagagaatgctagtttgaagagagccatgtgtatcaaagcaggagatgggattcacttaacaggttatgcccatccatctggcagcacgagcaataatgtacagttagggcggttaggaggactagtggcttataaagcactagaacacaatgaaactacatctgaagttagtaggggcctctgtcaacatatcgtcggcatgtgccccacaaaaatcggttctgacga

SEQ ID NO: 9794 - DNA, 794 bp, Diabrotica virgifera
aaagctcaatccacaaatgcaacgtttaagtctgtgaaaaaaaaatgtgattcatgttaagtttaatctttaaactgtattgttgaacaagcattccctttacaaaaaaattgaacagtttcagaaagatggtctaaaactataaaaattactttgatattccaaatttttattgtttatataatctgatgaagtggttatatgtactacacaaaaatttatcttacatgacatgacagaaaaaaatctgtatgacctggaaatccataatcaagtataccaacttgaaagcaatggctttaatatagcgaaaataaaattattgtatgtaataataagaaaataaattgatactgataaccttcttatcaatatagcaataattacatgcataattatatctgaatttattaatgacatttctgatcacatgggtgtaatagcttcacattcttattttactactccctcaagacggtcaacaatttaaaatggcatcttcaattaagccctttgtattaaataaccccacaaaagaagtatgaagggtcgtcagagaaattccatatctctgatccttggttataatcactaacatacagtggaaccccgataagtcggcccccgataacccgtaccgattttcatcagacaaaaatttcaacaataaaaatgtatgtaatataatatctgagtgacaatgtgtatttgtgtaatttgaactgtacgatagtaaaaatgactcatggcacacggcggcagagcgacgttcattgtctcggattatcggaaac

SEQ ID NO: 9795 - DNA, 789 bp, Diabrotica virgifera
  SmartBlast Evalue=2E-73; Info=Mono-ADP-ribosyltransferase sirtuin-6 n=1 Tax=Camponotus floridanus RepID=E2AN21_9HYME
tttaatgaagcaattcctaccaaaactcacatggccatcaagcatttgttggacaaaaatattattcactacgtaataagccaaaatatagatggacttcacttaaagagtggggtttctagaatacatatggctgaattacatgggaacatgttcattggtcaatgtaacacttgtgaaagccaatttgttagaccagaagctacctcaactgttggcaagaaatgcctaaatgaagattgtaaaagatcctctatgctacgaggacgtacttgtagaggtaaactacacgatacaattctagattgggaggacagtttaccggaatatgacttggaaatgtccgattatcattccagtctagctgatttaaatatttgtttgggtaccacccttcagatagttcctagtggtaatctacctcttcgatgtaaaaaatatggcggaaaagtagctatagtgaatctccaacctaccaaacatgataaaaaggtagatttaataatcaatagctatgtagatgacgtcatatcaagaataatgaaaaaactaggtctcgaaattccagattattctaccgaagtcgatccaaccaaaaaccaactgccatcttctgtgattgaatggaatattttaaaaaccaatattgatgaatttagagacaaatatgatgtactggtgagagaatacaaaaaactgagaatagaacaaaacattttaaataactcgaaactagctaagacagtgaggctgaggaaagaaaaaagtattaagaaaaactctagatct

SEQ ID NO: 9796 - DNA, 789 bp, Diabrotica virgifera
aactaccaattagacagaaataatcgattcgtataaagcactatacatagattggtatcagtttgttggatagtatgacggattttttttaagttgctatgtgttaacggctttggatagatcggacagaaagatatgtcaaatccggatgacaggaaagaataaacgtcagtggatattttattctcattctgaaatattcgcggttaaaaagtctttcatattcattagacgacagataagatagtaaaatagagctagagagaatagggggtgagtcgcactagtctttgcagacaaaatcaataaatatggttacctataattctgtggactcgctttttttatctatgaagagattatatttacgtataaaagtgttaagcaatattaattactagtttacgtattaataagtggctagaggaattgttttcttcagtctcgttcaaaataaattttaacatatatatcatagcagatagctacacaaataaacttaaaatggtttaatacagtataaaacagaaattttgaattgacaaaaaatctagcggacaaacattttgatattcagaacagtttcgccaacaaacagaatttttactgaatacgtcactcaaaggtagtgtataatttgaaccaacatattatcgcaccctcagtaatatagaggcacaattcaaaaaagtagatttttgggaaatcgcgtttaaagattctggtttccacaacctctggattctggtatttttttcaaataacatgcttattatttaagttataaat

SEQ ID NO: 9797 - DNA, 794 bp, Diabrotica virgifera
  SmartBlast Evalue=1E-94; Info=Mitochondrial Rho GTPase n=2 Tax= Tribolium castaneum RepID=D6X1S3_TRICA
gtaaaaagtgaaagaatctgaaataaaacagcaaaaattaatatttaaatgaagattttaatcatagtgcaatgtatttaaaaacaattacaaatctaacggtattctcctgggaaagttcacgctaagtcattcaataaaacagacctgtacctgagaaaatggtagtgaaaacttcccaaaaacgcacagttcgtattttgttagtgggtgatagtggtgtgggcaagacgtcgctgattttgtcgttggtaagtgaagaatttcccgaaaatgtaccctcaaaggcggaggagatcaccataccagctgatgttactccagagcaagtccctaccaacattgtggattactcatcagccgaacaaactgaggatgacttggatgagcagatcagaaaagccagtgtagtatgcattgtgtactcagtggatgatgatgactctattgaaaggatcacctcgtattggatgcctcttattagacaaaatcaccccgatggcacttgcccagtagtgttagtgggaaataaaatagacctagtagagtattccacaatcgatggtatttttgaaataatggaggagttttcagagattgaaacttgcattgagtgttcagcgaaaaccttaaaaaatatttcggaaatgttttattatgcacagaaggctgttcttcatcccacttcaccaatttactctgtggataaggctgatttatcagaaggatgcaaaaacgcattgatccggatcttcaaaatatgtgatatagactgcgacggactcctgaacgac

SEQ ID NO: 9798 - DNA, 784 bp, Diabrotica virgifera
  SmartBlast Evalue=2E-52; Info=Serine protease P38 n=1 Tax= Tribolium castaneum RepID=D6WDH9_TRICA
agtttgtgtattatttaaaaatgaatgtatatgttgtgtgtttatgttttatttcttgtagtttggcaagaaaactcacaattacaggtggagatgtagctgtgcctcacgcttatccatatcaagttgctatacaaataaataaagatcaattctgtggaggatctcttatttccgcaaattttgttctcactgcagctcactgcgtaaaccgaaaagatctgtcgctggatatcatcttaggagcacataacatatccgatacagaaacaacccaaattcacagaacaagcgccaacataataattcatgaagagtttgatgacataagcttccaaaacgacattgctctgatagaactggacgagcctgctccgataacttctgcgattcaaacaattcctttgcttccccagacgcaagctgatgatcctttcacaaacgagtatgtaactgttacagggtggggtttgattaaagatgtgttcaatcccactattaaagatatatcaaaggtactaatggttgtaaatgttacagttatgctgttggatgattgcaaaaaatattatgatggcgattactttagtagtatagtctatattactaataataacatttgtactaatggagactatcaaaaagggacttgcagtggggattctggtggacctctggtctgggtaatgttcaaattggtatagtgtctgctggaacaggcttgtgtcagattggtgctccatcagtgtttactcatgttggcaaatatttggactggattaaa

SEQ ID NO: 9799 - DNA, 793 bp, Diabrotica virgifera
  SmartBlast Evalue=2E-25; Info=Mitochondrial ribosomal protein S26 n=1 Tax=Glossina morsitans morsitans RepID=D3TRB7_GLOMM
cattgtgttgggaacaaaagtagggttatgtcatattaatgctttttggtacaaaattatttataatacagtatagtatatttatatgtagttaatcaatatgtatcgactaacaaatatttgttcgagtacccttagcgaattaactaattacacgaaatatgaaactgttcgatatctcagaaaaaggaaaccaatccatttgggcacagctaaaagtaaactttttaggatacctaaacgtccagttttacccccagatgagaaactggaactaatgaggctttttaacaattatcgcacaactatgaagtcgttacgatattactttatggtaaatcacagtgccgaatttgctgaagtcagtgaagatcccgaagaaagtaggaaagtatttttagaagatttccaaaaatgttcagaaataaatgccaaatggaatgagaaacaaaaagaacttagagaaaaagatattgccaatcagcatgaagcagaacttacatatgttatgcagaggttagaattagaaaagaaaaagcagcaagttaaaatggaggaaatagaagaaatagtaaaggctgaaaaagttgcctcaaaagattttattacagctgaaaatctagatgaagccatagaaagagcacttgctacacctgtagattataattttgctttaacacccagtggagaaaaaattttaggtaggaatacaattcctaacaaagaaaaagaaacagttagtgttaaacaataactgtaatgtgtacataatatttagataataaaattaagt

SEQ ID NO: 9800 - DNA, 790 bp, Diabrotica virgifera
ggccaaaaatacacttatgaacattttcgtgggctcaaattgttccttttgagttcttctatcattattgttgattgaagtatattgtttgtagctcagatttgtttgaaacccttacaaacgaattaatgtacagtttttttaagaaaattataacttcaaaacatataaagatggaataatttaacaaacttttgtttggaagcctattaattaagcttgaaaatggtatcttctagggctcatttgcattcgttgaagcggagttacgatcgataaagctaaataaatttcgtcacttacttgactgtgagccgatcttgcgcctcataacgcgccattaaaagatcgataacttggccaaaaatacacttacgaacattttcataagctcaaattgttccttttgagttattctatgctaaggatgcagaaagaaaaagaacttgcgcttactattaaaaagcgcaaactgtaatacttgggacatataataggtttgttcgtagaacgatcagtaaccgttgccaaccgtcagacgcaagcgcgttcgtagtctacgaactcgaactgttaactgcgcagcgctaactgttaactgcgcatgcgtttgatggttggcaacggttgctgatcgattggatcgtactacgaacaaacctaatgaggggacaaaagtaccagctactacaattaattattcagggaaaaataataggtaaaagatccattggcagaagaaaacattcatggttgaagaatttaagagattggtacaagtgcagcaact

SEQ ID NO: 9801 - DNA, 795 bp, Diabrotica virgifera
acatggttccatggtaacaattttgttgtcaacaatattaaaattaatgatggtgttgtaggtacgatttgccatttttataaaaaaaaaatagtcacaatatcatttaacttcaagtgtgaacacctcaactgtgaagacgaattaaaaagagcaagatcttttttcgaaaaatatttcaaacatgtaaaactattaaaaatatttttatttctgtaatatatttaactctatctttgactgcaacactgtcaacattttaaatataagagaccagcagtgcttagtgatataatgcgtatctaaacgacatgtgttttggaaagactttcgagtacagggaaccccgcccttttctgagtttagacgatcaacaagcaacatctctgttgccgtactctaaaaaatgtaagaagtagacgcaacctcccttaaaagagtcaaccgactccactcaaaagagaaaataaagacaaggcaaacagctctgtttggcagtgtctcacgagttcataaaaatttccttgtacaattcactccatgtgctctcacaatgattgtgcatgattgctaaaagagcaatccattacgagtttcaatagtgcctttttgtctaaataaatgtctagaagtttgtactgcttttggagccggacccagccaacgttgccgcacctccacagccggcacctgcataccattgagtttttgatagacaaatagtgcacatagacaatcaaaagcctttaactactaagtacttgtagttagtagttttgtttatatgtatgatct

SEQ ID NO: 9802 - DNA, 791 bp, Diabrotica virgifera
ttacggtaattggctgatctacatgcagatattttcatcacctaaaaattattatatcgctttaacgaaagcagcgaaatgttgtctaagtctaagttctgttggattaaggccagtaggatattattttatataaatgatagcagaactctacagcagcaattaattttaagttagatagaagaatacctagtcctattttagaaaaatattatattcttaattgccaaaattcgctgagtgtcttgttgggtgtctataatcttgagtttttcttaatcatgactgataaaaaatattacttccgagttgtcaggttaacacaataacttaaattacataatatacgttatggacagatcaaactcctttactgggaaagacagccgagagtacattcttatttctgcttcagtatgtttcttgaaatttgaattttttaaagaggtcaattggtgataattttaattttaacctaactgaagaaacaccctgcattatgtgcacttctagtcatgtaaaccattaggattttgtgacatttggtcagtaattggaaaaatcaacactgttaaactacatacttgataatacctaaaacatactttatatgtagtgtgtcttggaaataacaggtaaccaaagccaaaactgaatatgtcgaaagttaattataaggaattttctccaatttactgtttttctccgtttttatttatgcattgtagataagacaatttcaaatatctgcaactaatttataaatacagggagtaacaaagaggcagggc

SEQ ID NO: 9803 - DNA, 793 bp, Diabrotica virgifera
gaaccgccaatggtggctactaatttatcttccttctttttgaagctttaagacagaagcaccatttattgttttaagttcgcgaagagtgcacaaggtggaaacataaggattatccgaattactcgactgaatcaattaagaagaagaaaaaatgtgtcaagtgtacgttgcatctgcaatattaattctcgcgattgttgattgcggttttgcactgcaatgttgggattgtaagtctgaattcgatgttacatgcagagattacttcaacgtttcaaggatagaagaaaacaacagaatttatgaaaactttaatttccaacaaagtaatagcagacaattttcaattggtaacagaaacaatcctcgaaaaatacattgtgatggaagttacgtcaatagttataatcaaaaaaccgtctgcttaaagacagtgtccagaggtttttccggcagtggttccaatgcagaaattccaaatgttcacagggaatgccgcattgtttcaaagagtctcgcagcaggagagtgtcccgatgaactgaaaaacgacagaagcagaactatcgattactgtgttacctgtgaaactgatggttgcaatctagcgacaggaatcaagtcaaatattgtgttagcatcagtacctttactattgttagctttgttacaaaagtagattataaataataaaatcttcactctgataaaaatgacaattttagaaattagatagatctgattgaatggtataaatctccttcatagaagcaactttatagatattttt

SEQ ID NO: 9804 - DNA, 784 bp, Diabrotica virgifera
  SmartBlast Evalue=3E-15; Info=Transposable element Tc3 transposase (Fragment) n=1 Tax=Camponotus floridanus RepID= E2AGQ7_9HYME
atcttggtcaatcctggtgacctaggtggccaaatatatggacgaatctatctatccatttatttctaaattttatgttgaggttgttcttaacatcacgtcaaaaataagcaggagctccgtccaattggagccacatgtttgttcgcacgctaagtggaaggttttaagaaggatccaaaaaacttgttttaagaaatttaaaaaagttgctccattcagattttcgtcaaaaaatatgggtcgataacgtactcgctcagaatactgccccaaacattaacacttcatcggtgttggcgatcagcagtaaaatgtttgtttactgtatcataataaaatgaaagctatgtctattaactagacgattattatcaaaagtaggtagattcgtctgtacacaatacattcttaaaaaaatcatgatctccaaattctaatctaaagtctataaacgaaaagttaaacgttcctgttctgtctaatgctggtgtggttgagttttatacggatgatagtggtttttcttatgtattctacatacactcgtttgactgatttccaattgacccgaaatttttctcgtactagtatttgggttttccgtaacagaaagcaggacatcaagttcgttaacgtcatcaaaaataattggtttatttttatttaacttttcgtacctatgcaacattacagtagcacggaatctatcgagaaatctctcaaaaacgtccttttttgggtgtcttctatcaggatacttttaggcgtaaactttagaagc

SEQ ID NO: 9805 - DNA, 793 bp, Diabrotica virgifera
  SmartBlast Evalue=2E-46; Info=Sip-prov protein n=2 Tax=Xenopus RepID=Q7ZWU4_XENLA
gaatacattccttcatttgctaaaagtattgagtcttgtaataataaactgttttcggtaaaatttaagttcttttattgcagtttaagaaattttagcccctattggatattgtataagaaaagtattcagtaatgacaatggagaaaatcacagaactgaagaaagacattgctgagctcgaatcgctagaaaaacaagccacgagacaaaaaaataaagacatactgagtatagaaatcagaaaattggtatcggaagttgtacttttggaagaaaaactgaaaactcaaagcaatcctgtaacctctccaatcgccagtccctctaccggaacagtaaataagagatatcaagttaaaataaataattatgcatgggatcagtccgataagtatgtcaaattctatattactttaaagaatgtacagagtgttcctgcagaaaatgtcagttgtgaatttactgccaaaaccgttagtttaacagtgacggatctggataataaggaccatagttggcaaattaaaaatctgttgaaaaatattgatccagtgaagagcacatggaaagttaaaactgatatggtattgataaatgcagcaaaaacatcatcagataactggtcacatgttacagaatgggagaaaaaggctagtgacagtaaggcacctaaaatggacactgacaaattggatccatctgaaggactaatgtcattgatgaaaaatatgtacgattctggagatgatgaaatgaagcgaactattgccaaagcttggacagaaagcca

SEQ ID NO: 9806 - DNA, 791 bp, Diabrotica virgifera
ggttgagtatttccgaatattactgaaaatccgtcagtaaataatcaaagcgttgacaacaatgtgttaaagtagtactaaaattagaatctgcgcaggttcttcccagctgggcgtactgtacatgttcttttctacattgtgaaagaaacctgaaatactcatccactgcgttgacagatgacatttggcattattcctcacgctacattccagaatggaaaaaaatagataaatacaaatttttgtttgtcagttcgttattttacataggtcagaattttttctctctaagtcttccacattttaagagtaccacaatctttatttaaatgtcaaatgacaaaagtcaaatgagtggatgagtattttttaaatctttttcgagtttattgaagtcattttttaaaacgagttaatattttttactgtaagtgtccagtattttatattgttgaagttaaagagattagcggcaactacttccattatggttgtttactattttttttataataacatgtcaatacatcttcataggaacacatttgaactttagttactattttatgttatattttgcacttggtattgtacatattacaaatcgtactccaggtcttccactggttactatccagtgttattgtcccatcgtgtttcctcacattgtcacttcatctcatctttgtcttctgccttcccatggtcgccgaaacttattccatcgttcatcattttatcgaacggtattgtctacaaattcctgctctctaacgcctgtcattttt

SEQ ID NO: 9807 - DNA, 788 bp, Diabrotica virgifera
  SmartBlast Evalue=1E-94; Info=Pro-phenol oxidase subunit 2 n=3 Tax=Tribolium castaneum RepID=Q49I38_TRICA
aatctgatgttgatctatctcgtggaatggactttcaaccacgtggtccagtatttgttcgttttacacatttagaccactttgaattccaataccgtattactgtttcaaataacggaccacctaaacaaggaacatgcagaatattcatggctcccaagtacgatgaaaggggcaatccatggttattcagagatcagaaacacatgtttattgaacttgataagttcaaagttaatctgagacaaggcaaaaatttgataacccgtaggtccacggattcctccgtaaccattccctttgagaggaccttccgtgacttagataccgcaagacccccaggaggtgaccgtttggctcaatttaatttctgcggatgtggttggccccaaaatatgttgattcctatgggtaacactgacagtcctggatttaaagccgaactgttcgttatgatttccaactggagagatgatgctataaatcaagttatccaaggtgtttgcaatgacgctgacagctattgtggtttgaaagataagctataccctgataaacgttccatgggttatccctttgacagacagccaagggataatgttgatactttggcagacttcctgacacctaatatgagagttcaacaagttaatattatgttctctaataaaacctacagaccaagacaaacataatttgcataaaaaatgatggactgattgtaatgtgtatggactactgattgtaatgtgtaatgagcttaaataaataaaggcattttgaaattt

SEQ ID NO: 9808 - DNA, 789 bp, Diabrotica virgifera
gccaccgaaagcatcgcaggcctggcattcaaacagtttgactgattgacagttacataatatatggaaacctgcattaagtgttattatatctgcagttcaaacagacttgttacgatttatttaatcgatgcaataaaaatggggcattttaagatttgcgctatgggaccacactaaaattgttgtttgctgtaactttgtaaaatatttaatccttaagcagctatgcagcaaatataataactccactgtcttttcgtaaacgattaaaaaaaatgatgaaacggttgcccatttgagtttattcaacaaggttaaataaataaataagaggcttacgcacaatcaatttgttgaaccttggatgaccggttttgaactctgctgttcattgtcaggtctctggaaaggtttcttaaattatgccgattcaaggaatgtagttacataggtgcacactaaaacgcttaattatgctcaagtgtggatctatgtaactacattccttgtattggacctccaaacctttccggaggcctgacgatgaacagcaaagtttagttttcgaaaccggtcgtctaaggtactgttccgatggtaggttacggaatcaattaaaaaataagtgtaacaacgaacagtaatatatttattctgggtaaacaagcgtgcttcgtttattatctcgtaagggtttgttagcgagggtgtgtctgaaccgttcgcctgccgtatcgatactgccagaccacaacactctttatgccatcatgcttgcggtcttac

SEQ ID NO: 9809 - DNA, 791 bp, Diabrotica virgifera
  SmartBlast Evalue=3E-91; Info="Hect E3 ubiquitin ligase, putative n=1 Tax=Pediculus humanus corporis RepID=E0VFB3_PEDHC"
ctgaagaaatcgaggagagtttctagaaaaattacagagggcgcgatctgctgttagatgcgtcaataattctacgccgttactatcaaagcctggtaccacacgattagttgtaggaaactggtcgctgacatcaaggaaggatgctgaaattcacattcataactctgatggacaacaacaaacaaccattttaagagaagatctacccggcttcatttttgaatctaataggggaacaaaacattccttcatcgctgaaacatatttaggtcccgaattctcagccggttggacaaataagaaaggaaaacgtcttcgctcaaaattagaagccacaaaaatgaaagtaaagtatttggctcatcagatctacgaacaatacttcagagtggcccaagctcaacccagaggtatagtggctaaactaggaaatattgttgcccaaatcgaacgcgcttgtcaaaaacaatgttcgtatggcaacaaccgagaaggaggcaactcatggaaggaaatccttcacaatgctttagaggaattgacagagatccttaaggaagatggagtggtatcagcgtatgaattacacagttctggtttagtgcaagcattattgtctctcctttcaacgagttattgggaacaaggtttaaaatcaagcaaaatgagcaagttccaaaaacagagagtacaagtatttaaacagtgtttcagaaacaagtgtaatgaagacaaatctcctattttaatactagtccataaattaatatctgtccttgagagcatag

SEQ ID NO: 9810 - DNA, 791 bp, Diabrotica virgifera
  SmartBlast Evalue=1E-131; Info=Plexin A n=1 Tax=Tribolium castaneum RepID=D6W8D3_TRICA
tttagtgaaagtgagccagtgattgcaaataaaccgtcggaactctctgcactctgcgtttattctctcaagtccatccggcgcaagttcatgcagaatattaagcactgcttcagtggaaaaggtcaacgaggactggattttatctcccctagtcatcagtgtgtgcccacgaaacttcaaacaatcggcgaagatttttgcggtcttgatgtgaatacacctctggggggcgaacaaccggtagctgctgtaccagttctacttttcaacactcgattgacagctgtaattgctacatccactggcgattttactgtggtcttcatcggcaccgctacaggccatcttaaaaaggttgtagtcgagtcgtcaacctccgctctagaatatggagatctgactgttgaagaagggtcttcagtaaatccggatttgcactttgattcccagtctatgcatctgtatgccatgacggagaaaaaggtatcgaaagtcaaagtgcaagaatgcacggtttaccgtaactgcttagagtgtttgggagtgaaagatccatactgcggatggtgttctttagaaaataaatgtagcttacgttctgactgtcaagatgctgccaaagatcctctgtattggatcagctacaagagtggaagatgtacgacgattacatctgtcataccgaaccaactgcaaagaacaacagcacgaacgctcgacctagtgatcgataacttaccaactcttcagggcatttctatgtgccttcaccgctctcgataagactt

SEQ ID NO: 9811 - DNA, 792 bp, Diabrotica virgifera
  SmartBlast Evalue=2E-77; Info=Transmembrane protein 161B n=1 Tax=Harpegnathos saltator RepID=E2BE57_9HYME
gttctcggagctctcttcactttcccaggaattagacttgccaaaatgcactgggtacttttaaaatatttccaggataacaagctaaaacagctacttctcaacttcacattcgccttgccgtttatcctgataattttctggataaaaccggtgtccagagattacttaaccgtcagaattttcaacggacgaactgagcctctgatgacagaagatgctttcgattcactcagattgttagccattgttgccacgatgtgtcttaagctagttttgatgccttggtatttacaagcctatctcgacatggccttccatcggctggaaaatcagaagaaagaagctggaaggataaccaacacagagctacaaaagcagatcgccgctgtcttttactatctttgcgtggtaactctacaatacgtggcaccgatcgtcctctgctcgttcttcactctgatgtacaaaactctcggcgaataccagtggacgggcgaactgttgaagtaccaaccatccgacaatgacacaatgacagcaactgaaaagtctttgccgagtatggaaatcttcggttccagcgaagactctaaatcgatatcagacaccgctgctgaattccatttgaccttggagagtcttaagtccgtgttcccgaagactgtgttcagggggttgttcggatttgctacgtggtggtgctgttttttgtacttcgccaccacatcgttcggactgatctatcaatcgtacttttctaattcttagatcttttgtataaataaattt

SEQ ID NO: 9812 - DNA, 793 bp, Diabrotica virgifera
agaagaaaagtattaatttggtaaaaatttgggatgattgctatcgggtaagttgtattattacttcatccatataggaagccatattgatgaccggaaaatttataatttccataaattcttttcatttcttcttgtctttattatatatttcgactaactatctatagatacaatttttaatatcattcctagctctaaatccacatgtttctatataaaattccataaagttattcaaggtcaagtggaacctatgtttttggtacagaaaaaaaaaacaacacttcttttaatggatcctgaccagtttttattggaagtttaacttccaacttatttcctaattccataagattgattacccaaattaacaatgggtttgtatcttttagccacttggaaccactggaatattcatcccactaacatcagggatgaaataaaaaaaaactttagcgcagtcacgggtagcctaggagctggaatcgtctttttgagttggttttttggactatcattattttgttttggaactttggaaaagactttacgttagttggtgttggacagtgattaagtatttttttttgtattattttcaagaacattaattttttctaaataattggaacattcaatatctattaaaatataaaattaaataagtttacattatactccactaagttattcataattttttcaaacaaaaacaaaagaaataatttaaatatttcaatttttaataataaataatacctcctcttcggcttcaaatttgcatttttct

SEQ ID NO: 9813 - DNA, 785 bp, Diabrotica virgifera
  SmartBlast Evalue=4E-63; Info=Putative methyltransferase UPF0383 n=1 Tax=Harpegnathos saltator RepID=E2B3H2_9HYME
aaaattctgaagatatgttaacaccaaattttccgtatgaatttaattggaaaaatggatgttttggactcaatcttcagaattttgaagacgcagataccagcaaagccgagtggctagctttgaccttgtttccaaagcttctaaaatggtcacaagatgatggtagtaaaaatactataagatcattatcattagtggctctagatgaatactgtgtcttatatgaaagattgaaaagaacttacgtgaaagatttgctaaaggactggatagataaggctaaaaccgacccccaaaaatacatctttgaagacattgctatatccgcttatctcatttgtttatggcaaaactaccctaaggaggaaatcaactttgttgattgtggctgtggaaatggtctcttagtatacatattaaatcaagagggcttaaaaggttatggtattgacatcaggaagagagctgtgtgggatatatatccaaaagaaaccagattagaggtaggaactgttactccagactcatcttttcccgatgccacgtggcttatcggcaatcactcagacgaattgacaccatggctaccagtgatagctcttaagagttcaagaaaaacaaacgtttttgtgatcccttgttgcccatacgactttggcggtgaaaagtatgtaaggaagaacactaaagtcagtgcatacgcagattatttgacctatatcgaggctatttttgaaaaatgccagtttcaagtcgatgtggataaattgagaataccgtcg

SEQ ID NO: 9814 - DNA, 789 bp, Diabrotica virgifera
cgtagacacttcaaacggttcaataacggacaaatgcaccgtttccgacttgatactttgaatgttcttttcccgctcagcacatacgtcagtttgacttgtatgttgcatttgcacattatgttggatcgtacgtagaaattggtgttgatttcttcgtgtacgtttaaagttgtgggattattaagaaccaagttgagttttttctgtttgtcggaaggctctgtggacaattcaacattagcaatttcttcttcgatccacacatctatcttcaagtcttgaacttcatcttcctcctcattcttcacatttatccgaattatataccactcccccaacaaagcagggctttcatgttcgaattcaacttgaagtttcgactctctaggcactatcgtcgcttggggtaaaagctgaatggtgtcgaaattgatcttatttttattatatttgaaatggtacagctctagatgattgtcgttgctggtagtggtagcagcaaatttcaaatctatggaacattctggtgtgctacaaaggtagaggttgattgaagaaatctggatatccttatttatgtccgcaggatccgctggaaactcgataataaacctcttaatttcatcttgttgaaaacttaaagactcgtcattgtcagtttggacattgtattcgtttgtctggttttcagcactgattaatatggcaatgtttgaaagagttattggaaatggacatgtagaccttataaaaagctccacaatgattttctggtcgacttcatat

SEQ ID NO: 9815 - DNA, 793 bp, Diabrotica virgifera
  SmartBlast Evalue=7E-24; Info="Protein takeout, putative n=1 Tax=Pediculus humanus corporis RepID=E0VZJ6_PEDHC"
cgtatatttatttttctggaaacaatacatcaagcggtattctcttaaacaaattttcatgtctctcgtaaacgacagccttaactatctgttcaataacaggtgtaaattcttctatgatcagtttatagtgttcattaagaatctggttcgttttttggctaagttcattgtcgccaccgaaaagtccatccaacactgctacgtatttaccaattattatttttagatcggtctttttaattgtcaaatattctactccttttcggtatactcggtcaagatctagtgaacctgatgccttaatatttgttaaattgccttcggcatggccactcgcatccaaattcaaattcagtagtatccccttcattgtcgcatcagcttctacccctatcaaatcccattcaaggcttaaatccaaatgcattttcttcgcatcatatttaatgtcgatcaaagtaaaattctcgatatggtacaaattgatattgcgcatgctaattttgatatgtttattgggttcaagttctgctttttctattatcaatggagcgaattggggtatgtagagttcgggaacaccttttgctagccttggttggagattctttatgtttctagccagacactcgtccattttcggatcatttcgattacatggttccacgaatggtggtaactgttttttacactcaacaaaaagagcgacaaacaaaaggatgatacaccttctcatcttattaaattatctataacaccaataacacaaacaatataagctttgattttt

SEQ ID NO: 9816 - DNA, 792 bp, Diabrotica virgifera
  SmartBlast Evalue=2E-31; Info=Cytochrome P450-like protein n=1 Tax=Tribolium castaneum RepID=D7EJT1_TRICA
aattaatttccaaatttgtttcttctttttgctcttcccaggacaaatatttttttaaatatattgatttacagtaaaaatattggtgttaagtacacttgatatcagtgatagtgagtttaatggactgttaagaagaggaacaagatgttgtttacttcgtcatggtttatggacatattgctagcactgagttttgtctgctttctagtctacaaatatctgacacgacactttgattattggaaaaagagaaatgttcaacatccacctcctattcctttattcggaaatatgtacaatgtgctggcaatgaaatcagttactccagagtatatacaaagcatatggaacgaaatagatgcaccctattttggaatgtttatgtttgatgagccagtattagttttaaaatctcctaaattgattaaagatgttctaataaaacattcgtccactttttacaatagaaggattgctatacctgcgcatccagatatggcacgtggactgtttttcttaaaagacgagcagtggaaaaccatgaggaacacaatttcacccctttttacatccggcatgataaaacaattagaacctcattttatcgagaccaatagaatactgtctgagtttcttattaaaaatagtggagtttttgatacttcaaaaattgcaaggaatttgaccagtgagtttctgattcgaagcttctttaatgtcgaagcaaaatcttttgaagaccaaccatccgtcattatggaacagattgacaagatgttcaagtattcc

SEQ ID NO: 9817 - DNA, 792 bp, Diabrotica virgifera
tcgtattgaaagatcttattttagctgtaacagcgatcaaaaaattgataaagaatgaaatatttagtaaattgaatcaatctaatagcgtgatacattatcctactagcgataaattaacaataaagtttttccttgatttttgatattcataacatgacagcagtgaccctatttatcaaaataacaagtaggagtggctatactatgcagcgttgccaaatgtttatcttatatgttcatttcttggacttccaacttcgtacatcaggcccaggacttactgagtgctatttgacacacacaattattgtcgtgtgttgggagttattcttccacattgacaatttctcgtgaatgagcatattttttatgtagctgtgtataagtcaaatatgatgtactttttaaattcagaaaaagactgttatttttatttgtacttaatttttaactcgaaaaacttatccattactatgtatattagaagatgccacactggcgtgatatcagtcacatgccacactgatgtgacatcaggcaatgccacattggtgtgacatcaggcagatgccacattggtgtgacatcaggcagatgccacaccggtgcgacatcagacagatgccacacaggtgtgatatcttgtggtttttctccttcaggcacaatacttttgctatttctacaccagccttcattttaaactaaaaatatttcacgttagttatttttttcctattttctatgcattttgttacaatatattgcagataaagtacaaaataattt

SEQ ID NO: 9818 - DNA, 791 bp, Diabrotica virgifera
  SmartBlast Evalue=2E-62; Info="CG2818, isoform A n=6 Tax= melanogaster group RepID=Q9VQU3_DROME"
tgaggttgttaaaggtttaccacttgacagaaggtaaatctaaaaaccaaaggttcttcgacgaggaactagatgatcaccaaccgtttcccacccttcaacaatgcttggagactctggatagccatactggtttcaacatcgaaatcaaatggaccatgcaactcaacgacggatcctacgaactctaccacccaactgatctcaatctgtacctggatacgatactcgatgtagtacttcgatacggtggtgacaggaggataatattttcctgtttcaacccggatatctgccaagtgatcaggctgaagcagaataaatatcctgtgatgttcctaaccgtcggggaaagccagattcatgctaagtatagagatccaaggtgttggtccataccggctgcagcacaatatgcgaagatgatcgagattctgggtattaatgtacatacggaagacctgttgagagattctagtctggttaaacatggtgctggccttatactcttctgttggggcgaccaaaacgcagaccctgccaccatcaagttcctcaaacagctcggccttcacggagtcatctacgataaaatccacgagtacaacaacacggacaaaaaggaaagcatcttcatggtggaagcgagagagtcgcaaaaagaactaattcgtcttgctgctgcaacgtcagaagcgccgcaaagtccacccccacaagccatcatcaaagaacctgtactggatttccatatggtgaaaggacagttgggcgataagatatcgacggcc

SEQ ID NO: 9819 - DNA, 791 bp, Diabrotica virgifera
  SmartBlast Evalue=3E-28; Info=WD repeat-containing protein 32- like protein n=1 Tax=Camponotus floridanus RepID=E2AKF5_9HYME
aaatagtgtatttcaaaatataaaacagttttacacattcgtttagttcaggtattattactgacaaacacgaacaacctataattattaaaattagatttaattgaaatacatcattagttctatatcactggttggtaccatttaatatcactgcctaaacaaccgctgacgagttgatgatgcacaggactaaacttgcaagatactactacgcctttgtggtaatcgtttaattcaacggcagtcttaagctctgttggttgatctggtacgcacttggtcagttcgttacattgctcatcgaaggcgagcaatcgaatacctttgtcgtaaggagaacatattagtctaccatcggaggagaagcacacttccttaatgaaacctttgccgacattcttttctttaacgtaatgagtcaatctcggaagattgcttattactttgttgcggtcgtttggatgttgttgaaaatacgtattgtacgatgaatttaatcctattaggccagtgttaagaactcccattgttggtacctgtaggatatcaatatggccttgagatacttgactaaaatctctatggtgattgttgtactcttctagtgatatataacccatccaaagatcagttggtcgtgtgggattctcttcttccatgtctaatattgagttatcattttcattaatacacttgaaagcattttcgtattctattgtatctctatcctgaatgtcatgaacagtagtccactcttcgttttcttcttcgtttacattcctggatag

SEQ ID NO: 9820 - DNA, 789 bp, Diabrotica virgifera
gtgagattgaataaaaactcacaccatatttcatgttgcaaaagatagagaatcgtttaaagaagtgatcgccaaccttcgttaaaagacggcacaagaagaataatgtaattgcttcttcggctataaaaattatttctaggcattattttatcaaaggtaataccacgagtcctctaaatgttatcgataaatttttttgttttcacgaaaacttctttatttggtaaaattacgaaaacaagccgaatgataaaatcacgagtccgaaggacgagtgattttatccatttcggtttgtttgagtgattttaccctaaatcaagaagtttaagtatgaaaacgaaaaaatttatcaagcaaaatttagaggacgagtggtatttgaaaagattattttgtgaaccaatttggtattattagtaaatacgggcatctgtgaaatatttttaagacaactaggatcaatgtcttaagtaggttatagataaattattttatgatttaaaaatgaaccaatttatttattatattgttaatacataaaaaactgtttaaatcgaaaatgaacaattattaaaaaacacaatttttataactaatatgagattttccaatgtcgttcgtaacgtattatgtgaaatttaggggaccttaagttttatcagggaagagactgttttatcaaggaagagactgttttatcaaggaagaggctgttttatcagtattacactcaatgattggctagaacgacgcgtggtgattggctgaaaaaagcaaaaacgt

SEQ ID NO: 9821 - DNA, 783 bp, Diabrotica virgifera
ggacttaaaatgtcgttatatggcattataacgagttgtttcgattcggaacaggtttttgatcgggttttgtaatatagaaaaggttaaaatgccgtttttttgcatttttcttccattcccaaaatacgtcatagtcggtttggctgaggatttgcccatagatggccaaaacatatgactttgagtggttggaaggatttgagttatattgtagtaccaaaaaagttacatgcaataatatcagactcaaaagtatattagtccagttcggatagcatttgaccttgcatgcccagctgcccaaaattttatttttctaatctttagataagtcagtagtagcctaaatttaaaatcgcgaatgaattcctccgttatgttagccgccatcttgattttaaaggagaacttgttttgctcaatatctccgccatttttaacttttcgacaaaaatggtagaaactgaaattgttccaaataaatcgtatttacaattattacaatttatttttaacaatcttgtgaggtttaaattttccgagttaaccgtacttacaatagacgcctatatttttgactatgatattgcatgtaacttttttggtattgtaatatagttcaaagtccttttgaccacttgaagtcttatgctttggctatctgtgggcggattttcagccaaatcgattatgacgtgttttgggaatggaggaaaatgtaaagaacggtattttgacgttttctacactataaaatttgatcaaaaccttgttttgaat

SEQ ID NO: 9822 - DNA, 790 bp, Diabrotica virgifera
aattctatttaattttatgtcatattatttaatgttatttaatttcaatttaattttattttctttatcatcaatgctataaaaatcaattgctgttcttgtgtctctctaaaactcaagaatgggtggatcgatttgtcttattttgatgttaaattatttgtagaatttcagggaaggtttatacggttttatatagtccttttagtagccaccaaaatttttacatctgtatgtataaaatgctcttttcacagtgtttgttgccatactcctccgaaacggtttgactgatgtttatgaaattttacccctatattcggcaggactgggaataggttgttatctatttttcatacccgtacatcacaaggggggttgcagatgacgccttaactctcataataatgacgtgaaaaaacgaaactaagtaggtagactccttgctattccgagcaggaccgtaccaaatttttttctctagcgcaatcggtgtccatatctcaagccgtagaaatattctgaggacagaagaagaacgagcgacaaatttcatagaagaaaagtggaacagtttaactttgggactcaaattgagcataatatgaaattttttaattttgctaaattttcaaaaaaatatctctaaacggaacttttctgacgaaccgcaagcaggagaaaaattcttagcacacgaaaagaacaagcagcaaattataaaactttatttaaatttaattaattttatttaattttatttaattttatttaattttatttaatttta

SEQ ID NO: 9823 - DNA, 787 bp, Diabrotica virgifera
  SmartBlast Evalue=4E-62; Info="UDP-GalNAc:polypeptide N- acetylgalactosaminyltransferase, putative n=1 Tax=Pediculus humanus corporis RepID=E0VB90_PEDHC"
acaaaggcggaagccaattaacattggcttcagtatgggaatctaaaaatattaacacttcagctgttgctgctctggcacccgctaatctagctctgattagaccacttctttcaggtaaatgtatgactcttactttagttaaatttgcagctagataatcatccagaggtttcttcgtaaaaggtttgttactgaaatcgtctactaaaattatttcttttaaaatatgagcaggtgatctgttgatgacactcacggctgtccgcaataacgtcgtccagtgttcattgtggaaaggaactattacacttaccgacggaagattcttcaaatactttttcgttttacatcctgcatgccttatgtcaggtatggctctatctaaagcaattttatcactaagtaacgcattgaatccatttactttataaagagcatcatattggtcagtttcgttactatacaggtgttctggcttgccctgttcacctctaccagttctcagcgcgtcccttttgatcctatcataatcatgccaatcaatttttcattgtcaattaaagccacctcttctggagcaagaggttcaataccaatattattagcaccaatataaattacattgtccgtcctaaagtctctagttttaaatatcctataaaacaacacagtaaacactacagtcacagacgaaattaaaagatattttaacacagttttaaattccttctcattctgacgatcacagatatttccacataagcatattaacattactctccag

SEQ ID NO: 9824 - DNA, 788 bp, Diabrotica virgifera
  SmartBlast Evalue=3E-74; Info="2-deoxyglucose-6-phosphate phosphatase, putative n=1 Tax=Pediculus humanus corporis RepID= E0VBZ4_PEDHC"
tcttagtgagaaactagccaaaaatgcagtttaaaaaggtgacacatgttattttcgacatggatggacttttaatagagtctgaatccatttatgacgaaattattggtgatattgccagaaattatggtaaagaatataccgaagaatgtagagtaaaagtgctaggttctccagaactagatacggctaaaatagttgtaaaagaattaggattacctattactcctgaagaatttttggtagtttacaagaaaaggcaaattaaagatcttgcacatccacctttattacctggcgttagagaactggtaaaacacctttacaagaatgagattcccattgccgtagccacgtcatcctccttagaagcgatgcaagtaaaaaccaaagatcaccaagatgtttttaaattgttccatcacattgtctgtggtagcacggatccagctgttaaacatggaaaaccagctccagatatatttttagtatgtgcttccagatttcctgataaacctagtccttctaaatgtctcgtttttgaagacgctcccaatggaatccgaggagccctcagtgctggtatgcaagctgtgatggtaccggcttcctatatttctcaggaacttcgaaaacctgctactctagtcttggattccctgtcgcagttcaaaccggagttgttcggtttacctgccatagaatgatcaaatttgtttttagcacaattcatttaaatatttatttatttatttatcgatattttatgttttatatatagagggcgg

SEQ ID NO: 9825 - DNA, 785 bp, Diabrotica virgifera
  SmartBlast Evalue=9E-10; Info="L-caldesmon, putative n=1 Tax= Aedes aegypti RepID=Q16PE9_AEDAE"
aatgcttcagatcgcaaaagagagtttccttgatagattgaaacgagaacggcaaaatcaacctttaaatatacctaaaactgaacaacatctgaggagaaacctatcttgcctgagaagaaagttaatggtctacctaaatttacacctaagaagcatgtgtcatcagattctgatagcagttctacaagttcttcagattcggaagatgaagaagaaaagccgaaactagtaaacaacaatcaaaagtctgtagacatagtaaatgaaactcaatatcatgatccggattttaagattaaaaacaatagaggaaaaactttaataaatgcaaaaagtcttaaaatagaatctgtaggcaaagaacctattatcaaaatagaaaagcagaataaaaaggcccctataaatacttcagaggccaacattaaaagattggaatcattaaaaaatcttaagcaaggataccagaatcaaaagtcattaattcaagctgctttgtcaaatgtggattctaggtcaagaaataagattatatttgatgacactgaagatatctctaataataaaaccacaagtcactcaaataaaaagcaaaataaagttacagaggataaaaggtctttattcaatggtagtgactctgaagaagagtttgagcctagcttttcagttaaggaacattttcaaggaaaagagggtcaaaagttattggagctacaatcaaaatataagaatgacaaaaggtttgcattagatgctaggtttttaaatgaagataaaac

SEQ ID NO: 9826 - DNA, 785 bp, Diabrotica virgifera
  SmartBlast Evalue=1E-78; Info=Protein pigeon n=1 Tax=Camponotus floridanus RepID=E1ZYH0_9HYME
ggaatgcctctatgatggtaatatcgccccaactacggattactccatataaaagcgacctgtgggttaagttatgggaccatctagctaagttatccaaacctgggttaagatttaggtctagtcaagtattagataagctgagaatttcattagactgttatcaacctgaggcactctctagatgttctacgccattgtcaccgagcggaggagcagcttctacgtttgcggattttttaagtggtacaagaaatcaaacggattttctacctttctatgaaatggatagttgtactgccagtagacaggagcatattatctctgtgaatttgagggagttaagcatgcatttgttaaaacagacgtcggacactacaaggaaatttcaaatggcggatcaatctgccatgcacgttcacgcagttgccacaagatacgtcggagctcaattagaacaatctagacaactttgtcaaatagtatgcaaagcagcaacctatgatccagcggaagatgtcgataagggattcattttaataaacaatttagaagaagacagacgctatatatttttcaaattactcgagaagtattacatggctgtggaatccctagcgtttcctcttcctcaaggatttacttcttttttcacttatttaggatacaggacaatggagttcgagatgttcgaacagtatgtagttaatcacgtttgtgaactgcaagtagatgtaatgaaaataatactggcagaagaggatgaaagtaaagaaaatactgct

SEQ ID NO: 9827 - DNA, 789 bp, Diabrotica virgifera
  SmartBlast Evalue=1E-110; Info=Protein N-terminal asparagine amidohydrolase n=3 Tax=Aculeata RepID=E2A596_9HYME
ataaaatcgtcactttgttctagccataaatccacacctcgtaagggttcataattaaaagggcctattcttagtagtcctagtgcacagtcgtaaatgtctaaaacctgtggaacaccggttaaatatctggcagatcttaatgaatgatctggacctttatctggaaaagtagcggggaatatttcgccagtctttgtgttaactccaactccgtaaataatgggccaatggattcctcctctaatagtcgtattcagttctccggtacatgctaaggtcagatctatttctatcggatgtttgtggaacgaatttagaacattgtaaaatatttcatcagaataatgccttgggtcattaaatccaccaataagttgaagttctatacgaccttctggatatcctagtgctagttcctggactctttgaaccattgtgcatacagcttcgtctgttcccgatccatccaaatgggccattgctactgctccagagccagaatgtcgaacgactacgataaggcaggtggtaacatcatctgctccaagaatgtttacgttcttatcatggggtactgtagcggctaattctctttgctgtacatacaggagtcctactgagccaataattttattgggaacaccaaggagttgtgcagcagtctctccataaatgggatgagtatggtatagtgatcttgaatcaggtgggcaatcctcttgaaggaccccatttagtactaaaaccatcttgtagctagtacaccagttattgagaacacagctg

SEQ ID NO: 9828 - DNA, 776 bp, Diabrotica virgifera
  SmartBlast Evalue=1E-38; Info=Pol polyprotein (Fragment) n=1 Tax=Drosophila buzzatii RepID=A1BPH1_DROBU
gcctcattcttagaggtttctgctgtctgagcaccatcttccaagtctagcttagtggcgtagtcatctccagaaagcatcatatgacgcccgaaatttatgaagtacggggtcagtctagttgtctcgtgcacagaagtacgaagcgcgcaggcaattttatgtaggttgatatcccaggtctggtgattgtctgagacatacatcgctagcatcgtcttcatcgtacgattcattctctcagtagggttcgctctaggatggtaaacggcagtgaatttaagtttacattgatataattccgctaacttaacaaattccttacagcgaaattgtggaccattatccaaaattatagtctttggaactccaaataacaggaaaacctcctcctcaagcttcttaatgacggtggcaccagtagcttttctaagagggaaaagtaaggtaaatttgcttaaataatccgtgacgttcaatatgaagttatggcctagctttgaacgtggcaaatgccctactaagtccagagaaatcatctcccaaggacggtcaactttcgggtgtgataccatcttgtcaacaggtcgatcttgaggtaccttgtgggcggcacgtcgcaccggcgaacaaatttggctatgtcccacctcattttaggccaataatagcgttcagctatcctagaataggtcttaaaaactccaacatgaccagaagtaggtggttcatgagccgcagagatcacaccctgtctatccttctttggcaccact

SEQ ID NO: 9829 - DNA, 790 bp, Diabrotica virgifera
  SmartBlast Evalue=7E-63; Info=aldo-keto reductase-like n=1 Tax= Nasonia vitripennis RepID=UPI0001A46D42
atgatactaatacccagttccagcaaatatctcaagaccacttgagctggtgttttattatgcttcttggcaatctctattactcttgggtcctcaactgttgctccaggatagttaggggttttagttagtcctattctttccaaagggcaaaaaccagtaataacaatacctttacctttgcaaaatttgattaggtctggttgactgttgttaggattcacttccacttggttaactacgggtggtattttgcagtgttttaataatcgctccatctgttcctcattgaaattggagataccgatgctttttgctaatcctaaattgacacattcttccataccttcccaagtttctagataatctacatcactatatccagaaggacctgttggcaatggttcactttccttgaatccaaaaggccaatgtacaagatataaatcaatatagtccagttctaacaacttcagagattgtttaagttgaggtacaaccagtttcttttcatggtagttgttccacagtttagtaacaacaaatatatcttctctctttagtttaccttccttaaagatactctttaaagcagtgcctatttcgttttcatttccatagaatgaggcagtatcaatgtgcctgtagcctaaacctactgcatactttacagcctcttgaacttcatttggccccgatttataggtacctaatccaattgttggtatagacaaaccattactaagttttaaaactctaggaatctttgacattttagataacacgtaat

SEQ ID NO: 9830 - DNA, 783 bp, Diabrotica virgifera
acaaatacttcgtttccgagatatggggtgttgaaatctttcttacaaaccgacgacttatctattgctccaaaacggctgagacacgcaaatgcaattttgtgggttttaagaagtagttattgcgcattttttgacataaaatcaagaatgttatactcaccattagcgcgcataccggtaatggtctaatttttaaaagaaaaaaatatcactgatatcttttaaataaatcattcccgaattcctcgtccaatttgtgacaaaaaatctcttttccccttcttttcctacaacgcgccgttttcatgcaaaaaacatgttaacgcttacaaagtattccacattccgttcgctataactcctcccatgcggcacgactcatcctcaatcaaattaagtcaaaacagaaagtgaaacgtacgccgatgtgtgtagacagtatacaaaatgtataacacatcgacgttcgtttcaatttatgtccgacccaatttgactgaaaatgaatcgcaccgcatgggaaaagttatagcggacggactataagtttctatacattcataacaataaagaaacttacgttgaatactcagcgttaagatgttttattttttgcataaaaacggcgcgcgtaggacaaagggaacatatattttttatcacaaactgaacgaggaactcaaaaatgatcttaatttaaaatatctcagtagcgtactagttttttgttacaaaacgtcagaccattacccgtatgcgcgctaatggtgaatgtgacat

SEQ ID NO: 9831 - DNA, 786 bp, Diabrotica virgifera
aacagtgctgtcgacaagatgatttaatttttttggcttgatttttaacgagcagcagcgggatcgcttgagttggagtcgtgcctgactagtaatcgagaagtacaattgttattaatttacaaagtaaatgaagtacaaaatattattttaacccttttaatataaagtccgagcattaaagttttctttgaattaaattcattaaatcaacgtttttaagacatttataccatattttctgacaggggagttatcaatgatgcattttttatttggatatttaatgttaaccttttatcaatatgttatttcgttgtacaatattttttcgtgttaaaagttttttaattttaaaattgattattcgcgacttgctagatttgtttctagaagttagtactatttaatatatgtaaagctttcattgtcgttttctcgtaattgcgaatgagcttatgtttagcagcgttcatagtttaagcataacacattgtttacatctgatacatttttatttttacgcgaatcttatggtaccgttcaaaaaccattcaaaataggaaccaaatactttgaactacatatatttttataaacgtataccataaaaaatacataaacatatggaacattttttgcatttaaagaacacaaaattttttgttgatattatatttttgtaatgatatagtttttatactaaaatatattttttgatactcttatatgtttatatttaatgttaaaaaagctgtcgcaatgttgtaatgttagtgtataagc

SEQ ID NO: 9832 - DNA, 786 bp, Diabrotica virgifera
  SmartBlast Evalue=4E-18; Info=Large proline-rich protein BAT2 n= 1 Tax=Camponotus floridanus RepID=E2AK75_9HYME
tgccggtgttggcgcctagagtggcctttccacctccagacgaattgttgctgttgagagatgcgttttcggttatttttccgtcgtcagacttttcgttttggttttgatttccataatactgtcggtttggtgttttgttggaatttacttctatgtttctgattcacagaattggtttgctgcatttgttggaagtttactggtctctggattggtgctggatacctctgcatattaggattttgttgaccgctgactccttggtacaagttgtatttgtgctgtgctgtaggactcgactgcggaggaggatgtttgttgttctgtctagattttggagacggaatctgaggtcctgaattaaaaccgaagatagcacctcttggctgctaggactcttcaattgctgaggcctccctgtctggtctcctaaaggctggttgccgacgcccttcatgtacgccggcaagccggaccgaaactgctgctgtgcagtcaaggcggcagctacttgaatgggagtcgtcagaaaatgggagtgggagttgaagttttgcaaaccggtgttggtgtgcgattggctgtgagtaccgaacacgtttccttgaagaccatagccagcttggtgttgctggagctgcgcggagcccatggtggaactgcccggttgttgataatagcctgtttgggcgcctgtagatccggagtaaaacgatgaggaaggttgcagaccgggtaccacgttgttctgagccggcggtacgggggcccgctgcatcacac

SEQ ID NO: 9833 - DNA, 777 bp, Diabrotica virgifera
  SmartBlast Evalue=2E-15; Info=Transcription initiation factor IIA subunit 1 n=1 Tax=Harpegnathos saltator RepID=E2B5F4_9HYME
tcggctgataggttaattctcacagattaaattttccacgtttagttttcgttttccaagattagtttccacgttaacaaaaataaacagaataattaaattttggcgctattaattataccgttacgaatagatatggtacgaactgtcaccgttactatgtgtagccattatgaagtgtcgccgttacgaattgatggcgttaccatttttggggttacgaactgtcgcgttacgagatgtcttttcacgtgtaaacatagtttcggaactaccactcagcatctccagtcgctttttggaagacgtagtctattccgccgagattcataatgccgtctttcaggtagaatttccatctgttcctatttctgatgattttgtcgtattggcacacaacgatattgtctgtatcgaagagatcagaaggatcgtcgtcggtgacgtcgtcttcagagtttaacggttcttcttcgcctccttcatcttccatttcttgatcatcttcgtctttgtcatcatctaaatcatcgtcatcgttatcatcatcagatccgtcttcatcttcatctgatgtatcatttggtccatcagcctgagtgatcactggatttttgattttttgttcgctttggctttcttcctacttctaggtaaaataatctctatgctaatcccctcctcgatcatactttcaagctccttatccctatcagtcctagaggtacttccactctccatctcaacgtcgctctcttggtccgcagccccatcagt

SEQ ID NO: 9834 - DNA, 786 bp, Diabrotica virgifera
  SmartBlast Evalue=3E-85; Info=Fragile site-associated protein n= 1 Tax=Culex quinquefasciatus RepID=B0W2V8_CULQU
aacgaagttgtacaaaaagtttaatggtggagaaaggccagtgccgatatggttggaagattctgaagaacattccagtgtaaccagattattattttcattggtaattaaaatgcagaggatgcaattaactgcgacaacagcagggagctcagctgtaagattggagactggtgctgttgttctagaactgtccaatagagttcaaaatttgtctggttcgacaaagaaaaatgcaaatactagactttttggaaaagctcaagttgatttaaacctttctctaggtcaattgatacggaatgctgtctttgaggaagcggatatagaatatcaaccagtagctttctttaacacaagaattgctcttagaaatgcttttcaagatgaactaattgagggtgaagataaagaagtcgttctgattacgctgaaaaggccgcttatttacgtacaacccgtagcagtagacaaggctattttggtatggctaaattacaaaaacgcttacgattattggaatgagaaaagagccaatttgaacaaagaagttctaaatgcaactcaacaagtttatgaaaagtttcaactggggcaattgactagtcaacttagtgggccatatgttggtaccttgtttttacaacttactgttgaggacatgggaatctgtctcccacttaatcccctaccattagctaactggagccaacgaaatgtttatgacgataatagaggagcggtcgttattactttggagaatactagtatatccgcatgcaattc

SEQ ID NO: 9835 - DNA, 786 bp, Diabrotica virgifera
gatcgtgcgagaatagcggagaaatattgtaactttcttaaataattcattgtcaattgaaattgtcaaattgacgtatatttcatatctactgtcaatggagaagaaaaattatatattgctccacaatattgatatgatatgcaattattgtataaaggtaaatttaattaattgtattttgcttgcagtactgcattttaataactaattttatttactacatacaattggttatgttttaataacataacctgaatcttattttttcttcttattatttctttggactatggccttgacaattatccagtaaccaggactaatataattggacaatataattaaaagtgcgaataatgttgctgagcgtagaaaccaagtgtcgctttgcagaacttgcacggccccaataggaaggccaaggaagagatggagtcacaacctagatacatgatgaggatgcatccgaagatggaacaagaagcaggaaaaagaagaaaaagttctttgtttttactcaattatttaaaagcccggctggcctccaggcaatatcttttggccggtctgccagatcaattctccggtagaactgccttgctgttgtggtgaagcttcttttatatcattttcagtgatctatctcctaacgtttgtcctagtggatgaaagtatatgacagggctgcatgcgtacgatgcgccggcgagctgaagacgataccctttcaagacataaatgtctctattaactacaacaagaacactggttgtgatcatgtct

SEQ ID NO: 9836 - DNA, 789 bp, Diabrotica virgifera
  SmartBlast Evalue=1E-26; Info=Neuropeptide receptor A35 n=1 Tax= Bombyx mori RepID=B3XXP8_BOMMO
taacccgagtgagatctttttgagcttcacatgttcctcttcggaataactcctgtattgattttctgaatttttttgataatgccacatacactatcggattcaaagcagaatttagatgaccaagaagaagtaaatatcgtttcatgtcctttagttttattagctgattttgaacttcattatcatcagaatccgtgtcgtttgtatcaccttcttggacgtctgtatcattaagtagatttgcaatatgatgcggcatccagcatattgcaaaaattagagccagtaaaagaagaatacaagctacctttttccttgttcgtattagtctttccctctgatacgaagaagtggaatcttcataaaattgtgtaccacagcaaagaactttacccattgtaaaataggcaaacaacatgatcaaccctggtatgaggaaaacgaaaacgaaccagaaaattcccatcacgttgcgtgaaatgatgaaatctttccaattttccttacaataatataacgttatggcattccccggcataggaagaacgtcctcttctagttgattgacccataataatggtgaaaaaattgccatggaaagaatccataaaaaaatgataactatagctgtactgcatcggttaaaagaagggtatatcaatccaaataacggtttggtaatagcaaaatatcggtgcagagacattgctgtaatggttaatatgctagttgatactgatacacattgtatatacgtcagtagtttacatccgacctttccaaggg

SEQ ID NO: 9837 - DNA, 775 bp, Diabrotica virgifera
aagtgcctcaggtacaaccaaagcagttgtagaagcacctaaagaacctcccaaggaagctcctaaagaagcaccgaaagaatcccctaaggaagcaccgaaagaatcccctaaggaagcgccgaaagaatcccctaaagatgcgccgaaagaaacccctgctcaaaaagaagcgccgaaagaaacccctactcaaaaagaagtacctaaagaatcacctaaggcagctcaaaaaagatgcgccaaaacagtctcctaaggagacacaaaaagattcaccaaaggaatctccaaaagaacctgaaaaacctgcacctaaagcatcgacacctaagcaatctcctgcatctaaaaaaggtaaaaaggatactcctaaagaagaatctaaacaaaaagagactgctgaattacctagttccaaagtaacagaacctacacctcccacgacacccgtctctccccctgtatcacaagaatctagttcccctagtcccgtttctaaagcagaactacaagttagcgccagtgtaccagaaacaccacctccagccccttcaacagaagccgcaaaaggccctactcctccgccccgcaagagtggtggtggaaagaagaaataataggctaaatataatttatatgtttttatttcgatcaactggaaatgttgatacgtattgcatttttgccttcagtgtttaacgacggtgttgtttgtgttggctaatttaatttgtaataaagctgtttgtttttgataaacaattaatatttt

SEQ ID NO: 9838 - DNA, 789 bp, Diabrotica virgifera
  SmartBlast Evalue=5E-29; Info=Bromodomain adjacent to zinc finger domain protein 1A n=1 Tax=Harpegnathos saltator RepID= E2BPI3_9HYME
attagaataattgcccatatttaatttgtatttaatggttccgaaatccataggttttgttataatttcgtaataatccttaacctctgtcttttgtactggccttagaaaagcccaagcatctgcatgttttattacttctaccaacagttcttgtaacgccacgttatgcaaaggaagatcgtcccgtgtatcttcctttcgattttttctagtggacaaactaatttcatcacttgattctgaattacttctttcccttgaagatttgctgacattatcactacctttacaaaggtggcaagtccacaaacctctaggaggccttcttagaggaggttcacagcattctatatggaaagtactagaacatttttcgcacgagatcaattctcctccggagccacaagttttacaaagttcgaatttagcgaatccattgcattcttcttcacttgatgatttgtcttcttcgtcactttcttcatcttctgattcttcatcttcctcctcctccatattctcatctttaaatattctacgctttttccaagggacgggatcgggatttaaaagttttgtttcctgttctttctcctttttacatccatcacagaaccaatcaccttttggtatactggttaattttggtttcagacagtataagtgatgtcctaaattacaattgtcgcacaataacatattttcagaatctgttggccgtctacatatcctacatctagcttttaaagcggatctggaccacattatacatgaatctaaggtagc

SEQ ID NO: 9839 - DNA, 782 bp, Diabrotica virgifera
  SmartBlast Evalue=2E-97; Info=Hormone receptor in 78-like protein n=2 Tax=Tenebrionidae RepID=D6W819_TRICA
tgatgctctaactactgctagagacaagcagcttattcgaaggcttagacacaatggctagagtgcaatgtttgaatggaactaatataaatgctttgaccaatgaagaaaaatgttttgattatgatggaccgatccttcaggaacaaaatatggcttttaatttattgataccaggacctgtacctccgtacttaaatattcattatatttgcgaaagtggatctcggctgttatttttgtcaattcactgggccaaaaacatacctgcctttcagtatttaagttcagagacgcaaattgctctcttaaaaaattgctgggccgaactctttacactaggactggcgcagacttcccagtctttatctctaccaaccattctatcagctcttatcagtcatttacacgcgtctatagcaagagacaaaatgtcagctgtaaaagtaaagcaagtgactgatcacatagtgaagcttcaagactttgttacaagtatgaatagattacacgttaatgaaaaggaatatgcttttttgaaagctttaacgcttttttcatctgatcaaccagatatgttaatgaaaaaacctattgaaaggttgcaagagaagtcttttcaaggtttaaggcattacttagccacaaattttcctgaagatactgatagatttccaaggttgttattatgtttgcccccgcttagagcagtggaatccaatattatagaagaattatttttcgccagtttgattgggcaagtccaaatagatagtgtgatt

SEQ ID NO: 9840 - DNA, 787 bp, Diabrotica virgifera
gtggctgatatccttgtagaatgtgaacactcggttttgtcttcgcttgcaactagaggttctttgcactcgcattgtttttgttgtttacaaaatccgccttctatacaatgttcgtcatatttacatttctcgccaacgataccaacacatttgtcccaatatttgtttggtttatagtttggcaagcattgacaagttctgtttctactacaccaataggcaaaatgtctacagtcgctccctaaggtacaatgttcgttaagttcaccttcaattgcagttgaacatacaaatagtcctaataaactaactcctacacaaactatgacattgtatttcatcgtggcaactgatttttcgtcgtcttttcgatgtatcgctccctttaatttgaagttcttatgtttattacttgtcgttatcgttggctaaaagtttgatcgatataatattataattgattgccggaagtcccattcaatgtattcaccgatacattcataaccttataataataagttatcacaatttcgtagatttcccactttaatcacgacaaagagccggcgaacactctcaaaaacgtttcttcatcaattaaaccaatccatcaataccacactaaacactctatttcacactacaactaaaagccgtacctacacttcaaataatatttattataacaactgaaaaacactgaaaacgtttctttcctggtacttcccacaattttatcttcagaatgttcgtagctgggatttttactttgctgtgcgtgtgt

SEQ ID NO: 9841 - DNA, 787 bp, Diabrotica virgifera
  SmartBlast Evalue=7E-47; Info="Zinc binding dehydrogenase, putative n=1 Tax=Pediculus humanus corporis RepID=E0VXV7_PEDHC"
accaatggcactgcatcttctgcacaagtaccaaaacctcacaaccttgagatttaagtagctgaactgcacaagttccaacccctcctgaagcacctaaaattagcactcttaatccttccttttgctttgtaatcatatttccgaaaacaaagagtgcactccatgctgtcatagttgtatacactaatgaagcactctccacgtgatttaagtgttttggttttggtaagatatatgaggaatcagttagaacagcttctgaaaatgttccaggtttatataaaggcacaaaaccatacacttcatcaccaattttatattcatcagacacacctagtcctttggctaaaacagtacctgaaaaatccctacctactgttagaggaagctccaattcacccttcctcatcatttgcaatagagtattaccatagccacccatcattaatacatctataggattaacagatgcactgtgaacttgtactaacacatctgtagggcttctaataatagggagccgcgtttctccgagctgtgcattttgtataccaccatactcatgaataagccaggccttcatttttagtttttcggtaagggcttgtttgtcatagttaatgcggaaagttgaaaatactctttttaacattctgttcatttgtaaacttacaaacaatgagtatagactttacaactgtgcaaaattttatgagtttgcttttaaattaaataaattttatgtacttatgtaaattactcttttaatattcatggacttcaa

SEQ ID NO: 9842 - DNA, 787 bp, Diabrotica virgifera
tcgataatacgtaaaaatcgatatctgtcatattctcttcacttctaaactttgaggcatcgctgggacttccccgaattcgcgaaataaaacgtattttcatgtagataataatatgtgcaattttataaaggttataaaatcaaacagatttttttaaaatcgtcttacaaatattaagaattccctagattttcatagaattgaataaaattccctttttccctaagctggctcaaaattccctaggtttagggaaaattccctaggtctggtaaccctggcaagactgattatcctccttcatttgtctccttaaatacgctctcggctgtcctacctcggatgcctcgaagtagaagtggaaatgagtggggtatcgggttgcgcaggtattgggacgcgtgctgttctctgctatcgatctgctgaaggcatattattacagttgttcccgttctttttaattataacggtataaacggtgacggttcaacgtggaggaagtagtattaatagactgttggaatttacgtcattagatattcaaaattttgcattaggaaagatcattaaatttttggcagcttgagagtagatgtaatctgtcatactaaatgctcaacttttagattttcgagaattttacaaataataagcaatatattcaagtcaaatagtgggtactatggatgtctacaagttaggaatatacataataatgggtgctatacacagtttattctacgacatttcgcttggaatatttaggaatatatactatggt

SEQ ID NO: 9843 - DNA, 786 bp, Diabrotica virgifera
atttaagcttgaatactccgttgaaaaatatacattcaattaaccataactcactttaaattgatatctattagtgtagttctttaagcaaggagtgtattcagctttgtattatcttcaattttgataataataactttttttgtaaaagcttatagttattgaggtctacgtgaaaaacagctttaaaatatgcgtttttttacgaaaaggtaaaatctttgatctttaataactcaaaaagtatccatttatattaataactttatataggtaccaaattttgcttagaatttttctctctagcgatttatgaaattattaaaaaataatttcattcacgagaaggggtggcattcaccaccacggtggaggcgcaagttggcatcatgtcacctttgtttcttgaggtatcctctactactcaccaatttttttatgaaaatatcatgatatcgaaggtgaaaaccttcagtgactgcactaagtggattgaaatatattttccctaattttgacattgctttgcacatttacttgtgcttcccaggtgccaacgcaacgtgtccgctgaaaagtcatttctaaataatatatagaaggatataaaaataatttctcatcaagtatgacgtaagaacgtgcaatttgtcgattttgtcaagaaaataaatttttttaaaagaagtctgtgatgtgatgaactggaatgacaattttttctgttataggtatatccacatcgtagtttaaatccatttatagtgtttttgcaaatttctgcaa

SEQ ID NO: 9844 - DNA, 787 bp, Diabrotica virgifera
atcgtagtgttgataactcaatttctgaaaaatttggacttgtgtcagtgttttaccaaaagtgcgacgtgttaggaataatgtcaaagtgtaaaaacattttagctctgcaaataaagatattctggaaagagcagactgagtatttagttgtcttaaatgtttcccatgatttatgataaggaactcaatattggtatatctgcatccactcgaggtctgaaatattacgtctgatatattaatgggatatacattttaaaataaaaagttagttaactaaattacttggagatttcgacatgtggacctatcttggcaagatcatttacataatacataacttacaagagaataacgacttcctacaaaccatagccaaactggaaacatttgttataagttgtcagatatattgtcatggatctttattattttgatttcgtgtgcatactatgggaaaacatttataattttcagccttcaaatctgacaaaaaaaggtccaagggctaagacatgaaaaagaaattaatattactcgagttttaaaacaatatttggaaaacaattttttaatttgaacgtttctcttgattaacagtaatgcattctgcagaacaaaacgctagttttgctatatggacgagaagaaaataccatcgaatacagtgaatacattgaattaaaatgaacttaatactgtaaagataaacgcaccttctcaattgacatttctaatctttcttttgcattctgcaacaacctgaattgcattcccttgaaat

SEQ ID NO: 9845 - DNA, 785 bp, Diabrotica virgifera
ttggggaacaaacacaaaaaaaggagttactgatagttctaagttggaccttgtaattatataaatataagcctgtaattagtttattgtggaaaaatggacacattgcttttcagaaacttgctactctttcaagaaacaggggggattaggaaaatattgatattttagcttcgttctggtaaccagaacaagcgataactgacgcgtatcatacgcctatcataggaacattttcggtggggtcaacttaaggtagggtcatagacagtagagtctattattcaaagttacacaaccaaacggaagttttaggaaatgacataggaagtcatcacctaaggtcagtggctaaattgcgattatgaatggcttctcattccgacgagtcaactggcgggaatccgctcacttcatccctagccttcctcagtgtctggccatccataccgtaaagggggttagacaacatattttaatagagggggctgaaattcataggtccttgaagtaagaataaacttaggcaaaacaaacaggttctattacgaactatcactagtaactgtactaaggacttctgatatcaatctagataccaaaaaaaataaaaaacaatttttaaaaaaaaatataaaaaacatttgccctaagcttaagctggattgcatataagcgaaggtagtatatcctggaaggataccaaaaaaaataaaaaataaaaaaattcaaactttttattatgtaaaagaaagttttacttctatatcggactaacgcacgac

SEQ ID NO: 9846 - DNA, 786 bp, Diabrotica virgifera
  SmartBlast Evalue=7E-94; Info=Cleavage and polyadenylation specificity factor subunit 5 n=3 Tax=Aculeata RepID=E2C6H0_9HYME
ccttgtttgatacaagttttatatctaaataaatacagaaatactgtattagtgtaagtgtaaattgttagacatttaacaaaatattagctatcatggctatgacatcttcacaagtgaagagagaacagcagaacaatttaaccgggggtaccggttggccaagacgaaacagccaaacggctcagcaaaataatacagtagtgagtaatcctccaccaacaaatacttttacacctgcggcaataaaccgaatcataaacttatatcctttaacaaactatatatttggtacaaaagaacccttattcgagaaagatccaagtgtacctgccagattccaacggatgcgtgatgaattcgatagaatcggaatgagaagaagtgtggaaggtgtattattagtgcatgaacatggtttgccccatgtacttctcttgcaactcggaacaactttcttcaaacttccgggtggagaactaaatcctggagaagacgaagttgagggcttgaagagactgttaactgagactttaggccgtttagatggtgtcaaacaagagtgggttgtagaagatatcattggtaattggtggaggcccaatttcgaaccaccacagtacccgtatattgcttcccatataacgaaacctaaagaacacaaacgtttgtttttggttcagttacaagaaaaagcgttatttgcagttccaaagaattataagctagtagctgccccactttttcgaattatttgataattcacaaggatacggacctattatc

SEQ ID NO: 9847 - DNA, 785 bp, Diabrotica virgifera
  SmartBlast Evalue=2E-26; Info=10G08 n=1 Tax=Ips pini RepID= Q5FYF7_IPSPI
aagagctcgtcgtgatgtgcaaattcaggtcatcgcgtctgaacaggtgtgatgtgctgtgtagtcctcaatattgaagtggttaggccacgtttgtaaaattaataaattggtaatttttcacagtgtagctagaaaggcttgtagtaagacatgacactgccaaatttagaatctctcatagcggcacacattggagagaaccaaaacattgttgatacaaatgtcaccagccttgttggaccgggagaaaactatggtggagaattatttaaaatagatgttaatatagaagatagtaagtctaaagaaaaacatcaaatacatctagtaggtaaaactatccctaaacatgaagaatcccaacaagtattcaaggtgcaaaccacttttaagtcagaaatagcattttacgataggattgtacctgcattgcaaaattttcaaaaggaaaatgatgtaaaggaagtcattgattgttttcccaagtattatggaagtagattaaacttaaatggaagcagtgttatcgatagagatggtgtaatactcctggagaatttaaaaatctccggttatcgtaatctagatagatacgtgtgttataatttagcagaagccaaaattttactcaaagatttagcagaatttcaatcaacagtagttgcactaaaacttaagcatcctgatgtatttaaacgggaagtgagacatttttgccagaacgatataaaagctccccgtgaccaacgatttttccactatattttagttatagaagacct

SEQ ID NO: 9848 - DNA, 786 bp, Diabrotica virgifera
  misc_feature (69)..(69): n is a, c, g, or t
ttatctaaatcttcatttttaaagaaactgtcaaaggtggttctgaaatcactgttttttgccagtctnttaaatctatgtaatcctcagcggctaagttgattaaaggtaccctaaagactctcacttcattacttgggtgcattctgcattttttatcctccttacagccaattcctttatatgaggccttgggtcggttagcatagctaagagtaagttttcaggatgagcaaaatatccattgtcggcaaagactttgttcactattttggtaactttaggtggaaaagttctggaaagactaatggctttccataaatgtcgtgctccatcatagatcagtggtcgtgttttaacattaaaccaaacaggggcataaactttcataataaattcagataaaataactaggtttgatatgggtttttcggtggctacatatagtcgtagtatcctgttggctgtagtaagccagcgagcatgggataactttccaggatctttatttgccaaactttcagaaaaatgtccatttttaatagcagaacaaatgttgtacagatattgttggtcagtacttagaatatctgctgttacttctggaagctccgtgtctataattttaaatttttttactggcatttgttggcagtctttcagttgggaacccactggccctgaaaactataaggtcccttggtttcgccatctaaatgttgaagaagatgacgtaaaggcaattcatttgtatggaggagacatatactccactgaaggggtctt

SEQ ID NO: 9849 - DNA, 780 bp, Diabrotica virgifera
  SmartBlast Evalue=3E-54; Info=Endonuclease-reverse transcriptase n=1 Tax=Bombyx mori RepID=D5LB38_BOMMO
tgcaagactagcatataacaaccaagatgtagagagcgtaagaaagtttaagtacctgggaacctggctatgtgaagactggatgtcggatatggaaattaaatgtcggatagaaagagccagaagtgcattcatgaaattcagaaacgtctttacgaactctgactttgacctaaacctaagattaagattcacaaaatgctatatatggtcagtgctcctatatggcatggaaggatggactttaaaaataaacacaatgaataagctagaggcatttgagatgtggatttatcgacgaatccttaaagttccctggaccgcaagaataacaaatgaagaaatcctgagaagaattggtacagaacgacaactgatgtgcacaattaaacagagaaaaacggcatacctggggcacctaattagaaatgaaagataccagtttctgcaaaccttaattgaaggaaagatcgaaggaagaaggggagtgggcaggaagaaaatgtcatggctccgtaatgtcaaacaatggacaggactaaaaaacataggagacctaatacatactgcaagggatagagaaaaatggtcaaacgtgatcgcgaacatccattagtggattgcataagaagaagaagaagaagaagaagaagtaacttagtaaggagctattttttgtttgggtgattttggttgaatcttgatatttgaggtctggaatctgcatctcggagattggacattaaaagaaaagaaatatgtgtaatgtacctcttgcta

SEQ ID NO: 9850 - DNA, 787 bp, Diabrotica virgifera
  SmartBlast Evalue=1E-62; Info=Dynamin n=4 Tax=Apocrita RepID= E2AA61_9HYME
aaggggtacatgacgctgcataatctcagtataattaagggtaggagcttctggtacgtgttgtcctcggatagtttagcttggtaccgagacgagactgaaaaggagatccagtacatcctacccctcaataaattgaagttaagggatgttgagactgggtttataaatcggaaaccgacttttgcgttgttctacccgcatggttctaatgtttataaggattataaacagctagaactgagctgtaactctgtggacgacatggattcctggaaagcttcttttttgagagcgggtgtctatcctcagaaacttttgaataacaacgaagaatctgatgacgaaagtatcgatattcaagaagatgtagaccctcagcttaaaagacaagttgaagtgataaggaatctagtagagagctacatgtctatagtaaccaaggccaccaaagacttagtaccaaagattattacacatatgatcattaagaacaccaaaaagtatgtttttgaagaacttctagtcagcgtatatgcccaagatgaccaggttgaattgttagaagaatctccagaggaagtaaggaagcgagaagagaagatggcgacgttccaagcatgtagaatggctttggatatcataggagactgttcaatgaaattttccggtagcgctaccagtacagaagaagaagcggttcattacaaaccagcagtgcctaacaggcccaccgccaccaccaaaaaaagttacagactgtctacgccccctccagtgttctcca

SEQ ID NO: 9851 - DNA, 787 bp, Diabrotica virgifera
  SmartBlast Evalue=1E-125; Info="Membrane-bound transcription factor site 1 protease, putative n=1 Tax=Pediculus humanus corporis RepID=E0VQL9_PEDHC"
actgaatttaatgaaggcgtatcagatccttaatagttatacgccacaggcaagcctcagtcctagttacatagacctcagcgaatgcccatacatgtggccttactgtacgcaacccctatatcacacctcggtgcccgtcatagtcaacgtcaccattcttaacggcttaggtgtatcgggaaaaatcgtcggaaaaccccaatggcacccttacacgccccagcaaggacattatctggaagtagggatcacttactcggagatactgtggccttggtccggatggttggctgtacatttgtcggtagctaaagaggcagctacgtatgaaggttatgcgcaaggccatgtggtggttactgtagagtcgcctcctggaagtggagagtcggaggctagacagagtatggtgaagttaccaataagggccaaaattatccccgtacccccacggcataagcgagtactgtgggatcagtaccacaacctgaggtacccaccgggatattttcccagagataatcttaaggttaaaaatgatccactagattggaatggcgatcacattcataccaatttcaaagatatgtatcaaaacttgaggaatacgggatattacgttgaagttttaggttcgccattcacatgtttcgatgcatcgcaatacggcacgcttttgatagttgatccggaggaagaattctttcccgaagaaatcatgaagctaaaacgagacgtcgatgccggtctttctgttatcgtttttgccgactggtacaatgtt

SEQ ID NO: 9852 - DNA, 786 bp, Diabrotica virgifera
  SmartBlast Evalue=6E-57; Info=Furin-like convetase n=1 Tax= Bombyx mori RepID=Q75WU0_BOMMO
atcagtttgtggaaagtgcagtgttttagtttgagttatgtggacccgcacatgtgatgattttaaagttcaatgatttcattttccaaacaaaacgttagttcaatttacgatgatttttatcttaaataatagattacaaattttaatttcttaatctatcaactccttgtttggccttgaacgacgaaattaacgaaaaaggcggttcgacatcgtcttttgggaaacagaggatgaaggatttcttttatttttgtattggtgtatttctttgcaatttccgactctccaacggacattatactcaacaatgggctgtgcatatccaaggaggaaaggacgtagctgacgaggtagctagagaccatggtttcgtaaatcatggagtgattttcgaagatcattatcatttttctcacaatgacgtagctaaaaggtcgttaaggcctaatgtagataaacgagttaaactcgctgtagatactagagttacctggtcaaaacaacaaatagcaaaaaggagagtaaaaagagacttaaaagtacaagatagtgatccaaaatggccattcatgtggtatctaaatcgaggagggggactagacatgaacgttattcctgcctggatagagggaattacaggaaaaggggctgttgttacgatattagatgatggtctagaaaaggatcatcctgaccttgtacaaaattatgatccaatggcttcttatgacgtgaatggtcaagacccagatccaagccctcgttacgacatgatcgatt

SEQ ID NO: 9853 - DNA, 783 bp, Diabrotica virgifera
tattgatttgggttgtgtagaacagtctcaaatatacaccgtgtacaaggtttgtgcaattctgggtgaagaaacggtttgtttttttgaaaagtacgattggtatcactgacagaggtgtaaccccaaaaccgcccccctagttacgcctatgatcactgatttcattgtaagtcagcgtttcccaaccggtgggtcgcgatccactagtgggtcgcgagcggatttcaggtgggtcgcggcgtggctcttacagtagctaaatactgtaaatatataacatcatgtatacatattttgtataaagtaatcatttacagtattcgttactttgattagtattattacttttgtatttgagtaccggtaatcatatcgagaatcgtatttctcagtaggtagctattttgtataggtattccgatataataacgaccttcacgaagtacgaagtaatcagagtaatcaaagtagatacaatagtcgttactcgctctgttacgattggtacgaagtactcagactaatcaaagtaaatataatagtcgttactcgttctgatacgattggtacgaagtaacgaaataatcagagtaatcaaagtaacgatttgactctccgtatagtaatcgttactttcggtattcgtaagtaacgagtactttgtaacgaatagttactttttctaacatcactaattaaaaaggactcttaaatctcgttacgcctctcactctcgcttgctgggcttcattcagtcctttctaagcttcattgtagttc

SEQ ID NO: 9854 - DNA, 786 bp, Diabrotica virgifera
  SmartBlast Evalue=1E-74; Info=Transportin-3 n=1 Tax= Harpegnathos saltator RepID=E2B5G1_9HYME
cgcgcaagaagtgcgtgaactcttagaaagcctagttggacaaatagtgaggatctatacgttataccaacattcgtgttttctctatgtcggtagtatactcgtggacgaatacgcaatagatccgatatgcgtgccaggtctgctggatatgctgcaagcgtttctggaacctaccttccacgtgttgcaggaggagaacgggctgaagaatcatcccgatacagtggatgacttttttaggttgtgtgcaagatttatgcagagggcgcctttagcatttttaaaatgttcttccttggtccacatcttacagtgtgcccttttggcttcttccctggaccaccgagaagcgaatatgtctgtgatgaaattcttttacgatttgataaaccagggccagagtgggagagctgatcccgaattcaatcaacgacagatgttagttaaaagcatcctcgacgagtatggccaacaactagtctcaaatctaatccattcttgtgtcttctacctccattcctacatgctcagcgaagtcggcgacgtattcgtgcagctgctcgatttcgacagagagatcacctgcaaatgggtagcggctggtcttgacgtgttaccgaagaacagtaccggcggcatcatggccgccacacctcaacagttgacggatatacataccactattagcaggtcgaatacttccaagtccgtaacacatgctctcaaggatctagccaggttataccgttaacattaagaataaatgtctttttttgacatatg

SEQ ID NO: 9855 - DNA, 775 bp, Diabrotica virgifera
aattattcaaacaatgatccccttgcatgatttggacactttcccgaaaatatcccctgcacccacccaaacttcgatataaaatttgtcccaacctgtacgaatccacatttttgacttttttttattttattaggctatagatagtttgttagactctacataaatagacaaaaataatttgatacaaataatactcgcattactctggaattactagatgcaaaaacactcaatgttataaacttcacgtatttaaaattaaataaataattcaatatgatcgagacgattttaaattataagttatattattcattttttgttcttaatggattagtgtattgtaccacagggcttctgtaaagcggatttaattcagccgtatttttagcttcggcttcgaatcttctatattctgcacgttcttgtcggtaattattaatcttaattatcaaaataacgacgagacctatcgcaagtattaaacctacaattcccccgaaaagcatcatcattttaacacttgccgccattctacaaatctttctggctagtataactggtcttcctgtatcttctgacttgtagtaacaatattctataatacagtaaccgttgtctttacttgcgtcaatatgacagatgtccaaattttcagcacaacttaattcatttttactggattcatcgattatgtctaagtttgcattatccgatgatgagtcatttcgtgttaagaaattttgaacgtctttattataagcttcacaaa

SEQ ID NO: 9856 - DNA, 785 bp, Diabrotica virgifera
  SmartBlast Evalue=1E-124; Info=Inducible heat shock 70 kDa protein (Fragment) n=1 Tax=Leptinotarsa decemlineata RepID= Q9GPH9_LEPDE
ttctacacgtattccaaaaatccaacaacttctgcaaaattacttcagtggcaaaccattgaatctttccattaatccagacgaagccgtagcatatggagcagccgtccaagcagcagtattaagtggggaaactgattcgaagatccaagatgtcctactggttgatgtagctccattgtcattgggtatagaaactgcaggaggagttatgaccaacataatttcaagaaattcaagaattccatgcaaacaaacccaaacgtttacaacgtatgctgacaaccaaccagctgttaccattcaagtatttgaaggtgaaagagctatgacaaaagataacaatcgtctgggaacatttgatctaactggcattcctcctgcgcctcgtggagttccaaagattgaagttactttcgacctggatgccaatggtatactcaacgtttctgccaaagatacaagttcaggtaatacccgcaacatcaccataaagaatgacaaagggcgattgtcacaacaagaaattgatcgaatgttatcagaagccgaaaaatataaggaagaagacgaacgccagaaagagaaaatagcagcaagaaaccaacttgaagggtacgtcttccaactaaaacaagctgtacaggactgtggagacaaattatcatctgaagacaagtcagcaatcgagagagaatgcgaaagctgtctaaaatggctagatagcaacactttagctgacaaagaagaatatgaagacaaacagaaagaattgacaagagtat

SEQ ID NO: 9857 - DNA, 781 bp, Diabrotica virgifera
aactattaaggcttatatttttatattttgaatataactacttgaatgtaaatagacaaattttgaaacgtagatttactacatgtatacgattttttgattttaaaaatatgccaaaagtgtgatggtgtctattaaaatcattcttcgatcctataattgtaaatatttcttatgtttgtaaagacctgcacctaaactcatgtattctgaaggacgtatcaaaatgaacattattttaaaagagtttatgcagaaataattgaagtgtcaaatatattgccaaatattcagcgaatataaatatgttaaagtaaaaaacatgtcgagttacatacatatataaaaaacggttatgttttatatctgaagaattggcaataagatctaatgatggacaaatgacgaattaatacattttgaaacgtcttgtgtaaacgtaatctactcattttcattacctctaagtctttcatttaagtttttacttcttagatacactacgttatatgttatagtatatagatatatatttttcagagtattcatatacattttctgtatttttaatttttaagtttgtcgtttttaagtcttatggcatatgtagttttaggatatatatattttagaaagaaatataaataaaataacgtacatattatatataataaattttaatataagagtctgtatatgaagcaaaattcagaatattttcattttaaattactttgtcagatgccgatatcaattaataaatacctaaattatcattacc

SEQ ID NO: 9858 - DNA, 780 bp, Diabrotica virgifera
gaaccagttgtaatgagcagagaagataaaaaatacgaagagctattatttcgaacagaaagtgacggtaccacgacagacgaaaacgacaagaagagaaaagaggaagaattggaacgggcttttaacaaaagtcgaaaaataagcagatctccctcctacagaaaggagaaaatggaggagaatatacaaaaaattatggaaatgatggcaggagtaagtctaaaaatcgaggaacaatcaagagaacttagcgagatgcgtagagagcagaaagaatatagagatgaaataagagagctacgccaggagaatgtaacattaagagaagaaaacacgaaactaaaacaggcagtttatcaaatagaagaacggcttgaaagtttagaaaatcaaaaaaggcggaaaaatataattatacagggattgaacatagatacaaatgggccagatatcctaaaacatgcaatgaaaaattttatgcagacagaattaaaagtagatgtacaaatagagaaggctctgaagttaggagaaaaagtttgtctggttgagcttgaaaaggaagaagataaaagaaaaatcatgcgaaacaaaaccaaattgagaaatcgagaagaaggtctagtttatatcaacgatgacctatcaaagaacgacagaattgtacagaaacatgtcagacaaaaagcgcaagaactaagaaaggaagggagaaaagtgaaagtagggtataagaaaatatatgccgatcatgaaatatggcgctgggatggaatg

SEQ ID NO: 9859 - DNA, 783 bp, Diabrotica virgifera
  SmartBlast Evalue=0.000000003; Info=Inter-alpha-trypsin inhibitor heavy chain H3 n=5 Tax=Murinae RepID=ITIH3_MOUSE
aaaccacgtgttcacaagccagtagattccttggaacgcctctgggcgtacttgactgtaaaggaaactctccagaagatgaaaattgctaaaaacaaagtagaacttaccaagaaagctttggatattgctcttaaatattcctttgtaactgacttgacctcattggttgtagtgaaacccaactgtacacaatacacgtgttcagatacgtccggatattttccaagactgggaaaatcttcagattctcgacttacatcatccggaggcggcaggcgaggtcgcgctagaagtaggactaaatctcgatttcaagttggtcttccggatagagtttcatacgacgaggttaagccggatacacccacaccagcaacgttcactgaaacagctacaagctcagaactagatgaacgtctaaaatggttgtcggccgctttaagtgaaaacaaaacattatccctaccatcaggtaaattaaaacttggtgaagattcattacaaattactccctctgaaacctgtccaaaaacacccgaaggcaaagaaggtgtttgctctcttattaaagattgtcctcaagtattcccacaactgactaatttcgacgtatacaagaccttctcctgtgccatgccgaaagaatacgctggagtctgctgtccaaagaaagatgaagttgctgcttaaaattgtcattgcttgttaatttttaatcaaatttagaaaatcttgaaagttatgactttctaatgtaatacaatggttaataaacaattt

SEQ ID NO: 9860 - DNA, 782 bp, Diabrotica virgifera
  SmartBlast Evalue=1E-11; Info=Endonuclease-reverse transcriptase n=1 Tax=Bombyx mori RepID=D7F166_BOMMO
ctagggagcacccatgagatgtgtagttctttccaaaatctggattttctctattcatctagatagaacggattatcttccattcaaaagctgaaatattaaccagtggttgggttgcaatttgagtattttgatgtcttataagtttgttaagattatgcggatgaatgaagtggagatgaatcaagaagtgcagaaaataatcagaaaggatttgagaaaatttaacaacgaaaaaatccaacaaatgataaaccaacaggcaaataaaagcttgaaggtatttcaaagaaaattaaaaactggaaacagccaaataatcaaattcaaaaacaaacagggtgaaatgataaccaacaggactgagttgttaaaaactgtggaagatttctatcaaaaattatacagtagtaggacaccgaaataaagataaaaaggcaactgaaggaacagtcagacaattttttcacatttgttggatagtgttacctatatttgaagaaatacttaagatctttcagaaaaaaagtcatatgctcgtgcttactagagctcacctattgtaatgtggccggtgacaaaaatcgcctatgtggcaagagtactggttacagcgtattagcaacttattggagatgattatcatgggccacgttacaaaacatgggctgtacttttaaataaccatattaaaaagcaaatttgtcttgcttgtacagacttaggatatagtatgacaaagatacggctttgacaaagtttgctagtatatcaacacatat

SEQ ID NO: 9861 - DNA, 774 bp, Diabrotica virgifera
  SmartBlast Evalue=9E-54; Info=CAPA-like receptor n=1 Tax= Anopheles gambiae RepID=A7XII0_ANOGA
accaatatcagcgcgaatccatggcagcttatcaactgcttccgaggtccacaaatgcaggatttgggcatcgctgtagctgtcactgtgatcaacggtatcattttatttacgggattgttaggaaatattttcgtttgtgttgtgattattagacataagtcgttgcacagtaccacagagtactatttacttaatctggctgtgtcagatctgacttcttatttttggtcttccttatgatgtcacgctattttggcatcaatatccttggactttgggagatttctgttgtaaagctagagcactcatatcagaaacagcctcctatgtttctgtgttaacagtggttgctttttctacagaacgatatttagcgatttgccatccattgtacacaatggtaataacaaacctacaacgttcactgaggataatatcaggattatggattatatctcttttatgtgccataccattcgcctactatagtggtgtagattttatttcatatccatttgattctgataatattattccccaatcagcgttttgtgccatgacgtcacaaccggaatatataccattggccgagataagtactataatctttttcttcttacctctgatgattataatcttccaatatattaaaatgggaatgataataagggagacaacgaagaaaggatacttttatgaagaggaaggaactggaacagtcactataagaaataatcgccaaattaggcacaggcataatgtcattaagat

SEQ ID NO: 9862 - DNA, 782 bp, Diabrotica virgifera
cgtggattgtatcttaaacttcgtctcagttaagacgtgctagataagaaaaaaaaatatggtgcaacataagtcaaacttaaaggcggccttctctataaactgggctgggctaagctggagcttaaggctgtggcctccaatatatgctgtacattgcgtacaatgtcacgctgtaggaaaattgttagttttcaattacttttaataaactttgaaggacaaaaactatcttataacctaaaatagttaaaaaaagagtaattctaaaacaaattcaaattacggggtgaattgaagtgaccaccgacttacctggtggatagacttacccaacagaagccataggctgcgtacagcgtgtactggagatcagatttgttgtcgactttgttggtgcaatcaggcataagaattttatttgttatataaaatattctaccctgcacatattaataataggtttgttccaacacaactagaaaccgtcctgcgcagtaccatggaacgtattatttcgttcgcatggaacccatgaaaagttaattatctagtaacatgatcgttatatgacggttcttcatcgtgtttgaacaaacctaatattgtgcatacatataaatacacagttttctaaaacattaacttcctatagtgaagccattcagagcaatataagatgctaaatattgtttcctcgacaataaggcttcactatcataaagtgtaaatttcctttcaatattcaatatcggtcgacagataaacagaacaggaagaag

SEQ ID NO: 9863 - DNA, 784 bp, Diabrotica virgifera
attgtatttaggttagtgaggttcaatcaacctatttttggccccaggatctgtggtgtaatttatgaccagtcttttcgggacaccctgtatagtatatctataatatatcactgatatattatattataatataagtttcaagctttgtatgcattccttgctacatgtacgacaaacttttcctctgtgaccataattgtatttaaataaaccaaacttgtattgagagacataataacgtaaaagtgacatctttgagaactaagcgttcgaaaacatagcaactctgaaagatttcacagaggaaagtttgtcggacatgtcgcaaggaatgcaaacacaaaagtttaaaacttatatgtatcactgaaattttaggtccttgtactggggactatatagtgtaaagttaaacaatttttaatggcaaacattttgatttctcttataaacatttatttaaattgcaggtttgttcgatttgtttatcacctaaaagtattttacttatttattgtaagttgatattttaaaggtttgtattttagctttagtaaagttctcagtgtattatataatattttcctttagagatttttaggctactaatcaaatatgtatctgcattttgtaaactataagataaataaagaataaagaagagcggggacatgcatgcattttgtgttgatctgtgttttacatcattatttcaaaacaattttactgcatagatttcctattttgttttatcagcactccatacatgcatgcggtaagt

SEQ ID NO: 9864 - DNA, 780 bp, Diabrotica virgifera
cgctgttcgttgatacgggagcttggggaatggggtctacgtcatttaaatattcagtgatgtcaaaattgcttgtatttaatagatcttccgtttctgtacatggctgtggtacatcttttgtatttaatatcggttcttctatcgcaaaatctgtagaggcatcaacgttaataaactgttgccaatcactcataatcttatggaaatcatctatactaggggctgtatcattaatattagttaggttcatatcacatactggaataagagcaatgtctccatttatctcttgttctccttccaaggtccattcgtaaccgtttggagtcaaactgtggatcgaatccagagttgtcccctcatctggatacggatccagaaagctagaagagtcgaaagtagagaattgctctccatctcgaagcaggtccacatccataacctacaaatcaatatgctcctacgtaataagcggaatttttgtcattcgcgttttaggacaccggcaatatagttaatatcatcttaacttattaaaaacacttaatttaataccccaaaacactaaatttacgtaatattcaagttattcagaatcaaacacagattataggttatggttcgaaagtgtgcatattttcccgaataattcactaacacttatttagtccttattgtttctatatctacacttaactttgatgtacaaaaattgatattcttatactagagacgatctataatatctttatagtttagtatttgtcaataaactaa

SEQ ID NO: 9865 - DNA, 773 bp, Diabrotica virgifera
  SmartBlast Evalue=2E-31; Info=Endonuclease-reverse transcriptase n=1 Tax=Bombyx mori RepID=D7F158_BOMMO
gtctttcccattaattatattatctgacgtcgtcctagtgtcggtctgagtcatttcatactcttatttttttcaatagttgttgttattaatttttcttcttcttttcttttttgttttctgattccttttctaatctgcctattaagttctctatattctgcggtttcctttttgttagatttatttaagatcttccttttttctatttgttgtaatatttctttatctaattcattgtgtgttgtttttggttttttcagttgcagaatgcttttgttcactgtttcggttataaggttattcaaatcatcaatatcattggagtttatctgctgcatgttaacttgatttaatgcatgcattatctttttattaaattcactattttttatttcttcagatgtccatttgtatcttttttcatgtattctttttctttctagttttttgtttattactagttttgttcttattagtctattttcgcttcctaggtcaaactgatttaataccgacacgtcttttcctaggtttctatttttcgttaagatataatctatttcattctttgtctttttatcggggctcatccatgcccattttctgcttggttttttattgaaaaaggagttcattgagtacatgttatgttcattcatgaaattgagaagcatttctcctctatcgtttctttgcccgtagccataattgccaattaaatgttcataatcttcttcttttttgcccaatttagcattaaaatctcctaa

SEQ ID NO: 9866 - DNA, 785 bp, Diabrotica virgifera
ggaaataataaaaacagacaaattgtggtatcctataatatcacgtataacgacaaaacgttaaaagtttgcaaatacatgttccagaatctacatggtatcacaagacgaaaaattgatattttgataaaaaaaacaaatatcacccacgggttttatagaacctaatggatctggaaaacgccaaccacataacgctcgaccagatgaaaaagctgaagctataaaacatatagagtcttttccaaaatatgagagccactactctcgaagacacacaagtcgactctatttagctcccaatctaaacattaaacttatttatgatctttatgtatcaaacagaacaatgcctgtatcatatttattttatgctaagatttttaaagaacttgaatataaatttaaaaatcttagcatcgatacatgtaagacttgtgattatctagaaaacaagaaaaaatcctctaatagtgaagaaatacgtgcagccgtggatgaagggaaaaataaacacctccagctagcagagattgcctatggtgaaaaaaaaagcagatatagagttctccagaaacagtagtggtaaaatggttgttttagtatttgacttacaacagaacctaccaacacccaatttaagcacaaatgtagtctaccataaaagattgctctggacatataacctcaccatcagaaattgcactgaaaataccacttcatgttttatgtggcatgaggggttgtcagaccgtggatcagatcaagttgcttcttgtctttta

SEQ ID NO: 9867 - DNA, 778 bp, Diabrotica virgifera
cttgtttgggagcgccgtgtattgatgaagaacatgtctagttgttgaagtatttaactttttttgttatcaaacataagcgagtgagtcaaggggcagaatgttgagaggacctgaggctatagctgggttttggtttcggtgttttgtagatgctggaatgttccacagggtgatgcgaactttgagaagaggaacacagtttgattggtgcacccggtgtacagtgggagtttgcctgtttggcagcagtattgttacagtggtattgttaaagaatcaggctgtgacatgttcaagaagtcacttaaatcggccaacaggaaatatgagacatcaaaaacgaccaaatttttaagttcgccgatttctatgcacgtaagtttacattataattttcaaaatcgattggaaaatagaataaagcagatacatttttcttctttcgataggcaaaatagaatacaatagaataaaacatgggtgataattctctttctgcatattcaaataaaaattgataattaactgcctcaaaattatagacatcactctttttagacatcgaggtggcaccttctactttcagaactttggttacataaaaatgtgaagcgtttttccccagaattcgaactaaagattgattctgagagctaaaatctagggataatcccgtgccacatattatcatttgtttggatccgaatgttcacaatatgtttaattgaaacactatatactgcattacaagctagacgactagtatcacaagatc

SEQ ID NO: 9868 - DNA, 784 bp, Diabrotica virgifera
gactaaaattgcccaaataacaatgaagtggttcacctatttactcctagttggtgtctgcgccagccaggtgctgtcagctcctaccgaggaaaaaaagatttcgctactgttttgttggaaagagcagctgcacgtgccgaagcaatggccaagagaatcgaagagagcggagtcatcgacaaagcattagctggtgctcaagcagttggcaagaaaattgaagaaactggagttatcgacagagctctagctggagcagatgctcttgccaaaagagttgaacaaactggaatcatggacaaggccaagcaaacagccggacaactttacaagcaagttgaagacactggaatcatcggaaaagctcaagctgaagccggtaggttatataaatcaatcgacgataccggtgttctaaaccaggctaaagagcaagctaatgcattaatcaatagcccacttgccgaatctatgagacaaagaactcaccaagttttggagaaagtaggagagtcaaaattaggtgaagctcttgctgccagggcagagccttacatgcaagctgttgccaaatctggatgtgctctagctaaatcagcaaaccaagatggtctgaagttacctaccgattaccactgccaagaagaaaatgcttaaatggaggcgacgacactaaggaccttgcactgtggaacacaaccttattatatttctagtcacaaagaagttaattttgtaaacagtgttatttagtatttaaaataaaagtaaaataattacc

SEQ ID NO: 9869 - DNA, 782 bp, Diabrotica virgifera
  SmartBlast Evalue=4E-74; Info=Polycomb protein EZH2 (Fragment) n=2 Tax=Aculeata RepID=E2AC62_9HYME
ttaaccaatgcatggactagctccacaaacaattcatcatctataaaacctgattctcgatcaccatgtaccttcccatcatagtttttgataagttcctctataaatgtaccatcttgatccaaaatttcatctcccatgtaaggaatattatgcaatacagtctcatcctccaccataaaattttgctgtattggcgcccaagtgtacatggttggaataggtgttactgcgttcattattttaatggtagtcacctgtatatccccttcattgccaataacttctgctttcttcatgcatgttgagtgggctggtaattccggagtgtttccccaaaaggctttaccatcagtccaacgtttctgttcttcaataagaatttcactcatctttgatctgttttgattccatgctagctttacatcatcggctctcttatatcttttaatctgtcgcaatctcatgtattcctgtttaactcgcctcttccagtccacgttaactttagcttttgccattttttaggatttatagctagtcaccctgttaaagatcagctgtaattgttaatatacatacaatgtggtagaacgacgctaccccttgtaagaaagtaagaagatatacacacattcagaaagacgaaataaagcagaagtaactaaacacaaagaaccatactttttcctttcttctcatgtgtagttatctttccataattattaattaaattacattattattacacctactacaaactcccattcccagtaaattaa

SEQ ID NO: 9870 - DNA, 783 bp, Diabrotica virgifera
  SmartBlast Evalue=7E-79; Info=Titin n=1 Tax=Culex quinquefasciatus RepID=B0WJM9_CULQU
atgtcatggcgcgagccggtcaaaagataaaattggaatgtgaggtttctggattaccccctccaactttgacgtggtcccacaacgggaaagcggtcaaagaaacacgtgaaattaagttccaacaagagggaaacaaggccactttactagttttggaagccttcccgaaagatgccggcacctactcagtaagtgccaagaacatcgctggagaagcaaaaagttcaagcagcgtttccgtcaaaggacgacttcctaacgaaacatcggactctgagccagcaagcgatatggagccaatcaaaccgtctattcaacttcctttgaccaatacgacagcgaaagaaggaagtagggtacgattggattgtgttatagttggacaacctgaaccagaagtcatctggtaccatgatgaccaacctgtcaaagaatcccaagacttccagctgctattccaaggagaccgttgctccctcatcatccaggaagtcctgcccgaagacgacggcgagtacaaagtcgtcgctcgcaactccgccggggaagcctccagcaactgcgtcttgagcgttacgccaatcgcggaatcggacaacgagaaagcgccagaggaaaaaacggaggctggaacagcgccaaaattctcgaaattgttgaccgacgttttggtgtccgaaggggataaagttattttggaagggaacgtagtaggggagccgagaccagagattaaatggttgttgaataatttgcctatcaccgatctcgagcatttca

SEQ ID NO: 9871 - DNA, 778 bp, Diabrotica virgifera
ttagattctatttcaaggtcttatttttgcatattttatctcaccaatttgtcgaaaaatgtattagttgcaaccgttggaagggtagttttctttttaattcgagtctcactatttctgttatacgcctgtagcgccctctgtacggagaaacatgaggtaataagtgtgtatgtgtttagtgtattggttttatgtatgtaagacaatgattttgggtatttaaatgggtttatccgttaagagtttggtttacttttggtacaaaagatctgtagactatgagagctagatattgtgaattagaaaccatagcaagttagactgcagtgttctattggttaaggactcttaaaaggaacttaaaattaatttgggtcagttggcacatgtttaatttctgtccaaagcatactattttgtgtttttatttttgtataaaatattcgttttgaataacaagtatttacagaaagtcattttgaatgacgttctgtgacaaatactcacatcagattaggttgcttttctgcacagattcattatgcagatatttttcttcaacattacttttatttattattacaaacatactctattttctttaacgttgcaactaatacatgaattatttatactaattttactgtattgtatgaggcaattgtatggaatagcccaatgatttcgccaacaatgttgcacaaagttttattaaattaagtttacgtaatcaatattgatctttaaacggtatttagttagtagtcagatcttt

SEQ ID NO: 9872 - DNA, 781 bp, Diabrotica virgifera
  SmartBlast Evalue=2E-46; Info=Glutathione S-transferase n=1 Tax= Glossina morsitans morsitans RepID=D3TQP5_GLOMM
gtgtatagtagtgccgtaactactcccgttgattgatagttagtacgttttcgttgctcttagtgtgccagtgtctaagtttgcaatggctccaaaattatacggtgatagtagaagcccttgtgttagagctgttttgttggctgccgaagcaatgaagattaaattggaatatgtcgctattgacgtggtgaaaaaggagcacttaacggatgaatatctaaagctaaactcacgtcacactgttcccactttggaagatgacggtttcgtaatgtgggacagccatgcaatcatgatgtatctgggagaaaaatatggaaatgacaatcccgtctacccaaaggatattaagaaacgggctcttatcaaccagaaacttttatttgatgcgggagatctattttcatttagcagatacattgcgggcttcttcctgtacaaacgccaacctaacttccctcaagacttagctgaagctttaaacaaagcttatggtttcttggagacatttttaactgaatcaaaatacgttgccggtgacgagatgaccatagctgatttcagtctgtggacttctacaagtaactccaattcttttgtaccgattgatgcagcgaaatatcccaaggttactgcttggtccaaaaaaatgggagaactgccctatagtcacctaaacttcgagggataccaggagtttaaaaagttattagaaatactaaaagctcaactaaaagctcaataatgattatgtatgtttaaatattatgtaataaat

SEQ ID NO: 9873 - DNA, 782 bp, Diabrotica virgifera
  SmartBlast Evalue=3E-78; Info="WD-repeat protein, putative n=1 Tax=Pediculus humanus corporis RepID=E0VW21_PEDHC"
ggtcatgcggacaatgtgaaagcactggtcgtttcaagggatgggaatcaatgtttgtcaggtagcagtgatggatctattaaattatggaatctaggatcgcaaaggtgtgttcaaactattttagttcatactgattcagtgtgggctttactagctacagaaagctttagccatgtaatctctgggggaagagataaaaaggtgataatgacagatttaaaaaatatatccaacagtattacagtgtgtgtagaagatgctccaattttaaaaatgtgtttttactgctgatcaccaagccgtgtgggtatcaacatccgattcgagtattagatgttggaaattaccaaccgaaaagcattttaaagaagaagttcggatgcccaccaatccgttatctttaatacaaggaggtgcggcgattaggcaggcagtagttttaaacgacaaaaggcacatcctgactaaagatgctcaagataacgtagcgatatatgatgttcttagagctaggaaaatagaagacttgggacaagttaattttcaggaggaggaaaagaatcgatttaaaatgatttatgtacccaattggtttaacattgatctcaaaacgggtatgttgacgatacacttaggacaagacgaagttgattgtttctcagcttggttatcggcaagggacgtaggcatcaaagatgctccagatccagatcataaagtaactacggaaaattgttgcttcaagctctgtttgagcattggagaggagtcgagactga

SEQ ID NO: 9874 - DNA, 782 bp, Diabrotica virgifera
  SmartBlast Evalue=4E-47; Info=Histone H2A.Z n=54 Tax=Metazoa RepID=H2AZ_HUMAN
atcgttgcgtatgctacatttagttgaaaggagtcggtagttatcgtttcagtttcatagtccagaagataaatttgcaaaatggctggtggcaaagctggtaaagatagtggaaaagccaaagctaaggcggtttctcgttcagcgcgtgctggattacagtttcctgtaggaagaattcacagacatctaaaaaataggactacaagtcatggacgtgttggagctacagctgctgtatactctgcagccattttggaatacctcacagctgaagttcttgaattagcaggaaacgccagtaaggatttgaaagtgaaaagaataactccccgtcacttgcagttagcaatcagaggagacgaagaattggacagcttgatcaaggctaccattgctggtggtggtgtcattccccacatccacaaatcacttattggaaagaagggagcacattctcagcctgcttaatcgtattaaatacacatatataatagtaatgttaagacttgaaatgtgtcaatgatgtgttttaatattattgggcacgtgtttcccccatgtgcaaggccatgcagaagaattccaatttttcaatgtttgactactgttctaataagcagtttagtaatttttttgtgtaactaaaaagaactttccgttgtgccttgtaattcaaatttaatttacttagttcttttctctgtattttagtaattaaatttcatcatacattttaagaaaaaatgtattttgtgttcatttaataaaagttttcttac

SEQ ID NO: 9875 - DNA, 782 bp, Diabrotica virgifera
  SmartBlast Evalue=6E-15; Info=Putative polyprotein n=1 Tax= Oryza sativa Japonica Group RepID=Q5KQK8_ORYSJ
ggggatacatctcttcacattgtctcacagccttcctcatattctttgcgttatcagtcacaatagcgaaaaattttttaggtccatactcctccagaacttcaaccattaattttgttatatattctgcggtatgcttctctgcttttgttagtactgatttgacaaataacggttcgggtgttgtaacaatgaaattaattacactttcatttcgcaagttggaccaaccatcgcattgcaatgataaattgtcagcttgcttaattttatcattaacttgaacttcaactcgctcgtactcttcggtcaggagacgatttgataacatatatctcgatggtaaggtgtatgaaggtctaatttttttaaaaaacaatttccaatcttcattctcggtaattgaatgtggtgctgaactggtgtaaatagctctagcaagcaaaatattcaattcgttattttgttcgtgtgtcattcgatcacaaaatgattgtattctgttgatttttgtgcaaacaggtgtttccacatgaatgttatcagaagcagatgttgatgctgtggaaaccgttgatgatgtacaagcagcatcagtgttatcgttatccaattttgccgatgtgatctttttcatggatgtttcaaatggaaatttagagtgattcccctttgactttggagttaaaatattgaatttaagttttatcatatgcggcacataagtgcattgttgaagatgagatttcattcttgtagcattttttgcatgtacactcttg

SEQ ID NO: 9876 - DNA, 782 bp, Diabrotica virgifera
taaattcgaaatgcttgttatgctagtaaattattagcttgtttgaaaatattcattaagattgatccaactcatggatgtaatgattttagtagattttttttcatgttgttcgtacaagaatgtttttgataagcacataataatcaatagtatatattaatttttatgctctgtaaaggaatattctttagttttcaactataatatcaaggaatatagacgcaaatttctaaaatttataataagagataatgtttagaaatactcaccgacaattgtactctgtcatttgtacctattattgtatgttgcattgtactcgaagtcataaacttcgaatacttacaatgcaacgtacaatacaaatgaaggatcagggggaagaacgatgaatgtctatctagaagcattttcggtaaaatgagaaataaagttacatattcattgttttcccccttgcgttcaatcttatgacgtctttttaagtcgattctcatcgttttcccccttggtcattcacaggttaatagtactctttctaagataacagattgcacaaaaatcgcaaaatgaccaaaaattgacattcatcgtttttccctctgacctttcaaatgacccgcgtcgtaaaaactgtgctatcaataattttcaaaccgattatagtaatataatagttgggatcgtgaccattaataggtttgttccaacacaacgaaaaccgtcctgaaaacgatcacgaaactgcgcgcagatagcaaaataatacgttccatcgg

SEQ ID NO: 9877 - DNA, 782 bp, Diabrotica virgifera
taaaacaacgcttctatctttactcagattgtgagtacagtacaacctcgttaatccggacctcgttcatccggatgtccggatcaatccggaatgaaaaaataattttgataattgtatgtacataccgcattatcgtcattgcatgcattgaaacttcatacaaaattaaaacaaaggaagatcaatgacttttttgtaaataaaaactaatgctcgcgtaaatcatatagggtgtaaatatagtaagttatcatttcacatgtagttttattaaccttattatattcccggattatccggattttcgatttaccggatcgcttccggtcccagttagtccggttaaacgaggttgtactgtactaagaaccatttctggaaacttttcctatatgaaggaaaaggggatgtgattgaatattgtagaatcctttcggttttctatttcgtcgtctctttgccttgtaaattgcagaaggcagatatgaaggatgttaacaaagaatggttctaattaaggaaggtttctagatttaaattagtgtatatattatttttaataatgtattctgtatctgagaccttcctactttatattgtcttatcttcagtaattagtaaggcaccttaagaagaaggtttgtgtataccacagaatggctctgatcagaaaaaagagtatttggctccttctgtagcgaggctatcaacaatttcttcatgcctattgacagcacaatatgtacttactgttttggtgaacctgtttttaggctttg

SEQ ID NO: 9878 - DNA, 774 bp, Diabrotica virgifera
ttaccaacttgcgatcaaaatataataaaaattccacccctgagatggggcggcaaccacccgatggtaaaagcgcctttcggcatgatatatgattttgatacttggaccatccaccacttattctcaaattttcaagcaaatcgatccattctgtaaaaattgcgaggttttgtcctattttaagcttcattacttggactatactaaattgtagctttttttaacaactaaaatttttctgtgcattggttttctctgtgactatttagtggggtatagctgtttaaaacctctattgacgagcaaacaaccccttattcaagcactttaaactcaccccacttaaaaactaacggatctaagggaatttaatttacatattcttatagctctttaaaatccccaaaaaatcgtttttgaaaaaactttttatcaccaaaaattaaggagcgatatgtttataaaactattttttttttcaaaaaattcgaatagcttgaaaattcgaaagaagacgaagatgataaatatcgatctcgatgaagatgactaaaaaaatatttgaatttgtatttttgtatttgtaaattcgtatttgtaaattcgtactgctacgttttttttctgtaaagatctattaaattaattataaaaattgcaatgctattaagggtggtttttaagggttaaaatattatgatattatgtcctaaggcataaaacaatcattattgaatcaatcaaaacacaattttacccatgttatggttt

SEQ ID NO: 9879 - DNA, 783 bp, Diabrotica virgifera
aacggccacatacacgttgaacaaacacataaaaaatttttatcatggtataggtgtaggtatcacccatccattttggcctagtagagacagcatggagacagctgaatgacaaagttggatattcaaacctgcttttatctgtttcgtgttgacgtttgacagctaacattaaattatacctataccatgataatagttatttatgtaccaagtcagtaaagtgactctttatcgaacgagtctgatattacgagaatagcgagcgtagcgagcgaggtgagtaacagacgagttcgataaggagtctttactgacgtggggcatacaaaattttatcgccaacatatattttttaaatttaatgtcgtccgaaccactggggttataaacgacaacaattgaaaatacatattaaaaataaaaagagattgtaatattaagtaaatacatatgtactaacaaaaagtatacctgaaaaatttgtgatacaattaaatgtcttttattcctatttccgttaaaaactatatgatattgttgatatttgtattgtctctaagaagctcagatatgtccctgggaagttgagtttacttctcgtttgctggtatatttgacaatcggttaagatatgttttattgatataaaataatatttgccaacataatttgatattggttttaacactgacttgcaatttacaatttaagaactttttaaattttagacgtcataataatttcatgacagtgatgacagataacttacaagatggccgc

SEQ ID NO: 9880 - DNA, 781 bp, Diabrotica virgifera
gtggttccccgttgccttctgcatctttatgccgttgaccgttacgttgttattaggttcatccgccttcgagaccgatttatcaatctcaggacaaaaaggtgcccttccacttatcagctcatccgcccgaagccgttggccagtaagtggggggattgcttataccggcaatcgctcggacgtcagagcctcgtttgttatctggcaggatgcaccgaaaggtcagtatcaagaccattacacgggcaggtgaggttgacattttggataggagaggctatacgttgcgcatcactatcccttacatcccaggaaaatacagcgtgttttatatgttcgttcatgggtattatttcattttcctactgtatgtaaattccacacttgttcactgtaaaagttattcatattgtattaatttcaaatcaattttttttatttctcccgtgtgcttattctagtatcccacaactcaatatagttttgtatttacagtacaatttacgagaaaccaatcacgcttcttgattttaatttgaacatagttatttaaagttatgtctagacttattaactatcattattttttaattgaaatattttcataaattttattataataaaacacgaattagtgtatgggtacttaattgagatgactggcaacgttgccttagaattagaatgacacatttgacaagatcaacttacataacttgaaaaacgcgattttcggttataggagttgtatcagtttttttttgacgcgaagtgtaca

SEQ ID NO: 9881 - DNA, 782 bp, Diabrotica virgifera
  SmartBlast Evalue=5E-42; Info="Glutathione S-transferase, putative n=1 Tax=Pediculus humanus corporis RepID=E0VL95_PEDHC"
agtgcttatatatttttatttttaacaaaacataatcattttataatatttatatttacaatgtatagaaataacctaatcacacttaaacttcctgttttaagtcatattcgaatttcaaaggtcccatggtggaaggtgtttcgggtctgtttttgatccaatttctaatacttttaacatctaggacgtttttcttaattttttgtagacttggatacgagtcaaaggtagtttttcctagtatgttcatgagtccttcgtagatacaaatgaaaatgatgtcggcccatgacaacctatcaagagcggtataaccaccattctgctttgcatgttcttctaattttccaaggaagagtggtacagattctttcacttttttatttttctcatctttcttggcagcatctgtttcaaacacatattcgaatgcaagtttttgcaagtctagaagggtttccacagcaacatcaattctaagattttctctagcatcttttccatcaagtttcactatcgaagccaaatatctgcaaatggagatactgtgaggaatttgttttccatcgatttccagtaccggaagctggccaagaggagtagttggttttattttaggccaatcttccctggcaatacgttcgtcttcgaatggaatttctccatagcttaaaagcattcgaataggttcacctcttgcggtaaagttaaagtatcttactttataagtgtgcgccattttaattttaagttttacaacaactttcacaacctgcacc

SEQ ID NO: 9882 - DNA, 781 bp, Diabrotica virgifera
  SmartBlast Evalue=2E-20; Info=Zgc:110046 protein (Fragment) n=2 Tax=Danio rerio RepID=Q6DH39_DANRE
atcaagttattcagtgctcctctttttgaagtaaaataaatttctaaaagtataattaaaatcttaaatgtgttcataatttctcaagtttacgtgataggataaaaaatgagtatttataaatgtttttagtgtgctaaacaaaaattactaattactaagataacctcaaacttcaaaaacaaacaatgtggaaattttcgcgtaaaagttattctaatgcaattggaattacaacagatcaatggaaaggtgtaactgtgaaattcaacaataaaataaagggaaccctactagaaaaatggattaaatactggaaactgttagcaggagattacagagatgttgctcttaacctcaaaagtgaaatgagacaaaagcccctaaaatctgccgtgtatttatcgggattgtcatttctagcctactgtggaacacataatccagatttaagaaacttcagagcaaaatatattgatagcgctaatcagttagcactggtaaattcttcggtagcaaatccaaactccgtaaaccatttaaagtatatagaaaaatgctttaatgcaaacctcataagatttataaatttaggtgtattgtctattgtatgggttgatgaatttagtgaagattgtgataattatgaaagtaattgttcgtatttgcaagttccatatacacgttttggagaaagaatacttgatatcggtttcttgaacacttggtgggtaatatcaagaaaaatgttggactatgatattaattattaaattgttta

SEQ ID NO: 9883 - DNA, 778 bp, Diabrotica virgifera
tcatcctctctatgctgaaacaacgttgtaaccgccaatagtttcaaatgtaggcgctccatagaaaaacgtacaatatgagcaaaataatgtattgccgactgtggtgaatattacgagactttactttatgcaatctttattctatcatattacgctcgtaaagattccttttttgaacataatcaattataacgtattttcctcaaggtgtcgacaaaatctgatttggcgtttacaacgttgttccagcatggctttcatttattggtttttgcgtttttgtctggcatttatgttttcttctttctgtctttgatatattacttgaacctatattagaaaatagttcattggaaatcttgatatgtgtgtcaattgtagaattgctgattctatttcagattcttttattttcaagtattatatccggacaaatattttttcaatcaaaaataaaattaataaaacaagtacttctatgaatctttttaaaaatttaaccagaaacagaattagaaagcatgcatttgaaccattgaggtcacattaagccatggtttctggatgttttgcagtgaactggggtaacagctcatcgaatcttcgatttaaaaatccaactttatacatcaatccgttcacagtgtcttccatataagcctgtcgacgccattctagctgaggcaggagtaactcagattgagctatccttgattccaaagttcttatcttttgttgaacagcatcaacatacgcatcttgtaagaggttagct

SEQ ID NO: 9884 - DNA, 782 bp, Diabrotica virgifera
cacttctagatctacttcctgattttgatcgtgacctagaccgacttttagatctagaaccactttttgatctagatctttccctggaaccacttttggacctcgatcttgctcttgatccactccttgatcttgaaccactctttgaacgtgatcgagatcttgatttagatctggaaccacttttagacctagacctggatcttgatccgctttttgatctagatctcgatctactttttgacttggaacgagatttcgaccgcgatttcgaccgagatccacttcttgatctactcctggatttagatcggccacgagatgagtcggagccggaagatatttttcttttgcgtttaccactatatccttggtcgctttcatccccacttgccattcgaagtttgccaccgtcactgtcatcatcgctagatgatatagtagcttttgaaacaattctgctcttttgtttcgaactaaggccttcgtctttcttagctttaggttctttcttctttgagtgcttctttctgggtttgtcgcttccatcggagtcatcgtcgtccttacgctttctgcctcgttttcctttggatttcttttcgccgtcgtttttctgtcgttttcgccccctttctttcttttctttcttctctcttttatccctagatgggccttcgttttctccaccgctttcagaactagacataatatcgcctttactccttcctttaccctttgctgcttttttctcggagggcatatcttggaatataattgcg

SEQ ID NO: 9885 - DNA, 781 bp, Diabrotica virgifera
  SmartBlast Evalue=2E-39; Info="Glypican-6, putative n=1 Tax= Pediculus humanus corporis RepID=E0VMJ1_PEDHC"
gtgaagatggtggtgtgccgtgttctccgtattgtattagtacgatgcaaaattgtttgaagtatcatacagaggtatccagttattgggacaatttgattgatgctattgacaaggttggtgatagactgcttggcccatacaacatagaaatagtcgtggagccccttaatattaaaatctcagaagcaatcatgaactttcaagaaagtggtacggaggtttccaagaggatttacagtctttgtggcaaaccgaattttagcagaccaaagaggcaagcggattaccccgatgcttcccaagaaggacctacaacggaaataaagattgagccaatgaaaattcctggtaggaagaaacataaaaagacgatggcgcccgtggagaatacatcctcgccattggaaaaaattattactgatattaaacagaaaattaaggagaccaaacaattctggcaaaaccttccgtatcaatattgtaacaacttatcaatactgaattcaataaattcgacatcttcccaatgttggaacggaacatatataaataatacaattacccaatcaaaaatcaacttaggtgaccatcccatactcaatgagcagacgtatgctcttcaaggtcttacagaaaagctcaggaaggctcatcaaggtcaagaagttgaaatggtggatgatacagaggaaatattagatggtagtggatctggatcaggagatggacttgaggaagaggaagaaggagaaacgacggtgaaggacgacaaggagct

SEQ ID NO: 9886 - DNA, 779 bp, Diabrotica virgifera
  SmartBlast Evalue=9E-13; Info="Solute carrier family 2, facilitated glucose transporter member 8 n=1 Tax=Zea mays RepID= B6U615_MAIZE"
gtatggttcccatagttataacagcagaaatatttcctaccacagtaaaggcttatggcatggctatggcagatggatcatatgttactgcatctctattatcgctacaagtgtatcagaggcttactgattcatttggattgcaatacccattttatatctttactgcgtgctgcttttctacaatattttttacatactttgtaattcctgaaacaaaaggaaaaacattagacgaaatccaactgatattaaaaggagaatttaataaaagtaaatcagaaaaagtctagaaaacatattattattatttaatatattttttaaacccgagtattatatttcttatgcatttaggattaatatggtaaaattcaaatataattatgaacttaatataaatacatttttgatttgaaagtttgtctgtgatatcagtttcttaaaataaatttagtaaaagaatgtcaatctagaattaactctttattttttcttataaattgaaaatcttcccgatttttatttactcaaatattaaaccaaatatacagagaggggcaaaataatggaataaattcattttttcgaaaatagacgatattggagacaaatcccgaaacatattcgagttttatttttaaagtatgacttttttttaaaaccgtgttaaaatgcaattttcagcactccataggagcgtcaaaatggtactttaaaggcactagtgctttaaaaattttaaggcattgcagttaaaagtgaattgtcaaattgtg

SEQ ID NO: 9887 - DNA, 779 bp, Diabrotica virgifera
gttgggggtactatacggagtgttacaatgaatcacaaccaacttttaatcgcctttgtaatagtagcaagctttgctttggaaggatactgtgctgctgctgctcccgagagccctcccacaaatgtaaccatcaaagactactgcatcaaagaaacaaaaataagtccagacaaagtaaagaaaattgaggaagaatcagaggaagaaatcgacgagcaaggatactgctatattcagtgcattttcgtttccatggaactcattgatagcaaaggaaatttgaatgttaagaaaaccatggctgcgttcgatgacatggatgaagaatgcttaaagaaggtaaagaagattatggaatgtacggacatggctgcccttgatgactgtgaaaaataaattatctctaaatattagactaaaaccacatattttaatttgacttttaatttttatttgactgttagagtatgaaattccaattttctcaggtcataaatataaaaaaaaaaattttgataggatagtactcttcttaaattagctgttgaatctctcatttaacaaataacatatttaaataaaaggaactttatatatcaagtcagtgagctagataaaattgatacaatagtttttgttttttgtaattcttgtactggttttatattttttttttcactacccataagcgccgttataggctgtattggttggtcttttgtactttatttagtagtttaagaaatgtaaaaactagtaaaacaaatatattatgc

SEQ ID NO: 9888 - DNA, 781 bp, Diabrotica virgifera
  SmartBlast Evalue=2E-59; Info=Serine/threonine-protein kinase minibrain n=2 Tax=Aculeata RepID=E2CA53_9HYME
gaatctcagtgtataacgactggactctgctgaacacaaaccataggactgtcttcttgttcgttagtcttgtttgggggattgtgcttggggggcgtgctttccattctagttgttggatagggtacatactgaagggatggtggcccgtgatttaacatggaggattgaaaccgctgccgatgtatgtgacgagacggcgacgggtcacattccattgatgtgtatgctgaagataggtaggtttgttcagataaatcttttgaacgaccggctaagtttaacccatgctgactaccagaatttgtcaaagacatatccaaagaagcgactgcgggactggaactcgtactatttgcagtgtttgtgctttcgtctgacgtacgcttaaagaaattgtgctgcaaagcataatatggggtaattcttgttttagggtcatattccaacatacggagaattaggtctttgaatttcaagtaatcagacatcgaatgaccgacttcgtttgcccttcttcctcccgggccgcctgtttctacacctaagatatcatgaagtcttctggtacctggtattttatattttttaccatctttagtctttttcagtatgtaccttctctctcctggtaatttttcaaaaattttcttgttttattagcttgatctagaagatgcttgggtggcatacccagaacttcgacgattttattcatctgatcaatttcattggcaccactaaataaaggttctcctgtatgcatctccaccaatatgca

SEQ ID NO: 9889 - DNA, 781 bp, Diabrotica virgifera
  SmartBlast Evalue=5E-65; Info=Troponin C n=7 Tax=Neoptera RepID= Q868D2_9HEMI
aaaattttacattatatttattaaatattatgtaaatagcatgtaactaaaataaatatttttcatgtaactcgaactagagttatgattacagttatataaataaaaagatcggtaacaaaaaatgtgttcttatttattagacatttataaaggtataaacaagtaattatgtttattctccagtcatcatctccatgaattcatcgaaatctacggttccggaaccgtctgtgtcgatttcttcgatcatcatatctaattctttgtctgtgagctggtcatctaattctcttaagatttctttgaggcaggtggttgggatgtagccatttccgtctttatcatataacctgaaggcttctttaagttctttttgcatagcttcatcatcttcttcaacgatgaatttggcagccaatgtaacgaattcttcgaattcgagacgaccggatttatcagcatctacttcttcaatgagttcttctaagattttcttgtcgaagggttgacccataagacgaaggatgtcggctaccatatcacatggaatgcttcctgatttttggctgtcgaaagcttcaaaagctttgcggagtacggcgatttgttctggtgggagttcatcagcagacattttggcggactaggtattgcagaatcgaaacaaaaaaatgacaaagctagtgttgggggagtatacgcctactgcctgaaccagatcttcttgtgcttttatatatttccaaaaataaatttaacgacttgaacgatttacgat

SEQ ID NO: 9890 - DNA, 780 bp, Diabrotica virgifera
gaaacattacgagcagtgaaaaattacgcattcaataatcaaactcacaaaaactgagtcctgatttgtcctggataaatttgaaccctgtttctgcgttccattgtgctgtgatagctcgtaaagtgttgcaacggcccagtttgcaaattttcactagtaatcgtctatccctatcagacacaattctcggtctacccgaacttttgcctttgggttggactcttccactctcatgataatgcttaagtacatccgcaactgtagaattagccagatctaattcttcagcaatttcttgtatttttttaccctgacaatgtttttgaattatcgattgacgaaatttagtatgtgtcacacttcctctggccgttttttaacactttcaagtccgccgacacagctcccgtgttcacactgttatcaatcaggtgccaccgacacgactaccgtgtttacatttcaacaattttccaataactgtaaatgcggcacatgagacaaatatctcatattggcccggagctgaaagtgttaataaatataatatactccctctataacgaacacggatattacgaggtttcgcttataacgaggtacattaggtgacccatgaaatttctattgaactataacacctctataacgaggcatatttgattatgacgagggaaaatgagatcgaagaacatgtttctttacctgttttgggcgcggtggtcgctgtaaataaataccccagctgcttgtgtatacagaaaagcctaaaatatg

SEQ ID NO: 9891 - DNA, 779 bp, Diabrotica virgifera
  SmartBlast Evalue=4E-52; Info=Trypsinogen RdoT3 n=1 Tax= Rhyzopertha dominica RepID=Q9XYY1_RHYDO
gcggtaatctctgttttatggtatttttagtttattatagaatttataaatcctcttaatacaggaatactagaatatactccagggttttttgcttcagcacaatcgtatccccaagaggttatgccaatcagaattccagatactactaaaggtccacctgaatctccctcacatgtgtcttttcctccttcatcgtaaccagcacaaaacattctttctgtaacatcataatattttttgcaactattggtagatataataggcaactgcaccgcttttagcttttcagaagccttaccatcttgagataatcttccatatccagtagctgttcctactaacccgtcactaataatagtacctgatgatgccaaagatacagcactaatgctattggtaaaattcaatggagtcttcagttccagtatgctgatatcatagtcataattttctgggttataattgtggtgacgatgcactttcgttatatagtgaatttgaccttgaaaagatctaaatgaggatccaacacgaactgatagtagtgatgtacttttgccataagtacaatggccagcagttacaacatatctattagtaagtattgcacctccacaaatctggctctttctatgtagtagacctatttggtaagggtaatcattaatgtcagcgtccactccacctactattctgtgtctggaacgaacttctataaccacaagacctaatattatcaaaggagataaaatcttgcaaaacatcattcctcacat

SEQ ID NO: 9892 - DNA, 778 bp, Diabrotica virgifera
  SmartBlast Evalue=4E-15; Info=Nuclear receptor corepressor 2 (Fragment) n=1 Tax=Camponotus floridanus RepID=E2AKE4_9HYME
gtcgaatctgctggtgttgtacaatttggtatcgatgtggttgatccaagatattatctgccatcgtcttaccaagaccttcatgggcatttggtactggcaacgatggttgttgaactgcaacgtccactagggaagatagtgcttcgtggcctggttggatatactgtggtctcgcatttctttgaatcaccccttgtcgctgttgctggccaggttgcgatggagacggagtacgatgagctgaatttgtaggatagaattgcgttttctcatttcttctacctaacatttgttgggatgtaatatagtcattaataattatttgtcgagaactcaactgttgttctacattatatgcctgtctgtactggccagcatattgttgacttgattgcatttgttgtacaggaacagcccctcttttattaaagtaatcaaacaccctcttttcttgcatgttgtgcggtattacaggagtaccttgagtaatagatcccattttagtgtctggtatttgccttaaaacttcgtatcttggctgagacataataggggtacctagtgtaatcgaacccgatttggggttagcaagcttcgaagtggacatcttcgttggtgatctaatcgaaaatgctgaacttttccgctcttgatggtaaacataatcgcgatgcatttgctgttgagactgtggttgagttttattatgtacaggtaaaagtgtctctctaggtttctttatgctgagatctaaggtttccggttctctgccgtc

SEQ ID NO: 9893 - DNA, 774 bp, Diabrotica virgifera
gactggcgcaaaaaagtgtttacacttgaacaaaaccctatacaagataactctgccacatccttggtagaggaagaaattagaataatcacaagaaacttccttgatggacaacggatcatccaagtaacgaatcaagactgctaaatacccctcctggatttgaaaggtgactgaagaaaccatggccaacagacttaataaattaactatttatgtgaactaatataaaatatattatacaggagagttgccacatggcagcttctccctcatgtgttcaacattcacaccatttacttatagcttcatgatcagatggtaaattaaattgtgtattaaataaaaaaaaatgtcaaaatattttttatacctaaaggtggagcagaatctatttcctgaatttcagttatacaattttgatcgcttatggaagatgtttgttgtcctttatatactttcttattttgtacaccaatcctttttctcggcgattccaaattcaattcttgttctgcattacttccaatcattgcaggaagtatttgtattgtagatgacctgatactaaagatataggaaaagtcaaacaatgaggaatgcacataactttccccttgttgccatattctaaatttgaaaaaatatatagagaatagtcaggtttttttgatatgccattcctattacagcaagcatttcattggctagaattagtgacgagtataatatatgatgtcatggtaactgacgtctgtcataatatggaggtta

SEQ ID NO: 9894 - DNA, 784 bp, Diabrotica virgifera
taccttgtatactagtcctatatcttctcttggttggttttaagtccaaggcacagttcacttcactaaatgtcactttacaaaggaatagatacattaagagtacatcaatggttagtttcccatagtttatagaaaaattcagccatttatttcttaaaacaaatcggcactgctcgaacaaaatattgaagaactcattagtcctttcgtatattaaacgcgatcaaaaaaaaatataaaagcaactccatgctttaactatgatgtcataaactgctaacacaaaaaaattataatcctgcctgcatgtaagaaaaatttataccaatagtggtatgataatacatatcgacatccgcctaacagtagcgaaaatgccggagtacacgttgtatgccgggctgagttaagctacaagcattagccagccggccgaagaaactcaaattcaactacatcttaaacttcgacgactcaaactagacttctctatagctcaaacgtaactgcttgacggttcaaacgtaactgaatttttcgatctctcaaactcaatcctcagaaatcaaacgccccttccaaaatcatttaatttccccatcaataatcctcaacgaccaattacagacttaaggcactcacttaatcaaaatcttaaccaataggagaatgcaaaatacgttctgggttaaaccttctggcgtaaaccaaaaacagctcgttcaatcaccaagaggataaacaaaaccgatttcagtagttcctacgaccctcttcccac

SEQ ID NO: 9895 - DNA, 777 bp, Diabrotica virgifera
  SmartBlast Evalue=2E-14; Info=Gag and Pol n=1 Tax=Zea mays RepID=Q8LSK0_MAIZE
gttacttgcggggttgccgaatagattcgctccaatgacaatggctctggaacactcgggcattgaaataacagcagattcaataaaatccaagttaatcgatatgcagaaagattgtaacagtaggaacacagacagtgaaaaatctactggtagtgcttttgtaagtcaaagtcaaggcaagttccgaaaacatcccaaagagggcggtggtagttccaaaaacaatgacagaaatgacaatcataacaaaagcagagaacatgtcatttactatggatgtcaacaggtcggtcattacaaaaacaagtgcccaattttgaaacgggagtttgagaattttcgaaaacagcacagaaaacctgaagataaaagtgcctttagtgcggtctttttaaatggtggatttaataatagtgattggtacattgactctggagcaagtgtgcatctaacgtcaagaaatgactggataaagaatgcatcccaggatatggagctcaaagaaattttagtagccaacaatgaaaagatgtctgtgttgtgtaccggagaagtagagttaactacagtaagtagcaacaaaaactttgacattgtagttacaaacgttcattgggtaccaaatattacaaccaatttactgtcagttagccagttgattttaaatggcaacaaggttgtttttaaccagaaaggttgagagattttaatagtaaaggtacaagtgtggctacagctgatttaataaatcaagtttatagacttaattttgtc

SEQ ID NO: 9896 - DNA, 778 bp, Diabrotica virgifera
ttatcctatttaaagtctagaaattcgtcgatccattaacatgggaaagaggaaaatattcgggcggttgatcctgcactgttccaggaagcttttcctggattttagtcgctttcgtggagttccagctctgtatagggcattctgctcatccgcgatttaattttctctatgtgatctgctacatttctgcatgttgaggaatctgcaaaactctctgctttatatagatttgagactggcgtcggtttcatgcatcccgttactattcttatgtctcattaagtaccctttcagactaagacactggtgtctgacaccggtgtccacgactggtgttcaattgcacccaagcattgttgagccactaaaatcagccagacactcaaagtggctcgtctgtagtcgttcatttaaaacaatgctttgctgccggtggcggacaccagtgccttagtcggaaagggtacttagcgcatcaacttgcacgaaagcaacccctgttataaatttttcttctaagcccccctcaatgtgttttgttagtgcgctgtaagatttgcagggtctgaatcatccttgttgtgggtttcatatagtttaaagaagtaacaatactgggattttgtccgtgattttggaatttcgcaggctttactgtgttataaagttgcaagatccatgtttttgttccttggcctaggtgcttttatttgctcgctgcatatatcatccacacctgcagctttactgttttataacgattcagtcttcttct

SEQ ID NO: 9897 - DNA, 777 bp, Diabrotica virgifera
  SmartBlast Evalue=4E-68; Info=DEAD (Asp-Glu-Ala-Asp) box polypeptide 10 n=1 Tax=Tribolium castaneum RepID=D6WA49_TRICA
atgaaagtttttgccgtaaacaatcagcaatattattttgtactgatttggctgcaagaggactggattttcctgaagtacactgggttgttcaagtagattgtcccgaagatccggaaacttacattcacagggttggtagaactgctcgatatcacaggggaggggagagttttcttatgctattgcctagtgaagtgaagatggtggataaacttaaagaaaagaaaataccagtagagaagattgaaattaatccaatgaaattaaacaatcctgttagaaaaatggaagcatttctggccaaggacccgtccttaaaggattcagctcaaagagccttcgtttcatatgttaaggcagtatttctgatgaaagataaagaagtatttgatgcgcaagcattagatacagattcgtttgcgaaatcactaggcctagcaataccacctagaataagattcttacaaaggatgaatgccagattgaaaaatcagaaagaagggaaacaaactagtggtcttattaataatcatcaaaatagtaaaaaatattttgataatgatagtgataatgaggtaaatactaataaacaaataaaagatgattcagatgacagtagtgttactgaaggtgatgataccctcaaagcccattctgcatcaaatccattccaggtatcagacaacgacagtgacaatgatgatgacaacattttttactgtaaaaagaactgatcatgatattgaactacctacagagaaggaaatggctgat

SEQ ID NO: 9898 - DNA, 780 bp, Diabrotica virgifera
  SmartBlast Evalue=8E-57; Info=Probable rRNA-processing protein EBP2-like protein n=1 Tax=Harpegnathos saltator RepID=E2BPV6_ 9HYME
ccgaaaccgaactttttgtctttcattttccgtttttctgccatttttttggcagcagatttattttttccgtcaaggaagtcaagatctttggacattccctttcttacttttttaacctgagcaagcatatctttcttttcttgttgtctttgaagttttgtctgaacttgtaacattttaccttcttttcgttgctgtctaagttgtttgactcgttcgcttctcttctgttgctcctgtttcttcataagatgttccctaatcttctgcatatgggcatccgttttcgccatttcagcaaagtaatcgtcaggccttttagttagtattcccatatcttttagctttggtatagaatctagaatggcagcctgggcttgtctgtggaacatcatttctcttttaaagtcgtttaaaaccgggtcttcacttggagtaaactgtgtgagctttttattatttttaagctcattacttcttttttcctcgtgggtcaacatttgagctgctaattcaggtgctaaaggggcttgtgcatttacacagtccagtcgttctatccatggtaacttgagtttgatttcttctaatttttgttttaaaccactcacattatttgtgaactgttttggtccttcttccacagtatttaagccaggttgaagcttaccatctgcaaatgcttgttggagctcaatgtcgctatcacttagttctgaatcagaactcatttttgctttaatatattttcaaatatctggaacatgcacaataaat

SEQ ID NO: 9899 - DNA, 770 bp, Diabrotica virgifera
  SmartBlast Evalue=5E-11; Info=Probable RNA-directed DNA polymerase from transposon X-element n=1 Tax=Drosophila melanogaster RepID=RTXE_DROME
tggcgaacaaaagtaaataaaacaaaatcatctcaaataacgttttacaaaccgccacaacacatgcccacctgtaagaatggaaaatgtacgaataccaacaataacagacgctaaatacattggcctccatcttgaccaacgtcttacttggaaaaacatatacagactaaaagaagacaactagacttgaaatttcggcaaatgtattggctccttggacgcaatcaaactcaacatccaaaacaaaattcttctgtacaaagcaatactcaaacctatttggtactacggactacacctctggggctgtgcaaagtcaacatcactgaatatcatccaatttggtactacggactacacctctggggctgtgcaaagtcaacatcactgaatatcatccaaagatttcagtctaaagttctaagatcaatagtggatcaccatggtacgtaactaatcaaacacttcacgaagacttaaatatacctttcatcagagaagaaatcatcgagccacagagtcacaaaatcagcgtaccattcaccatgacaatgagttagtaagggaattattccataatggccctgccacaaggagactagatcgaacctggcctcaggacctattttaaaacttaaacataaatagaataagatgagacatcattggaagtctcttcttcatgcccaaaacatggaacaaatttacttaatactcttttaatgatgtagattgtaaataaacataattacataataaaatctgtc

SEQ ID NO: 9900 - DNA, 778 bp, Diabrotica virgifera
  SmartBlast Evalue=2E-39; Info="Ubiquitin carboxyl-terminal hydrolase, putative n=1 Tax=Pediculus humanus corporis RepID= E0W1Z0_PEDHC"
ggcgttttgtgacttttagcacatgtcaattttctccgaacatggtttttctaccagaagatggccttacgaaaaaggttacagtacgtgataccatccaacagtcagaaaagaaacaggcttttataaatatatttccctccaagaccatcgacagtatcttcagagaagtttccaaagagttcagctataaccatgatgaaatcgaactcgtccttcaaattggcaagaaagacatgcacatattgaacgaccacaaagacaaaacggtacaggaagctggcatcaagtggactcctttagatagaccttctattatcataagcaccctaaaaaataaaccaatgtcgttattcgtccaggaaagcgaagacgaccttcttttaggtgcttcagcgagccccacagccggagaagtttccagcagcacatgtgaaagtggccaagcgacgacgaattactgtgacttctacaaaccgtcatcgcgtcctagcttgaagcccattataatagaatctaccaattacgtaggattagtcaaccaggccatgacttgctatctaaatagtttgctgcaggctctttacatgactccagagttccggaacgccctatacaactgggaatttgacggtgttaacgaatcgagatcgataccataccaattgcaaaagttgtttttgaacttacagacgtcttcgaaatctgccgtagaaacaacagacttaaccacaagtttcggttggcaaaatagtgatgcttggcatcagcatgatat

SEQ ID NO: 9901 - DNA, 778 bp, Diabrotica virgifera
  SmartBlast Evalue=1E-117; Info=AP-3 complex subunit delta-1 n=1 Tax=Harpegnathos saltator RepID=E2BM89_9HYME
ctgcaactgtaaaagctcgtatggcttgaacccttatacatacatccataagttgggctcctatgacatgaccttgttttgatccgaattccatttgggctaattccactaaaacagtgacgtaccattcaaaattagtaataaattgataattattttgagaacaaattagaataattttactaagcagttcgtctcgataaacggttccttcggctttgtccatgtgaaccattagttttttaacaatttccattagattcttcttcgaaaccattccatatagtaaatctaaggccctcagtcgtatcgattcatccttatcttcgagacactgtagaattaaatccttgtgagactgtacacttttaggatgagtctttaatatcttcgacatggcaagtaatcctaaatatttcaagttttgatctgaatcttctattagaatcctcagtttttggacgcaaagttgtatgctggctgcgtggttcggcataccagatgaaatactaatcaggacagctatgacagtgtttatgcattcgtaaagcagactcattgcagacgtactgtgtataagatttgtaagaggttcgattaattttttacctagcctaggctctaagggagtaagggcaccaaacagtttaataattttgtattagcatccagttatttgtacttgttgtcattagtttaaagaagactggagcaagactcaaatagttttttcggtattttttcttagctagttcacaaacaacattaactgctgctg

SEQ ID NO: 9902 - DNA, 779 bp, Diabrotica virgifera
  SmartBlast Evalue=2E-71; Info=Fatty acyl-CoA reductase 1 n=1 Tax=Harpegnathos saltator RepID=E2BHA7_9HYME
gtatagagcgcagagtagaaaccactggccccataaaagttatttttccatccttccataggttccctatacgtcgattccactattgaaggtctgaagatagctacaggtaatttatttccttccttatttactaatgattctgctatacatttggtaaaagtgtatgtattgggccatttacctattaaccttgatgtagatttttctaattcttttggtgacaacttttctattaactctactgatttctcataggatatcggtggatcatacagcctttcctctacttcgcttcgtgtgcaatttgaataggcagtggatacataaacaatcgattttatatgtttcatttctttggctaagtctataactaatttggtactatatacattggcatgtaatgcactgatgatgctttcattgaatttgattgttgctcccatgtggataattacgttaacttttgaaattaaaagctgtctatctgactctgataatcccaaatgcggtagcattaagtctccggatatagcttgtactcgatgtctgaatttggatttttctgatttaagtcttttaaaaaccacatcgtcgaatatttctgtgattctgtcatccttgtgcttccctttcttttctcgtacaagcaaatacaaagttcccacctccgttgacctcagcagcttttccacgagaatttttcccataaatcccgtccctccagtgataaatacgttggcatccttataaaactgttgaataggtgtatgatccat

SEQ ID NO: 9903 - DNA, 780 bp, Diabrotica virgifera
tttgccggtttgatcaaattgattatacagggaaggattcaaagaaaaagatgcatagggagacgtagaatatcatggccacgcaacctgagagaatggtactgatgtaaatcaaatgaacttttcagagcagccgtctctgaagttcgaatagctatgatgattgccgacctctgtcggcatcaagtgccatctccgtcgtggagatggcacttgaagaagaaggttgttaatactatgttattacttgtcaactgtcatctgttattgctttcttgtcagttgttagcataggacttttcaacgattgttatttgtttcgagattctgtcatattatgttgtataatctgtgtataatattaatatacattgtcatttgtttcgagtttctgttatatgttgtataatctgtatactattaatatacacggattatacgacatatgacagaagctcgaaacaagtgacgttcgttgaaaagccctattgaggatcgctaaatatctaggatggccctctagtatgttaaatcaattaatttgtagcaaaatatacaagatatcagttattttacacctcacttaatctggaagaataattttcttttattgataatataaacaggatctacgccgattttaaaaagtcaattttgtgaaatctgcgctgtgctgtatttaaaagatgatacaatgtagtgtgtatactgtatacctataacattttctagaagaaaatgtttactgttgttactagggcattagttttctacacgtag

SEQ ID NO: 9904 - DNA, 778 bp, Diabrotica virgifera
tatttggggagcgtttgttcacttgttcactattcttcctcttaaccgaaaataaatatatgtacctttttaaatcttaacatttttttttcatcataaataaagcaagctctcttggtaacatctcttgcactttggcacacttttttaataaaatctgtacaaacgattttaatttttttttctcttctattttttttatacacaaaagtaataaatatatttatattctcaataaaataatttatatccattttttcacaatttttttaatttcaatttaaaatagcgaccccgctacattttaaattttttaaaaatctaacaaaaaaaaatatcctccccaacaaacaatatttatcaaaaatagtttttttacatttccccaatactcgattggttacttccttttgtctatgttgctaaacccacaatttcaactaatgcccacattaaaaaatatattacagatgataatgcacagacaacttccttgaaacgtattgattgatgtatacgattttcttaaatattaatatagatatttcttcgatatagacaggaatggaaaaccttctagaaccaatattgtgatgattttaggattgatgtttgattgtttgattgtctttcggaaaatgaatgtcattgttttaaatctcaaagggatctattacgggattataaaaaacacatccacgcacattcaatgagtcaaaacgtttgttgaagtaaataaagaatgccaagtatttaacaaacttgatatccaagtagc

SEQ ID NO: 9905 - DNA, 773 bp, Diabrotica virgifera
  SmartBlast Evalue=4E-99; Info=Ras suppressor protein 1 n=3 Tax= Aculeata RepID=E2A8L4_9HYME
cactctatatgtttcacttcttaaataatcctgtagatggctaattcctagttgtaactgttcggcaataggtggtacccattcgttgccttcaaatcgaaaagcagacttgttcgaggacatgtctaagtttccaatctctggaggaaggatagtcagacgatttccctgaagatgaagttccctcagacgaattaattcccctatttctttgggtagttcaatgatgtcgttttcacgaagaacaaggatttgtaaatttttcaggtttttgatgtcagaagggatatattcaaaatcattatctcctaagtataaggcacgaagggtctccatcataaagaagtttcccggcaaagcatcctctttcagattattataagtcagatccaacacttctaatacaggaaatgcaccaaaacctcgaggcaaagtatacaagcgattaatggagatattcagtatcctcaatttggcatggaggacaaagacagaggtaattcctcaatatggttgttggagagattcaaaatttccaagttggtcaagttggcaagaccaggaggtacagacttaattttgttgtggctcaaagttaaccttgtaatatttgtcatattcaataatccaggtaattcttcaaatgaagatattcctctatcaaacaaatcgagctctggattctgaaattctcgcgcttcttccaaaaccttctttggtttagccattctgtttaattttgtttttgttacaaaaataatctaaacaaaatc

SEQ ID NO: 9906 - DNA, 778 bp, Diabrotica virgifera
aattttaattgtatatattatatacaaacattataaattaagtacattaaaattttataaattactgctaaacttggtaagcatacctcagatatgttaacatttttgtagatttctttacacttacacgtattattcaaaaatatattcaataactacaacaaaaagtttttgaaatgagaagtgtttatttcaaaaataaattcagatcttgctcacatgatacaactaggggtaacttcgatgacactttaggcacttaattcataaaaaaagtttataacctcataattacactagcggcaaccatcagcaatccaagattggcgtagacagtgggactgctgctctttttgtcttctttcttctctccaccagcttgagcacttggagaagctgcagaagcggcggtagtagcagaagtaacagcagctgttggtttcttgtcgtctggttttgtgtcagtaggagcagtttctggggtagtagttggtggatcagcaggattgctgcctggctttacacccgatgggggcgcaggttcttgaggagctggttttgaataaaccgtattttgaattaaaataaggcacaaaacactaatgactacaaatgttactgaactggccatctttacgaatgtagaatcgccggtcgcggaatttctatcgtatgataataatactggaacgtattcaacactcagctactcgatcgccgacgggtgaggactgacttctataccgacacctggctgactagactgcgaataattgtg

SEQ ID NO: 9907 - DNA, 778 bp, Diabrotica virgifera
  SmartBlast Evalue=1E-109; Info=Autophagy-related protein 2-like protein A n=1 Tax=Harpegnathos saltator RepID=E2BCN5_9HYME
ttattttttatcacaatacacgccggcatcactgcgccatttttgatttgcttctcttcgagcgtcgggcactaactgactgcgcatgcctcctagtacgttgctagtggcttcagacgcaagtataattggcttcagtatggttggagggatttgacgtaggacgccgcctactgcgccgctgtatcccttttgttctttttcctgggcggctacttggacgatgttgtcagctgtctcaccaatgccctctttcactagtaaaaacgcattcgtcattccttccctgatatcttgtggttgatggtacctccttcgttttcccttggacttggcaagtatcctaacactaggaccaggagacaacatatcgtaggcagtttcggcagttatctgtattagatgaattattctagatgtcaattcgagcgcggccattgctgtcgacgtcgtaaaactattggctcctcgttgaagtcctctaacgatcctaccgtctttttggtactgttcgattggtaaccagaacagatctcgaactccttggaacagctgaacaagagtatacatcggtccaacacctccaagtaaactgggcagttggttcttcttaatatcactcaaccattcctgtaccaaatgcatcatgagtttgtcgaatcctaaaaggccatgtcggtaagtcactcgtttcaacctcaattccgaacaatttaattggccaaggcccatcagtagtcctgggagtgacccgtgcgtcatgtctacgcgttttccg

SEQ ID NO: 9908 - DNA, 763 bp, Diabrotica virgifera
  SmartBlast Evalue=1E-22; Info=Transposable element Tcb2 transposase (Fragment) n=2 Tax=Camponotus floridanus RepID= E1ZYL6_9HYME
tttacaataacacaagtttgtttcgtgtgggatggtaagccactcttctactgcgtcaataagctctggatcgagtttgggggtgacgtctaagtcgaattctttgttttagctcatcccataattgttctatgggattgaggtggactatacgccgggccattccatgacccgatggaatgtaattttgcgcgattcttgaggttttccttggattatcctgcataaaaataaattcgtctcctatgtaatcaacgcaaggtagcacatgcatcgctaaaatattctcgatgtatgtagcacccattacaactcctctctcgtaaagacggttacccctacgaatgaaaagaaggtcggttcgtgcccccatagaaattgcactccagatcatgcaggaaccatctccataaggactacgctcttcaatgcagcattctcctcgtcttcggtacattttccatcttcggtcgctaccatagaggcatattctggtctcatctgagaacagaacagatccgcattgttccaacgtccagttcagatggttccgtgcaaaacgcaggcgtgcttgacgatgagctgcagtaagcttttgaccaatcgcatatactggaggagtcagttattttcctccagtctttgtcttactgtccactgactaataaccactcctcttacttcacggagctgttattgcctttgaacggtgttgaggtgacggtttcttaatattttgacacaataaagcgatcatcacgag

SEQ ID NO: 9909 - DNA, 775 bp, Diabrotica virgifera
  SmartBlast Evalue=6E-35; Info="Solute carrier family 2, facilitated glucose transporter member 8 n=1 Tax=Zea mays RepID= B6U615_MAIZE"
tggaaagagcagatgaccaggtatacaaaggtttcctaccaaaccttttaactacaaataaaacaacggttatatgaagtacaatagagagaacgttatatataatagaagccacttcggggctcacatcaccaccagcttttttgaagatcagttgagtatactgcacgaacactatatttccactaaacatttgcgaaattcttagaaaaaatccagctaagagagcttttctgttgctttctatacaaaacagatccttccaggtcccctgctcggacatttgacgttccacgtcactcttcagcttttttaaatcagcttcaacgttgcttttcctagtcaaaaaccttaaagatttccttgcagcttcgtcttggtgcttgattaaataatagtatggtgtgtccggcatcaatgaaaacaaagccacgaatagtattggcacaggtaagaagatgcaagatgttgtaaacacatcattgtagctacctactacgtttacaccaaactgtccaacgttaagtccaaatgtgatggcagtacctagagctcctctaattttgggcgaagctacttctccaatgtacattggcatcgctgtccataaaaaactattcgccagtccaacaaacatcctcgaaacatagaacacataaatactcttagcaaacgcagcgatgaggaggaaggtgatatgtgggatgctcaacaaaagaaggggtcccttttcctgccgatgatgtcagggattttgctaaaaatcaggcatgtg

SEQ ID NO: 9910 - DNA, 770 bp, Diabrotica virgifera
aaaaagcaacataatctgaacatggtttaaggtaattacaggcaatattagcatttacgtatcctgtcaggagacttgacgaagaacagtacagtttagtgttcgaaaccggtcgtccaaggtaaaataaactgattgtgagtaagtctaatattgtataaccgattcattcatcatttcaacataatcttatttactattaattaataaaaatatatgtgaagtttacataagataaaaatataacaatcgaacatacaatattgttaaaacatatgaagagaaatattaaaaagtcataaataacagttaggcaaaatagaaaataaagtaaaagatctaccttattcgactttttcaacgtaaaaagttgggaagactgcactcaaacgagatggctgtaattgaatggaaatagaagaaaagagaacatagagcgggaagtttcttatatgctaaatcgggataggtcccaggagttgtctgtataccattattagtcaacttgacatcaaagtaaacttctgttataactggtacaagtattcaatcaaaaaattaaattaaaaatccaactggattacaatagatatcagaagctaataaccgcaaaaccaaacagtggttgggtttaaattattgattacatacttaaaagtatattatagaggtataaatctactgaacaccgcacttaagctaaccacaaaagtcctaaccaacaaaatcaataaactaacaactttatcagatgaacaacaaggattcag

SEQ ID NO: 9911 - DNA, 777 bp, Diabrotica virgifera
tttaacacaatacattatgcatacgaggtttatcccaaaactatcagatttttacgcaaaccatgttgattgaactagcattccatcggcttctatgtgaaagcgtaatcagtaattgtttactaactagccatgtacaagctatataaatggtgtctaagctctttaaggacaatattagaagaattgttcagtacgttagaagaattgttcagtaggtttaaaaacagtcaagacaccgtctgacaatgacttgttttctttaaggactttattgtgctttacgcacaatgacttttccttattaaagcacgataaaagcgcaaaatattcgaatgtgcaagacttgagatttaaaaatatcgttatttgattgggcgcgaacgagaaagtaatcttggagtatgaaaaacttctctttcgaaaatcctaacggagcatttgagaatggtagccttgtatgccaaatttataccaaaattactcacggcagagaaaagaaaactggactggaaccagtcagctcacttaaaagttggcagtatgacatcggatattaatactctcaaaggaagcagacaggggtgtatatcgtcgccactccttttcaatttatattctgaatcgattttccaggaggccttaaaagatatatgaatggaatgcgaaacctaatatgtgaatggaaaacctattatatgctgaaaacacgatcattctgtttacaaattaaataaatatatagtaaaagaaaaaacaaaataaatatataatatt

SEQ ID NO: 9912 - DNA, 771 bp, Diabrotica virgifera
  SmartBlast Evalue=7E-42; Info=Pol-like protein n=1 Tax= Biomphalaria glabrata RepID=A3FMR3_BIOGL
gtctatgtttgaggtgcttttaaatgtggtcatactgctttcgactaaatttgaaaaaagattccagtttgggtttttttaaattccattttggggtaaatgtccgtccacgttggtttttgttgttatgaataaaaattgggtagtgatcactgttatacaagaaatccagcctatcccaggtgagctgtggggtcagacctggttcgcatatcgtaaggtctatacatgaagattcaccgttctgtatattaaatctagtgggtctgccgtcgtttaagactgaaaggttggactgttcaaatatctcttccagcaatcttcctctggtatttatagtagaagagccccatgaaaagttgtgagcattaaaatcgcccaaaataagcctgggttggggaatttgttgtaagagttcagttaatgcttctgagtctacttgcgttgatgaaggtaagtataagttacaaacgtagatatttggactcgagttaactttaatgcaaattgcttctagattagtttggagaggaactactgtagtttcaattgacttttttacaaagatagctactccaccactggctttatcttggttagttctgtttttgcagtaatttttaaatttttttaaagcttgtatgttttcatttttgaaattagtctcctgaagacaaattatatctggattgtgtctggacagaattatttggagcattggaaggttattatagaaaccgttaatgttccactgcaaaattgatgagaagc

SEQ ID NO: 9913 - DNA, 776 bp, Diabrotica virgifera
  SmartBlast Evalue=2E-13; Info=Protein unc-84-like protein A n=1 Tax=Camponotus floridanus RepID=E2AJ06_9HYME
gagaagccgttttaggtgtgatttcctatgaaaatttaggagaatattcatacacacgaattaattttaaatgcggaagtatttattggtgacttattgacatggatattagatcaaggaggtcaaaatcaaggactccttttacccaggtggaggagtttagtaaagccttcctggagaaggaggtaatagttgaaaataatgtgcgtgtcaccaggagctctacttcattcaaagtaaaggatagcacatcagaagcggtagatgaggtaacatctacgaacgcgagaccaattacgaaatcctcctcccatcaatcagaacgtgtcagtcgacaatggcacaatacttcggattattcgtccgaaggagaaaacgaagtttcttcgaccaaaactatatcacagaatgagaggaatcaaatgatacaggacgctagagctgccgccaacggtggtagtgaagtatcggcgttagatctctacaaaaaatccggaagatattgggacgtatatccaaaaacagattacacctactcgccgctctcgggggacagggtcgaattagctcctggcgtcgtagctatgcccaacatgtcccggaaaaccatacactcagttcactcgtccagcgacgaatcactcctttttacaaacgtcgaacacaagcataccaacaccgaatcatacatatcccgaagtccctcagaattaaacactaactacaagcctaggcaattgtttaacaataactatgagagcagttactccaaaacg

SEQ ID NO: 9914 - DNA, 773 bp, Diabrotica virgifera
taaagaatgctcgcttgaattccacaaagtttacaagtataattttgtttaaaatggggtaaaaagagtatttattaaagttataatttcaaaaataggatctcttctgtaagattttataatatttcatattttattgtcttgaatgtttaaatgagcgaattccagcgctctctcctgcgttaagcatgcattatacctaacaacacggctggctgggcataagtcagtatgctagtcgaccgtgaaacgaacgaatagaccgtttttttttcacgtgtttagtcttaagtttacgttataataattgtgtttttattgaaacagttttacggtcaggatctcgatcacgaagttagaatatgttaaaccagcattttcctggacggatcggtagccgtggatacgaaccgtggcctcccaggtcgacagatattactacttttgttttttaatttggggcctgcttaagaacagagtttttgaacagatattccagtatctttcttcagttcctaattgctgttagtttttctgcagctgtttgttatattgcgttcaaaatgattttgtttgcatagtagaaataatttagataattttgatttttaatgtattttttttctatcctattaaatctaaagtatgttgacaatttgttggtttactttcttggtagcacttctatttgaatgtgtacctatatttataaaatgtttcagtgcccatactatagactatagatatacattataaattaaattgatttattt

SEQ ID NO: 9915 - DNA, 776 bp, Diabrotica virgifera
ggtaatagcaatatatttacattatattaaacaaatcagtactagttgtttcataccctaatgtttaacaagaggtaaacacaagaactaatttacaaaaaatttatcaattttataattttacatgcatataataattacttttatattcgtaccaaagatggtcttgtgatatgtaactcatcaaatcgatagagaatttttcgcatttaatggcaatatattaatttttctattttaaaatttattttgtcttgtattatcagagtttggaagacggcctgctatagatgtagatgcaagattagatattaaagaaaactagacatttttttgcaaatgtacaatggaacaggtatgcctactttcgacaaaatattattcgtgacgattgataagttttgcccaaaaaattaagttttttcgttaagatgtctatattttgaacagaaagaataatatgtaatacaatgatatagtggtggaccgttctaatcttcgggtttgtttgtgtgtttttccttatggatttcgattttgtgttttttaaattatggacttccatgttgagtaaaggtttagggcgttttctttgttcttgagacttccttgtatttttactttttttggcctacagaacctgtaaccagaaatatatctacgaatctccgtcaggctagacgaactcagactaagtctaaggactaagcaacagccttacttgcacaaaatatacttcagcgaagtcacaaataaaatatgtcacagctatccca

SEQ ID NO: 9916 - DNA, 777 bp, Diabrotica virgifera
  SmartBlast Evalue=2E-26; Info=Mitochondrial import receptor subunit TOM20 homolog n=1 Tax=Salmo salar RepID=B9EQA5_SALSA
ggtgtccatgatcatggtggtgaggtccttgatcatgatggtgtggtggtccatggtcatgatggtcatgtccaggcccatggtggtgaggtggtggggtgatggacactggcatttgagggataattttagaaaattttcttaaaatggtatccccccaagcaatgatcggtatatgtgcaggcgtctcagcaaccctatttatcggatattgtttttactttgataaacagaggcacaacgacccagaattcaagaaaaaattgaggcaaaggagacgtgctcgtagagatgcagctgcatcatctggaaaaaggtctagtacagtgtttcctaacattaaagatcatgaagcagtacaaagatttttcttgcaagaaatccaactaggagaagagttattagctgctggcgaccttgagaatggagtagaccatttgggtaatgcagttactgtttgtggacaaccaaatgatttactgcaagtcttacaacaaacactacaacccaatgtgttccatttacttatcgaaagactgcctgctgtggcacctcgtctcatgaaagcacaaagtggtcaaagcgcttcattgcaagaagatgatgttgagtgattgtagatacctttttgctctttcactagtctcattttgttagaactgttatagattcctgtcatccttcattgttgctgtatcaaagtaataaattagttttacttgagcaatatctcatattttgtatgttgtatgtttttgcggttacttgaaagaatgt

SEQ ID NO: 9917 - DNA, 777 bp, Diabrotica virgifera
tcgtggtagtgagtggagagtcgtggctatttatgtgacgggacggtgacgaattgacgaatgtaaaatcaataacagaaacaaacaattttcgtttcatagttattgaatataggagtttacaaaaacttagaaatataaggagaaatatggctgatcagagtgaactaagatcaaatgaactccttttgcccctacaaacaaaacaagcagcaatagcgctaggaaaacttatgtttttcagtgttttgatgtttacattgccttttgtggcattttttggaactaagtacatactgcaagagcattttgatgttataggttttactaatactgtttggtcagttctcttcagcgttgtaactgtaaacttgattattgtagcctatgcatatattgcttacttagagccagattatgatgaaaaaggaaatgtaaaagaagaaagtcgaaataaaaaacaaatgtaatcttatttagtagaaacagcatcataccttttgaaataatgtggcaaatattgttaggtggtaattatatcattatgaataaatgttatcaaatgtagttctttacggaattacaacagcattacaatcattggtttaaataaatcaaaatgtgatgtagtttatattaacagttaatttaccatatatgtttacgtcacatttatctgactatcagatttaatattaatgtattaattttcaccacttctaagagttaaacaaaaaatttgtaacttttcttttttgtaaattaaaaaacaagttt

SEQ ID NO: 9918 - DNA, 776 bp, Diabrotica virgifera
  SmartBlast Evalue=2E-16; Info=Transposase n=1 Tax=Salmo salar RepID=A8C5I4_SALSA
tgaagggagccttttcttactgcatgaacactgtcacagcgccttcaaaatgccactggtgcccttgtttccactcgaattatctaggtgtcctttgaggcatttaccattgatcttacgatatcggcgttaaagattagattgagctagagcacatttaaattggagagatgaataatggcattcaatattgttcacagatgagtccaaattttgccgattttcagatagccgtcgagtacgtatatggataagaccaagggtaccaagaaatcaaagactatgtcagatggttccatccatttggaggtggtgttgttatggtttgagatgaaatctgcttcaatggaaggacagatctctacttttgccagaatggtgagatgtacagacaagacattattgagcatattagttttaattttcatgcagccattgaggaccagtttttttcttctcgactacatagatccgcagttatcgaagaaagtaaagatttgcatggaatttcccattggcattatcccgcgctcttcagaccccaatcccattgaacatgcttatgacatgctacaaagaaggctttcggatcacgtaccccctccacaaacccttcaacaacttcgaaaactgttaccaagactatggggagaaataactcaagaatctcttgataatttaatagatagtatgccacgtagaagtaaatcaataattcatgccaatggtggatataagacgtattagggcacaatgtctattaatgcaaaattaaa

SEQ ID NO: 9919 - DNA, 773 bp, Diabrotica virgifera
tcaataatacaaaacacgtgctcgttttttctaaactatcaagttgcagctgcataggtcaggcatcgcgcgtgttgttgtgtacaaaaaagttttatctcaggcaggtaccgttataaattcagctacaactttgtttcaatttcgaattttttaataacattttaggatagtacttctatgatactaaggaatgtttttacgtaaaaaacaaaaattgattttttttataatttataaaatataaataaggggacttaaaagtacccgtaaaaatatgtaatttttgaacgtttaaaactcaaattttaataatatctacaaaatacgagatcttagtgtatatgttgctggtttgttcttaaactgttagtttattttaaaatcgctgaaatatatcgcaccctcagtaatataagggctcaactcaaaatttgtgttaattttgactttgaatgatatgggcacaaaatgaaattctctaccggttagcattgacagagggagaaaaagacatgaatggttcggtaaagatatttatgcctccttcactctccccgaccacctctggtgtttattgttacaagggagccatcagtaacatgtctttctatgatgaaaatcctggttagattgtgttttaacattttgtatatagaatagtttttagttgagccgttatattatgcaaaatataataaataaatgggtctaattcatgatagatcgctattttgcataaatcgcgacagaacattaataataatataagg

SEQ ID NO: 9920 - DNA, 775 bp, Diabrotica virgifera
ttattataccagttaatattaaatgcacgattttgacgattacctgaggatttaataatagttaaatttggctgtggtctttctaaggttttaataatataagctttattataatatacttaaagtattaaaattattcatgtatataccttttatataaacaaacaacggtacgtaaattgtaaaaatatccttaccaagccaataacaacacaaataaaaatatatgaaatacaaaaattcaccaaacactaattaaaagaaataaaatgataaaatcacaccaagaaataccctgactattaacttccttatagaatataagtaaaaccacaagtgagcctaattctggttttgcctcccttggcatatatttctgggtagtttgacgtgaagcgatataatattacgtttctctatcgagtattattgtaagcataggaaactatatcgctggtttagagacgtttgtcgtaacttagaacacaacggagtcgagtctggcttctacctcccttggtagggatatgaggagctgctcacagcatacaggtgggcatattgatgcattccagatgcgtttagttacaaaagtgtgcaataatttacactttctattagtacgagcgcttgttgtttctcgtgattcaaaataaacaaaacagtgacatttcatcaataattctagaaatattatgtcccagatatgacataaaatgtgtaaaaaaattatggggaggctaagcctccgttgcctcctctgacgagccgccac

SEQ ID NO: 9921 - DNA, 768 bp, Diabrotica virgifera
gcccatgccttttccgttacatacttttaaaaaccttagctttatataacttcagctattatgctttttgaattaaaatttcgagggaacagttattttacaattttttaataagttcatggtattatttttaacattatcattaaaattatcatttatcctatttttttaaccaaattatgtactaaaacgtgatatcgactactcaataaaccacaatcatatgcataatatgtaaagtatacacttattttcaaaaatattttatattttcaaaaaaaaaatgttgataattatttaatttataaatattttttatattcaaattattaatttctatatctactttttaccgcttaatgccatccaaaaattacccacactgggaagaagtcacttccatattttattaagatatttgaaattggtcaattttacttgattccttcacagcaaattactagaaggtcatttaagaatattttcaataaactcaattagtaagtttcttccagcagatactaactagaggcagccttcatgatctgagtgtgtgatgagtatcgcaagagagagggcaagtaaaactacatgctatctcctttgcacctcgttctgattgacatgtctcaaatacctctatatttctgtacaaaagtcgaaccgatgggttgccagaaagcgcatgtagttttattcgctctctcctgttggtacgcctctaactcaaaattgaaaagctgcctctatttagtatatgcttgatag

SEQ ID NO: 9922 - DNA, 759 bp, Diabrotica virgifera
  SmartBlast Evalue=7E-18; Info=importin subunit alpha-7 n=1 Tax= Saccoglossus kowalevskii RepID=UPI0001D3A162
tccctgctttccattgatttgaaaaaaaaaagtgaaaaatgccgttctttgacaccaaattgtttataaataaaaatggccgccagatcctacgcaggaaatagttacaacccgctcttataggtatcacctgtcgaaaaaacgcttcagcaccccggctgttcaagtgtcatggaaaaaaccttattaccctggactatcatgcactgaagctgaaaaccatttgcgtcgattgcattcacgggaaaacccctgagaaccattcggcagcaaatatttcttggggattccttgttcggaatttttttgtagggatattccgtccaaaaaaatttgtgggaattatttgaccagaatttttttgtgggggtccggggattttttgtccaggaataatttttggggatttttcgtccgggattatttgtcctaagaccgtcactcatacatacataagaaaactcagttcctgttttcttctgaatgattcttgcatcaataaaaatttccttttttgtttgaaactgtaataatatgggcacttttataaaatgaatctaacttcttcaaaactgaaaaccccccattggtagtgattgatctgaactgaactgatattgttgatgatcggtatctatcgatggagctatgtttgaatcctcttcttctgtgccgaagaaatgttcgataatgtcaaatgctttctggtaaatctccatgttttcgtgcgactgaaggaattctatctgtctagaccgt

SEQ ID NO: 9923 - DNA, 775 bp, Diabrotica virgifera
tcaagatccattattaattatttcatttgtgacctttgatctttgataaacccgatcatcatgtgaaaactaaaatcagtattctcagtttatacacacaatgtttttccaaagtgttgtcttcttgttttgtgtttatacagtgtacccctgcagtgacattacctttaacaacgtaaatgttactctgaaaggtgctaaagacatcaaggaaataacaggatgtttcgagcccacagaagatttaataaaggtatcctacatccagatcatcaaccaaaatattcctgttataaaaagaaacgctataaacagtttgccgaagctcatagacgtcattttggaggaaaacaacattacggacatcgaacctggagcttttagaaatatttcaatgctttatctgcttaaaataagaaataacaacattcgaatgattcgcgaaggtgtgtttgctgatctaccacttacagagctaaatctgatgaataacagcatagaaatcattcatccaaatgctttcgacaacatgcctaacttaatagtgctgtccctcaacgaaaacaaaattacatctctttctaataattggtttaaatctagtcccaaagtgggaaatattaacttggagagaaattatatatctgtcattcccaacaagatattgcaaaatatacatggagagcatatagtgcgaaatattaccattctgacgaatattatgttaaacgacaacaccatccataaaattgaagatggtgcttttaatgggcct

SEQ ID NO: 9924 - DNA, 777 bp, Diabrotica virgifera
  SmartBlast Evalue=8E-59; Info=Cellulase II n=1 Tax=Apriona germari RepID=Q6SS52_APRGE
ctcataaaatatatttattaaataaaaattaaggatgagaaatgggatcacaaccactaatactaagcagctcctgtggacattctacctcttcaaaactaacatcaggattggaatatcccaacatccaattgaatctaaatgcacagccttcccataatggctggggaagattgtaacactcttgtaaagaatttactccaccgtattgatctccccagctagaaacatcagtatgccactgagatgtacaaccttgtgtgtaatatccaactccacttccaggcatggcgatatcaaataagttagtgtttgtttcaggtgcatttccagtgttggttacttgtaccaacattttcttattagccaactcttgaggttggaaactgaagagaacgcacgaacaacacatgtttctagttgttccatggaaacgagcagcaacatacccataggctaaagttgagttaattgcgaaaccagattgctttgtacatatataagattgaccaccaatacatccagactcattttctggatcattggcgttttctccgtcagcctggcacgcttttactggctttttgtattccacatttccaggccaagaacaagttgctttacaacagtcccaatatcgtgtagtggttccgacaccacttaaaccgcctggaattttttgataacgatgttctggttattcagactggtagctgcaacgtatgcagctagtaataacagagaagtaattgtatatttcattttttaaatactaat

SEQ ID NO: 9925 - DNA, 767 bp, Diabrotica virgifera
cttttggacgggacttaccgaaccactggtgcaccagagaataagctgcagtgacatggctgctactatggagaactcaacacctattgcaactacttcagcatacatccatggaggcagcctatatcaaacattcaactacaactgtagttaataaacgctgcatgaagccatacattttgttgtattattttcacattttgtacagctttacgcaggatttgctttttttataggataagacgtacctacacctgagagacagggctagtcgaagccttaaacaattagcatccagtgatctagctaatggcttcactgttatacattggttgtaatattgtcacataccaatttttgaagcagttcgaccattctaggcaactctcgtctcggactgagtagtacagatccgttcggcttacccgtaccgttcccgtactcatccgagcaaaaaaaggggaaataatgctcactcggggcgaatgcttaagtgtgcacaaggcttaagattgtatggcagatgatcatatttatttatgacttatgacagatgtcaagaatattgcataatttaggaaaagctactaaactacagagcgattcgctcggcaatcgaatgactgtattacaattttattatctgtaccttcatcggtacatgtgaaagaattgctcaacacaagcatttctagtacttttgatataattgaaacaaaatttatattttattacaaaaaatatcagcttttttcagctcagttccg

SEQ ID NO: 9926 - DNA, 774 bp, Diabrotica virgifera
  SmartBlast Evalue=1E-100; Info=Kinesin-like protein KLP68D n=1 Tax=Aedes aegypti RepID=Q17N32_AEDAE
gctctgtaggagtaccttaatgtaatgactgtttcctcataattcatactagctggtccaatatttgcgatcatgatcgttttactattaccacccagagaatcttgtagaagtcttgttaactttgaatccctatatggtatatgagaagagttttcagctaaggcatatatcacatttcctagtgaagatagagctttattaatctttgtagcttctttgagtctatctcctgtagcaccagttttcgactgtctttcgcttccagccaaatcaaccaaattcagtttgccaaccttcatagttttcgaatgttcttcggccatctcgatgattatttggaagatggcgtgcgatctagagctgtgctcgttcatgttagtagttccagtagtccggttctgattacctattttcatggccttcaacatatctttcacgctttgacaggtttgggaatgaagatttgttactataacaccttggcctgatatttcacgaagatcgtgaggtttgttgtttttgatttttagcagatctcgtatttcctccatataaatttccaaatacctcacactaactaaaaattcaacaccagtttttctatctatgtgagaccaaatttgctcaaacgccctcggaatgatacccttgtcatctccttcagcgccttccatcgtgtaggtctttccagttcctgtctgtccgtatgcgaacacacacccattgtagccatcaaggactgatgttactaaaggcctcactgtttcatcg

SEQ ID NO: 9927 - DNA, 747 bp, Diabrotica virgifera
ccccgaattccaccctactagatggattgtaataaaattttgggaatagcctctacttatctcctaattcaaagtctaccctatgccgatgtgcgcttttatcttgggggtcgttcccaccccttctcgggggcggaaaattgttggtcaaaataaccacggaagtggctgaaggacctaattctaagcaaaaactgcttcatattttttttgaaaacttaacactttttgaattattcgtggttgaaaatttgccatttccattgaaaaatgttacatttcaggacagttctttgcgaataactcaaaaattatgcatcccacgaaaaaaactatatcaaacacttctatagctcatagaaaaacaaaacagattcgtttcttcataagtcttccagttataatacaaaagagatatggcaggtgaaaatagatttttctggcgcatgctgaaatcagtgtgttcaacttataataacagagaaatggtcgaccttcagggtacaatgctacaaatgccttttgtggtaatcgaaaaaggccttcaaaatgagcactgataaatgtcgaccacgttcaaaccaagcgagacatcgtgcaaaaaaaatatgagtaatgtattttcaaaaagaaatgagaagtatatttaacccctcatccaccagaacccaaatacatcgctttccttccacaacacctcctattatagtgttatttatatgctaaaaaagttggacgggtccaaaa

SEQ ID NO: 9928 - DNA, 775 bp, Diabrotica virgifera
  SmartBlast Evalue=3E-23; Info=Transposase n=1 Tax=Salmo salar RepID=A8C5I4_SALSA
aatgactttgccacctattagtaccattatcttttgtattaatttgtaatacgacgatggcggctttggtgactgatatcgaaatgtcatatcgacatcccagaagcactgtatttaaataatgattaaaagccaccaaatgatcttggttttaatgaacaatgatagcaataacaaaacataaaaacctacttaaatgtaacttaacctaagtacgcaaataacaaagaaaaactactaaaaaataacttggtactttgtattgcctcccctggcctctataactgcctgtacacgtcgccgtcggctcgtgctgtctatgaggttgcgaatgttatcttggtggatgttttgtcatttcttttctagagccaagcgaagttcgctaattgaggctggtgcgacttcgcgacctcaaatatttctaccaagcatgtcacaaacgtgctccattgggttcagatctggcgaacacgctggccagttcattttattaataccaacttcgtctaaatattacgtgacacacactgcagagtggggtcgcgcattatcttgcattaatagaaaattatcgccgatatattgagaaaagggtactacgtgattcgctaaaatttcctcaatataccggtgtgtagccttacgcttgtttgttccagttcgtataaaacgtttcactaccctttggatggtagagcgatgagtgtgtagtactctagccaaatatttataatttcgcccatcttcaaccagagcaacggctttcgcacga

SEQ ID NO: 9929 - DNA, 773 bp, Diabrotica virgifera
ttacttaaactggaaagtttgaaggacatatcaaactacatatatattgatattattaaggcatatatcgcacttaaggataagggcaaacaaatatcattttgttgggtaaaagcccactctaaccttaaacacaatgaaatagtagatactttagctaagaaggctaccgaacaagaaattgaaagtgaatataaattaacattaaatgatatttacgctaatattactagcaataaaaccaaaacctggcaacaatggtataacaactcaacaaaagggctattctataaaaacatacaattaaatattccagctaaatcctggtttaatcattatcacggcgaaaaaatcgttgtttcatatatatgcagacttagatttggacactctctaattccagaacacaaatttaaaataggtcttagtgatactaatctttgatgaatgtggtgagttggatgtgcagaacacatgatactaaactgtagactaaagataatagaaataaatcaattcatgaatcaagtatatagagaaaccaatattacaagaccttttaatctaataacaatattatctagtttagacgaacgtgtatatgagatcctaattaacacatacttagtataaaattaaaattgtaaactataatacctgtgtttatcccatttgtctacctacctttccgtggtctagtcttgtgtgtgtgcattgctctgaaagacccctgagcagaagtactccttgttgacattccttataatacaatt

SEQ ID NO: 9930 - DNA, 770 bp, Diabrotica virgifera
  SmartBlast Evalue=3E-62; Info=RING finger protein 13 n=1 Tax= Camponotus floridanus RepID=E1ZWF2_9HYME
aaatcgctcagatggttgcgtacccatcgtcccaccacctaacatagataacgacgtagggaaatggatagcgttggtgagaaggtcctcaacggagtacaagaattgtaccttcgagatgaaggtccgcaacgcgcaggcggcaggatacaacgctgtcattgtctacaatgtcggctccgatgagcttatcccgatggggccaacaactcgacaggcatttacatacctgctgtgttcgtcgctgagaaaagcgggttggctctgttagataaatatgccaacaacccagaatacttcattgttgttaatggagattcgccgtttgatttaccgactcatttactagtaccgttttctatcgctattggtatatgctttatagttatggttgtttttatgatatggaaatgcataaaagatagaagacgactaaggagaaatagactgccgaaatctgtattaagacaaatcccgctacacaagttccagaagggtgatcccttcgatacatgtgccatttgtttggacgattacgtggaaggagaaaattaagagttcttccttgcaaccatgcataccatatgaactgtatagatccatggttgacgaaaaatcgacgagtatgtcccatatgtaaacgttgtatttggggcagcaaagaaagacgttcggaatcggacagtgacgatacagatactgacgatacttccccgttaatcaatcctcgaaacaatactacgcagggaggcacttttacaagaacaatc

SEQ ID NO: 9931 - DNA, 757 bp, Diabrotica virgifera
gttgtgcggaggacggggaggttagcgtttgcaatcggaagtcacatttgtattcatgggatgcgcatgattgcacctcaattgtggcggtgctttttactgtttggccattggctccgatgatggcgtttgtgttgagggcgctcagctaggaaagtggattgtttacacactttgacatgctacatttttatttcctttattcatttaagtgtgtacaaacgtatcagtctttcaactacaattgtctataaaacactaatacgaatagtgctaacacatggagcagatacgtggccacctacatagagcgaccaagaactgcttaaacgtttcgagcgaaaaaattgtaagaagaagatatggagaaataaaagagcaaagtttgtggcgcaggcgttgcaacttttgagttgcataggagcttctgggaacctgacgttttaaattcattcaggtagcacgcgttagatggataggcgtgttatcaggcgaacgtgcaacaatcagaaaatttttggcagaagacgaccgatacgacaacgagccaaaggaaaacagagaattagttatcaagaggacttagaggtcgatttacaatctattagagttagagcatagaaaagagttgctagagacaggggtgaatagaggattgctcttaagaaggctttggcgtataacaagctgtgattcactaatgatggtaatcaaatgattcgattcaattaatttgtatcaatttctgttctgaaca

SEQ ID NO: 9932 - DNA, 776 bp, Diabrotica virgifera
agagaatttcggattatacaaaatatatatattccggctcaactctgctctaggcggttgaccaacagaaggtttcaaataattattttataaaaatccaatacttcatcgagctaatgaattctgaactcattcaaaaacaagttaaaattccactccacccaaatagttgccacagttgcccatcacgtataaaaattgaaagccacacctgtggcgagaactagactaacctctaacttgactaatgtgtcaaaactgctcccttttagagttgcatgtccgcacagcccaagaattataaccgcaccgactacaagcacaagccgatagattctagctatctacgcatacgtggtacgaatggactattatggatatgaagtttatggatatgtacttaaaacatataatatcacctaaagtacatcaagactctcgaagcacctggtgcacagggttactgctaaggcacatcatctagagtttcgagggttttcggtacccaattgatgcaaacagattacttgggttttttaggattgctgaatatgaatacgtcatcagaactgacctcatgagcacctggtgttcagggtcactgctgaggtacatcatcttctggagatttgagagttttcgtgactaaattgctagaaacagattactcggtggagtcttggggttgttgaacacgaatatgacatcagaacccaccctcggggcacctagtgctcaggatcatcggaaatatcaggatctgatatacacgtcat

SEQ ID NO: 9933 - DNA, 773 bp, Diabrotica virgifera
  SmartBlast Evalue=7E-45; Info=Sarcosine dehydrogenase n=2 Tax= Aedes aegypti RepID=Q16F15_AEDAE
gtcaattaaccaaccgctttatgtttattaaacgaagaaatcaatctgtgttaataataacgatacgcttaaaactagtgcaagtaatacgttcaaataggtaaaatgttaagactacataaatttcacagtattgtttcgaatcaaacgaaaacgcgaataattacatacgccaataaaaagtattttagtaatgaaggggatttgcccaaacaggcggatgttgttgttgtgggtggcggtgtcataggatccagtatactgtaccatctatcaaaactaggagtaaacgcgattcttcttgagaaaaacaaattaactagtggaacaacatggcacagtggtgctttggtgtggagtttgagagcgacagacgtggacaatataatgttaaagaaaaccagagatcttctggcgggcttagaggcagaaactggcgttaaccctggatggacccagtcgggaggaatttttattgccaggactcctgagaggttagaagaatacaaacgttttcatacacttggacatttattaaatatagaaagtcatataatatctcccacggaagccaaaaaattggcatcaattctggaccccaaagcattctacggagccctctggtctcccagtgatggacattgtgatccttcaatgtattgtgcggcattaatcaaaggcgcaaaaaatcggggagctcaggtatatgaagacacgggagtcacaaaagtattaaccgcgccaacgccaaacaatgaaaaaaagtaaccggg

SEQ ID NO: 9934 - DNA, 775 bp, Diabrotica virgifera
aaagagaatgataatttgtttgatatttccgaatattaagttgaataatatgatcaaaccggtaatataaaatacttttcgataactctcttcttgaatttttaattatttgtaaaccacttgatagttacattaatatctagaagatctttgtgaaacctgacattaaagactataccgctacaatcatatatataatattatacagacatgtcaatatgatattcgatttttcataaaaaatatttacacacattctatatagctaattgtcaaataattcatctcgtgtacagatagtcaaatataggaacaagtctgaatctctgaaattagaaatgcccatagagctagtgagaaaaattgctcgattttaatcaagcacttcatcatgcctatcccgtagggatctatggaggagtatcaccgagccgtaagccctcgtctcttgcctttatatattgatcagacacagcgagttctaatctaagtagcaaagtcacctagatctttaaactactacgttagcttttgtttttctggccaggaccagggccaattggattgaaaaacttcgaagggagaaagaagactgaataagagtttttaaagtcatcaaaagaaagaatgaaaatattcatatacaaattatgatggtcacctctgaccatgggcgcccatgatgagcaggagggggccgtggccctactagcttttcgggtgctgtaaactatatatggttatccaaagtatacaatattagtccatgtgcaac

SEQ ID NO: 9935 - DNA, 774 bp, Diabrotica virgifera
attaaataaagtattagaagatttttttactaagcaacaacatttttgtttatttagtattattttgtattttgacaacgacacccgacttgggcgtcggaaagttaataaattaattttttggtaaattgtggcttatttcccatttaaaatagttcaataacaggagtacctaaaagtgataaatttttcaacgttgacatcaaattcagcaattttaatctatcttagctatcgaaacctcacctttagcctgttgacctaacctcaacaatgttttcgaaaaaaagtaatttttttatttaagctttttgatatataaatatataaataataagttaaacaagactagaacataccaggattgtctttctagaaatatgtttaaataaattcacaattttaagcaattgcaaaccgtcctttggtaatcttatacatcagcactacttgtttctcaatactagcaatgtagatacttcttttaatcctttttgatacatataaaaggccatacacaatattttataataagacgtcttgctgactagcctttgtagtagtagctagcaattttgtgtggacgtggcttctttttgaataaatgttcagtattgcatgctgaggtaacccgatgggttctagatgcttccttttctcaaattaaggagatatgtgctattttttactgcttgatttttgttactttttcactgatgtttattttttatttgtataaaattgttgacttaatataatatatattttgttatg

SEQ ID NO: 9936 - DNA, 769 bp, Diabrotica virgifera
atgtcatcaaaacaacattacaaccttcattcgattatataaatattgttagccaagatcacgattcactaataattgcagagtcaattataaacattttcatggtcgatgctgaataggcatttctaaatatataaacagttaaactataacaagggaattctttattattatattgagacattcgtcattctattttggtgatcagacgtaatatttccacattaaagatagtgtctctttctacacgagatgttctttgggtgaggtgctaccagcttatactaatgcgagtgtaaataaaccaactcaacaagtaagcgtatcaattattccacccctcggataagggataaccaccctcaccgggagaagatagccttagtgcccagggctgccatatggcgatccagaaccagggaagaactcaggactggtgagcaggacaggtatgaagaaacacgtcaatgttcaggcacctagaccaccttagacaacagtgtggtatatgtaaaatggatggagacatcaggccgacgcggagctgaaaatggaatagtatggagatggaacatcgtgggacaatggaaaatggacaatgctatggaacgtgcagcgaggacttgtgatacgaacaaagacgcgtaaaagtggtaagtccatattagctatttttatggtatttcctgattaataaagtataaagtataaacattatgtgctaccttaattacattaatatatgtttcaagtttacctatttttactt

SEQ ID NO: 9937 - DNA, 768 bp, Diabrotica virgifera
aacaaggaagaaaatgagacctgttaatagaaaaatggaaggcaactagataagaacgctggaaatagagtgatatgaaggtacgacaaggaaagaagaagggcgccaactcgaacagacagctcggctttctggaccgggaatttgaaaagttcgaaatttggaggaacgaatgacaggaaataaatgacagttgatacaatgacctgaaatacaaaatactcaatacttaccttgtcttgctatatttatatactgataatagagactgaaataaaaatcaaccgtactaatgactaatatatttctaataaataattccaaacagtgtagatataaaaataagtttttggaagtgcaataaactcagaattttgattgtagttcgcactttttgcttgtatattatacagggtgttgcggttactttaatacataactcacctaccaaactagttaggacggcgaatggaaaaaacattgtagtgactgtcagtaaagttttgaatagatggtttacttatatactggtgatttaagattgttacaaaaatttacacttcttaattgaaccactcagtataccaagtcctcttaacgcgttgacttttaggtgatatatttgtatataagctacctttttagtctgatataacaagaaatgaataacactcgttatattttccattttttatcttttattactatgtgtaatttgtatgtattgtatgtatgtacatgtatgttacaaaacatggccagtcagat

SEQ ID NO: 9938 - DNA, 767 bp, Diabrotica virgifera
taatacaaacaattgaacaaggtctgttaagaacggcagatattagttttgatataactaaaaaacaagtacctgctgtaaagaagattcataaaagatttgttgacatgaattttgtcaactacaaaaaagtggttagaagaaaaattgttaagtaatctagctcccaatagtgtcatcgtaatggacaatgcaccttaacactcaagaggataaagcactaacatctgcacttcagagagtgaaaagattggctaaaagttagaaatattcttcttcctgcctacatgcttagaccagagatatggtctgtataattggctgttgattccattattaaaaataacagaatgacgtattaatgctcccaccatatcatccagatttaaacccgatagagcttgtttgggcatcgctaatacactaatgttggaatacaaaatgtagacttcacttttgtttctgttaaaaaaatgccagatgagttctttgaaatgttttccgtagaagagtcgaaaccaattattgtagacaaactgaaaattattgaggatgatttcatttcaaaggagccattatttgatgctgccatagaatcttatattacagtcgaacccgcttattagagtaccggttataggaatatcccggtttaaggaatagaaatttgaggtcccaaaacgtttccatttactccttaataaatttatccgcttataggaatacgttttaatgaattaataccgcttaatcgaatattattcaag

SEQ ID NO: 9939 - DNA, 774 bp, Diabrotica virgifera
  SmartBlast Evalue=1E-78; Info=Xm278-prov protein n=3 Tax= Xenopus RepID=Q7ZY10_XENLA
aaacaagagttatgtactcgtatatacatttttgaataattagtgataagcgccttttaaataaaaaccatttggaaatagtcaaaggtttaagtataacgatggcttcagttccaaaagggataaacatcgatgaaccaagatatgatcagaagacctacgtaggaagagctaaacattttttcattacgaccaatccattaaacatatttgcctcgtcgaaaagcctagatgaagctaaatcaatagtggacagatatagacgaaacgaacgtatcgaaggcctaaccgaagacaaactatggagagccaaaaatttatacgattcggcatttcatcccgacaccggcgaaaagatgttcgtcctaggaagaatgtcggctcaagttccttccaatatgcttatcacaggaggaatgataacgttctacaggagtataccagcggttgtgttctggcagtggctgaatcagtcatttaacgctctagtcaattatagcaacagaagtggagatatagtacaaacagatcagcaaatattaacttcttatttatgtgctaccacgggagctgtaggtacagcattaggattaaatagtttaacaaagtccatgcccagtataattggccgaatggtaccattcgtcgctgtagcagctgccaactgtataaacattccaatgatgagggcacaagaattgcggcaaggaaccccagtatacgatgaaaataacaacaaattaggatactcaaaaagggcagctcaaagtggaa

SEQ ID NO: 9940 - DNA, 774 bp, Diabrotica virgifera
  SmartBlast Evalue=1E-46; Info=Uncharacterized conserved protein n=1 Tax=Glossina morsitans morsitans RepID=D3TNK1_GLOMM
tgatgttgacaaatattgacaaaatatagcgataaacattgaagacaaagagttattaacagttattaaatattaccttctatattgtttcttattaatataaattttgcaaattgaaatgggttgtgatggtggtaccattccaagacgagacgaacttgttaaagttaaaaagaagcccgaagctaaagataagaatgcagaactagcattcaagtggagatgttgttttataactcaagaagttctccaacaaccaattgttgtttgccacctgggaaaattgtacagtaaaatgtctctaattgaagccttgctcgatagaagttcattgccagagtcgatcaagtacattaagagtttaaaagatgttaaggatcttaagttgaccccaaatccagaattcttgaaagagaaggcaagaaggaaggttctttggacaatagagctgcaccttacatttgcccagtattgggactagaaatgagtggaaagtttaggtttgtagcagtttggtcctgtggatgtgtattttctgaaagagctttaaaagaaattggtacaaaaaattgccacaaatgtactaaaccatttgaagatgatgatattgttataataaatgggaatgaggaagatttagagctaatgcgtcaaagaatggaaaaaagacgtcagaatacgaagaaaaataaagaaaagaaaataaaacaagaacccgaagaagttgcaggaaattcttctgaaaccataactactgaaacaaaaagcattaaa

SEQ ID NO: 9941 - DNA, 768 bp, Diabrotica virgifera
  SmartBlast Evalue=7E-93; Info="Geranylgeranyl pyrophosphate synthase, putative n=1 Tax=Pediculus humanus corporis RepID= E0VT01_PEDHC"
gatataaatgtagagtatttattttatatatttaaatttaatataagtattaattccgtctaaaacatgtcagaatcttcggctaaacccactttaccgtacagcaaatctaatgctaaagaacaagataagaaattgttggaaccctttgagtatatacttcaagtccctggcaaaaatattagatctaaacttgccagtgcttttaattattggttatgcattcctgatgaaatcttaacacaaatcagtgacattgttcaaatcctacacaattctagtctcttgatggatgacattcaagataattctatattacggagaggtattcctgtagcccattcaatctatggagtagctagtacaattaacagtgcgaattatacatcttttattgcgttagagcgagtaaccgacttaaaccatcctgaagcaatatctattgctatagagcaaattttggagctttatagaggccaaggaatggaaatttattggagagataattttacatgtccaacagaagatgaatataggcaaatggttattagaaagactggtggactgtttatgttagctataagactgatgcagctgttcagtaaaaacaaacaagatttcacaaaaattactggtattttaggattgctatttcaaattagagatgattatattaatttgatatctaaggagtttatgctgcataaaagttactgtgaagatttaactgaaggtaaattcagctttccaataatacacgctattcgt

SEQ ID NO: 9942 - DNA, 772 bp, Diabrotica virgifera
  SmartBlast Evalue=1E-124; Info=CDKAL1-like protein n=1 Tax= Camponotus floridanus RepID=E1ZVZ2_9HYME
ttggtacttgctggatgtgtacctcaaggagctccaaaatcatcctttattcaaggtctaagcataataggtgtacaacaaattgatagggttgttgaagtagttgaagaaactcttaagggcaacacagtaaaattgcttggtaccaaaaaagaaaacggcaagaagatgggaggtgcttctttgcttttaccaaaagttaggaggaatccactcatagaaattatagctataaataccggatgcctcaaccaatgtacctattgcaaaactaaacatgccagaggagatttaggtagttacccacccgaagaaatcgttgctagagcaaaacaagcttttgaagaaggtgtagttgagatctggttgacctcagaagatacaggtacctatggaagagatataggtacgtcactaccggaactcttatggaaattggtagaagtgataccagatggatgtcggcttcggttgggtatgaccaatcctccttatattctcgaacatttagaagaaatagcaaaaataatggctgattctagagtgtatgcttttcttcatgtaccagtacaatccgctagtgatgctgttttaggggatatgaagagagaatactgcagaaaggattttgaacatgtagtagatttcttaagggagagagtacctggtatgacgatagcgacggatataatttgtggattccctacagaaaccgaaaaggactttgaagaaaccttggacttatgccaaaaatatcaattccccagccttt

SEQ ID NO: 9943 - DNA, 771 bp, Diabrotica virgifera
ccctgatccagtgctcccacatatcaaagcctgtccgaccagacaccgttaagccactaacaaaccttcagcctgccattaatcaacttttccttcttatgggggatccagacctactagtaaattagacaaatagatggacgaaaaggcgggaaaaaataatacaaaatctattattttatatcaagaccgaaatatccgataggtactgcaaaagtaaatgtatataagaatattaatagcaagttgggattcgtgattgagagatgttcaatcgattttctaggttgtttgaatcaaaaagattatgtaatgttctataaaaaataaattttttaaaaggtcagtagactcagatgggcagggcagtgtttatgggaaagtgtttcagcagtggcggctggtcagaggaggcaagggaggcttagcatccccataaagttttttcacatgctacactgttttgtttactttgctattttgcttcgcgttagagatatcggaaaaagtcacttgaacaagttgttcccaaataatgttctaaccccacatacaaaatttcatcacaaaattcgcacttcttagctattcactacttgcagtcaggatcctaaaactggaccggaggctgccggccggaaagtctcacttgctaatgctccgcgcatcccagcagcggttaaggagacccggtctccttagcgctgcattatcgcctaacgcacacgccgcccggagatttagcaagggcggctaatcggccagcagcct

SEQ ID NO: 9944 - DNA, 770 bp, Diabrotica virgifera
  SmartBlast Evalue=8E-62; Info=Endonuclease-reverse transcriptase n=1 Tax=Bombyx mori RepID=D7F157_BOMMO
tctcttcagctcatgagtctggttatccctgccaatcgtaatttcatgtcccaggtatttatatctatctacgagttctatttccttcccaccaatactgatgttctggttgggtaccaaatttgtcattatttttgtttttcgagatgtttatatttaaacctacattttctgtagctacaacgagttcttgtaccatctctcttgccatacctagatcctcagctactatgactatatcatcggcgaaacgtaagttgtttagatattctccatctatttttattccctttgtcatccaatccaaactcttgaaagcatgttctaagaccgtattaaaaagtttaggtgacattgggtctccttgtctaaccccccgttctatttttatgcgattactgttagtatgtaatttgacagtggttgttgcctgtaagtatattttgtgtaataattttgtatacctataatctagcctgcattctttaagcgcctgtaatattttgctaagttcaactgtgtcaaaggctttatgaaaatcgataaaaactagaactaggggtttattgtattccactactttctctatcagggtttttatactttgtagatggtcatttgttccgtaattttttcggaatcctgcctgttctcttggttgataagtctctaactttctttccattctcttaactattattcgcgtaaataacttatataaatggctgaggaggctaatcggtctgtaattctctaaattggctttgtct

SEQ ID NO: 9945 - DNA, 771 bp, Diabrotica virgifera
catatatcaaggtttgtccgactaggggcccttgagctgttaacaagttttcggcttgctattaatcaactttcttttcatacgcgggatccagacctagtaggttaactcggacctcttgagggaaagtggacgtatattatttattttgccaatcttttgcttgtacctaccactgtgcgtctaggtacctagtactagcaacatttgtattgtctaccatcaactttatatgcacacatgtttatttcttcactgcttaaaactaaataaagtcgttcaagtacttctgtaactaaaaactacacaaaatttacaacaaaatgttcggaaaatactaactaaaaaacccgttaacggtaaaaaaacttaagaaacatgacaatatggttcaaataatataaaacaaacacaatgtttgacagtttgcctcccaaacgtcaaagttttgccctattataatcttgacatatgttaaaagcgccatctattggcaatttgtaaaaacttaggaagtaggtctcgataataaattcaatgacagcgtgagattcatgtatttcacaagttgttaacgccattttggctaggcatcgatttattttcgaatgtttaatatgtcggtgtattacgttttttagagtgctcatgagatgctgtgtattctgatgtcactgtaactgttctgatgtaacaattgaaatgtaagaactttttggaaccaattttaattgtacaaaaaaagtcaacaggaaaatacatattttttat

SEQ ID NO: 9946 - DNA, 758 bp, Diabrotica virgifera
tctgtataaaatgaatataaaagataatcctttttgtgaatgtggtcagtctcgaggatctaaaccacatcttttttgaatgcccgattaatgtgattcctaattttgatatatacacaaaatttttttccatgaacttcaaaacaccgctctctatatacaatattctaagttccttaacggaagaatcagtcaatgtaattatgcgttttcttgcaattaaccaaataagcttataaactgcaatgcgttttctagcaattaacaaaataagcttacaaattgcaaggctcaactgtttatatgtatccgtgttatattatgttgctatttgtcatttaatttatgttttaatttttaatcatacttaacctgacccaattaatctcatttaattataatcatcacacctcatcaaaagcttccttacaagaacatagtcagcgattttggtatggcttagagccagactacgtcaagatcgcttataaatcgtgctggtaatcgccttgcagcgaaaccaaaaacaaaaaaagaagaagaagaagaagaagaagtatgataaggatacgtcaaatggtttgaaagtgcttggtggaaatagttttgaatttttgaatggagcgccctgtgactcagtgattagtcacattttgtttaagtgattttggaccaatcttaatattttgggtctgatctacagcttggacattcgacgtttttaatgaaacttggccctaagggagcccatagtaatg

SEQ ID NO: 9947 - DNA, 773 bp, Diabrotica virgifera
  SmartBlast Evalue=1E-13; Info=Enhancer of yellow 2 transcription factor n=5 Tax=melanogaster subgroup RepID=ENY2_ DROME
gtaatttaactttaacttaacaacaataattttttaattcaacagtcaacgtttcgttagattcctgttgcgattttgtctttacattttaaatttatattttaattttaaaaaaccaaaaaataactgtctagcaacaaaacaaccaattatagcatttacattaattgatcttattttaatctaagatgcctcaagattatgattcaaaagttagtttgcatttggatattaatcatggtctagaaagagtaacggaattagttcagactaggcttattgaaagtggctggagggatcaggtgaagttagcttgtcgtaaggcaattttggaaaatggtgaaaaacacccccctactgtagatgaattaataactcaaattacaccaaaagcaaggtctatggtaccagatgctgtgaaaagggagcttctgcacgaattggaattaattttagttaatgtggacaaagctggatacagtaaaaatttttaaatgatttaaaaaagttgaggactttatttgttcacataaaatatgtttagtgtactctaaaccttttatgcatgaaagaatgtctttcatgttttccacctttaacatgtttatacgatttataaaatatactgtttgaaactatgtgtggaaagctagtttgcattatataatgtctatacctaaatgctggtccaccaaagtgtacttaaaactatttctttagatatatttcataagacattattttaactgaaaattagttaataaacttccttt

SEQ ID NO: 9948 - DNA, 767 bp, Diabrotica virgifera
tatggtgacacacagatattgactaataataattattattgtgctgtgcgttcttattttcggctttcgattctaaaaatagaactctaaaagcacggtatcatttatcattacatatatgtatttaaattgaaatttaatccagagccctgaataagaacaaaaattttacataaaaaaatgcggaggtggcataactgcacgtgtacatttcaacgaatttcttttggcttatcgcaatgctcaaacaaaatgaattgatgactaaatttttacttatgtatacaatataacttatgtatggaccctgacggttaacagaggtgacagttaatagagagacggataatcgaggttccactgtacataaaaaatactaaaactcttgtctaaaagtttggactaaagatatggtagtaggtaatcggggctgaaataccaatataaacaaaaatcatataatagttttactgaaaacttcaaaaatattccaatttgtttggatttcatttgttccaaatgctaaacatgtgtcacgtgaaagcactgttttgtaatcaatcatgtttaataatttagttgaatgaaaatctttgaaggattgtattgtttagataaataccttataatgttttacaaacttccgaacaatatataagcccgaaatgttgatgacacacttgtctattggaataaattctttcaggatccattagattattttttaaatgtggagaaacacagcacggaatgttccaacgcttagt

SEQ ID NO: 9949 - DNA, 770 bp, Diabrotica virgifera
  SmartBlast Evalue=8E-70; Info=2-deoxyglucose-6-phosphate phosphatase n=1 Tax=Aedes aegypti RepID=Q17GH7_AEDAE
ttaacactttaacctaactgtttaaacttggcagcccaaatttttctaggggagccctgtctaatctatcaataacaacatgtgcattttttctaagttctggtgacacattttcatctggtaacataacagcttgcattcctgcactaatagcagctaatacaccattgggggcgtcttcaaacaccaaacatttttctggacttggtttgtcagtaaatctagaagcacaaactaaaaatatgtcaggtgctggctttcctgatttcacttcaggatcactacctccacaaacgatatgattaaataacgagaaaaagtctttgtgctttcccgttttaagattgaaactttcttgtgatgatgatgttgctactgcaattggaatatttttcgaatgaagatgtttcactaatgtgatggcacctggcattaattgacattcaggcatgatgatataatattgttccattgcttgtttgtaatattcctgagctgaaatgggcaaatcataagtttttactattctttctgccatttcttggccgtgcagtcccatcatttgggattttacttcccatgtaaaagtttttccatattgatctaaaattttttgtgtggcttgcgtgtataaaatttcagtatctaaaagaacaccatccatatcaaagatgacatgggttactcgtttaaaagccttactagcactcattatttgtacttttgaattaaattagagtaaaaaacgtaaactacctacataacctaca

SEQ ID NO: 9950 - DNA, 759 bp, Diabrotica virgifera
  SmartBlast Evalue=1E-48; Info=BAG family molecular chaperone regulator 2 n=1 Tax=Harpegnathos saltator RepID=E2B7Q8_9HYME
gccggttattagcgcacttatcactgtatatagttaaaactagtaaagtttagcagtcttcattgtataattattaactaactatgtttaacaattcatttcttctaatgagactacttccaacttttcgaagtagttcagcaggccctgaagtcgtctcttgacctttttctgatcgtctaccgtacagcctagaagagttgattcgaaattcttgtccgtgacgccttgaacaacactagcagaacaggcattcatataactttcacatttagatctggctaattcagggtcagatttcagccccatgacgagtccatcaatcaaacggttaacttggaagagggcttcttcttgtagtttatctctgtgggtatgtactttgacttctacagttaggcatcggttcatgactcgatcagcgtagcgggttacatcgtccctgtcattatgttcaagactatacataagatcagcatttagaacggaatcaagagtgcacaaaagagcatctttatcctcttctatttgactagcatttttcctcaatttctcaacgtggctctccagtagatccagcatttctagaatcctctcctttggaggttttgaacttagtacatgatcttcatctatttttggtaatgtttgcaagactactgaggtgggtaaacctggggtcggatcaacatccatatcgccgtaattagccagttttacttttctaaaacggagtttttgtctaaaagttgtaacttt

SEQ ID NO: 9951 - DNA, 768 bp, Diabrotica virgifera
aacattttaaatactttattttattttttatactcttgcccaacaataactccattttaaatctttgaatcagcacaataattatataatatcagtcgttgcgccaattataagtgatccaatattggcaaatatttactaacaacacatctcttttaatacaaatttcatttttatccctctgtgtatattcatcaagcaaaaggaggtataaggtgtacaaaaactacacaataataatttataaatacatacgtaaaaaagtccattacgcatcggattccacctaaagatctacagtatcttttttatacaatgattacagtgaaaaaagttcttaaaaactaataatcacatggtaaaaaactcgagtaaccgacgaatgaagaacctgattgctattcagactcaccgtcttgtttgatcacgttatagttggatttcttcgtcttcagcatccggaggaaagagcccaaagcgaagatggaccttctgtgtttttggaaaatttcggagtagagtgtctcccgaagaagtttcctgtctaactccctggtggacatcggcgggttgacatttggcatatttttacaatccatcgttataataaacaccctgtattgtatcacagtaaaacgacttttgcaagcatgtagggtggtgttttttgcgaataatttaaggcaagaagctgcaaggcatattctcgatacgtacgtagatttgttacgacactgaaaacaacaaacagtctacagctagtacggc

SEQ ID NO: 9952 - DNA, 770 bp, Diabrotica virgifera
  SmartBlast Evalue=1E-76; Info=Pentatricopeptide repeat domain 3 n=1 Tax=Culex quinquefasciatus RepID=B0XIM2_CULQU
ttgggcttcttcaaatagttccaagctctttcaacttggaagtacttggacataccttggatcatagcagagtatgattcagctgttgggttttctaagctttggaatagttcttctgcgaaacttccatccttccaagtctttctttgtctttccttctgattggaactctgtttaaaccatctctcttcaataaattcttctggcaatgtatcgtcactgttaaaataacacactaactctaagagactttgctgtgtttcaggcgatatcaccactccttgtttcttcaacaactgataaaccaactgtgcatccaagatttggatatcttgaattactttcttcaaatcatcttctgtcactttgctatcttcagtgtatactaattttggtaaaaacgaaggtacaataggatcagcttcaagatgattgaaaagatcagcatgttcttttcttatccagtgagctgccttacgacctgcttcttgagccattgcaaaagttcttttactcacattcgacttaggaattaagtatgggtcgtcatggtacttatagtgagatgcagtggggtccctacttatggtactctctaaagctctaagtatgtctgttggacctctaggtattctatttggaatttctattctttcttccgtgttgctactgctgaaacctcgtacccaagtctttaacgaggaatttaggactggagtccttctaagacatatagctgagaggttcattttgcaagacgttaaataatt

SEQ ID NO: 9953 - DNA, 766 bp, Diabrotica virgifera
gccgcattagacagagacagatttgccagtgtagtcgctaacctccactaaaggagaaagcagcacaagaagaagcttgattttctctccttttctcttccaatagcatttcaagccttttcggtgatgtctttgcacgaatattcattcaaggtatagttatgtaagcacggatgttttccacttcttgtactaattttatattcagtgactattttgtcagtttcgccatttcgcgtggtaattttaactaattaaatattaatatcaaaacaaacttgaaactagtcgctaagcgaccagcacgtccagccgcaggctactgatcaatgacgtattacagatcggttattaactagtggcactgtgtgcggatactcattaaaatacatagatagtaagtaataagcaactggtgggtaactaaagtttacaactggtttattgttattagcttcatgtgcggacggccttttaatttcaaatcttaatttgacctgtatatctgggatatattatgctacagcttctatgaccagaaacggattatattagatattatatatctaagtttgtacgcattaaggcacattgccttgcaatatacattataacaatattttactgaaacaacaaatcactgcaaacgcaatctgtcaaaatttattgtcttccaaacaccatttagctgtctagtttaatactacaacatatcacaaaatcttttcatgtcttactgttgatagaaattttttaccaaactgaa

SEQ ID NO: 9954 - DNA, 766 bp, Diabrotica virgifera
  SmartBlast Evalue=1E-63; Info=Ubiquitin conjugating enzyme E2 n= 1 Tax=Bombyx mori RepID=Q2F5U8_BOMMO
agcagccattttggtgtgtaaggagtgctcaagtaccaaaaatcagtgatctaaataattgttttcggtaggaaaagtatcaaaactgctagttagtgacccatatggcttgtttaaatacgttgaaacaagagataaggacattagaatcggtttttacgaaaaatcatgaacggtttaagatcatctctgccagtgttgacgaattgacatgtaggtttattggaaagaatgctgtagaatacacgatccatgcgaatattacggaaacttatcccgcatcaccacccgtgtggtttgcagattccgaagaaactagtatagcaaatgcggttcaaatattaagcaacacagaaggcttggacaatcatgtcctccatcaggtgataatacttcttagggaactatgccgattgcatggcgttccagaaccacccgacttagaaagactgcatattctaaatccactaacaacaaatcgaataacatctcgtaatagcactggcgacggagactacgcaatggacgatgaaaacttagatagcgacgcagatttggatatcgccgatagtgatggcgaagaagatagtgatgctgacgaggatcttgcaatggagtcgaagacaacagaccgaaagcagacgaaatgggagtggaacacttggccacattggaacgattaagacagaatcaacgtcaggattacttaaggggctcagtgtcgggttccgtccaagccacagatcgtctcatgaaagaattacgc

SEQ ID NO: 9955 - DNA, 771 bp, Diabrotica virgifera
gtccgttttgcagggttcagcctttgtttcctacactataagaaatctccgatatttacagcgtcgtttataaagaacagctgttattttaccttcaaaatacatagagactaaaatttgtaaaaataattcagtagtataccctttaatacaacgctttagccgttttcacatacattctataccagtgtttcccaaccttttttatgccatgccccaccttagccccattaattttaggtaaaattatatttataaaacttctaacagtacgtatatatttatcttgattatagatttactcccaagttattaagtaaaagaaatatttgttgtagaatctgaaggtaaagtaacaacaactattttcgaaccactctgtatataagtaagacagtattgtcaaaatgatctctaagaaatcccctttgggattcactagtaaatgaactgtgtttatatttatttattttacaaaataactaattttataaaatttacaaagatctttaatttaatatacatctaagattatttcaagacgggataaaagattacttcttgctcagtcttcaaacattttgtaaaaagagcaaatcaagcaattttatttctttttgattaatcactcactgtacattttactatacactttattaaccaagccttctaattttcttctattctatgtcgttcgattttattttaaaacaaatattaatatttataaaaatcttatacttaatctaaacttattttattctacgaggc

SEQ ID NO: 9956 - DNA, 772 bp, Diabrotica virgifera
  SmartBlast Evalue=2E-53; Info=Chromodomain-helicase-DNA-binding protein 7 n=1 Tax=Camponotus floridanus RepID=E2ARZ4_9HYME
aagagggaagaagcagatttcttcagagttgtgtcgtcgtatggagtcatatattatagaaagaagaaatcttacgattggatcaaattcaagcaactagcgaaattggaaaaaaaatcagacgaagaacttactgaatattacaaacatttcgttatgatgtgcaagaagcagacaggcatgaacatagaagacagcaactatgacaataccatcgaacatatctcagaagaaaaggcacgaaggacattggaaaggctggagctgttgtcgaggatcagagaagaaattttaacccatcctaaactcgacgaaagattgagggtgtgcattacttcggctgatatgcctgaatggtggattgccggcaaacacgacaaggatctcttgttgggggtcgccaaacatggtttaggaagaaccgactactaccttctgaacgatcctgatctctcttttcatgaagttttacgcaaaaaggtccgatctgacaatactgacaataaggaagccataaaattagaaagtcacgaagacattctcaaatttgacaaagacgaaatactcgtaaaactagaaaagggggaaggaactcttaaaatagaaaaggtcgtacctaaaaaagaaccggcggaaaagaaacccgaagaagacagtaaagtgaatttgactatcgttaagggtgaaaaatgcgagaaagaagcagtgaaagaacaagttaacgaggaggaaagtaaagaagtgaaaccagaggtagaggaagagcagaaag

SEQ ID NO: 9957 - DNA, 771 bp, Diabrotica virgifera
agtttgcccaaacgtaggatacactagtcataccaggaagagacttcatattgacctttgactataaaatatacactatatgaaaaaatacctgatgagagattctattaaaaatatatattttttttttctgaaaactattagcatgggcttaacttttttttatttatatttagaattatcatttattttttcttatgctatataagatatttttactatactttttaagtaaacaaaactaggaatgtaggaataaatttaattttctctacggtagcagttagataaaaatttcaaagagaagagtataaaaggcaaacattcattctaatatttagttcatttcaggagattggtgatccacgataaacaaaatatagaattagagctgtgttaaaaacgtaatgtatttccaatgttctaaggattactataaaaatgtgaagtggaagtaatagcctaagtaatcagttctttctcatatttgacaattttctttgactgttgagtggattaaagatatactttaatattaatgtgaaagaactgcattcatttttgaacaaagtgtttttaaagtagtgatgtgtagtttataaccataaacaaatgtataaccacatcttaaaatggccatttgtgattttggtgtttagttgacagtgttaatttatcaatttcaattattccactatggcatgattgtattttacaagtaaaataatgtgattcaatgtaattcatactgtgttgtgaaatagatagttc

SEQ ID NO: 9958 - DNA, 766 bp, Diabrotica virgifera
  misc_feature (738)..(738): n is a, c, g, or t
  SmartBlast Evalue=1E-131; Info="Cathepsin L-like proteinase"" n= 1 Tax=Diabrotica virgifera virgifera RepID=Q70EX2_DIAVI"
tttcagaagaaaaatcagaatgaagctgttcatccttgccgctgcccttattgtggccacaagtgccaatctaggtgccttcgaaaaatggaccagttttaaggcaacccataacaaatcttacaacgttattgaagacaaacttcgttttgctgttttccaagacaaccttaaaaaaatcgaggaacacaatgctaaatacgaaagtggagaagaaacctactacttggctgtcaacaaattcgccgattggtccagcgctgaattccaagctatgttggcccgtcagatggctaacaagcccaaacaatccttcattgcaaaacacgtagccgatcccaatgtccaagctgtagaagaagttgattggagagaaagtgccgttttggaagtcaaagatcaaggacagtgtggatcatgctgggctttcagtaccaccggatccctcgaaggtcaactcgccatccacaaaaatcaacgtgttcctctcagtgaacaagaattggtagactgtgacacatcaagaaatgctggttgtgacggaggtttgatgacagatgcctttaactatgttaaacgtcatggtctctcttccgaatctcaatatgcatacaccggcagagatgatcgctgcaagaatgttgagaacaaaccactctcttccatcagtggctacgtagaacttgaaacaactgaagatgcactcgcgtccgctcttgctagcgtagtccagtttcnatcgctggtgatgctgatacatggcaat

SEQ ID NO: 9959 - DNA, 771 bp, Diabrotica virgifera
  SmartBlast Evalue=1E-106; Info=PHD finger protein 14 n=1 Tax= Camponotus floridanus RepID=E2ARM4_9HYME
ctcaggagggatcttcaaagaaactgatgttgggaaatgggtacacctggtatgtgccctatatgtaccaggagtagccttcggagaggtggataaattaaccagcgtcactttgtttgagatgccttataataagtggggtacaaagacttgttcgttgtgtgaagatgatcgttttgccagaactggtgtttgcatcggatgtgatgcgggaatgtgtaggacttactttcatgtcacatgtgctcagaaagaggggttcctatcagaagctcattcggaagaagtcgaccaagctgatcccttctatgcccattgtaagttacattcagacaaaaccttagtaaaaaaggaggaaaagaaattacatggcgttgcagctaaggacacaatataggaagtatcagtttgaacaggaaggccataaagatagtcccgaacaaataaggataaagagaaaactagagaaacagactgtgcattatttaggccataaaggactaaagccaccaccatgggtgccgacccagaagatgccccgcctacttaccaccagtgcctcggcatgtaggaaacttttgaggaaggctgacttgatgggtattaacacagtcgtattggaaatgcaagaatcacaaacggtagcattagctgatattaggaaaaaatggcacattccacctgcgttcacagtagaattcatagcatactttttagatagaaacgataggctaaaagacatgaaagcgagtgtggacaaatatgcggaag

SEQ ID NO: 9960 - DNA, 760 bp, Diabrotica virgifera
atccgctcggcgagcgcggagcgcaaggcccgacaacgagccaaacggtcgccgtcgcccccatcataccaacaagggcacgtcatcgacagcaacataggccatagcatggatcggttggatagacaagcaccggtccaacggtactaccttggagaagacccttttggagggagcatctacggacgggagaacaagtacgagggtgcgcggcccgcgcgaaattcgagacggccgcgtgaggtggtgccagaagaaaggaggtcccagagcaccttgggtagatttagtaaatccacatcccgcttagtgaacggtcagcatcacaccgacgaaagaaattctcaaacactcccgcgccatctgccgaaacaagaggcccctcgagaccgcttacgaacagatcgaacagtactattaacggttcgatcatcaacacggtgtcatctcccaggaagctggatggtcctgtcaaaccccagcgcacgttcaaatcgaatctgtccagaagcaagagcttaaacgttcacggaggcatgtacgcgtcaaatccggtactcaaccaaccagtggggctcaaaagtcctggattaatttcaagtcttaaccgaagccacaaagatatcagtgaagaatcttacactagccgttttgcccgaaacggtataagtgaccatagtgaaaataaaaaagtgtttctatcctcccttaaagacagggctccagagctatttaaaaccctagaagaaaacgagagcta

SEQ ID NO: 9961 - DNA, 769 bp, Diabrotica virgifera
aagtggtactggcgacaccagtaccatagatcccggtttaatccccagatccattatctataccagcaatttcttaaacctgcatcacactcttattacaaaaagtttttaaatgttccaaatatttttgcaacataccaacggtatatattataagatatgagaacattttttgagatcattttattgcttttcaatcaagatctgtatatttatgtttaaaataaaagtgactactttctgattgtataaactaaatgcaatatttttaataaaaactttaaaatatataataaaataatcttatactaattttgttcataatcagttacatatgttacttttcttaacttaatattttgtttcttataaactgtcggtgatacggcgatgttacaattgtgatgctgtttgctagaaaatatattgactcgatttcttccacagataaaagaataatctcagatattatatgcccaacactgtaagggatgtccacaaacgctctggctacaaaaaaatgaattttgtgtggaatcataaattagcttatatttgtccactgctgagaataggcctcccgtaaaattttccacctatctctgccttgagcttcttttgcgtggaatggatatagaataatagcctgtggagctcccacttttatttatttaagatcaaaatatgcatgacaggactttataggttaacttatctgtaggtttactgacattaattcacaattttctgattttttgtagaaatattc

SEQ ID NO: 9962 - DNA, 772 bp, Diabrotica virgifera
attaacagacgtgcaaacgggaaatattattggtgttgtggagcaagaaatgtctcagagatccatagctgtgtggtgggcgtgacacaggctgttatgtcaaaaacctgtgcaagatatcaggaattaagaacgcttaagaatagactaagacaaagttgccaaaaagtaacaacggctcaccacaaccttttcatttttttttcaagtacgatacagcagaagacagttaggggttcctgacttatctaagcaacacaagatcggctaaattggtattaaaggcaggaacattaatattttcagacgaatccaggatttgtgtaaagtcagatgaccgacaaattcgtcaacttacattgaaggcgaggaaaacaagcaagaacggaaattgacagatctttcacatattaaaggcgggaatgtcatgttctgtggagtcattattatggtgttgctttggttccagaacctctagttaggatatgtaaaggtgcaatgagatatccacacaccagcaggttacccacagacttccttgaaagccctcgaagccttgaaatagaagatattaaacgatatcactggagtggttctgcttacgcacccgaccttaaccctatggagcattggtgggatatgcttaaaagaaaaattagaagtcgctgggataacccgcaaaacaccgcatagctagtacaagttactcttggagaatttaacaacctgccataacaaaatgttgataatttgattaaaaacatgtccattc

SEQ ID NO: 9963 - DNA, 770 bp, Diabrotica virgifera
  SmartBlast Evalue=9E-55; Info=Low molecular weight protein- tyrosine-phosphatase n=1 Tax=Aedes aegypti RepID=Q17G80_AEDAE
gtggcatctatgagatatcccctacatattttgcatgttatgtggctattcaaggttcttaatttgattttcctttccattatcatactatatacataattctataaaaaataactctaaccctaatcgatacctgaaaaactcttaaaggcagtaaaaagattatgttataaaaatgtataaatgtcctatttcaactggtatttatttcacaacactgaatttgtaaatttaggagttttgttccaaaaatgctccacaagctcttaggcactgctgataacatttctcaaatccttcagaaccatcatcataatatggatccctgataattctttcgccttgtgggtcgaactctccaagaagcaaacgtttggccttacttccctttggagctcgtgattctagatctgacatattgtcttcatccataccgaagatgtagtcaaactcattgaagtcatttttctggatctgtcttgccctgccattgtactgcactccatggttctttaaagtctgtctagctcttgaatcaggttgttttccaatatgccaagaacctatagccgcactatcaacaatccaatctttagcaacacctttttcattaactagatgttgaaatacagcctctgcaatgggagacctacaaatgttacctaaacatatgaatagaactttttgaaccatttggatttgatataactttgtataaaaatgtttaaaattaataaggtctgcataaagttgatggagtaaatacaccg

SEQ ID NO: 9964 - DNA, 769 bp, Diabrotica virgifera
tctaagttattatgagtttttgaagcgtgaaattttggtaatctcatttttatacaaaactgaacattattatgtaataaaaaaatgtgcaatttccctattggtatgactggagttgcctgaacattaatgataatagttaacatagccagcaacagaagcaaaaaagaagatgaaactaaattacataggctgaagagaatatcatgagtttcataaattttaaccttttcgttgacaaattaaatttctttaagctaaaaatctgaaaatgcacaatttggtttctaccagatgtcctcatttgaggatatcatgagccattggagtaaaaaatattaaatatattttttaaatgctaacaaaaaacaaaaactaaagcattttattcaataagtaatgtatggtatcttacaaaacaattttttctttacttatacagagatgaacattgattgcatttgtcgtatgtcaatatagaaatgtcatatgaaatatgggatgcgtgatcatggtggggatacacgaaactatgccagcgcccgtagcggcgaaaaatgacaactttggcgaataatgattaaataatatttttttataatagatatttcgttcgcttaccttattattgccgttttgatttttattatttatttttatattttcatactgacttttatccttccctgatccggtggtatattcctatcgtcatttatttccattttgtgttacacacacatcacaaaagtaatagttcaataggccc

SEQ ID NO: 9965 - DNA, 771 bp, Diabrotica virgifera
  SmartBlast Evalue=3E-39; Info=Endonuclease-reverse transcriptase n=1 Tax=Bombyx mori RepID=D7F170_BOMMO
ttagatctttaggttctgctacttgattattatttgtgaccttcatatacctacttagttttattagtgttaacttgtagccccatccttttgctgctgcttccaatgtcgttaacgattgaaccaggtccgcctctttctacttgctatgatatcaatgtcatctgcatacgctagtatttgtacactcctattaataatggtccctcttgttgttattccagattctgtaatagctttctctagggcaatgttgaatagaaggcacgatagactatcaccctgtcgaagtcccgtttgtgtctggaaagttcttgatattccattctgcattctaaccttacactcgactgttgagagggttgctttctccaacatcactaagtgtattgggatattaaattcttccatggctttatataatgcgtttctgtctacactgtcataggcacatctaaaatccacaaacaaatggtgagtatcaattccctactcatatgtttttcaaagcttgttttagaaggaatatttgatggatggatggataaaagacttttctttgcgaaacccatactgttatttgcctattatgctttcacaatattccgacagtcgatcttaaagaatgtaggccaatattttgtatgtcacgtttagcagggtaatgcttctgtggttatcacaaactgtttggtctccgttcttgtgaatagacacaattatacctacgttccagtctactggtagttctggtagtctcacctgcttccc

SEQ ID NO: 9966 - DNA, 769 bp, Diabrotica virgifera
  SmartBlast Evalue=6E-72; Info=Uroporphyrinogen decarboxylase n= 1 Tax=Aedes aegypti RepID=Q175D5_AEDAE
caaatattctgcactgctatacaaaaacttggacgatctgagctccagcttttatttgcattaccaaataatctataatagtatttgttaacaagtttaatagttcattagcagccgttggatggctatacagccacttttttggcattacttaatgtcttggaaccaccaccttctatcatatagcccataagagtccaaggagcacctgaaaatccaaataagggaacttttccctccagtttgtgcctagtgagagttatggctttacctacatactctaatctttcaactgcaccttctaccaataactcttttatattttctacagttaatggttgtggcagcacaggtccttttcctggatgcatttctacagtcatgcctagtgcttggggtataactagaatatcactaaaaataattgcagcatccaaatcaaagcgctttattggcattaaagtaacttcacaggcaagttcgggtgtttgacaaatttcaaaaaagctatgttctttacgaaatgccataaattctggtaaatatcttcctgcttgtcgcataatccatataggaagcttatcaggtttttcacctcttgcagcttgaagaattcgggaattttttaaatgtggaaagttatgtgattccatcttaactctaaatatataggatttaattatcgtcctaaaactgtctcttgacaaaatatttaattatacaccgtacaaaactaattattatttgttaataattatgttatatcata

SEQ ID NO: 9967 - DNA, 768 bp, Diabrotica virgifera
atcggcaattcagatacatatgatacattttaaagtagaagactttaaaatgatattgccaatatttataaaaatgccacaagaaaatagcttcagaacaacataaattatttattttaaaaagtatgaccactattaatttttttgtatcatgatttttaatattttaaatttattatttatttttatttatgtgaactatgccatacaaaacttaaaaaaaaatgtcaggtattttattgtcatgaaatatgtccactcatattttattagataacaataaattatggaattcaatagcaaataaaagcactgacagttgatgaactaaaattaaatgtcccctaaaaattatgaaattacatctaaattctctcaaaaggagtctcatccagaatatttggaatctttcattttatcaataatgattttatattgtttctccagtctgggacgttttgtaccacttaaccatttgctcagcctgatgcaccgtatatatgtacagatgatcaagaaaacttccactcgtgcaattatttattggaggtaatatattttatataattggtttatgcatgtaactttaaaatgtagatatttttatttcctttctttgtgcctaccagtttcttgatcatctgtacacgtaccaccatgagagcattatttttcaaatcttttctatacttcagcgatgaaaatatattttttctgattctccctgtataattattttttcacccaccaggtatcagtatcacggac

SEQ ID NO: 9968 - DNA, 767 bp, Diabrotica virgifera
  SmartBlast Evalue=5E-37; Info=Retinol dehydrogenase 11 n=1 Tax= Camponotus floridanus RepID=E2AK57_9HYME
cgtactttaacactaactttaacaaattgttatcaaacgttgttgtttgataagctgaagttttgtttttatcgaaccttttgtcattcaatgtacttgtatgccggtaattattataagcgttgtttagttagttaagtagtgaattagtattaaatttataatttttataacaatggggcagatatttacgacaaaatgtgactctgacgtgagattggacggtaaaactgcagttattactggagcaaattgcgggattggaaaggaaactgccagagatttatatctaagaggtgctacagttatcttggcatgtaggagtgtttctaaagcaaatgaagctattaaagaaataaagacacaatgtgtatgggaaaagaatgtaggacaactaaaagcaatagagctggatttatctcgattgaagtctgtaagagattgcgctgcaaagctgttggaaaccgaaaaagaaatcaacatattggtgaataatgcaggagtatttgcagttccttttgcgcttaccgaagatggcaacgagacaacttttcaggttaatcatttgggacacttcttgtttactttactgttgatgcctttacttaagaaaagtaccccagcaagaatagtgacagttgcatccagtttacatagtgccgtatggaatttagatttatccgatatgaaatgcgaaaagaggaaatatggcagcataaatgcttacaacgagagcaaagtgtgcaacattttgtttactcaagaat

SEQ ID NO: 9969 - DNA, 769 bp, Diabrotica virgifera
  SmartBlast Evalue=1E-63; Info=Cytochrome P450 CYP6BQ9 n=2 Tax= Tribolium castaneum RepID=D7PM84_TRICA
tgatgtttccaacaatggtcgcctgtacagtggaattaaaaaacattctagaaaaagaagctactcacaccgatggtgtagatatcaaagaaataatctcaagatttacaaccgacattataggatctgcagcttttggcatcgattgtaatagcctcaagaacccccaatcggagttcaggcagtttggtataaacatattcaaaggaagtggtcaaaaaggtaaattaagattgctagcgagaaccactttccccacgtggatacttgatttaatgaaactgaagatgctttctcaagaaatggatgacttcttcatgggtatgataagaagtaccgtagactaccgagagaagaacaatgtcttccgacgcgacttcatgcatctactacttcaactcaaaaacaaaggtagagtcactgacgacgaagacattcgacctgatgaccataaagacccgaacggtcattacttgtcgtttaatgaagtagctgctcagtgctttgtcttctttatcgctggttttgaacttcgtcgactgccactacttttacactatttgagctggcacaggaccaagaaattcaagataagttgagagatgaaattaggactgtattaaagaagcataataatgagattacatatgacgggattctggagatgacgtacttggatcaagtgctcaatgaatctcttcgtcttcatccaccagctgcaagcataggaagagtgtgtaacgaggactttaaaattccgaatacagat

SEQ ID NO: 9970 - DNA, 762 bp, Diabrotica virgifera
  SmartBlast Evalue=8E-17; Info=Androgen-induced protein 1 n=1 Tax=Harpegnathos saltator RepID=E2B9U0_9HYME
taagactttgtacactggatatagccacacaccatgccggaagtacagcgaaaagtataaaatcgtgtaacttaaaaaaaagagccaacgctggagctgctttttggaatttcacaaaattgtgtttcttcggcaacattatttcaatgataactggcaagagtataaaagtgtgtagcatgtggttaagccactgtggaaagaagagatctagaacttttggaaagaccagttctctgtctatgtgccacagtgtccaaaatattgagactaccactaaagtagatggaaatagcacagtattaaacatcacagctctggttttgcttagtttattctgagtagaaatgggtagtttcatcaattttgctgcttcgtccataatagctactatcataaagactagttggaaaataaaattccatagcgtaaagaaacaaaattcaaaaccagcaaacacggccacttcttcaaattcttcttctttttccttaccactgtttttcattgaatctccaagttcaacgaagaatatcaaagaatagagattaagtgtaagggcgctaacgaacagcatcaaagctagcagatttcccattatgaacagtagttactagcacaacctcctagttgacatgaacttatacctactgatagactaacacttttagtcgattgagtagtacaacaaaaatgatatggacactaaacagtaacaaaaatcatcacggtttggactatgtttaaaataaactacatttc

SEQ ID NO: 9971 - DNA, 769 bp, Diabrotica virgifera
  SmartBlast Evalue=0.000000002; Info="Protein arginine N- methyltransferase, putative n=1 Tax=Pediculus humanus corporis RepID=E0VP33_PEDHC"
aagtacaagagttttgcccttttatttctaattcattgactatgagaaaattttctttgggaatgttgttaacgcttaaaacgtaatcaaaaaacgctttatcagcttctgtctttattggatggtatacagtacatggagaagtttttgccaaaagaaaacctaacagcgggcatatgttgttgtcgatcaccgtcgtgtttgcattccaaacctttttcaacaatccaactatattgtcaaccaacttttgatcatttaaaaacgttataacttctttagaaaccttaaaacaagtgtgattcgtaggttcagtctctattaatgttacatttaaaccacagtctttaattgttaatttcgccgtgatgatcgttccctccacaacttccactggatggtctaggcaaatgatagcatgctcccaacaagtgacctgatcctcgtcgaggggattgtttgttatataggtgtttggtgtaagattcagatcgaaccaaatggcaaacgcgtgcaacattccctgctctatgcacctcagttggatgattttctcgtgtccgtcttcgctcaagagttcgtttatttgttctaagttataaaaatctagatcgaacacttggttaatatcagtcacgtattttacttctttgtctagtaaattttctgcttcgtatggttctagatcgtattcagtgacacaaacattttggagattgagcaatttgattgatttcttgttgaccagtttatgtcgcttgatttgatc

SEQ ID NO: 9972 - DNA, 767 bp, Diabrotica virgifera
  SmartBlast Evalue=7E-29; Info="Low density lipoprotein receptor adapter protein, putative (Fragment) n=1 Tax=Ixodes scapularis RepID=B7QMS0_IXOSC"
gtagtgaacaacaggtgcaaaacaataagggggaacctataactgccagtccggaaccatttgagtacccgccaataacaaaacggatgttaccttttcagtgaaccacgaacttggtacctacatagaagcatggctgctgtttaatttatggttaaaaaattattttgtgactgtgttagtttatatattgttgttgttatcgctggattaaaacttcaagatgagtgatagtgaacccgcaattgcttttaaggatcttcctctaacttttaaggtgaaatatttaggtcgacatccagccaaaggtctctggggaatgaagcacacgagaaaaccagtagactacttagtatctcaggcaaaaaatcttcctcccgatgtcattctccctataatcgatttcaaagtcacccaagacggcgtcagctatgttgagtccgcaaataaaaaagtagaatcagagccagtgaagtttgctgtggacaaaatatcgtacggtgtgcaggatttggtatatactagagtttttagtatgattgtagttacagatgacaccctcgacaacggtatcccttttgtttgtcatagtttcgtttgtgaatctagggaccaagctagaaggatcacctacgctttagcagcagcttttcaagattatggtaggaaggttaagtccgagaatggggaaaggactgttaaaaagtttgctatcgatttacgaacaccagaagagcaggctgctgcttcggatggagaaactgacg

SEQ ID NO: 9973 - DNA, 766 bp, Diabrotica virgifera
atcttttagttcttttggatcgggatgagagggtgcgttgtctaacagcaggactgcctttctcggtagatttcagtagatctggacggcagaaccgtccggatatggggaggtccggatatgacaggttcggatgtggcaggttgtactatattagtatttttagtaaatatatttattataattccgtgtctttggatttgtcttcctcaggagtaagatgagtattattaaaacattttattgtatatttattatacttcaccttgtctgtttgttaccgtgaattgtcattaggtacgtccgaaccgatacagacacagtcctcgtagcgtatttggtatagcattcggccagagatcgagaggtcttgagttcgaatccggagcaatcctatactttttttttattttttgaaagcggtaagcacaaaattagtttggtgtttaaaaaaaaattaaaacaaactgtttaaagtatatttattttaagaaatcatataatagaagtataacttcttacgtgcgtacaaagtacacacacattcttttttattcaataaaatatgcgctggggtctctttgggacccgcttggcgtttaacgttagacataaatttagtgttctatcgacttcaaatcttttgtctttgcttttttcaacttccactttagaatttgcagtaaatatttaattgatattatgtgctcttgctcggttttgaattttagttgtgagagtaagaaataattgacggtatggcagc

SEQ ID NO: 9974 - DNA, 766 bp, Diabrotica virgifera
taatttaaaggaaatctttcagataattttttgcgtatgggttatttacgcactgaaatttttgaaaaaatacctaaaaacgctttagtgaattgtatgatactctactattcatcaataacggtcgatgctagtaacaaaattttgttttgagttatttttttgttgttttgataaaatactttccaaaataaaatttgaactaaattttctattgacagtaacgaaattcatattactgtagcaatttcgtcttcatgcaacaatgttttgcaacaatccgttagttggagcattatataaaaaattgtgccaattttcggggcttttcttgaactccagcttgacagccaagaaaaggagtgacgctacttttatagctaacaaatgcaagcaagcataagcgcggtataatgacaatgctaacgaattagtaggcccactctcgattttgacagttccaattttgcaatcactcctgagacaaaattttgaatgcgcgacgataaccaccaatcacggcaaacgtagtataactgtcattcatctgcgcaaaggactaaaattcttaatgaattcagtgacattgtcaccagaatggcacggttcttagacattaactacagttgcccagatcgactaaccaattaacattaatgtaatatactgtaatttgaatcgtaatctgattaatcggtattttatgtctttgatgtatggaaaatagtcaagatagttaagaaataagatgttagtgaattataat

SEQ ID NO: 9975 - DNA, 769 bp, Diabrotica virgifera
cgcgcctgttccattctcgttgccactgttttctgcagcagcttcattgtcggtaccttgggcagcatcggcattaccgttgttttctgcagcagctccattatcattagcttgtgcagcatcattttgagcgtctgcattagcattgttttctgcgttggcttcattggcgctaccttgtgcggcatcggtttgggcatctgcgttagcattattttctgcagctgctctgttgtcattaccttgggccgcgtcagcactaccattgttatctgcagctgcctcattgccgttcccttgtgcagcatcagtttgggcatctgtttgggcattgttttcagcggcagctccattttcgttaccttgtggagcatctgtttgtccatctgtactattttctgctgtagtattatcatcatttggttgaggagcatcagtttggttatcagcattaccattaatttcctgttcaccatttcctgacccttctggttcgctgttttgaggaactgtggtattttgatttaccacttcggttccgtttcgagtagtaccatttgctggaatgtctggaaaaggttcgtctggaggatacacatcatcatcatttacacatggttcagatgctaatgccaagctggaagctggatctgcaacatccactgcaggatctgcattctgagcaataactgtcgctagtgatatagcgcaaataattgcaaaaagaactgttactgatctcattatgtcggttttcgataaatttttc

SEQ ID NO: 9976 - DNA, 768 bp, Diabrotica virgifera
  SmartBlast Evalue=2E-26; Info=Protein lunapark-B n=1 Tax= Camponotus floridanus RepID=E1ZW26_9HYME
aacgaaacaaaaaaaccagtacttgaagtatccacaaccacagatttagtggcccgaactagtcaggcgggacttcgtcaaagaaatataggagcaaatcaaactttgaaaacacgactgtttgctgggtcaacggccatgtttcaaaatagacctcttccacagcaggcgcctttattgggaccttcaaggagtaatactcttgtacctactcctggattaaggatggcggctccgagggctggacctttagctactggcacacctctgccttcaccaatgggcgtattaccagcaaatcggtcggtactagataagatggtggattatttggttggtgatggcccgtcaaataggtacgcccttatttgcaaaaaatgtttttgccacaatggtatggcggtgaaagaagaattcgaatatatctcatttagatgttactactgcgcacatttcaatccagccagaaaaatgaaaccaacggggccgagattcggaagcacttcaaaaatcgagtcagtagacaattcttctgattccgatagagattctccagattctgatccggagacaactctacagccaatagaatctgtgaaatctagacgatcgtcctcagaaacagaagttccagtaccgattcaaactgttgccgcagtcgaattaccgaaagaatctgcgagcgaaaggaattcaaattcttcccctgaactcgaaaaatattctgattttgacaaattgtctgacttagaatctcgagaaagcgaa

SEQ ID NO: 9977 - DNA, 768 bp, Diabrotica virgifera
ctgaagtattgccaggaccaatgcacataataaacagcaggtaagtttacaaattattacatttttataacctcaagtatgttacgtggttcctttttcaataatgaagttaagtgaaatgtgggggtttggtacttttattgttgtttggttccatgttctaaaatgcctagtaggaataatatggattctcttcttattggttctttgttcagaaatatgatatttatggaatccgaagtgatgtgcacatagttacctagatgttttcgtattttgctaggatgttttttggagtaggatttgcacgataatattcctaatcatcttattcgatgaacacaaattaggtagtcagacattactttggtcttgtgtaataaatcaaaatatatttagataccgttttttttatagtcagtttgaaaaaaatactggttactgtataaatacgccacttacctattttagctttgtttcaggataatcgtagcttaggtaacaacaaagatagttatccaaatggtaagcaaaatggtgcaagtaaggaaaatagtacagctgaggctgataatacaactatggaaggccggaacaccgatttatctgaagagagtgactttgacgacaatattgcagatcctgattttcaaaatgatgaagcctcatatccagaaagtaccgatgattcatcagacagcagtgcaaatacgggacacgattctaacaacgaaaattatactcaacaagtaaaccaagaagagcatt

SEQ ID NO: 9978 - DNA, 767 bp, Diabrotica virgifera
ttgagagctgggtcgctatttaagtcaccaagtcacccggtctgtttcctagtttcttcctcacaccaacttaaaggtgaagttggtctttgtacagcatccttgatcttctttccagtccggttaaaattctcttaaaagccatcgtttgtttcaaaatgatatgattccatttgttgccttcattattagcattcttctaaataaatattaaatatttgatgttgataattttattagcaaatcacacttgcatattacggattatccaaatacatatcctataattgaattagcatacaatcgtccattttttgatctacattaagattaagttcatattttttagttttcaaagtcgaaggttcacataggaaaatattatgactgcaactttgtttacctctcttaaagggctgtacgtactatttgatccttaaagtctcttgtgaggatttagcaataatatcttttcattactgtacgcttacttttacttatgctgtacagtattgagacagttattgagtgcatatccagacatctattggaatcactatacaagtaccaaagtttttttgtcaattcagatggattaaaaacttatttgattgtctagtgagtgctgtgaatagacgcgtgagcatttgataattcaatggaactctgtgggtaaaagaagtaaaatatatagccatatttgtgccataataaacgttatcgggggaccatccactggaatggagatttacatttcattgaggtat

SEQ ID NO: 9979 - DNA, 767 bp, Diabrotica virgifera
  SmartBlast Evalue=2E-16; Info=Anon-15Ab n=5 Tax=melanogaster subgroup RepID=Q9TVE6_DROME
gaatcaacagatccttttctaggttgatcatctttgtcattcttttccctttcttcttcctcttgcctctgtctcaagattttctggcgctttttggcatctcgtaagtgacttaccatcgcttctgtatcagtgaaacgtggtttcttgcggagtcttgacgcaagttgtggattggagaattccaacccagatttatttagcagatcgtgcaactgtttaaaatttaaaggagggaagaaatttctcccgtctgtatatctaagatttcgtaaggcttttatgaagtacatcaggggagattgtaaaatttcatccaaagccattagagctcttcttattttctaataggtacttcacttaaagtatttttattggtaacaaaaaagtctggaatacatggtttagcttgtgatagatgtgtatgaagacgtttgagtactttcaacaatttaatacctagcctatgttctgcccagtcactataatgggactcacattccaaaaagatgaagtttcttatatgatcggccgtgagacctaaatgcgcagtctgaggttctatgaaagttttatgaagtgttagaagaatgatcaagcttttcatttgagcatgactcatgaaactttccagatatctttgtgcttggggaaaacacagttcccattcaatatcagagtcattatattcacctcttttgtatgaataacctttaggtagcaggacacaatctaaggttattatttcttctaccatacttgatgta

SEQ ID NO: 9980 - DNA, 765 bp, Diabrotica virgifera
  SmartBlast Evalue=2E-21; Info=Endonuclease-reverse transcriptase n=1 Tax=Bombyx mori RepID=D5LB38_BOMMO
tttcttcaaaatatttcatttttcttttaaccaattttcttttgctatgcgaatttgtcgccgtatttcgttttgtgtttgctggtataacgatttatttttgtccttatatgctcttcttttgttcattaagtttagtatttcgtctgtcatccaatcttttttcttttctttgggtttgcgtagatacttttttgaaggttctattaagtcagcctttattttttcccagtttttgttgatattttcttcactacattcgccctcaatctgtacggtgtttagacgttcgttaattctttctttgatattttctctgatttctggatttcttggtgcacttatatcagttctttcttcttttgctgttttctctattcttttattttaattttcatgtgactactaagagattatgattagatgtatatctgctccaggttgtattttgactgctgtaatactatttcgatatctttctttgatcattatatgatctatttgatttctcattatctgatgttcattatctcttggcgattccacgtgtacaaacgtctattaggtaattcaaagaacgtgtttgtaacaatcatattattatcttggcagaattgtatcaacctatgtcctctttggtttctatcacccaatccaaaatctatcgaatgataccaaacacgacttcccacgaagaggggtggggggtaaatttaatattttaaatacgaatcccgcgatatttcgcgaaatgaacatcagatc

SEQ ID NO: 9981 - DNA, 766 bp, Diabrotica virgifera
ttttaatatcagaatagattatcctttttatagcagacacttcgaaattatggttctgaaagtatttttttgtaacatcaattaatagaaatacactacacttttaattaaaaaaacagtttatttaatttgtattctgagaaatgtcaggtataaagtatttttagttaaagttgtggcatatttccattaaatatagtagttaacgttaaaattataaaaaatattggtttaaaataacaatggatagaagtaaattgtttaaatttcctctttattcctttcatccagcttagtcagcatctttttacttcaaatttttaatcatcagatttaatatttttcgtcatgtatttacttactgtgattaaatttttatatatacaaatgcaagtttaatgttaaaaaggcaatttcaaaaagcattttatcttgacattattgataaggatgtcatttagtattgaacatattgcaattgttcatatttaattattattttgtaaaccattattaaaaatgcactctttctctctgtcaattcactattataacgaaagtgtaagttacggggatacttgttgaaatgttgaattgaaagcttataaaactcaatataaaaatggaaaaatcaccggtaatttgtatcaaattttcaaattacaagcaaaaatagattccctggtcgtagttgctagagcaacgttagaaatgatacaaacgatatgcatataacactacaataaagaactgtaagttatctaca

SEQ ID NO: 9982 - DNA, 767 bp, Diabrotica virgifera
  SmartBlast Evalue=3E-62; Info=JmjC domain-containing histone demethylation protein 2B n=1 Tax=Camponotus floridanus RepID= E2AVL8_9HYME
aacgactttgttcaattttcattgggcatgtggaaaatgtggtttcgttgtgtgtatagattgttataagggtcgaaaacgaggaacaattaaactatgggtagaagctaataaagatcgtgatgaatactcctggttattatgtacaaatcgacaagtacacgaacaagaaaaactaatgctaactcaaataatagctggagattctttaattaaattagggaagatggttcatgagatgagggaattatgggatatcgaacaattctgtgaatgtccagcgtctaaagaagtcaagaataataaccaacaggtcaaggaagtcgtcaaggcactattaggctattataatgttaatggagtgaagaaaaagattaaagatgaacgtgaatcgggccctgaccatgaaatcaaaaaagaagtcagcagcagtgatgacgaaggcaatttctccactttaagggaactactcatccgaccatctcacaaaccaaatggctcacgggccgcttctcctataattaagaatgaatccaaaaagaaaatatcaccttcaaaagcctctgatcttgtcgacgatgctatagccagcgttatagaggacagtgtagcagctcaaaatcccgccgagtctagagagctgaagcattacatcaggaggtaccattggcaacaaaaaggaaggggcagttacctataaggataatgaccttgactgagagtaaattaatgtatcctaatactccacatagttggttgtgcgatgg

SEQ ID NO: 9983 - DNA, 766 bp, Diabrotica virgifera
  SmartBlast Evalue=5E-22; Info=Kidney mitochondrial carrier protein 1 n=1 Tax=Harpegnathos saltator RepID=E2BDN4_9HYME
gttaaaattctaagagacatcaaattactatcgttttttcaaaaaaattaaacgaaaaggccttacattctaaactcaataaaatttgtttaatcgtttaaaccttttacgaattatttacaaaaatcctgttgacgttcacaaaacgaaagaacatgcacttttcaatattttcgaaccattgtttgtaaatcctttaaaaaaaacccattaacaaaaaccacattaacgatttcgacttccccgaaacagcactgtttattactaaattagactctatacaatttttggtcatgtacagggtgaagaaaatctatgatctcgtggtctatgatataaatttattttctgaatttttccaaaaaaaaaaaacaattctacaacaatatgtatatttttagacccgacttatgaaccaaagaaaactgaagcggtgcggtggtcagttgcctagtcacatttatcgaggaacgttggattgcttcgtgcagacctacaagaacgaaggcttttgggcgttctacaaaggattcgtgccgacgctgttccgcatgggcccgtggaacatcatcttcttcctcacctacgaacagctccaacacctgtactaagtattacttgcgtattaattttgttgttgttttattcttcaagacgaaacctgttgatagtattgtgattttagtgcaccttttaagattttagtatgttgaatttattcgatataatgtatatggcacatgttacgaaaataaagaatttaatg

SEQ ID NO: 9984 - DNA, 768 bp, Diabrotica virgifera
  SmartBlast Evalue=2E-61; Info=Heartless n=1 Tax=Tribolium castaneum RepID=D6W6I2_TRICA
ttaacgtgactgtgttagaagccccatattttacacgaaaaaaccaaatgccgaggctattagtgaagcctgccggaaacatggtgaggcttacttgtagagctgagggaaatcccaagccgaatatcacgtggtatcgagatgacaaatctccccctacaagaaaattaggaaatatcaaaatcagccccttttccttaacgttggaagatttggtgcctaatgatgcaggaaattatacctgtttagtgtgtaacatcgttggatgtatcaattttacttttgccgtggatgtagttgagcgataccacaacacccccatattgacaacaggacttgagaattccacagttattgttggggaatctgttaaacttagttgtatgtttgtttctgacttacatccttatattgtgtggacaaacttaccctacggttatgctaaatgttcttacgaagctttggacgactgcaatgctaaagtacttcagaaaagtgatgatggcagggcaaacccggaagtgtatgagatcttgaatgtaactcatgaagatgaaggatggtatgcctgtttcgcatctaacagtcttggcataacagtttctagagcttacattactgtagtcgataataaagaaggcgattttacctggcctagattgtcatccaaaattaaagaattaccttcaaaagtataactacgcctatgaatatccgtgctagcagaataatacttctatttttatattttttattattcctttttgt

SEQ ID NO: 9985 - DNA, 767 bp, Diabrotica virgifera
tctgtaggtatgtttttagttatgtctggtcgatctttcctagacggagcaccagctgcaggtaagtcttcaggagataatctatttggaccatccttcttaggtttttgtttgtcatctgtaggtacgtttttggttatatctgggctatcttttctagaaggagcaccagcagcaggaagactttcaggtgcaagccttgtgggagaatggtgtttgggtgctgcctgattttctgaaggttttctagaatcatcaggttgtctctttttagaaggtgctcctgctgcaggaaaatcttctggagatgctctagtaggagatcttgatttatcttctggtttttgttttgatgattcaggttttctttcgggcgaagcacttttcttaggtttaggtgtttcataagtaaacgatccattccatccagtttttccatagtttctgtcattagaatatactagatcagtcgtgtcgatattttggtccataataacgtgacctgtagtaccaatagtattttgcacagccttagtatcgtaaacatttccaactatagtgtttttggaatcaacggtatgaccataaaattttttagaatcagtacctaaatgactattacgaattttttgcatatcgacatagttttcatcgacatatctgacagtgctgtcttgagaatgaatttcttctgttactgtccccgcaggtgatcgagatgtaggtttttcgttcagggggattttgttttcttgggtgtagaagaa

SEQ ID NO: 9986 - DNA, 767 bp, Diabrotica virgifera
  misc_feature (398)..(400): n is a, c, g, or t
  SmartBlast Evalue=4E-78; Info=Yellow-c (Fragment) n=1 Tax= Tribolium castaneum RepID=D1LZK2_TRICA
gacaaagctttcgcctatctaccagacttgggaggttatggaatagtcgtatattctttcgctgacaacatctcttatagagttaagcacaactatttccactttgatcctcttaaaggaaatttgaacgttggcggagtcaatttccagtggactgatggagtgtttagcattgctctaggaccaataaatgaaacaactggctaccgaacagcttatttccatgctctagcaagttgtaatgaattttccgtcagcacggaagttttgaaaaatgaactactggcttcagatccatcctcgtttgatatgtacaaacttgaaggatttaagaatgaccaaggacaatctacatcttcggaattcgacgttaaagcaaatgtcttgttcacgactcnnntacaaagggatgctatcgcttgttggaatcctagaaaaaaactcgatgctaacacattcgcactggttgcacaggatcacgaaaaactgattttcactaatgatatctcgattgatgctgaaagaaacctctgggtgttatcggacagactgccagcatttatttacagagaactaaatccgaaccaaatcaactacagaattatgaagatgaatatcgatagttccattaaaggtacaccatgtgaagcataacacaacccagtattaccatcagtgattgtattatttttataaatacatagtttatagtattcctaaattgtattaattatttataaaacaagtacattacaagttagttaagt

SEQ ID NO: 9987 - DNA, 764 bp, Diabrotica virgifera
ttgctgataaaataaataaactgacctatgaaatgccaatagtgtcaaaatttgatatgagtaaaattgcctgaggttgtaccaattacaaacaaggtgtacggcgcgggaaatttgaatgactcctcttgtttaaaaacagactatagtgaaaaataagctcttatatctcaaattccaaatcgaacattttaacgtgaaataaaaaaaatgaaacacccttctgggaaaacttattacaactttcttaaagtgtttaagaaaacgtttatttttatttttttttaagtttccagcagcaagagtaagcaggttacgcccaaaatacagttgttcccctttttttggttaaaaatattctaaaaactccctctaattaacagcccaaatggaattaatcgttaccacttcacaagtaactttatgtattgtttgtgtttgtaagtttcatcagttcaaagtgcttatttgtggaaaaatttggttttaaagtaaatttttttaaatctttaattttgaaaaaaagacttttgtcaaaataacttaaaaattattagtgataccaaatatcttaaagagtaaaaaatgtaggtgttgcttttttaaatatttggaattttttgattttctggaagacaaaaattggttaagatatggctgttcaaaatttgcatatacatactcgtgactagtgattcgttcgaggcctttcaacaaaacccctttcaaaaataagcatcttgaaccaatgcaacttacagatc

SEQ ID NO: 9988 - DNA, 748 bp, Diabrotica virgifera
gaaagaaacatttattgtaaacatttttaaaatactcttaacaaaaaaaaaaccaaaaaagtttagattttattttttattttacttgtttttgtatatttttcaataaaactttacgcgacacttgatattgtctatctacaactactgtaaaaatttgaaccttctatcttctaatccagagatatttgacatcaaaaattaaaaacccagtattcgggaaatcgcaaaaacataaaacactctaatacgctataaagctaccggtacacggtaagttgagtgcagccgttcaaaaaacaaataattttgtaaccctggatattttatactatgtgttatatatcgttgaaaaagagaagatttcagagaataattttttcataataggttctttttcataaattaaacgtggaatacaaaaataatttttaatttgaaatatctcagtggcgtaccatttttttttctttaaaaaagttcagaccattacccgtaggcgcgccaatgatgataataaaattgttatttgttggccaacaaatgcgcaataactacctcttgaaactcacaaaatgtaattttcatatctcaaccggtcttagaacaatgaaacaattggcagtttgaaataaaaatttcagcgccctgtatctcggaaacaaagcatttgcggacatacgtttgtagagcgaactgccattgattttttttatgtagaattatcccttaaagtttttcatgctta

SEQ ID NO: 9989 - DNA, 763 bp, Diabrotica virgifera
ttctttaacaattttaattgcatttttcagctcctctttggtcaatggcatttctggaattggatctctaattggtccaggtcttaagttttcttttaaatcgtttaaatgagatcttagatcatctttaatactcgtcaacgtatttttattatttattgctatttttattatatcctttaaacctaaaatggttttatcgcaaatatattttttattgatataatttggaacttttaactcatcaagtgcttttttgatttttagacttttcgaatttatgtcgtcgacttttttctttatgtcatctgaaagttgttctagatacagtttcagattttcataatctttctttaatttaccataatatattttagctgatgaacaaacagtttgcgtctttttgttaaatgctttataatcattaaaagtatcaaaagcattttttattcgttggagctcattaagattttctttgaggtggtcagttgttttacgatattcgtctaatgaaccttcaatatctcttatttgtcgttgaacgttagttgattctatttttgatacaattattttaattcgatttataagttctttggtatctttgaattcatctggtgttgtaaattctggcacagcttgtaaagtattattcaattgtttatcagctcgtatgtaacagacatcatatatagagcttaaactcgaaataggctgaaatatcacagttgttattaataacagaacaaacattttcgatgca

SEQ ID NO: 9990 - DNA, 767 bp, Diabrotica virgifera
  SmartBlast Evalue=2E-39; Info="Heat containing protein, putative n=1 Tax=Pediculus humanus corporis RepID=E0VZU3_PEDHC"
agttgacaaaatattgttttaaaaatatttattttaacaaaatgattatgttaaaactgttgtgcaattttaacaaataatacggtcttctagttgtacaatgtcagatttccaaatggacgttcaggaaacagatttgatctccaatgattcagaaaatgaatgttcacaaagtgtgtgttctgatacccatagtgataacacatcagcctctggactaacagacaaaagtactttgtctgagtcaaccttacatgccctttccggaggcagtgaagctgataatttttccagccagtcaaccgctttatcaggagttgactccaaacaaacatttactacagtgatcaatcgaggaattgttttaccatggggagcacaaaaggagagaagtgcatcgtcaggacaacatttggacatggacttaagacctggcgagtttgtgatgagaaatttgtttgcagactttacagttatagcagagaaaaagattgaatctgttatgacagagtctcaagaaaaaccattgtcgaaatctctacaaagaggtgaagattcagagtttgatcagcttcttagtgcatttggatcggtggctgaacattgtttaccttctctcttaagagcactattttcatggtacgagaggcaaatgtccgaggtatcaaatccagaacagaaaaaatcagatatcaagcaaaaaagcattataaatatagtagccggaaacactacagagactatagaacgatctgaagccgacattc

SEQ ID NO: 9991 - DNA, 767 bp, Diabrotica virgifera
  SmartBlast Evalue=6E-97; Info=Diacylglycerol kinase theta n=1 Tax=Camponotus floridanus RepID=E2ACQ0_9HYME
gcattcactattaatactcgtatgacaggaggcatggctcgtcattccacaccattcgcatctgtatccggataaacattcagtagtccagcacgtctttttacagagagcacacttggaattgcttggaagatttccttcgcgccagtgatgttgatgacgcacgaaggtaagttgttttcccggaagataagttgcattttctttacagtcagctactgcaaaatcctggcactccacatgtacgaaatactcacaaatttcgcaatgaatggattcgctgtcatctaaccgttttctacatacgttgcaaaattttcttttatggtgaaacgactccgaccaacagtgtgcaaccggatttcttatttgactggcggagacgctggaacacggggataccacagtccttaagcagcgatcatgcactacgaagttgcaaacttcgcagatgaagccctgctggatgaggccccataacatgtcgctgcagtggtggcagtaggtgggcttgtggaaggtcttcttgcagaagctatggccgtgcgcggcgggcggctgttcttgcgagcccgccaccgacgccatgattcctccgagccaccgttcacgccagaacttcaccgtgatcaagcactcgcacgcatattacacgtctatgtaatgtcgaaaccgtatacgtacatgttgctgtctttgagtgtctccgacagccacacttacatgcctaaggcgcatttctcgacttcaactcccgtacacagctg

SEQ ID NO: 9992 - DNA, 766 bp, Diabrotica virgifera
  SmartBlast Evalue=9E-58; Info=Transcriptional regulator ATRX (X- linked helicase II) n=1 Tax=Aedes aegypti RepID=Q17M67_AEDAE
ggtgcaattcattaaaccgaatctgttgggtacctacaaggagtatatgaatcggttcgtcaatccaatcaccaacggccagtatacggattccacctaccatgacattcaacttatgaggaaaagatctcacgtgcttcacaaactcctggacggcgtcgtccagcgtcgagattattccgttctagagccgtatttaccgccaaaacacgaatacgtcatcttcctgaagctatccgatgtccaggttaaaatatacaaaacttacatggaaaaatacgcgcgcaagaacgaaggatcgaaccgaacgtcatttttattcaacgattttcaacaattgcagaggatatgcacgcatccgagggttctcttggataagtccatcgagaagaaagagaaattgacggacgatgaagagtctgaaggttctttgaaagacttcatcgacgacggagaccagagttccagtgcgaaaagtacttcatctggttcagaatccggtaatgagagtgacggatcgggaagtgggaatgaaaagaagagacctaccaggacgagactgactagagccagagcagcacaaaagaaagaaaatggcgaagaagacagcgaaccagaagtgatagaagaaaagaaagagtggttccaggagttctgtgacggagaggaaatggacaatattaaaaatagcggtaaactgacgctgcttttcgaaattctgaaagagtgcgaggaaatcggtgataaagtgttagtgttttctcaa

SEQ ID NO: 9993 - DNA, 763 bp, Diabrotica virgifera
  SmartBlast Evalue=9E-19; Info=Endonuclease-reverse transcriptase n=1 Tax=Bombyx mori RepID=D7F173_BOMMO
tttgtagatagtttctgctataacttccgacgaatgaaagtgggaaacatgatttcgcaattgatttccttcagtttttcacagagtttgtccaccagagactctatttcgcagttttttttattagagtgagaatatggaaactgtaaatcgtcctctggacacaagagatcaactgtatgtgaatgtagcaaactgaggatataggtacctacatacataaggttcttgaacccctaggtggagcatagagcttcaccatatccttcctcactttccttgacatcttatctcgtccatgattgatcttctccaagtttgtactgggcgacccctgtttctttttccttggggattccattctatggcagtctttgcaatactggagttacttttgtgaagtgcccattgtataccctcttttgttcggtcagctggagtagatctttacttctgatgatgctaggacaaataatgcgaacaattcttcgtaggtatttgttaacaaagagctgcaatttgtctttggtttttgtcactttccaagttttatatccgtagggtagaaaatacatggcatttgactggaatattcgcatctttgtctttgtaatatactggtcagaccttcaaacacggttgagcatgctaaatgcttgttgagcttttcgtatcctcataaggatgtctccttttataccgccgcttttcaagattcatacaatttttcacattttcaatcagcatattgttaatagggcag

SEQ ID NO: 9994 - DNA, 767 bp, Diabrotica virgifera
  SmartBlast Evalue=2E-68; Info=Mitochondrial ribosomal protein L16 n=1 Tax=Glossina morsitans morsitans RepID=D3TQF4_GLOMM
ggaaactaacctaacaaaagacccaaaaaagccatagaattttataaattagttaattttatttaagaatattagaatatttaagaaactttgtgtagtaaaataataaaaatgttacgcgaactacaactattaagacctctaaggatactatttgttcagtcaagtggatttaaacactttccatcaccccccaaatttgaccacattcagctaccagaaaaacccagacttaagtttatagataaagttccacaattgcctccatcgatacgaccgcccaaaatgcagaagaaattaaagctaatgcgtggtcctgaacaagtacacactttcttgttgcacaagcaatacggaattatggcaaccggaggtggtcgtttaaagtggggtcactttgaaatgatgcgtatgacaattggtaggaaaatggacaacaataggatgtttgctctatggagagtggatgcaccttggcagccagtcacaaaacaaggtttaggggtacgaatgggtggtggaaaaggagctatagatcattacgttactccagtaagagcaggtagaataattttggaattaggaggaaaatgtgaatatgctgaagtaaaggatttcctacaggatgtagcaaataagttaccattcaaagcaatgcctgtttctcaagatattctagacgaaatgaaggaacgtgaaaaatgggaggaagaaaacaatcaaaatgaatacaccatgaagtatataatccaaaataatatgggtgg

SEQ ID NO: 9995 - DNA, 760 bp, Diabrotica virgifera
taaaagccccgttaacgttgtagttcctttctaaaatacataatcaatagcctatatacgcagtaacgacaatcgccttataaacaatgtgttctgggaaaggccagatggaaggtctgtagggtggcctagaaaaaggtggaaagatgcagtcaaagaagatctagagaaaatgggagtgcgacaatgggaattagtgggacaggaccgacaaacatggaaggcaatagtaaactcggcaaaggctcacgaagagttgtaacgccattgatgatgctaacgttgacgcaatcaaatggacttggaagttatttccctggatggtcggtgaatatcaagttcttcctctgtatgcatatttttaataggcaatatcgtggtatttaacagcttattttatagcagagtttatacattttgtagggaccagttagaggtgttataattttgtaaaacctcaaaattaataaattggcgctcatcatgtttttcccctggacctttcatttgtaatgagctgccagttgcaaacaaataaagtttaattgaaagaccgagcaaggaattggaaccttctaaaatatcatattaagataaaagagtaaatagtctaagagctagtgaaccctccgaccaacggtcctcctgcaaggccagaaatccgtatagtgacaattcacagcacaccaaggccaaaaaccatgacccggcaggcaccagccccgcacgcgcatctaccaggcgaatcgaaaactgcata

SEQ ID NO: 9996 - DNA, 765 bp, Diabrotica virgifera
  SmartBlast Evalue=8E-69; Info="Trafficking protein particle complex subunit, putative n=1 Tax=Pediculus humanus corporis RepID=E0VBE5_PEDHC"
tatgtgtttatgctatttgtacaaattttaatttgttataatctctactggaaaaacgtttgctagtgaattaaccaacataaatttaaccaaaattgagcaatgtctcgctcaactaccagattcgatgttaaaaaagtgaattcagagttagtaacgttaacttacggtgctctcgttgcccaaatgatcaaagacttggacaatgtcgatgatgtctcaaagcagctcgaaagattaggttataacatgggcataagacttattgaagatttcctggcgaagactggtactggaagatgtttggatttaaaagatactgctgataaaattcagagtgcttttaaaatgtatctgggaatacaacctaacgtaaccaattggagtccttctggtgatgaattttcttttatgcttgattcaaatcctctgactgagctagtagaactacccgatgatttaaaatcgttaaagtattgtaatttgctttgtggagctattagaggtgcccttgagatggtacagttagatgttcagagttggattgtgcaggatcagttgaaaggtgaccaaaatacagaaataagagtaaaattcatcagaagattagaggatgctatgccagctggggaagattgattgctatacaatcgtttatttattaaatgtatatatcggtatatatttaataaacaaaatttgatattgtaagatatacaatttgtataattccatttttatattattttaagaagtatttataaa

SEQ ID NO: 9997 - DNA, 762 bp, Diabrotica virgifera
  SmartBlast Evalue=1E-11; Info=Muscle M-line assembly protein unc-89 n=1 Tax=Camponotus floridanus RepID=E2AYP1_9HYME
atctgacgccgaacgaaccgaatcgaaatcgaactcaatttgaactttgtttgaaaaattgttttgtattttattgtgtagtgacggccattaatttgtaacacgtcattcattaaaaaccgctgtacacgtccacatttattttaataaaatcagtaaaaattggtgtaaactttttttaaaaaatggttaattacgtgttgtcattttgcaaaatcactggggccagcaaaatttttaaaagacatttttatttgcctctactcaagccgcagaatccaaaagaagctcttcgaaccctgcgaatcactggaaaatggcttcttggagcgaaaattcagcgatatattccagtgttgttgaaccactcacaaaaaagaccaaggaaatcgaaacaatttggaaaactatctcacagtaagtctagcgattttacttatatgactcctaatttagatcctgacaatgagaatcataaaatacttttgaaaattttagaaaaaggcaaagacaaaaatggatattttacttatacagtagacgacaaaaaatataatatttttgaatcaaattttgaaaatgctattttaaatggtgatattatagatattttagtatctcaaaaaaacgataaaattttaataaaattaaaagataaaaagaaaattcccatagagattcaatactttgaaggaaactctgatgaattaatctgtggtgaaggtgctacacacctgccgaagaaaaacaacatcattatgg

SEQ ID NO: 9998 - DNA, 766 bp, Diabrotica virgifera
agcaaaattgcggctcacctcccataaaaaatacgtaagttatactgtctgaactcgacaaacgaagctttatacacatcttagatggacaaatgctatgcacaattcgataggtgtcactgtttgtgttcggtgcgtcgttgattttggatatacgtataatgacactagtgtcatctgacgataaatacatacatgtatttgacttgtatacataatgtacttgacccatagacgtgacactttgtgtgataggagtttacagttttattaaactgttggtacaataaaaccgattttaaaatgttttgagttatagactatacactctttgagcggagatgcgatatatattatttattcattgcgattgttttaaaatctttaactgttacgatataagttttcttcatttttgatatatttatctgactagtttaaataaagaactaatttgcttttaatccatataatatagtaattaggtactaatccaatagtatttcctatatgtatatctctataatgttagtagttgtatttcttcgtacgttaatgcgccttaggaggagtacgagggcattttgcattaaagattcgtctacaattatcaaataccaatttttcgcattctccacaacgcggctgtttatttatatcacatgttaaacagccatccttattagctacttgtattttggactcattaggttttccatcaatatatccccatgtattagttaagaagatcacaaaaattaatgct

SEQ ID NO: 9999 - DNA, 756 bp, Diabrotica virgifera
gtcgctcactgttccaacaaaccatggctttaggctttctcaatattacgctttttgactaactcacttatgttggacaacaaaaaagttaggtacttcaacaactagcaatgtttctcatcaatacagggtgtttccaaataaatgcgacaacatttacggggcaattctacatgaaaaaataatgacccttgcttctacaaacacatgtccgcaaatgcctcgtttccgagacacgggatcccgaattcttcccacaaactgacgatcacattgctccaaaccggttgagatatgcaaatgaaatttgcatacaattaagaattttatattcaccattggcgtgtatatgggtataaacattttaaatacatcccgtatgcacgccaatggtgaatataaaatttttaattatatgtcaaaaatgcgcaataattgcttcttaaaaactaccaaatttcatatgcatatctcaaccggttttagagcaacaaacaaatcgccagtttgcaagaaaaaattcaacatcccgcatctcggaaacaaagcattgcggacatatgcctacaaaacaaacggtcattactctttcatgcagaaccaccccttaacatttgtcgcacttattcagaaacaccccgtattttatgaaaaacatggccagctgctaaagtacccaacttttcctactatcccacgtaagcgaatgaatcgaaaagcaaaatgttaataaagtccaaggctacagttaagttt

SEQ ID NO: 10000 - DNA, 760 bp, Diabrotica virgifera
tgggaccaagggtatgacggatgatcgaaaagacggttaacagaacattaaaaaaaaaattaaaaattcatagtacaactttcaaatttcatttgtatgttttgtttgacaatataagagggatttgtgttgtacaatcgaatcaatttaaaatattctgaagcgacggctgaatttcttaatcagcgtaagatcacatgcaatctactttattggcttcttcttgttgagaatactactcgatgaattattgcatgtgcgatgcagtttcttctctagattatttacgcaaatctttgtcagttacaataggtttatcaacatgtctacagtcaaattccaagttggtgtcggcttctgaatctgtttggtccgcctttgttgccatttcaacgatttctttatctgtcagcaatggatagccgtttgtgtcctcatcacaaatcaaattaactttttttatttttttacattaaaatttttgcttatgtagtcaatacaacgtctgtatgtaccctgacggttaacagaggtgacggttaatggagagacggataatcgaggttccactgtacgtggatagacacttgccaaataacgtagtaaaaaatatagctcattttacttttgagtcgatttttttctcgcaagtgtagtacagaggcgtactcggtacaatgaataagaaatatgttacagggctatacctaacacccactttaaaaaatatacaaccttacgttgtaagtatttccattgg

SEQ ID NO: 10001 - DNA, 763 bp, Diabrotica virgifera
  SmartBlast Evalue=6E-75; Info=Stromal membrane-associated protein 1 n=1 Tax=Harpegnathos saltator RepID=E2C4J0_9HYME
gagcttcttgtgtttccggctttaccgctgatgtaggggcggaaacgaaactactgaaattatcttcggagttttgtaaacctaatagatcactatcttttttctcctgtttgttagtagtctctacactattcacagctctggctggtttagggctaggattagtaggtttaggcaattgaggcacttctacggcccctaacgatttcttttcaactatggttttctttttacgcctgttcctctcaatttcctcttctatttctttctcccaattaactttaggtaatggaggagctacccattcgcgcgcaatgtactttttatgttcatattttgctcttataaaagattctaaactcgaatcattttggggacgcctgaagttgtctgggagattggcttcatatactgctctagcccttgaattacccatctgctgtaatgacactacctgctcgggagtccatgagtctaaattaactgattttactttcgaaatgtgtactcctaagtttctgtgaataccagcacatcgtatgcataaaaatacacctatattccacgacgcccatcttggtcctttagagtcgcaatctacacaatatttattatcttcatcccttaacagagagttgagaactgattggcatttatcttgtaattgcttgactttatctttttctggtttgagactcatttttccttttaattgtttataaacacataaaaaagttcataaatgacaactcaggggtggttg

SEQ ID NO: 10002 - DNA, 762 bp, Diabrotica virgifera
tttcttcgactaggttttttcttaagtggtttaagctcaactttttccaattcatctttaacagcttcttttctatctacttttgtacgttttagtttaatcgcttctttattccatggaataatttcttcttgtgtctctttcaaaagagattcttcttcttttacttgataaatttctgatggtttggtttctgatatttctggctttactggagcaacttcttcgtgtgtttctgtctttttagatttgcgccaaggttttgtttcagtttcttttgattctggtatttccacaactgttgcttcctcgggtttatgtgtaacttcttcggctatttctgttggtttctcgatctccttagtttcatcacgtttatctttagctttcttttctttcttaacctttttaacgcccttttccttttctgattcaatttcttgttcgggtgtttctaatatcactgcttcttctttgacaacttcctcttcttcaggttttttgatagcttttaattcaacagtttctaactcatccttaacttgttctttcttttctttctttgttctctttagtgtaatctgttgcttattccaaggaattacttcttctttgggcttttcgaagacggtctcttcttccgttacctcataaacttcctttggttgttcggtagtgccactttcaggtttttgttcttcaatttctggttgaactggtttctttggttttcgccaagatttagtatccggttgtttgact

SEQ ID NO: 10003 - DNA, 765 bp, Diabrotica virgifera
  misc_feature (735)..(735): n is a, c, g, or t
  SmartBlast Evalue=3E-70; Info=Transmembrane protein 161B (Fragment) n=1 Tax=Camponotus floridanus RepID=E2AYY5_9HYME
gaatctcaattttttaaggttatgactctaaattcaggtacctgctgaaatttctataaataccacaaaagtatgaagttaataaggtacgggtaaatatctaggccacagcatttagatcaaaatggcactactgggggctcagctagtaataacactggttatgatcagtgttatacaaaaattggggccacattactccctagctaggtggttgttgtgctctactggccttgtcaggtacctgtacccaacagatagtgaattgagagagttggctaatatacccaaggaaaaatccaagaaccgtaaaaattccaaagcacaaaccaacgggaagactaccgtagatactttccatattcccagatcattggacataaaactagatagtattaagatcaccagacaggatgtaattcatattaggtactatacagaataccagtggttggtagatttttctgtgtatgctgctgttatttacggagctacagaattatatcaagtgtggtttcctttaaaaaatgaaatcaatttgagtatggtgtggtgctttttggtgattttatttgctatcaaattattattaggcctgactgtacagtattttaaaggagaagaatcaataggagagaggtcaacatgtatcgtcatgggttttatttatttgttaatttccatgatgatactaattgtggatagaaaaaaccttggagattggtctagaagatncttatgacagctttaaataagagtgcctct

SEQ ID NO: 10004 - DNA, 762 bp, Diabrotica virgifera
  SmartBlast Evalue=6E-59; Info="Nuclear distribution protein nudF, putative n=1 Tax=Pediculus humanus corporis RepID=E0VNY1_ PEDHC"
tcgtgcagcttcaccggatatcacgtaacttgcgccgtctataaccacgacggatcacaaatccttggtagctataacgatgacgacatctatctcttcgattgcgacggcgaaccaggcaccttccttcatcagtacaaaggccaccggaacggagcaacgatcaaaggagtcaacttctttggacctcgttcagaatttatcgtcagcgggtcggactgtggaaacctttatttctgggataagaatacggaatctattgttcagtggttgttggcagatgatagtggagtggtaaattgtctcgaaccgcatccacaagtgcctttcatttgtaccagtggcctcgactgggatataaaagtgtgggtaccttcatgtgaaacggacaacgaaatgaaaggattaggggatgttattaagtccaacaataagaataggttgaattggacgtcaagaatgccgccagatatcaatgaaagtcagatgctgtggatgctttggaggcatttaagaacttctaataggcgtgattttcccatcggaccatccgatatttcaatcagatccatagtgttcgacgttgacgacgcttcggcatcgatgagttccagttccagcgattttggcagcgacgacatacctacgggatgttctccgtcataatggatacatagtaaaccaatgtatattaattaatgcaaaagtaatatgtataaaaatatactttatagtttagttttaaaacatttagagcataat

SEQ ID NO: 10005 - DNA, 765 bp, Diabrotica virgifera
  SmartBlast Evalue=3E-32; Info=Cytochrome B5 n=3 Tax=Culicini RepID=B0XBR0_CULQU
caaaggttgattgatggctgatcggtgatcctagaaaaacgtcgtcatcggtcatagatcaaggttcctttccgacttatcataaaattaaatccattgatttgtttaagcattttatcaacttaggtgttggcggtacggtgcgttctagtattaaaatttaaaaagaaacatgaccacattatactctttggccgacgttaaaaaacacaatgataataaaagtacatggatagtaatacacaacaatgtttatgatgtgactccgttcttaaatgagcacccaggtggtgaagaagttctgctagaacaggctggtaaagaagctagcgaggcattcgaagatgtcggccactccagcgacgccagagagctgatggtcaaatacaaagtaggggaggtcgtcgaagaagaacgtactgccgttaaagccaaaaatgtcgactggggagtatcgagtaacaacgagagttcatcgtcgcagaattccttcaaatcctggttgatcccaatcgctttgggagtgctcgccaccatcttgtaccgtgcctattttcaatcctgaggaaagtagatttaattgaattgtcaaagaactccgatgaaagcatttatggttctagggactattattcatataatatagcttattttctatttgataactatcaacttagatttattatccaattgtagctaggactttggtcttaaatttgttttaaaataatacaagttaaatataattaattttacaattaagtg

SEQ ID NO: 10006 - DNA, 764 bp, Diabrotica virgifera
  SmartBlast Evalue=7E-36; Info=Putative alcohol dehydrogenase n= 1 Tax=Gryllotalpa orientalis RepID=Q6RUR3_GRYOR
tacgaatacctaattagctaaaaatattaaaatgaattgcttgtaaaattattagttaataacataaaagtatcaattttgcaattgtaactacttagcagactaactacatttattttagtcatggcttttcaaataacgaataaagttgccatggtcacaggtggtgccggaggtattggtttagctattgtaaagaaactgttagagaaaaacgtaaagggcgtatcagtggtagacataaatgagaatattggtcaaaatgcagtcaaaatgcttaaagaagaattcgggccaaaagtaatttttattaaaacagatatttctaattacaatagttttgaaaatgcctttcaaatttccctagaacattttaaaaatgttgatgtactatttaataatgcgggcatacatgatgatatggactattcaaaggagattgacgtcaatgtaaaaggcacaataaatggtgtaattctcggaatagaaaaatatctaaaataccacaaatcaggcgaagaaggcgttattgtgaacacttcttctatagctggattagaaaaaacattgctaccgacatattcagcaactaagtttgcagtgaacggaataacagtaaactggggaaccagacttcattatgatgatagcaaagttagagtttttggtatctgtcctggttatacagacacggatataactaataatgtggatttaaaaaaattcagaccgcctttaagaaaagtatggatggagaagtcgcc

SEQ ID NO: 10007 - DNA, 766 bp, Diabrotica virgifera
  SmartBlast Evalue=4E-28; Info=Glucosyl/glucuronosyl transferases (Fragment) n=1 Tax=Aedes aegypti RepID=Q16T56_AEDAE
gacagcctaggtgacaccatgaatctattattgagaacatttgtacttgtgcaaagtgtatttgtgttaacggaaagttacaaaattttaggtgtgtgtcctatgccagcacatagtcattttactttggagtttaggctattaaaggcactggccgatcgcggacatgaagtggttagtattaatagtcatccacagaaagagaaaattaaaaattttcgggatgtgtccgttgaagaaattgaaaaacctctaagggagttcattgccgaaatatttgatttccccaaaatgccgtatatctctcagctcttgcgaatggtggacttccgtagagtagtgacgacacatacatttaaaaacaaaaacgtccaagatctgatgaagtcaaacgaaacatttgatttggtgataatgtcacatttcgtcaatgatgccatggttattttcgcacacagatttaaatgtcccctgataattttagctcctggaccggttactccttttaacaattttatgttcgtcaatccaacgccatcatcatatgtggcaaatgtgttgacatcttacggctcagacatgaatttctgggaaagattggataacactttcaaaaatttgcttgccgaaatggtcgttcattacagataccttccgtcgcaggatgccattttaaaagatgcctttcccgattccccacctttatcgtctataatttacaatgccagcttaatgcttattgtaacaaaccctagtttagacgacc

SEQ ID NO: 10008 - DNA, 763 bp, Diabrotica virgifera
  SmartBlast Evalue=4E-66; Info=UPF0363 protein CG9853 homolog n= 1 Tax=Nasonia vitripennis RepID=UPI0001DBBF60
aaaaatatggctacacaaggagttcgtggagtttctagagttttacaaaagttggaaaaatcggtaatagatggaaaattttatgaagcacatcaaatgtataggactttatatttcaggtatatgggacaaaaaaaatataaagaattaaaagatatgctatacaatggagcagttttatttctagaacgtgaacagcaactaagtggctcagatttgggaatattattaatagaagttttggaacaatcggaagactctaactacgaattgtgggctccaaagttaacgaacatattccgtcaaataaatatttccactccagaacgtgacacatttttagcacatgcagttcgttggtcgtctaaaggatcatctcatggacacccacaattacataggagtgtagccttggtttattgggctgaaaaaaattattcacaggcacgtcaccattttatatattcccaggatggtaagagctgtgctaaacttcttatagagttccaccgtagtcgaggatttaaagaagaagctgacttattcatagcacagactgtattccaatatttatgtttaaaaaataagagtactgcaaatcagacatttacaagttacacagaacatcatcctagaatacagggatcggggccaccatacttgtttcctttgctcaattttatatggttcttgttacaggccattgaaactaaatccacaatccacacattccttctactaatcggaaaatatgaaccatcgc

SEQ ID NO: 10009 - DNA, 765 bp, Diabrotica virgifera
tgtaggtttcaagttggtaatatcagtcatcatggctttttcaattctattcttcaaaaagtttataatgttctaaggcttcaggtcgagaacatgatgttcctatattttctgcgtcccaatatagtgtttttacttgatattctactttctttctaaaatctacatatacggtgatacttggcgattttgtccacttgtgtagaaaaataagtgggaacgcattcagtgaattgtgttgctgttgcatcgtaggtggagccaagtatcaccgtatatttgacacttacaactttgatacttcaacaactgaacgatacatttttgccattaaaaaaatcacaaacttgtttgctttcaacgacatcatgtcagatgtcaccattgaaaggaatccgttatcatgtaacatcatctgtcaaagaatatggtattgtgcctaccttcacatgcattgcaattattgttaaaaaagggatgtggatgtcttgtgatttaacaaaaggatcttaggttatcattttgcaatcttatttttctatttttttctaccactttgatgttgattccgccaaagatgaactcgggcctcattctgtctatttggtgccaaaatatctgatattccagtgccctgaccatcggttataccatcgatttacaatgatccaattagatgaagaacaaaatcagcctaccctttattattgtattcttcaatttgcacaaaaagtttagtaatttactcttgtattttgaacaact

SEQ ID NO: 10010 - DNA, 764 bp, Diabrotica virgifera
  SmartBlast Evalue=9E-36; Info=Rhomboid-4 n=1 Tax=Tribolium castaneum RepID=D2A5C5_TRICA
gctggctgctatcttcataaataaaagtaagtataatatctgagaggataatagacaaaaaaactcccaattgtattcctggtaatgtcattttgcgccaatttataaaaatagttccgatatgagcaagtaagaaagcgtatgctccagcacttgcaccataaagataagtatttggatgagtgattgtcgatgcaagtgacccagctagtatacctgcgaagtatagtatcagcactctccattttttatgaactatttccaatggtataccaagcacaagttgaactactaaatttactgctaggtgggtatatccaacatgcacaagactataagtgaaatatctccaaacttgtttccttttttggggaatataaattagtgtttcatcccatgaggcttcaccactattagtcgattcgatatatttgttcacaataaaaaatattatttgtaatattgaaataatgggtattactaagggtggtggccaaattgagaagtattgtttttcatatgtaccatctctttttaaatcttcagtatcggggactttttgatgttcttgtcttggaagaaggtaccgaatatattggttgacgtattcagacaataaatttctcttatggtccattttgaacagtagttgtgtcttttgaggtgataggaattctttacattaacaattgcaccaacttatgttaatctgatttaagcagttttgaaactaaatttagatattaatattattcaaaatagga

SEQ ID NO: 10011 - DNA, 763 bp, Diabrotica virgifera
gcgttttgtatatttcctcagcaatgaaaaggttaagaggcaatattaggatgataagagttaacctctttcattcattttattttttattcaaatttgtgccacatctgcaattttccgttgttataaagaaagctctttaattcacaacattgacttaaaaactaaaactaaaaaaaaacaccgatccttcttaaccaccaaacggataccaataattaaatgtttttttttctatatagcagtgcggtatgtaggtattttccttttctaaatttatcgtcccaattatatcaccaattacgttagttgcaccttttttaagttgccagactgaatcggtctacctacatcattaagaaaaggagtttggctgatatcatttgaagcttcaatttttggaacatctcaaatttcggaatatattaccccctatacctaccttaagaaaaatctaaactagaacgttctattttatttaacccttagtctctccacggtacttttgagtaccaccaaattctggtaagcttatatcccaagtattgaagtagatctaatttgagaattttctaataactaataaaattatcacaaaacagaagaatggagaactcatggggaggcctttgtccaggagtggatgcaaacatgctgaagaagaataacgctatagctgatgtttaatacttcagatgtcattcaaacgatttcgtgttaatacacaataagatttgtaggtactctaaaggatctttgagaa

SEQ ID NO: 10012 - DNA, 762 bp, Diabrotica virgifera
  SmartBlast Evalue=3E-81; Info=Glutamate transporter n=1 Tax= Culex quinquefasciatus RepID=B0W0K4_CULQU
ctcctgtggtaaacgatgcctgcaccgaatgagtcgcccatgacattgattgctgtccggaaacgatccaataaccagtctacagctaaaatcaaactaacgtcttcggcaggcaacccaacggtatccaacaccataaccatagtaaccagacccgcctggggaataccagcagcaccgatactagctgcggtcgcagttacactgatggccactaacgtaccaaaatccaaaggcacgttccttacttgagctatgaagatggctgctactgcttcgtaaagggcagttccgtccatgttgatggtggctcctatgggaagcgcgaatctggccactctggagtccacgccgtttttgtcttccaagcatcgaattgtgaggggaagtgtggccgaactcgaagcagttccaaacgcagtgacaatggcttctgacatattatgaataaacgtaattggattcctccttgttaagagtatgtacaacaatggcaaaacaatgaatccttgtaccgtcaatccaaccataactgtagcaaaataccatcccagcgatcctaaagttttagccatatcgtccatttccattatcttagacgataccagaaacacgatacccactggagagaggaatatcacccaggaagtaatcttcatactgacggccatcagctggtggaagaagtcggctatcactttggcttcctttcctagttgagctatagctatacccaaagcagcagctactacgactagaccg

SEQ ID NO: 10013 - DNA, 764 bp, Diabrotica virgifera
  SmartBlast Evalue=3E-41; Info=Protein BCCIP-like protein n=1 Tax=Harpegnathos saltator RepID=E2BC51_9HYME
gtactagtagtggtggacaccggattgtaactttgttttgaaatcgtattttatttaatttggcagtattatggcaggaccaaagaaaaagtccagagtaccttccaaatctgaatccgaaggatcaagtaacgacgagagtgattcgggaacttaccatggacagaaggaaatccaagcaacatttgaaggacggaatcctgaagtacaagattttcatggtattaagcaactactaagtcagttattccttaaagctcacatagacctgtcccaaatgagtgatttactgatttcacaacatggtgtaggttccgtattgaaacaaagctatggtgacagcgatgatgaggatgaagatgttgaaatgagtgacgaaaaagatgtttttggtattgctagtgtcatcaatttgggttcgcacaaggagactccatgtgtgcagcaattcttttcgttgcttgaagagctcagcaaaaaacatgcagatgaagccatccaaactgagattaggaaaatagttacagaacatagtaggttaggatttttagtaaatgaacgatttgttaatattccagctcaaatatctgtacctatgttaaattcattaagcgaagaagtggataggatgaagaaaaaagatccatcatatgattttgagtactatgttatgatatgtaaaacctgtaggtccaaagataataaagatgaagtaatttttacaaacgacgaggaagaaatcttctctacggatgctgatattg

SEQ ID NO: 10014 - DNA, 760 bp, Diabrotica virgifera
  SmartBlast Evalue=6E-43; Info=Pheromone-degrading enzyme 2 n=2 Tax=Antheraea polyphemus RepID=Q2TIL4_ANTPO
ttatactctaaaaatcataattagcaatttaattgataagatgcagaattcccgtattgtttgaaaatacttttaagtcgataatagtataagggttttagtaaaaatgaaaacttttttaatattaagtttaattatatttttagttgcacccgtttttagttttgtccatgaaaatgatggaacgatagttgaaatatccaacggaaagatacaagggcatatcttacaaagtgctgaaggtacggattattacgcttttcaggaaatcccatttgctgcgccccctattggcaaaaatcgattcaagttacctcaagaacccaaaaactgggaaggtgttttaaatacaacaaagaatacaaaagtatgctatcaaggaaattattatccaaacctagagaaaactgaagattgtctttatttgaacgtttatactcctgtgcaaccaggaggtgataaagctctaccagttctattttggattcacggaggtggcttcaactggggttctggaacttatgatgattacggtccaaaatatctaatggatcatgggattgttgtcgtagcaacaaattatcgactaaatgcatttggttttgctacaacagaagatgatgttattcctggtaaccttggtatgaaggatgtgcaactggctttgagatgggtaaacaaaaatattcgtcgatttgggggcaatcccaatcaagttataatagctggagaaagttgcggttccatggagtcggatgct

SEQ ID NO: 10015 - DNA, 762 bp, Diabrotica virgifera
  SmartBlast Evalue=2E-24; Info=Proteasome activator complex subunit 4 n=1 Tax=Harpegnathos saltator RepID=E2B9B8_9HYME
ggtacattcaacaacaatactttctcttatttatcgataaaaagtataaagtttaaatatattaagtgagattctccatatagtaagtgagaatgaaaaaattgcacgcagaaagatattttagtattgttgttgtttatttgggtttatatgactgtatttatatatatttatattttgtattagtcaacggtaatagtcctgtgggaatgacaacatagtgtcagctgtcaattatactgtcgatgtcaataaaatgcgaaattttaacataatttttatgatagcattttaacaatcttgttttattgaattctaaaccaattcctacatatctttgcgattacaacaattaaacaacgctgtataatcggtacaatatacatttgacctgatttgagcaattttcaaagttattttaccataaggaaaatctcgtcaatatcggcatgctttgacaaggttcttcagcgcagtaagtcaattattaaaataatttcctagggttgactacacgttgcttacacgtaataacttggaggcacggtaagatcgcttaaaagacacagctcttcttctgtaaatttcaatttgtgagtttcccaattgttgtggtgagttcttttaaaatcccctaaagttttgcggatagttgctggaatgggctgaggatcactgagatgcggtctgagatgctcgaaaatatccggcagataatcaggtacgtcgtagggatgagattctatgaaggcacacaatcct

SEQ ID NO: 10016 - DNA, 761 bp, Diabrotica virgifera
caaacattatttctattacactatatatttgtacataatatacagtgatgagcagtggcggctggtcagaggaggtaagggaggattagcctccccataaattttttacacacgctacactgttttgctaaccttgcttcgcgttagagatatcgcaaagggttgtttgaacaagttgttccaaataatattccgaccccacatgccaggtttcagcacggaattcgcacttttggtttttcattgtttgtagtcgggatcctgaaatcgcagaggaggcagctggccggaaaatctcacttgctaatgctccgcgtagcccagcagcgtttaaggatggtttaaggagacccggtctccttaagtcgcgtttacacgatggcaattggcgagacaattgtcagaagacaactgcctggcatgaaatattgtcttcgtgtaaacacttcaggccaattgccttgccaactgccctcacaattggcccaaaattcagttgtctcagggagtagactgaggacaatgagctgcgcccagtgagccccccaccactcgaaatctcaattgtcgcgacaattggcgccgtgtgaacggtgtaggccagtagtgctgtcttgttttttgccagttccctctagatgacgagcagtcggccatgttttagctgtctactgccatggcaatagttggccccgtataaacatcttctctttcaactggactggcctccgacaatccgcaaccacgtgatgacaattgtc

SEQ ID NO: 10017 - DNA, 755 bp, Diabrotica virgifera
tctagaggagtcttctaaagttgctaagaatgaatttggtggttttggcacataaagattgtcattagtggatgcttttagtaaatcaaataattcttcactatttaactttctttctggttcttttccttttttctgtttgatatccacgccgtctctctctcccttctttatactattttcttttgttctcaattgcatctatgagaggatctatcagatcattttcgttgtatgatgctacctttcgagagcctcttctacttcttcttaattcttgattctcttcagctattgtggttccggaagaatcttctgtgtttatctctttttgtttatgctcttctttagattttcctggataaatgtagttttcttcattttcaggaatcatttctgctcgcagttccctttcaatactgttatccaattcttcgaatccatctaactcagcaaccaaatcttctagaagaggagtttcagtggtgagaacttcctcagcaaagtcaaattctggtacagactttaggttcttcttgttagtttttgtctttttgtttaaagattctacactagtaatagtatctttagatattattttatccgaggcttccaattcattaagtgaatcgtgaacgaaatcttctaaaataggaatttcactaccgataacttcaataggagcatcaacatctgctacttctttttgatttttctttttacttttcatttttttacttacagattctacactt

SEQ ID NO: 10018 - DNA, 757 bp, Diabrotica virgifera
  SmartBlast Evalue=1E-10; Info=Endonuclease-reverse transcriptase n=1 Tax=Bombyx mori RepID=D5LB38_BOMMO
acttattgataacttgtcgcattcgaaacattagggaacgaacaacgatgttgatgtgtgcacacacttttctggtctcgatgcatctcattccttatagcatggggaaagaatttctggcttcaagtggtactaccccgaacatagaaaggaacacgggtgtcaacatgggtaaaagggatatgatttcgaactattcaaaacaccaaaccaatttagggaatttcaaacaagtaaggaccgggatataaatagcatgaaattgtcttcctcgtattagcatgaaattcgtttgtaaaaatgaaaaaaattaactgcgataaagaccttagattataactgaggagttgtgagatgctacgtgttgtacagtatgggcttgaaagctgaacactggagcaagaactcataaattaattagttagtcatttcaaatgtggtgttacagaaggatgcttagaatagcttggacacaaaagaaaactaacggggaaatatggagagaaaataagaaagttaaatatctaggacacgtaatgaggggacaacgatatgaaatgctaagactgataatacaggtaaagataaaaggaggaatgagtataggaagaaggagactgccatagttgaaaaatttaaggaactggtttaaatggatttccatagaaatcttcagagacagcggtaggtagcgtaaagatgttatacatcttacatatttattataaaattatgactctattacacaggtgtcccc

SEQ ID NO: 10019 - DNA, 763 bp, Diabrotica virgifera
  SmartBlast Evalue=2E-88; Info="Long-chain fatty acid transport protein, putative n=1 Tax=Pediculus humanus corporis RepID= E0W0G9_PEDHC"
tcttcatcagcaacagctatcataccagcttttccgtcggtctttggaacctctactccgtaaactacgatgtccttcggtccaattacgtcacttactaccaactcgacttccgtcgttgcaacgttttctcctttccatctgtacgtatctccggttctgtctctaaaatagagatatccaaactcatcttgtaccatcatatccccagaattaaaataggaatctcccttctgaaaaacatcttgtaaaatcttcttgttcgtctctttttggtccacataaccatcaaaattgtgtgtactaattttcttgtatatttttcctatgagtatacctggctcgttgtctttacatctaatacatagtccgtttgcatctctaagtggttctttggtttcatcgtcacatttaattaggcaaattgaaaatattggtcccaaatagaatggcagaaaaccaactgagccaatggtgttatccaagttaattaaattggtgtttccttctgtcgatccataaaattcaaaaagttcaggtatgttgaaagtttctacgaagtctttccaaacatcttttttgagtccattaccaaacattttttttactccatgtgctatggttggttttcctttatgtgctgctaatatatatctgcacgtttcacctatgtagtttgcaacagtacaattatatttattgcagtccgtccaaaagttagaagcagaaaacttgcgcctaagtgtcatggttactccgaaaa

SEQ ID NO: 10020 - DNA, 763 bp, Diabrotica virgifera
  SmartBlast Evalue=8E-80; Info=39S ribosomal protein L13 n=2 Tax= Culicini RepID=B0WVS2_CULQU
aaagaaatgtatcatgtttcctttattgatccgttcaatgctgtatgataaaataaaattatagaatataacataaccaaacattttttaaaaaccttaaaataatttacatttataataatgtacttgtttatttaatattatattataataatttatcctgcaagtgattagaaatgtctgctttaaaaagagttcaacagtgggcaacttttgcaagaatttggcatatatatgatgcagcctggcaaaacccatttcattcagctgaacttctaagaaaatacctgatgggcatacacaaacccatatatcatcctatgaatgattgtggagatcatgttatagtcataaacagtgcagatattgctttaccaggagatgaatggaaaaaaagagtttacttccatcatacaggatatccaggtggagctagttggactttagcttgggagttacacaaaaaagatccaacattggttctaaagaaagctgtatataatagcatggatggtaaccttcaaaggagatatacaatggaacgattgcacctcttccctaatgcagatgtccctacgaatttattagcaaatgtttcaaatcaaataaaacagttaagacctaaaccaaagaggctggatacttatccagatgaagaggtgaaacaatttccgaagattattgatctacctaaagattatattttacgataaattggaatataggctgtagtagttttataaataaaaatttatttgataat

SEQ ID NO: 10021 - DNA, 761 bp, Diabrotica virgifera
taaggcatcagtgggcggtgctaataatgctattgagatcactaagaccatttttcccacaatatacttattttgcggaaacttacggtataatctgtaaatcactctactttcaggaaaatttaaatgaaaatatataaagaactgaaaatgttgaatagttttttgaaaaaatgaggttgtattcgtacttgttgaaaccacaaactaacttggtaaacactgttgtagcaaacaataaattgagacattgtttgacaagtttaaatgaaatgtaaaaacacttccttaataaaattgagtatggtgcatatgttgttattctctccaaaatttatttgatctatgatctaggaaaagttgttgatataaatattgttaatttatatgtgatcagaaataaattttggaaaggttatagaaaaatttaaatgcatggaaatttataaatttttttaaaagaataaattaataaattagtgtttggttaattactactttgctagtggttctaggccaggacaataatggtgggatgttatccgataaacaaacttaaacatcggggcaaagggaattcgtaaaaatagattttatatacactagttatctaaaaaaaaattacatatcgtcgtcctaatctgtaaactgcgtaactcgataattctctaaaaatgagttattactgccatctgtttgaaaaagtccctgcttatcgtttaaaaaaggacgcacgtacatattttaccagatgagtaaat

SEQ ID NO: 10022 - DNA, 750 bp, Diabrotica virgifera
caattttaaaatgattttacctcgaaaacgattaacttaagagaaaaattataagagaccttttttatccagaatggttcaaaaaacctataaaaaatttgttccggccaaaaatattaatttttgcaaattgattaaaaaaaattgttaaaaaaatttggaccacttttcgcgtgggcgacttcttgaatcttattctggaatgtctcacgaatgtgattatgcaaaaaatctcatgggaatattttctccaacgaccccgccgttttcgccttttctaagataataatcagcagtcatagacgtcacgcataaatatctactctgtagactttggaaaatcgctgttacaaatgatgcacagttgttcagtgtgagttcatggatggcactttgagcaaccgcagcaagtgcaggagattgaaagttgattccccttcactttaatccttttctgtgagggatatgcgtgaattaattgcacaaaagaatcggacaggccgatgttcaaggctttctgaacatcttgatgtcttgaattctcatcgggcatttgtaccgttttgaagtggtagagtaggctcagaaatttacatgtgtggcatagaagattccgaatacgtcggtatttatttctagaatatttatagaatgactcgttaccaagttcataagtttttgcactaatataaaaaaattatgtgcacatttcctagactctaaactgtagactttatttatatttcatgg

SEQ ID NO: 10023 - DNA, 760 bp, Diabrotica virgifera
  SmartBlast Evalue=3E-70; Info="CG2446, isoform A n=5 Tax= melanogaster subgroup RepID=Q9VYV4_DROME"
gaacaatcagtgaaagttggaataaaaaatactcttggcaacgctgaattatcagtcttgctgggccgggcttggggaacatcatcagacaatcgaggccacgccggtgctgccgctgagctaacatacggcgaacccggcaactaggctacagcacaccagcttagcattgccagttagtgaatagcaataggtatggcctctgcgaaagatacggctacgttctttactcacggcacctgtcaacatttcgagcaggtcctcaagttatatccacaagcccttcgattgaaagctgatagaaaagccaaaaagcccgaggaactgattaaattagacaattggtatcagaatgaactaccgaaaaggatcaaaagtcgtggcaaagatgcccacttagtacacgaggagttggtacaatgcatgaaatggaaacagaccagggggaagttcttcccccaattatcgtatttggtaaaggttaacactcctagagctgttatggcagaaacgaagagagcctttagaaaattgcccaatcttgagttggcgatgtcagcgctctcaaatttgaaaggagtcggtaccacaatggcctcagcattactggcggctgcttgtccagacagcgccccctttatggcagatgaatgtctgatggccataccagacatcgaaggtattgattacaccaccaaggagtacctgaaattcgccaaccacatcaaatccgtcgccgagagattaaacaaggccgcag

SEQ ID NO: 10024 - DNA, 761 bp, Diabrotica virgifera
tgattatttaacattttgttgtactttcctttcatcattatgtttattacaatcttagtaaaataattggtaaacgatcagtcttgggaggatgacaaaatgttaatgtcatcagaagttgacagaaaagtaaaaacaaacagtgtagccgtaaaagcacagttactaaaaatataaccaaagtgtagaaaaaaatgcatgaaaaatagcgcagattctatttagctgcaacttcttgatgcaacaagttgcagcaacttttctgtgcaattttcgtatgaaaattttataaaattcttctgtcacactggcagatgccaaactcctccgacacctctaaaagtttctttgataatttcccacctctgatagttccatctctttttattttaattttccgtcttttgtgttattttgccggttattagagcactcatcgctagagctgggctggttactgaataattgtactcgggtacagagtaccgggtacttttcatatttgaggaacgagtacagagtaccgagtacattgctcaaaaaaagcactcaaagtacaattacccgaatttttcgggtacttatttcgagtaaatttgaatctagaatccgaaaaaaggtaagaaggtaataattatctctaaacatatttatttgtgagtcatgaaaaaataaaataacgtacaattccaacttaaataaaaaaataaagaattttaaaaattagatcattgattaatacagtaaaacctgtcagtaac

SEQ ID NO: 10025 - DNA, 762 bp, Diabrotica virgifera
  SmartBlast Evalue=5E-42; Info="Phosphoinositide 3-kinase regulatory subunit, putative n=1 Tax=Pediculus humanus corporis RepID=E0VUY6_PEDHC"
catcatctgcgtttaattgccgcgactgaactggtatcattttgttgccagccgagtctactcttaaaatattaatagatccgtcttgacatattactcctaaaccctgaccactctcacatactgccatgccattaatattggatcccagcttgtagtgctgcttggatctattggcgatattctttccctccatttttgcgcagtcccacaacctgactgaaccatcggaagaagagcttgcaaagtatggcgtatctggtagtacgcatagtttattcaccgcacctttgtgttcatgtaagtgagctaccaaaacgccccttaatctccaaccgggaggaggcaattgtggacgccaggttgcttgttccgcccactctttgttcctcagagcttcaaaataatgatcttgttgtctagctttcagattagccaattctatataacaattggattttcgatattgaatataagacctttcatgtaaactgacattcgacgatggatcggtactattaaagtgattgttgccatctggcggtggagatgaaggtctgctggacgtggatctagaaggaggtccaccagaattcgtactctccgattgtcttgtcaacacttctgagctataattccagtctgagttaatgttagtgtctatcgatcctgaggtgttagttctgtgtagtctgttggccatgtaatcgcctttttgtgcatctcccaaattataaatatgactcttaactgaactgttta

SEQ ID NO: 10026 - DNA, 760 bp, Diabrotica virgifera
ctggaataagcaactgggcatatattgcagatcctaaaccatacggttacgaattagcttccctgataaatagcacaattaatatcgattccagttcagctctccttagttttcttcaaagtgtcccagcaaagcaaatagatattgcttccacaaaaactacaaagatagaccatccacttccagtcattgaggtcgaacatgcgggagcattcttaacaaaaaatatgtatcaagcattgaaaagtggtgattttaatcgagtacctctttttattggagctaattcggaagaatacatatctttagcaacagatatggattcgctgagaaaacgtgcggcatcctatgacaaaagtttgaaaaatttggtgccacataccatgaatatagtaaacaagcagaagttggatgaacttggacacaaaattaaagaaatctatatgagtgccaatgaaacctttaaagataatttaggattagctattgcttacaattcagaaagccactttttgaatccatgcgtaagacacgctgagatccaatcacaatacacagatgtgtatttttataaattttcatatgcaggactaatgggaagaaacactaatataactttaccaggtacagaaaaagatacacacggggaagaactattttatatattcaaaagggcattaaatggttatgataatagcgatttaagccggttttcaaatgacgatgttttgactcataaaagaatgatcaagttatggac

SEQ ID NO: 10027 - DNA, 752 bp, Diabrotica virgifera
tctatttgcatataatagtaggtatccaaaatttcaagatatacctactcgtttttcgagatatgtaacatgtcgttgtcttttttgggatggttcggaaatatcaagcgaatccaaaacgtcactgcgtatatattggaaactactatcattacgaaaatctctgagattttgcaccagctttcgtattctatttttggaataaataatgtcagttgactgattttgaacaacaatgaatatcttgggcaaactctgtcttaaaaatatttaaaagaatattaaaagagtaattatttaataaagttctcaaaccgattgcttcacggatcgaggtatcgccactttcaaaatcgtcgccttctataataaaatcaaaaactttcaaaagctgttcacgaaaatctgctacagatactaaaactactagagataatctgcttagataaaactaaccgagatttaaaatttcatcgcgtctgacaaactgttcgctgttttttcgaaacaaatttgttctaaagcagtaatccgtttaggtgagctaaactggcaagaaaagacgatattctttattttttttacacgtatcatgcaaaactaaattcattatatgcatcataatagtgagtaaataaagctttgatgcaatagttttaacttttgcctggagaccattcaattcaccacacatcacagcaacgccgtcataagattgccccagtttgccctaccaatttatttttgatatc

SEQ ID NO: 10028 - DNA, 762 bp, Diabrotica virgifera
  SmartBlast Evalue=7E-76; Info=Protein transport protein Sec24B n=1 Tax=Camponotus floridanus RepID=E2A0D0_9HYME
tcagactgtatgtttccaggcagcattactatacacgtcgagcaaaggcgaaagaagaataagagttcatacgatgtgcttgccggtggctacgactatacaagacgtcatccactctgccgaccagcaatgcatcataggcttattgtcaaaaatggctgttgatagatcgatgcaatctagtctttcagatgcccgcgaggcgtttatcaacgtagcaatagatattctatcgagttttaaaatgagtctgaacatgggtagtcccgtaacgggtctgttagtgccgaattgtatgcgaatattgcctttgtatatatcagctcttcttaaacatttagcgtttagaacaggtagttctactaggttagatgacagagtaatgaaaatgatagagatgaaaacgaaaccattgtacatgctcatacaggatatataccccgatctgttccccatccataatttagaacaccaagaagtgatcatgaattctgaagaggaaccagtttctatgccacctaggttacaactcaccgccagatgtctggagaataaaggtgcgtttttgctggatacgggcgagcatatgatcatcctagtttgtccaaatgtgccacaagaatttttaaccgaagctctgggagtttcccaatatagcgccattccggatgatatgtatgaaatacccgtgttagataatcttagaaatcaaagacttcatcaatttattacatatttaaatgaggaaaagccgtatccggc

SEQ ID NO: 10029 - DNA, 762 bp, Diabrotica virgifera
actcagtaattcctttatttagttagtataataataaacaatttagattttaagccgcgcatggaccagaaattgattcatcgtaaattttcaagaatttatctaagttggcagacgcgtcacattggtcagtaaacagctttggaaaacatttagaaaccccgacgagaacccgacatgcttcagctttactatgaggcagctcgactttgtctacacctactgcagctgcttcaacacattgcctatatttactaacagctctacttgactccacttttttgtaacattgttgtacctcgtcagatcttaaaacatctttgttggcatacaaaaaatgtgtcactgaatttctcattgatataagcaaatctggaaaatagctctggctctcctttaagcaggctttactaagtctaaccacttctttgctgcagtcattaatgttttgtgtaaattcagcttctggtacagcatatatattttttttacctgcacacgattcgacctcatcaaacgcttcctcaagtttagttctggcttctgctgttattccatttcgcttgcaattttctattatatccgagcgggaatttacaagaaatcgatttcggtttgaactagatatatctcttataagtctgtaatgagcacttctcttctctaatgcatattcagcatttgagagagcaacacataataggattgaaataatacaaaatttcattatagcactgctattgtagtacttatacgaaaaat

SEQ ID NO: 10030 - DNA, 752 bp, Diabrotica virgifera
  SmartBlast Evalue=2E-11; Info=Endonuclease-reverse transcriptase n=1 Tax=Bombyx mori RepID=D5LB38_BOMMO
ggaccagagaggcattattttgtatgcgcgttctcttagaaaaagttgtaagttccgaaagaacatttatgcttgtttcatcggttcgagaaggcatgcaactgagtacaacacgatacacttttcgattgcctgcgggcatcaggacttgaccactatgatataagactgctaaagtacttattacaatcaagtagcctctattcaagttggagatagtcctactgaaaaactacccatcaaacctggagtacgacagggttgagttttgtcacccagtctattttaatctgtactctgaagaaatctttagggaggctttggatgacaggcaagaggtagcggagaagtaatcaacaatatcggatacgctgacgatacagccattcctgtagaaaatttacaagatcgccagacatttggttaggtctggagacattagtaaatctagttagtgaagcaagttatcggacaggccttaaaatcaatatttcaaaggcaaagtggatggcagttggaaaaattgatatagatcaaggtctgctttctgttaatggagaggagatagaacgagcaaaccattttaaataccttggcagctggttaaatgtaggtaaattctgactctaatgaagagatattaaccaggatcgaaatatcatgcaaggcttttatgacctggaaaccagttctatcgtgtctaacagaatcctgtagatgaatgttcgcaggtaggtttagaaatgttacat

SEQ ID NO: 10031 - DNA, 763 bp, Diabrotica virgifera
caacgccatgtcttttttccgtaaccctccatttgtctgaacttcatatgagtggtttcatttttcgataataaataccaaacaagagaaaactatatccatctggagtattgctaagtaaataagtccccatggattccgaagattctcgggaggcttcctctggaagtggaagcgaagatgatcaaggaagaatcagtcgtgctagcaaaaaatctgctggtagagactcctacaaatccagatcttcatcaaggtcatccagtgctggtagcagggctcattctgcttcttcacaaagttctgctgggagtagaagtagaccaccctctccagaagcagataggcttcaatctagatctaataaaagtagatcacctgattctcgttctagtaggagtaggtctccgaatgaggtatcagctgcaccaagaagtcaatctcccaatccaagatcacctaaagtaagatctaaagaaaaacaaggtccaagatcaccaagttcatcttcctcctcttcatctgaggatgaagaaccaaaatctcctgaaccggagagacctgtatcaggagggccaagatcaccaccctcttcccctcccaatgactatcccaaatctccaagtccagctccagatatgttaagccaccctagatcgccatcaccaaatcaagttagatcacctttaccaaaccatcctctttcatctccaccaaatcatcctaaatcacctccaatgaaccatccccaatcaccctcacc

SEQ ID NO: 10032 - DNA, 760 bp, Diabrotica virgifera
  SmartBlast Evalue=7E-20; Info=Grain n=1 Tax=Tribolium castaneum RepID=D6WKS0_TRICA
gtaaaccgatagtagtagtagaatattgtaagtgccgtgaaaaataggacactatgtgcacaagcgcgtgaaattttacgcacaatgttttaaaatttacgcaggagtatgcagaagaaattttactgtgaaacgggtaacaaataaaaaaccgaaaaacatttgaaaccctattgacctgacaacgtcgcgtaaccaaagttttcgatcggtctgaccttgggaggttcagatatttctgtcgacctatactttatatttagaaaaatggtatacactaaactttaaacactacattattaaaattgatcctaagcattggcaggtgggttgttactaccatcgtcctcttctgtatcgactcgaaaccgtgcttgttgtgaggtagatgttatgacgcttgtctgttcgtcatctgtggtaataattggttgcaatggctgagcatttaagcctcgaagattctcagcagcgtattgtctgtaaggtccttgagtgggtgaaggatatacattaataggcaactggtaggtgtcctgttgtatttcaagttctggagcatgttgatattggtagatgttaccaagcctgacttgaccagatgggccaggatttccaccggagtttttgggtcttctcttacgtgtttggatgccatcctttttcatactcatcggtcggttaaccccgtgcaatttaaaatagagaccgcaagcgttgcaaactggttccccttgattgtttcttcgccaaagtgttg

SEQ ID NO: 10033 - DNA, 762 bp, Diabrotica virgifera
  SmartBlast Evalue=9E-26; Info="CG2663, isoform A n=12 Tax= Drosophila RepID=Q9VNB4_DROME"
gtgccctcgtgtacgaatatccggctggccaatttgggcttgatcagttgtttgagtgcattaatcgtgttaacggcaaatgtaggacagttgaccatgtgtatctttttcagcttattggaataaactttctcgactattgtcagcattttcttcaaatggaaaggcgacgatttaaaaatatgtcccattttcacgttttctaaatcgataacaataatttcgtcatataacacatcctcctgaaatcgcacttccatattgctgcaaccataagccatatacttgtaaaaatcgaagttgtcggtgcaggtgtccattagtttgcagaccgtaactcttgaaccttcttcagttcttttgggcaaaggaaagaaatataattgatcagcaatttttttcagatgtcgcttattgatattagaatggtcatagacttctggcatcatatggcggatagtgtagtacatatctactttttctttagtttgttctatgctaaacttatttcctaataaaaagtttcttattaaaccatcacttcctacttctggtaagtgatgttgagttttcatccagtctttgataatgtgcatatcatcttccagttgttttagggtttttccatttcttttcagtgccctacccaatgcttcgtcttggttccaagtcagccacttcttcgtatccatggacactatcattttacactaacacattgatattattattatgttatactatcaacaaacacgttgcttt

SEQ ID NO: 10034 - DNA, 764 bp, Diabrotica virgifera
cggacttttgactggcactgtaaagaaataactatgtagtaacatatttcagccaaaataatatcagtagacttgagacatcagtaatgagtaagtgccgacagaataagagtgatggtgagttattcgtttttgtttgagttgaaaaaaaaattgcacattttcataacattcatatgtacattatttgtacatatttttaatccggtcgtaattgttgtgaatatacgaaattttttgacaactatataaaatatttacaaaaaaactaattttactgtaactttagttacaaagtagcaacagcgtagaagataaatgcaaaagtggaaatatctacttattgcacattttatatcttctatctcagtttttgatgatttattctgtacaggaacatgttgagtgccagagctaatttgtaagtattaaaatacaagaaatttccttaaagtgcaacgcatttaacatataaagataaaatgaacaaattacaaagaaatcattagttttttattacttgaaactagaattatatagatacaaggagctctctttagtttatacgctgctggaaatattagaaaagtttatattcactcacaaaaactaatgataacaatagatataagttaaataaatgactatatattcagcataatctaaattaatatgaaagactgatgagtgtaaaagcagagactcaattttcaacataattgttataatgtccggacaaataatccccggacaaataatcccag

SEQ ID NO: 10035 - DNA, 758 bp, Diabrotica virgifera
aaaaaattttattagttttctgagtattccaaaaaaatgaatgcatttaaatagcattggaccaagattttgcgtataaatcttctctaagtataaatgcgacatactaactaaatagaacacaatattttatttccattcattctttcagaactattttttcacatacagtatgcagcacataaatgtattaacaatttaatattgtttgcttccagacgttgttctgtatatatagaagcgcttgtttaaacccaaagaacaatgtcttatattgtttgttgtcctgtacaaaagtgctacctaatattattttaaggcgtgactgataaaaacgaaatgtatgcgataaaagtatctataagagaattcattttaattttaacaaaggtgtatttattcgtaaacgttttgttttattttcaatttcatttcaaaaactgtacgtttttatatgaatatctgatactttaatgctggtaaaagctagtaataaaaaattatatttatagagacaatagcgacaaatttaaatataccaatatattaaacgacgtcgaatgtgcactcatacccccaccccctgtcgtatttcgtcgaaataagcaagccccccctccctcttctcaatgacgtagtttatggatgttccatagacggtggttggaacgttcggcaaagtctccgtgttcatgccgtccctcgtttacaacaacagacggcagccgtaccgtctttacgtacccagtagcataggg

SEQ ID NO: 10036 - DNA, 759 bp, Diabrotica virgifera
ctttattttctgattagtgtaatgttttttaaattaccatatcaggttaaatacagtttaaccgtcctctgatattcggacttccgtaaaatgacgatttttttcaccagttttaaaaaaatgtaagctttctgaaaactcgtttaagacagttgacatttataatttagaaacaaagtcggtaattttgtatgagggcgggcaagcagtaaaatccggtaataactagtttaaaactgtaaaaaggagagcccagaaaaaatcagttttagttttacatcagttacaatgagttctacaggtatttacagcggtttaaatgaaaattccagaaactccagtagggtcttaagaccgcctggcgggggccatacagatttatttggtgatgctgctaacgactccaaaccgtcacgaagagaccatggaagaaatgcttcttccattttagagggaacaaacagtccaactacatccccaacgactccaacaaagactgtagtagcacctccaccagtgccacaagccaaggaacctgttcctcaacaaccaaaaggccgggttccacctggaggtttttcttccggactttggtgaattaaacattttacatttaaatgtgttatgactgcatgttacctctttacatctaatttttgacttgattattataaaactaatcgatgttttaacgcgtactggtaatttatactgtagcatttttttaaaatttataaataaagcattttttctgtgtaa

SEQ ID NO: 10037 - DNA, 758 bp, Diabrotica virgifera
aatgctgcatcatgtataatttgaagtttgtttgtccgtttgttattaataaataaatatcaataaattaatatattataatgtaatttaatgtaatttgtaataaaagttcctttaacatttttttttatttcccaaaattaaaaatacattcttcattgaagtccaccgaaggtattttttggacgtccgatgaacgtccaaataacgtcctctcaggacgttagatggacgttcggcagcacgacattggaccaaactgggacgtcctatgaaggtacacctatgaagggacaccgaacgtccgaggggacgttcggtggacgtccattggacgtttggcaacgtggcatttggactaaactaggacgtccgattaaggtccaatttacgtccgattaaggtccaatttacgtcccctcggaccttagatggacgtccaacggacgttcggtagcgcgacatttggaccaaaataggacgtataaaggatgttcctcggacgaaaacggacgtccttaaagtccgtgaaggacgtccattggacgtccttgtgctattagggatatatctgaatttttgcacctcgtgcaagaagttttgacttcgttagatgttgcattgtaaagatggatctatttcctgccattatttgcgtttcaacttcccgtctattttgttgtcatttgtgattgttgctcctaaatacactccggtgagtgaatgttcaagcagtttccaaactgttaatctaaaaa

SEQ ID NO: 10038 - DNA, 762 bp, Diabrotica virgifera
atcgtcatttgggtataaactatatacagatagatttgaaaaatgagattccgttaaaatatttgttttatttatcattctatgccaataccttctttgatagcttctcccaaattctggatattctccgaaaagttcctgaccaagtatgtatgatacggaactaactggctatcgcacataagacccagcttcacgtggtcagaatattcatttaaacataatgaaatgcacgtgtttgcttgtggaggtcttagataaataacactactaacttcctgtccccaaatggtcctttgtgttacattaggatacctactggtgatctcagcaacacttactgcatacttccttgacaaatatttcaaatagatactcagaagagttgctggcaagaatttactcagaaatctaaacttcgtttgcaacatcgtcaacaggtgagacagtccttggttttctagcgacgcattaaacttgtttcttatctctaacaaattttctatttctgtggtgcctttctttggatcaggaacagttagactaagacacagtataccactaacagcatcttccggtctaatattgggtccagtagaaaagatatagttagaagaaatgtttctgatcgtgattggtagtttggttggaatataatggttggtttggacaaaatatttagaaaggcacatagacaccgctgacaacattatctcagtttctgagactcctgcctgttttgcgacagctttgatggtttct

SEQ ID NO: 10039 - DNA, 760 bp, Diabrotica virgifera
  SmartBlast Evalue=1E-114; Info=DNA-directed RNA polymerase II subunit RPB3 n=4 Tax=Apocrita RepID=E2AM00_9HYME
tcctactctagctatagactgggtaaaattagaagctaactcaactgttctcagtgatgaatttttagcacaccgaattggattgataccattagtttccgatgaagttgtacaaagattacaatatcctagggactgcgtatgtctcgatttttgtcaagaatgcagtgttgaatttactttagatgtaaaatgtacagatgatcaaactcgacatgtaacaactgccgattttaaatctagtgatccacgagtcataccagctacttccaaacatcgtgatgatgaatcctcagagtatggtgaaacagatgaaattcttattattaaactgcgaaagggtcaagagcttaaagttaaagcgtatgccaaaaaaggctttggaaaagagcatgccaaatggaatcctacatgtggtgttgcctttgaatatgatcctgataacgctatgagacatacattatttcctaaaccagacgaatggcctaaaagtgaatacagcgaattagaagatgatcagtatgaagctccatataactgggaattaaaacctaataaattcttctacaatgtggaggctgctggattgttgaaaccagaaaatattgtcatcatgggtgtagctatgttaaaagaaaaactgtcaaatttgcaaacacaactcagccacgaactaacacctgatgttttggccattccaatttaagaagttaattacaatcataggtagagttcattcaaccacagttatacatttttt

SEQ ID NO: 10040 - DNA, 756 bp, Diabrotica virgifera
ataatcgaaaataaaataattttcgaattatataatatatctacgaatataatctgaacaatttgtaagactatacaaatcaaagaaaataccattttataaatgcaataaacacaattgatttgtttttttaccaaattgcaaataaaatgtgacaattgtcagatttaactaaaatgccatgtcactaaaatgtatattgtcacgaacttaccttttttctatcatttgtgacgcactgaaaaatgctcatgaaaagaagcataatacaatttaaaaatataggtggtaccaaaaataataaaattaactgtaggtggtacataactcaaaagggttgagaaccgctgctttaagggctttaagtcggaagttaattaattcatatattctagtgatgtcccatggatggatcgtattcgcttcaggaagtctggatgaataacaaattgatctgacttacttgtttatttaatcactacatactgcactgttttactatggagaagacacgaattagccctcgcgtagaaataatactaggcaaaatctacattaatgataatgtacaaacttccgataatatcattacttcaattcgatctcgtgtttaccttacttgtatttatattaacagtttaatgtcaaacgtgagtaggtcggaaagcattagatggccaggcaaggccgtattatcataatatccaaaacattacacattttatttttatacttttctgccttcacatacacttt

SEQ ID NO: 10041 - DNA, 761 bp, Diabrotica virgifera
atatggggcaaacgagcattctatgtttattggtgttataaagtagataatacgtattgtttgctataaagtgcaatgcaaatattttagtaacatactcaacttgtactacgttaagaactgtttcattcaaaacaaaacaatgaagaggataagtgcatgcatattaatactttcaagtttgtggattaaaagcactcttcaatcgcctttattccacaaatcgatagaaaataaagagaaaaatgagacgctccttccacatattacctcttttctcaactcagctaatagtttacctgaaaaaatttatgtcggagatattggtgccgataatagaaaagatacaaatagtaatggagaaataaattccgatgaaaattcggatgaagcagagaattcgagcacaatggataaagccaatagcaccccatctgatcaaaccgatgccgccgaaacagcagatgatttcaatacaacagcggacaggtccgatacaacagcagacatttctaatacagcagtatatgattccaatacaactgaagatgattccaataccaaaacagacgatactaatacaacatcagatgattctaatacaacaacaaacatttccaaaacaactgaagatgattccaatgcaacagcagacgatactaatacaacagcaaatgattccaatacaaaagcagatgattcaaatacaacaacagatatttccaatacaacagcagatgattccaatacaactgaaaatg

SEQ ID NO: 10042 - DNA, 749 bp, Diabrotica virgifera
  SmartBlast Evalue=2E-16; Info="Uroporphyrinogen-III synthase, putative n=1 Tax=Pediculus humanus corporis RepID=E0VBP6_PEDHC"
agatggtatataatttagatggaaataatataccatccacctacacgtgaggtctttacctcattagtaagtttttaatctacaaattgtatagtataaatatcagttttgtcctaaattcattaaaacattattgtaatattaccacagtacactttctcactctcactgaagttgttataaatcatcatatttattaatgtatacattaatcttatattggcaacaaaagatcaaggacatcctttggattcggctgcttagctacaccaaaaacaggaagacttaaatctttcatagcagcctccgttgttggaccaatggccattaatttacttgactcaaacagaggcagttttctaaggtattctattgaactttctaaaccagaaggactaaaaaataccataaattctggagtttctgtaaaattattagtggcatcactaatttcttcttcgacatttggattatctattgtatgatatactaacacaccttccacttgaatcttttgtttctcttctactttactgaaactatcgcttttcaaatttccatgaggatataaaaaacaggctgtcttggtcatcaacaacttttttcatgtattctaataaatttactgcatttccactatcacttcccctgcattcaaaacctagactgtgtagggcttctgtgtaagttgctgttcctaccacaaaattatttttcgactgccaatctttgatgttgatatcagcttc

SEQ ID NO: 10043 - DNA, 760 bp, Diabrotica virgifera
  SmartBlast Evalue=1E-134; Info=Regulator of nonsense transcripts 1 n=3 Tax=Apocrita RepID=E2BGD3_9HYME
atcgcctatttcaccctcgccaaaaccgatggagatatgaagttgatgcacggagatgaattgagattgagatacgttggagaaatgcacaagacatgggcgggagtcggacatgtcattaaagtacccgataattacggcgaagatataggaattgagttgaaaaacggttctggggctcctgtggattgcggaagtaactttgtagttgatttcatttggaagagtaccagttttgatagaatgcagttggcccttcgtaagttcgccgtcgatgatgcttcagtttccgcttacatataccaccgactgttaggccacgaagtggaagaagttttatttagatgtcatctccctaaacacttttcggcccccaacttacccgatttgaaccgatctcaagtttatgccgtaaaacacgcactacaacgccctctatcgttgatccaaggtccacctggtactggaaagactgtaacatccgccactatcgtttaccaacttgttaagcaaaatggaggaccggttctagtatgtgctcctagcaacaccgctgtcgaccaactcacggaaaaaatccacaaaactaaccttaaagttgtcagattgtgcgcaaagtcgagggaagcaatcgactcgcctgttagctttttagctttacataatcaaattaggaaaatggaaggcaatactgaactacaaaagttgcaacaactgaaagacgagacgggtgaattgagttctgtagatgaaaaacggt

SEQ ID NO: 10044 - DNA, 761 bp, Diabrotica virgifera
  SmartBlast Evalue=3E-99; Info=Proteasome alpha 3 subunit n=2 Tax=Obtectomera RepID=Q1HQ44_BOMMO
atcaatttcaagtttcaagaaaaagcaaatcactacgacttgccggattttgtagtagtgttaattttgtattaaaaaatcaaaatgagttctattggaactgggtacgatttatcagcttcccaattctctcctgatggaagagtatttcaagttgaatatgcaatgaaagcagttgaaaatagtggcaccgtaataggcctccgaggtacagatggcattgtattggctgctgaaaagctcattatgtcaaaattgcatgaaccaagtacaaataaacgaattttcaacattgataaacacataggaatggcattttcaggcttaatagctgatgcaaggcaaatcgttgagattgctagaaaagaagcatcaaattatagacatcaatatggttcaaatattcctcttaaatacctaaatgatagagtaagcatgtacatgcatgcatacactttatacagtgctgttagaccatttggttgcagtgtcatcttggccagttatgaagatagtgacccatctatgtatctgattgatccatctggagttagctatggatactttggatgtgctacaggtaaagcaaaacagtctgcaaagactgaaatagaaaaattgaagatggggaatctaacatgcaaagaacttgttaaagaagcagccaaaatcatttatttggtccatgatgagctgaaggataagaattttgaactggaactttcatgggtatgcaaagatacgaatggtttacataccaa

SEQ ID NO: 10045 - DNA, 758 bp, Diabrotica virgifera
  SmartBlast Evalue=2E-19; Info=Transposase n=8 Tax=Plusiinae RepID=A1XCQ5_TRINI
atgcccgtgatatgaaaataaccataaatgcccatgtggggtctcctagggaccccactaaaattttcaatttagtaacgtcatttagcactgactaaaaggaaaacacggttaaaaataattttaagcatatttgaataatttttatttatttttcatacaaaattaacggcttttctagaaacaaattattttcaattcgaacaaaattaaaattaaataataatataagcatataacttttagttgcaatttttacatacaatagttttttcttcttttctgtgcacctggcatataaattttttgcaaaaagagcaaacggtattcacttttctgtcacagtttcgcggacactggtaacaacgagcacgtttcttagctgaatggacggattgagttgcaacttcggtagttgggtttaccattggtatgccacaatcttttagagcagattttacataggctttatgttttatatatttcgctcttttttccatgttgtttcgagcaagctcagcccctaattgtaacaggaaaatacgtcttcgtgaaaaattatttttcttccaatcaggatttttttcaatgtataaaatataggcatttagtgcacatatgtctataatattcataaagagcctgaatggccaacgagcagttcttcttttacaggaatattccctaatcagtttgtcggcattatcaacaccacccttggtattattatagtctaaaatcatcaagggtttgttttg

SEQ ID NO: 10046 - DNA, 758 bp, Diabrotica virgifera
ggccaacgccgagctcatgcagaaaataggacagctagaactaaaagccaagaaatcgctaccgaaggtgaactccgcattcattctgtcgacgctagcgacaaggtaagagaactccaggacaaagtcgccgatcttcaagcagaggtcttaaggctggagaggaacaagaaggcttcgctagcgggcgtctatccggaaacagatcttcatcaatagacagcacagacgaagactctagattagttctcgaagattccatgctgcgtcttaacatcgtagactcccccaccaccaataacgaacccaactttagcgaattgtccaaatctgcgagcgccagaaacggcaaaatagaagtagattccaatgcaaaagcgcacaccaagttagatgtatatattagcgacaactctgcgccgcaagtctgacacatagactgagtataggatcatttctcaaattgttgtagagaacttttctgcaaggctgtgtttcgtcttaaggtatcagaaacaaaatgtacttttaatagatgtataacctaacataacctctaaatttttgctcctaaagcacaacattaaacttgaattgaagtttgcatatctaaaaccttctagacgtaaaaataatgatgattttactgcagccttacagcgaaaggtgatagaataatgtagaactgtctactagatcaattgagataattttatacttgtttgttattcaagtttgggattgcgaaacattctaag

SEQ ID NO: 10047 - DNA, 739 bp, Diabrotica virgifera
gtaaaatccgtcttatgattgtatacctaccgaattataacaaaaaaaaatggctaatttcgccgaatatttgtaaataacgacagcgaccatgtctgtagcttttaaaatgatttgttgtctcgggtttttgcgattatttacttgtctcttttattgtaaacgactttttgtaaatattgtacaataagcaaaaaaaaattggaagaagtgtataaaatatattatgccagatagatttagttgtagaattttgtattcgagatagcgtgattttctcaaagtaatttggaaaagttggattcgcagtcgatgtcacgacttgattgagcagtcgtaactctaacgtaaaactccttgttcccgctaagggagaggctcgtgcattttctacaaagctgtaaatattgtatattcatcagctgattataataacagtataaaagtcggtttagattttgaatatttaaatgccgtcttaggctgtattgtataatgatttttgtggtacattcgggccattgcttttatttatggaaagtacactagtcaacaagtgaagtaatactacttcattaataggaactacaaaactcgctggtaatgtaagaacgatataaacactttttcattaataactatctgtctacttaaagcgttcgtcttctttgctactcgatcctctaagtatcgagtatgtgtaagactctagatgaatctttagacctgtatatttata

SEQ ID NO: 10048 - DNA, 759 bp, Diabrotica virgifera
  SmartBlast Evalue=2E-98; Info=Transmembrane emp24 domain- containing protein eca n=7 Tax=Sophophora RepID=TMEDE_DROME
actcggtgtacttgggtgacgtgtatgcgtgtagtgaaaaatagaaaataagaaaaatagtcaaaatgggcaaaagtgtaccatatttctcaatagcaatattttttattctctttgaaatctcttcggctttatatttccatattggagaaactgaacgaaaatgttttatagaagaaattccagatgagactaatgtcatagtaaattacaaggtggaactgtacgatccaagaagtggaggtttcatgccttcttctactggtattggtatgcatgtggaagtcagagatcctgatgataaaatcatattatcaagagtatacagtgcagagggcaaaatctcctttacttcccatttacctggtgagcatgtcatttgtatgttctctaacagcacagcttggtttagtggatctcaactaagagttcacttggatatacaagttggtgaacatgccattaattacggagaaattgtacaaagggaaaaactttctgaattacaattaagggtcaggcagttgattgatcaagtggaacagatcacaaaggaacaaaattaccaaaggtaccgtgaggagagattcagacacactagcgaaagtacaaactcaagagttctttggtggtcaatcacccaaactgctgtgcttctagttatgggaacctggcaaatgagacacttaaaaaccttcttcgaagccaagaaacttgtttaaattcttaatttctttgttattattttatttaaataaa

SEQ ID NO: 10049 - DNA, 746 bp, Diabrotica virgifera
  SmartBlast Evalue=7E-22; Info=Reverse transcriptase family member n=1 Tax=Glycine max RepID=Q1AKH8_SOYBN
tcgtaattctgttgggttgcatcctcattaaatgcccataccaattcatttgtctcttttttagtttattcattattggttcttggttggccattctcctaatagtctcgttgcttaatctatcccattttgtctttccaactatccttcttaaatgtctcatctccattgcatttattctgctcttatgtttttccagaattgtccagttttcacttgcatagagcacagtcggtatcactattgtgttatatatgtttatttttgtctctcttgcaagttctcttttccccagtattggggctaaggcatagtataacttgtttgatttctttgctctatttgttatttcccagtctatttttccgtcgttagtaatgatacttcccaggtattcgtaagttgtaactatttccagttctgagtttttgcattttatctttatttcattatcttctttgccgttgattatcattatcttactttttcctcgtttatttccatttttagctcttctatttcctctacccatatatccattagtttctgcattttgttctcggaatctgctattagtactatgtcgtccgcatacattaaggactctattgttaccggttgtaatctatggtatcctatattgtctgtagttggttggttcttgctctagtttttcttattaattcgttcattacgattatgaatagcaaagggctgagactatctccttgtttaatcctctattc

SEQ ID NO: 10050 - DNA, 758 bp, Diabrotica virgifera
  SmartBlast Evalue=3E-99; Info=E3 ubiquitin-protein ligase UBR3 n=1 Tax=Harpegnathos saltator RepID=E2B3J0_9HYME
agggcgtttcgatgcggcacccacgttttttccgtatgatcgaatcgatgcgccagccactgttgttctagtagtttgtatcttgctgtacttaaatataacggtttgccacgctttaaatctctgtcctcctcttcgaaatcgtctaaatacaaggaaccccatagacacgcgcggtgccccctaatgactataatgtaggttgaagtaacgactagaaatatgccggtgcccgctccacattcggcggcgtgcgcaacggcctcgcaaacgttttgttgtttgcaacagttctgcttcagacatactatcgttccgcacaacaaacatatgctggtttcttgagctaccgattggcattgcctgcaaggtcgttcgtggtaatacgtaaatatcttttcatattccctaggtaattgcaataacctaggaggataccacagtatatgctgctccgctagcaaccctttggcggccagttgactctttccgacgaacactcccaactgctcacaccaagctctaggagtcttcgtttccagtcccatatccatagaccacgttagagctacggaggcattgaaccagccccagtccatggattcggtaaccagttcaagatagtacactaatcggacgaattcgttgttcgcttcgaaaatatccgggaggggttgttgatagaggtggtgtttgaggagggcggcgatgcggaggaacggtagacataattttgcacctgcagttctaatccaacc

SEQ ID NO: 10051 - DNA, 754 bp, Diabrotica virgifera
aacatagtgtagtttacctccgaggtccagatatataaacttaggtattctaataataaagcgtaaaatatgacaaacaatataaataattaacaacaagaaatagaaaatacaatatgtaacaaaacaatgtgacaagaaatatagaaatatattgacatgtagtattaaattcctataattcaattgctaatagataaaatgtatatcatctttacagatactagatattacactaaatatgtatacagtacaacctgccatatccggacggttctgcgccgtccggatctaccgaaatctaccgagaaaggcagtcctgctgttggacaacgcactaaaagaagaactaaaagatggcgaaataatgtattatagaatctataaaactgtctatcgacgaaagttattgacggcgttgattactggaatgtatgaaggagaaaacgtttcagagactaaaagaagtagtggtcttgatatccggattttttcatatccggatcggtctgtcgccacattgatccggatatggcaggttttactgtacatataaaaaggctcccaaatcatatagatgatagctcaatgaacattaaatgaggcacaatatgataaactaataattatcggaatgaatttaattatttaaataatgtatgtaatcatgtataaatttgtctatgtataaaatattgaccctattttagagacaataggttttctttcttgtgtcaaaatttgggatacctgt

SEQ ID NO: 10052 - DNA, 760 bp, Diabrotica virgifera
  SmartBlast Evalue=1E-88; Info=Ubiquitin-specific protease n=1 Tax=Tribolium castaneum RepID=D6WDD8_TRICA
tcagtgacattttcgggggattattgaagtctaggattcaaagaactggcgaccttaatactgaaaatattcaaccgttcctgaccttacagttgaacatagagaaagtgaaaacagtgcgggaagctctggaggtgctcgtcaatagacaccagctggaaggactgacttcgtccaaaaccaacgaggaagtggaggcctggcagcaggttttactagacgagctaccagtcattttgattttacatttgaaatgtttcgactataagcaagacggctgcacaaagattgttaaggctttggagttccccgtcgatttgaaaatcgatcagaaattactggcttcaaagatacaaatccagaaagaaaagcactacaaacttttcgctgtggtttaccatgacggtaaagaagccagcaaggggcactacgtgacagacgccttccatgttggctacagctcttggttgcggtatgacgacgcctcagtgaagactgttcaagaggagcaagtattgaagccgcaaggaactagggttccgtatttattgttctatcgacgtagtgataccattagagggaaatagtgtgccaggttgttgacgcctataacgcgatttaggaatctttcgactcagattaggaagggtattaaaagagtgattggagtgagatggaacaaaaatagatgaattttttatagtttttacagtctttggcatttatttctatacacaaaactataaatgataacgtataa

SEQ ID NO: 10053 - DNA, 757 bp, Diabrotica virgifera
gggctattggctcttttaggcggctttaagaaaatatcaatttttaaatggtttttttccaaaaaattattggattaatattggagaggatttattttatccccacccccctaatattttagagttaactttatttgaacataagtattttttgttacaatcaaacgtaaaaggtatacattgcgactaacaactaagattattttaaagtctaaaatggcgaaatatgatcttaactataaatgttcaaaaaaaaaatctgcgtaatactgtttaatatggttcgtacgtaatagcgataaaagatcttccttcttgctctccttcatgtttagtttatttttataggtggtctttaaaatgggaacagtctggaatagactagtgcctcttctaagcaaatttatttcactaaattcacttgtagaatactttctttttatataaagaattcccatgttacttccatcaatttttaaaactttaacttcagttatttttagccaatttcatataaactcaatttttacttatttttagtattaaaaagtttaaataaaataagaagtaggtaacctaactttttcacttcagaagtgtcacaactcaaaatagtttcagtactgctaactgcataaaataatccacaaaaaaatttaaaaaaattaatgaaaagaagcttagaaaaactgaaatatttagttgaatttatttaatgaaaaatacattatgttttaaagcacataaaccaaaatat

SEQ ID NO: 10054 - DNA, 759 bp, Diabrotica virgifera
  SmartBlast Evalue=4E-60; Info=Dual specificity mitogen- activated protein kinase kinase 4 n=1 Tax=Harpegnathos saltator RepID=E2BS01_9HYME
gtcaatactatattttccggaaaatagcaaaatggcagatcaaatagacaatcagcccagtccagttccaagaagacctggtatgcagaacatcgatttctcgcaggccagcaattcaaatgcgttctcttttagacctttatctgggggcgataaagggggggttacgcctgcgactaatcgccccaaaatgagcttgcctcctgtgacaaaggcaaaagagccacctatagttatacgtgaaaccaaactgaaaccttgtcccccttcgatgacctctgtaggaaagcttcagatcaagggtcttagctacgacttcacctccgaggatcttcaagatttaggcgagatcggcagaggaggtttcggtactgtaaacaagatgattcacaaggcgacaggcacggtcgtggcagttaagaggatcagatccacagtcgatgaaaaggaacagaagcaattgctcatggacttggatgttatcatgaaaagtagcgaaaacaaatatattgttcagttttatggagcgctttttaaagagggtgactgttggatatgcatggaattgatggacacttgcctagacaaattttacaaattcatcttcgagagattaaaaactcgaatcccagagccgattctaggaaaaatagcgttagcgactgtaaatgcactgaactatctcaaaggaagaactcaatatcatccatagagatgtcaaaaccaagcaatattactttagataagagaggtaacatt

SEQ ID NO: 10055 - DNA, 754 bp, Diabrotica virgifera
  SmartBlast Evalue=2E-27; Info=Kynurenine/alpha-aminoadipate aminotransferase mitochondrial n=1 Tax=Caligus rogercresseyi RepID=C1BQK8_9MAXI
aactctctataagtaatgtagtgtagtacaatatttcgccataactcttcaagttcggcaatgtactacataatacttgaattctgagtaatttttagttaaattcaatataactgtatatacaaaccatatcggttatggtcagaattataagcttccctctttaatggataagatgtcaacagatcagcactagaaacttggtttgagcttccagtaagcaaatttgaaggaataccgttccatcaaattttcgttttttcatttctgcgctacgttcttacaaaacctatcttattatcatttcgtcatctaaactatccaatttcctgcgcaataacaagtgttcctcccttatcaactcagccaaaatctgcatggccttgtcgatttgcttcaaaccaactttactgtatgaagctctgacgtagctgcaggctgctgtaggatccgccatgtagttttgtccgggaatgaaggtgatgtgtttctttaggcctctggttaacaacatatcgtagacatcagatacaccaagtaccttgaaccagatgaacatgccgcctgatggtagttcccattcgcagagtcctttgagatgtttctccatgcatgagacagtgtagtcacgccttactctgtagaatgaagcaactcttgaaaagtaagcaagaagaccactgttgccccatttttcgaacaggttttgaagaatgacctgtgaaagcacactggagtgaaggatgcagcttga

SEQ ID NO: 10056 - DNA, 759 bp, Diabrotica virgifera
  SmartBlast Evalue=1E-59; Info=Angiopoietin-like 1 n=1 Tax= Tribolium castaneum RepID=D6WEJ6_TRICA
agaaaataatgatattgacaaaaaggatggttatgtccaggttcccatgaaattttcattcgcagtcgacgaacaacgcaatcataatattttggaagggtgtagaaatttagttggagtaagccagccatctttatgttttctaaagtcgtcttcggcagctgcagaaaagtacatcgcatatcccagaagttgtagagagattcaagaaattggtaataataaatctggaatatatgagattaagcccaggactagcagtaaaccttttgctgtactttgcgacatggaaattcaaggcgggggatggacacatattcagaaaaggttcgatggatctcaggatttttaccgagagtggagagattacaagtttggctttggaaatctagatggagagttctggattggattagagaacatccaccatatgacaggttttgaagccagtgaactgttaatagaacttattgataaggaaaagaaaacaggacatgcgcattatacatcgtttgctataggccctgaaaaagacggatacaagctgactgtacttagtggatattcaggagatgctggcgatggactaacggcacatttaaatgtaaaattttctacttcagatatggatctggatgaaaactccggcaggtgtgctaaaaattatgagggaggatggtggtataaaagttgcttcacaagttgtctgaacggaaagtattcaactgttattgtccctgatgcgataaaatatcacgg

SEQ ID NO: 10057 - DNA, 756 bp, Diabrotica virgifera
tattaatgtgtaactcattgttcttacacatttataactccacggttgtcatgagaattttccacgttctattagtatttgtcaaacatagaactacattgcagtctgtagatattatattccttccttaactaacctttcattgaaccgtttatagtctccactggttttgtctcctgtaatttctctctagttttgctaacatcaaattatcaatataatataaatatgatggaaagccaaggactacctgttcctctcaaatttgctatggatgcttcaaatatattcagttcatggcgaatggtcatcttcctgttcaaacagttttctctctatcagtagccccctcttaaatctattttactcttaacctgagccatccatgatttccaagtatctcttgagcgtactctagtactcttcttttttaaattaagtctttttagtttggatttttacaaataatttaatgctcttgagattagaatgagttgagacttctttttcaaataacggacgacagatggctaagaagatgaaaaaacctaacaatttagaaatagatattcagtgaacaatatctatatttacacaatatacaaaactagagttactgtatttgttcaagttttcttttcataatgtttaatagggtgtttttaaacgcaaattcaatttttatgttacaaatacctgtggtagtcattttatagatatctttgggggctaactgaaaatgttaaaataacttat

SEQ ID NO: 10058 - DNA, 758 bp, Diabrotica virgifera
  SmartBlast Evalue=9E-15; Info="Bile salt-activated lipase, putative n=1 Tax=Pediculus humanus corporis RepID=E0VVK3_PEDHC"
gccctgtttcttaaaactcctgttcttgtttccaagttatcattatcgataatatagtactcttcgttttctaaagtatatttttcccatttatttggaagtaaagtggtggtttctggagtgggatttccagttttagcgaagttggtccagagtgttgtaaaaaccttggctattcttttatcactttctgacggtttaacatctgggaaaagtccatcaccaacggggaaaaggtactgtaaatcgtcagcatgaaccgtaccgaaatgctcgtcacctccaccaaaaactttagaaaagcttacacttccgttatatccaaatacataaaagtgacaggctgtttgtagaactttgtgtgaagtcttgccacatcatcggaagctttgaagaaccagccatcagtatacatatcagttatgccttggatattatcttgaactcttttatttccaaaatagaattttttcagacggcgagtcactctttgaggatctttttccgtcctatcataaaatagagaaactggaacaagttcgtcgaaccggtcggcaaattcgtcgagcaaattggcgtttttgtaacctgcatttttaagagcaccatcttgacttgtgattccgacaataattggaacatccatactttttccagacttgataatatttaatgggtgatcaggcataaatgggtcttcaacttcacttggttctacaactggtttgaatggaatcataggatcgtagtcccatacc

SEQ ID NO: 10059 - DNA, 753 bp, Diabrotica virgifera
gttccctctgccaggtcgagtttctgacgcatatgtcattatatggttttgtaaattctgcctttcatttcttttctatatttttatttctccatatttttcattcagacaacctgcagctctctgtgctctttgctcaacatttgggcagcttaaattttttaaatgccatcttatcaatgaggaacgtgcaataaatctaaatagggccattttaaattccgtttttatactaatgtcctcccattattaacaaatctacaaattgtcctcttattatcttacccatattttttaatgcaacagaaatacattttcacattttcagttagtactgttcacagatagctccattggtccaactttagatgtgggatctggtcatttgttgttgttattgctagtttgaggaaaagactatccaataagccaaaacatcgagatgtaacttttcatttcaaatacgtggttaaatccagtatgcaaaaatacttaaaataaaatcgtatgtctttgacaagtcctatgcttttaaaattctttattcggtcaatatctaaaatcagactaggactaaaaatctaaaaattaaaggaataacgcagaaagcacaaaaaatcaccgatataacttaattctatgaaatgccaatagtgtcaaaatttcataaatgtcagtagtgtcaaaatttcataacatggataaacttgactgcggttggaccaattacaaacaaacattaaatttgaatta

SEQ ID NO: 10060 - DNA, 751 bp, Diabrotica virgifera
  SmartBlast Evalue=8E-29; Info=Ras-related protein Rab-8A n=1 Tax=Harpegnathos saltator RepID=E2C0R8_9HYME
ctttactaattaacgttattatatcaccttctttgaaagatatttcatcctcgttttgcgccttatatgggtatgttgcttcgcataattgtttcgttggttttgcgggtaacttggggggttttgcatcattttcgtttggaacatatgacactctttttgggggacttggttggaaagaaatttccttgacgaaattcgaaggaaacactccctccttgccatttaacgtacctctccaccaaccctcttcttcttctcctattatatcaatcacatcacctacctttaagttaagttcatcttcatggtcctggttataggaaaacactaccctgcattgcttgatcctgcacacatctttgctattcctgaacaccacaccatccttatctaaaggtctcacgaaattgtcaggaaacattcctttcttttccttcaacactccttcccaccatccacctggtttcttgactacatcttttatgatgtcacctttttttattgtcagctcatcagattctttagcagtatagtcatactctactattacttcattcatttttgtctttgtaatcttttcatagttttctattcatttataaagaccaagccccattggacgatttacacttaactttactcaagcaccaataacaataagaccacttttatctttaacctttcaatttaatgtttattatttttcactacgaattatttattcatagaaataaaatttttgttggtt

SEQ ID NO: 10061 - DNA, 732 bp, Diabrotica virgifera
cgatatctctagcgcggagcaggtcgagtcgcataccgggggttcaccctgcttgtggattcgcagtagcctgcgtttaaaatttaaatttcagttgactattttaaaaattgtgaaccatcaacctgtatgactgtgccaaatttcaaatctgtatatattttgatagccgaaatatagggtgtcttcttcttaaatgcgacacactgtatattatcaatttgataatttattgcaactgatatagtcgtgtattttatacctagattcaaaatatacattcgaaatactgactgattcactaattttatcatgaagggttcaaattgactgcattgaagtattgaaccaattaatgcgtattaatataatattattatagtaattatagtatatgcagagtgagttttatgtatagagaccctcaattatctcggaagcgtcttgcacgatttttatgggtttttggtgggtaggggttttctaatgtagccgatgttgtggtgataattacattgttgtcagatcttccgtttttctggaaatcttgtgacctttcttattttggatggaacgccctctgtgtcttttttgttttgaggtccttaagaaataccgattattttcatgttagcctatacctgaatgccatagtttcggacctgttgctgcatgtatttgaaaaagattgacaaattatagaaatcaattttttcggcccgtgtagacatt

SEQ ID NO: 10062 - DNA, 758 bp, Diabrotica virgifera
  SmartBlast Evalue=9E-95; Info=Pre-mRNA-processing factor 19 n=3 Tax=Aculeata RepID=E2AHR8_9HYME
ctttattaaatacagtagcattcttatcattaccacctgtcaacactttacttgtgtctgataaatgaacatctaatgctaatataccagggatacttgctgaatgtaatccgataagtgaggataatgttctgaagtttcgtaactgctcaggggttgtcaaatcttcaggtaccgttttccccttctgcttacgttctaatgtcaacactgtagccttttcttgtaatttttctatgatttcttcactcataccagcttgttcagttggttggtttgctacacctgcagcttcagcagcaacagccggctgtggaactgttgtaattccagcttggggtttaagtgtagcaagggcttctcttgcagctgtgacttctttattaagcctggcaattactctgcaagctgcatcatgttggtacagggcatgacttaattcttgtctagctgtttgaagctgttgtctctgtgtaaaactatataacataacagcatcccattcatcctgtaaaagctttaaggtcgcgggaatgctagttgcactaggtggtttcggtttaacaacaggaggagtttttatttcaattaaatcatctattgtcagttctttgccactaataggatccacgccattttcctgtatgtatttttcaattatccttttttcaaatatcgcacccgacgatggggataccacagggtattccggaacttcatttgaaatggcacaacacaacgccattttatctatctat

SEQ ID NO: 10063 - DNA, 754 bp, Diabrotica virgifera
gttttccaattcaccacccggtataagaatggaatcttacaacgtagtacattgcacagtattgtgattatgtacaacttactttaagttttcaagtctggatacgattacaatatttctgcctagggtcggactaagtctacaatctttgtatttgcgagtcataagtcatcgaggctgtactgagatgagcaaagtctgcatactctcaggtgctccacattctgtttttgcccaaattcacaaaatgcgtcgttatctgtgtttataccccatttaatgaggttctgttttacaggggcaatgtcaatgcgtatgcggttgagtgtccgccaggttcattccattgggtagttctgggtgtaggatgaacagttcgggggtgattcgacgctgacgtttctcataaaacttttccttggtttaagccggccgcatcgaaagtttacctgaacttctcgacatattgcgagacgcatcaacggcgatgcgaatccatctgcccgctacagtattgatagaggggtagatttcatacagccggtagttactatacataaatgaatttcatttaatgccgtggtaactttttgggcgtgtctagatctaccccacacgggacaaccatattctcaggcctcactggatccaaacaaatgatactaacaagataacaattatgataatggtctagctgtaaccattggcaattatttctatattttaaaattattatttatattactgtgcagta

SEQ ID NO: 10064 - DNA, 755 bp, Diabrotica virgifera
  SmartBlast Evalue=2E-38; Info=CTTNBP2 N-terminal-like protein n= 1 Tax=Camponotus floridanus RepID=E2A0A3_9HYME
tttccatttctaattcttgttttaagcgagtccgttccatctccagtccatatgtgatgtcatcgccttgagctgtgtcatgttcatgtttacacttttcttcctctaattcctgaataaccttcttgtgcttattttctgcttcttttagtatattcatcatatgttgatgtgcccaacgttgttgtaaaattagctgcccaaatgcatgtaactgttgctcagctgcctgtgccatttctttttcgctaactggtgatttagcttttggcccatctgcaatactgtctctaagtaaagctgtataagggtccgacaataccactggtctgtatcttcccacgttgactacttgttttagcctctcagactttaaagctgcaatgactatatccctagcctgtatctctccttcaaaaaatgtaaccaatttgatgagatcattcttagataactccatttttggatttctctttaaagttgcgttagttcggtccatttgttcatattgattcatgttggaagttcctgggtgttcagaagagttatcaaaatcaacccccaacacccaaggctacccatagtccccagccagtcaattcctatgttattagtagccatattggagtatttagtttatccctaaagtttctttggttttttaagaaccaaaacgattatttcacatgtccgatatagtcgataaaaatttttgacaataagtttgatttacaagttacatcctagttttcttg

SEQ ID NO: 10065 - DNA, 751 bp, Diabrotica virgifera
tgaagatatttagatatataataaatatgacagtaaatgatgtatttgttaaaaatgttaaaattaatatacaaattattttattaagtttcaaaaacgacattctttcggtaaaaactttttacccgtcattttctatattcatcggttcacttaattcattttccatgtttttatatatattgtatatttggtcttatttttttatatacatatatgttttgtatgccttagtgtatattttgtatattatgtggtaacagtatattattgtatacattttgggaatgacaaaatatcatggttaaatatttttaatgccaattttttacgaatttataattcttttaaatgaaacacgataatttatactgttgatttgttgctaatttaaactaaattcaatagcatatatgctcaaaagagtacttgatttagtttattacaatatcaaaactatgttgatacttgtcatttaaggtactagtacagattagaaggataaaaatgcatgttttgaaaaaaatttctgggatccttgagataccaacatgtttttttttaatattattttattcttgagttaaataaaaaaattctcaggattaacacatgtgaaacaaaaaattccaactgaattatttaaagaaagctcccttacaagacaatcaaccactttttaatggaaataaaaaaaaaacaaaatggcggacattgaagaaaaaataaaaaaaacgatattttccaccaa

SEQ ID NO: 10066 - DNA, 754 bp, Diabrotica virgifera
cagttactactctaagcagtagatgaaagcatacaaaagccttcaggcacataaatcttttacagctggatttgtttttaaagttggaagtcaccagcaacaacttcacataagtacaagaatattgaggaaattcagctcctcgataccactgggcaaactagaagattgaagaggacaaagccttttgaactagtatgagtggtaggtgacagtgaaaagcagagcataatgcttgtgtgcctgtgtatgttaaaatagtgcacgatcttgttagattagataagagacactatgaggtaagctcttcattttaaggaacagtagtaatttaggttaaatgaaaattgctcattggtcagttatgaccagattgtaattgtaatgtacaatttaatacaatgaatacaatacagcgtagtgatgaatatgggaaaaaatatatgacaagattttgtgcaataaaaatgtttatatttatcaaggatgtattattttgtatggccacatatacttctagtatatcgtcggtgatgtgacaatacctcctatctgctttttcatgaatttagtatgagacgaaaaaccatttcaaggtcatctcctgttttcacgtgtaaattttgacatgttttgtattaaatagatagttgaatttactacaaaacatgtcaaaaaaatatcatataaaaatagaaggcgactgtaaaaaaaagttttttagcctctcttactaaactcatgaaaaaacaaa

SEQ ID NO: 10067 - DNA, 758 bp, Diabrotica virgifera
gagccgtagtcgtagcagaagttttagtagatcgcccgtgaggcgaagaagtcggtcgcccaggggggccagaagatcgaggagtcgctccagatcgttttcattgagtcggcctcgcaatcgagacagagagtacgaggacgaccgagaattcgatcgaaacgatcgcagagataggatgcggaaccgagatcgagaccggcgtcaatcgagagaacgcgacagatactacgacaggttcgaggataagaacgtcgctagagggcagcaggggcaatggggccaacagagagccggcgataactattactcggcgcagccgcagcagacctaccaccagaataacagattcggacaaccgcgtgattttggacctcctttcttgaataaagaagtaccaccgtacaatcagcccatgccgcaaaccatccacagcattcaggtcgtccagcgacaataccaagacgtcgctccaccaggcgtagacgacgatatagcaccaccaggcgtagaagaacccacctcctacaagtcagaaaagaaagacgacaaagtggataaacgtaaagaatctgatcgaaaacgaagtaggcacgataagaggagtagaactcctgagaggactagaacaccgcgaaggagatcgaaatcgaaagaaagagaacgcgagagtcccgataaacataagaagaaacgaagggattcctcagataaagaagacgacgatagatctaaacgaaacagagacaagaagaagc

SEQ ID NO: 10068 - DNA, 745 bp, Diabrotica virgifera
  SmartBlast Evalue=4E-60; Info=Large subunit GTPase 1 homolog n= 3 Tax=melanogaster subgroup RepID=LSG1_DROME
aataatgcaatttagagtttgagcattttcttctacggcagtcttcattttttctatactttctttaaggctatcaatctccgtttcaatgttttctgaactaccatcaacttctttttccggttcatcatcatcatcttcttcttctgcttcttcagtcacctcatttaacgataaatgcgcagagtaaaatattgcttgaactccaatagaattaaataatcagcccaagttttcctttgtgtttctgttaagaagtcagacttatttattaatattaaattcatcttgtctgttgaaacttctttaacatacttttcgagatcttcacaacgaaacaatagaggatttctggcatctactatctgaacaataacatcacttctttctactactctccaaagttgtctccaaaattccaaatttttctcatatggagttagtacgataccttgttcctcttgtaacatagcaagcgatctgcgccattctaagaatgcttctttttcattgttatgcaattcctctggactaggtttcactattccaaggtggtcttcttggaatcttaacggcatctttatgtgtcttttgagcaattttcgcagcgctaagctcatctttggtcaacagtcctacatgggatctaggatttacataggtaatatttaatttttctgcttgaaaatctgtgccagctaattctgcagtagaaagaaattcttgaaatgaagattcttcggtc

SEQ ID NO: 10069 - DNA, 749 bp, Diabrotica virgifera
ttattataaatgggtttcaaaaataaaattcagacttacaatttattttattaaacaataggacgaccggtttcggacattacaatctactgtccatcttcaggtatccggtaacgtcaacttcaaataatgcctgttcaagtaatagtatagttaaatagatgcgtattaaacgctcatttattctatggtggtaccgtatgcataaaactttaccgatttttttgtgacacactactaattatttaattggtgttaccgcctcttggtgggttgtcgcatcaaactgggttcaataacgtactggtgttgtggtcactcaaaacctgtttcgagctttacagtataaatcaaaatagttgctgtagtatgggtacctaagcagtgttatgtactaaaagaaaatctccaatgtatggggtgaaatgcatcataatatattccaatatgtctgttacctaccttagggcagtcagagatacgcttcctatgaaatgtacgtgctccaaatgctaccccagaccaattttaactatcaactataatactttcatcttacaatgttacactgtgcaaatctatctccgttactccattacctaccttatcgcagtctgggattctattacatatagctcatatgtgttccaattcaaatgccacctcacaccaagattttctacaactataagactttcatcatacaaccataagactcgtctgactcatttatcatccagctccgcggc

SEQ ID NO: 10070 - DNA, 755 bp, Diabrotica virgifera
  SmartBlast Evalue=3E-43; Info=Gamma glutamyl transpeptidases n= 1 Tax=Aedes aegypti RepID=Q1DGN4_AEDAE
ggtaataatgccaccattagctttgatatctgcgacaaatttcttagtaagagatccattatgcagggcatttccaccttctcttgcaattactctcaatgtttgagccaatttcactcttttatatgtttctcctttcttgtaaacttggtttgtagctggattaataaaaatttctcttaatccagggtcagccctcacaacatcgatttgatctcttacgttattgtatgtaagttcgttcatttcaattccttcttcgcagattttaatcgtaggttctactaaggcactccatggaactccacctccgaatttgttatatagtatccagtatccccgagtctcgccaggaactgctacagatagaccacctctctgagccagagattgattactaacaaacatatcttcagtagctccagaaggtgccatttctcttgaattgatagagtatactctattttcggctctgttgtaataggtagcaaggaatcctccacctacacccatcgttgtaggatttcctacaccttcacagaaggcagtggcaattactgcatctatcgcatttttccttttttaaaatatcccttccaacttctgcacatcctggtgcattgctcacaacagcaccttctaaccccgatgttgaaaggggattaggcattgctgtcaaagatcccgccaataataaaagtagaagtccttgcaagaccggcatatttactggttacaaggttttgaccgtcttc

SEQ ID NO: 10071 - DNA, 755 bp, Diabrotica virgifera
tggtaggtacggtgaatttttggagttatgtacctagtgtcctgtgtactgtgtgtgttaaataagtgtcttgttactttgcaaagtcgacgtcatcatctttacaaagagacgctaattgtatccgaacgtctgcggtccctccggtgagtatcgatcccacaaggacagaaactattttcatttattaataaggccatcggtacataattcgcaaatattttacgggtatccctactttttctgtctttacacggcaaattacgtgtagtaaaattcacactggtatggatatgtaaacattactagaatgtcattctacttgaaaatgtcatcattaatttaaagagatggcttttgaatgttcttggataactgttatttttataattgcaaattattaattcagttaataaatgtgataattttttcactaactatgtattcagtgattgtaataatttatatgtacaacaaaaactaatactcaatcgagaaaagaggaaaagtgttaaagtgattttttaataatattatgtgttactatggaacgcttacaattttgaacatctttaacaacaaaatacttggatcacagaatatatcttgatgtattctctgcttactatcttccataaataatacacaataaataacttttttataaaattcaccttttaaaatcaattattttatcaaatacactatacatcaatattatttaatcaacaacttaaattattcccgattcatgt

SEQ ID NO: 10072 - DNA, 756 bp, Diabrotica virgifera
  SmartBlast Evalue=7E-58; Info=PAR-domain protein 1 n=1 Tax= Tribolium castaneum RepID=D6WGU3_TRICA
gaatgctaagaataacattaaccaagtatattcgataataccatgctaaaaacaaaaactaatgtttgactacaagtaataaacttaacactacatgattactacataatgtggatgtttatgtacaaatgtttggatttgtcctctgaaagaacacggcataagtagatttcgaaaaaagtgttaatttgaccggatactacttcttttcttcttatgaaatatgcagcggagaaatggttctttcaggtacttatacatcttcatattttgacaatttgttctttaaaattaaattttctttcttcattctttctaattcttgacgaagaccaacattctctttctccagataaccagctcgaagtgcgatttgattttccttcatccgacgggcgtcacgtgatcgtttggcagccaggttattcttccttcgtctcgcccaatatttgtcatctttaaggtcgtctgggacaaattgtttgcgggactttttgatgagtggttgtggtttcaggtcttcattggagtcggcaggtgagggggggttcatagtgtcaggactcatgcaatcactgggactaggtgacctttctctttttggtaaaggttgagaactgtttaaaggtcctaatgagccatgactacctagcccgtccatcgaaactccattttctgacaggaattcatccaaatcaacgtactttaaatccgtttcataagtcttatcccaaagatttggaccgaggaaagctg

SEQ ID NO: 10073 - DNA, 752 bp, Diabrotica virgifera
tatagggtgttaccattaaaaaaaaacataagtttggtctgccactgtgttgtcgaacaccctgtagcattctaactagttttgtggtgtggggctcaaaggtggctgaaatttttgttattgcttttattgctgtctattactatggcggagctattgagctttacccttccctactaatcaatcaccctgtgtaccagttcatacaccagtaatgcctggttgcaccaacagatcttaatctccagcttagctaagctctgcttatactttaatactgtggcacactaggcgtctaataccgttaattattaattaccgatagttaaaggcattagacgctagtgtggcaccagcataatgatttacatttatatttaagcttacggtacgtcttaagcttaatatctgttggtgcaaccaggcataagttatacccgaaaatttcaggggggttagttttgtaattttcaaaatgtattttatcaccttcttcaggatgttgctggactaagagaaattgttgaaattgacttataatatatacttagtagcttagatttataaattgtaaatagttcacatggaaattgtgaaacatttgtgcctttataatctataaaaatttgttaaaattgttatatttatatggtttaactacttatgtatttaataacgttttgttcattataagttgttttacaaaaaatgaattaatcgtttttatttttgtctatgactgtgatttggtt

SEQ ID NO: 10074 - DNA, 757 bp, Diabrotica virgifera
  SmartBlast Evalue=5E-67; Info="RAB-40, putative n=1 Tax= Pediculus humanus corporis RepID=E0VST9_PEDHC"
tcaaggagttcttctagtttacgacataactaaccgatggtcattcgacggcctagatcgatggttgaaagaagtggacgaacacgcaccgggtgtgccgaaggttttggttggtaaccgcctccatctggctttcaatcgtaaggtcggtcaaagagatgcccaaatatatgcgaacaaacacagtatggcgtttttcgaagtctcacccctttgtaatttcaacatccacgaaagtttctgcgagctatcgagaatggcattgcaccgaaatggaatggagaggttatggagatcaaataaagtgttgagccttcaagaactgtgctgcagagccattgttgcacgcacaacggtgtacagcatcgagcagctaccgttaccaaccagcgtcaagtcccacttaaagtcatacgcactgacgtcatcttcgacgcaatggcggtacgtcatcagtcagaagaagaacagtcgaggatcgaggagtcgcaaaaagcggttcacgagcacgcccacgacgcccggttcagtgacggacaaagacagtataacgagctgtgtacccagaaactcttgtactatatcctgacgcgcccggaattccttggacttcattttcaggactacgaaactcacgaaatggatcaggcgaacctataggtcagtaaacgaccgttttggactgtaattttactcgtcaagtcagattttcttgaaaatttggatttgggtttctcttaccatccacttcacgttt

SEQ ID NO: 10075 - DNA, 745 bp, Diabrotica virgifera
  SmartBlast Evalue=4E-21; Info=E3 SUMO-protein ligase RanBP2 n=1 Tax=Harpegnathos saltator RepID=E2BTD9_9HYME
tcggaacagtttggccctatgagagtacaagacgtcttcgtcttcttcaccggttttcacttgaactttctccggtaaaggaactacaggcttgaagtaaatgttatcttcttcttcttctacgtaactaccatccgcatctgattctgcatcatgtccctggctgaccctcctcggaggtctctgcttgaactcaaattcttgctttgtgggcgaaatgaaagaaaaactattctggttcgccgtcgctggagtagacttgttagcgccggcagctggggcggcgtctttaccaaacgtaataggggtagctggggtgcatctttcccgaacgttatgggggcagttggtgtggcgtctttaccaaacgttataggcgtcggtgtggtcttgctaatgccgaaagtccacttttgttccggcgtgtttgcagctgcgtttatatcaggaatgatggagggcttgttttggccgcttaagttgatgggggcggtatttggaatgccgaagacgaacttctgctcagggacggctgttttgacgtctggcttaatgttctgcttcaatacaccttctctaggagtctcgcatgctacacatttagagtccttcccttcatttttgatcatacaagttttgcactcccaggatccaggcttaggcttgaacttgtcaccgaatcccattactggtgtcgttttcgtggcaggttgtgcgttcgtgaggaagttaaacgtgacagtct

SEQ ID NO: 10076 - DNA, 757 bp, Diabrotica virgifera
  SmartBlast Evalue=2E-67; Info=Ataxin-3 n=1 Tax=Camponotus floridanus RepID=E2ASR2_9HYME
ctgaaattcacacaaatattctacagatgtttttgataatttatgatactcacagtattgaaacccacttatgtaaggttaatctatttataattttgagtcagaggaaatagaaacaaaaaagttttatttaattttgcattttcaacttactatggaagcaatatttcacgaaaagcaagagggttctctatgtgctcaacactgcttgaattcattattacaaggatcatattttacagctgtagatctaagtactttagccgaaaagttagatgatgaggaaagacaacggatggcagaatgtggcgaagaaagcgaagaatatcacaaatttcttcagcagccttcaggaaacatggatgatagtggatacttttctgtacaagtaattagtagtgcccttcaagtatggaatttagaattagtgccttactctagtacagaccaaagactcaatagtgatccaagcaaaatgacagctttcatatgtaacttcagagatcattggtttactatacgaaaaattagtaattattggtttaatcttaactctcttctctccagaccagaaccgatttctgatacttatcttgctttgtttctagcccaattaaagaatgatagttattctatatttgctgtacttggagaactgccacaatgcactgccgaagaagcattaaaaaataaatcacttgtaaatgatcctccaccaagacctccgttaagaaatatttcttcagttgaaagtgat

SEQ ID NO: 10077 - DNA, 750 bp, Diabrotica virgifera
ctaggaaagtacttatcggctatcatatgtcactttccttgccgtcaaatgtcacttgtcataaatgtcaaaataatttatcaaattataataaaagttaatgtagatattattatttgaaacttaattattaatgatatattatgactaaaatagtatacatatgtatactcgggagaatgtatttcagcctcgcgtctgtagcttactttggtaattcctgaacaagctaatttgacaatcaattctcctgggcaatatgtaatatactatgactcttagtgatatcgacttagtcgtaaaccactggttcttaataataatacagggatattcgtaaaaaaaggttctgcgaaagagtaccatgtgctgggagaaatcaacaagcagcactgtcttagacatcaactctccctctctcttaccccactactttcacctcgattcattgctcggtgtcgacctagcagccttcgaagattggggtcactgtcgctcttgcagccaatgtaaaatgtatgcttcgatacgttaattaatcgaagtttgtgggtaaaagtgtatatctcttcaacatattctcaaattgtgtagagtagagaattcagtgaaggccgaacgaaaattcacgatgaatatgaaggccttctgctctgatctttttcgaccatttgcgaacgtgttgaggattatgcacttttacccaggaacttcaattaactgacgataaatgtcaataggtgaaatcaa

SEQ ID NO: 10078 - DNA, 753 bp, Diabrotica virgifera
gatatacgaggtggaaattatacacccagaataatccaatgtttaaagtgtttgagatttgggcatataagtgcccaatgtagaggaaaagataggtgtgaaagatgtggcgaagaacacaacaaatctaattgttccaatccgaataatttactttgtgtattgtgcaaaggaaaacacagcgctactgacaagggagcagattgtacagaaagacaaaaacaggaatatattaaaaaaagttatgaataatgaaaatataacatattatgaagctaataataaatataaaaaatgttattcaacagtaagtaaagacaagaaaatacttcaaataaatatacaatatctaaacgaaaaagatcaagtagtattgattctagtagtgtagataaagaaacaatggaagcacgcagaaaaattttgcaaacaccaagaatacaaagtcagccttgttataattttaataatcccatttattctaacacaacacaaacacaaaacgataatcaaaataatataggagaaataatagtaaactttatttcagcaacattaaatcaaattaatcacaatttagatcaaaaaaacgttggaattattaaaaaacaatatttcacaattattattacctcgtgatggctaacgtttcatttcttcaatggaatgcgagatcaattaaaacaaataagggttatttagaaaaattcttgtatgacaataaaatagatataggattaatatcagaaactt

SEQ ID NO: 10079 - DNA, 756 bp, Diabrotica virgifera
  SmartBlast Evalue=1E-58; Info=Reticulocalbin n=2 Tax=Aedes aegypti RepID=Q16FY8_AEDAE
aaataatgatggacaagtcacttgggaagaatatttggcagatacttatgggctagacagttctgaaaataatattgatattggtggagaaaatgaacaccttattgaatctgatagagcaatgtggaaggcagcagatgtgaatggtgatggtattctggatgagaatgaatgggcaccattttcccacccagaagaatatcccagcatgcttccacttatattagaacaaacgctgaaagaaaaagatacagatggagacaatggccttatttttcaagaatttgtgggagaaaggggtacacatatgagcaaagaagatttgctgactgaaaagtctaaatttgacgcttttgattcaaatggtgatggaaagttgactggcaatgagattttgtcttgggtagtacctagtaatgacgaaattgctgatgaagaagtggatcacttatttgcctcttccgatgacactcatgacggtgtactaagcttttcagaaatactagcacaccatgacatttttgtaggaagtgaagctacagattatggggaccatttacataacattcaccattttgatgatgaattatgataaggttttattattgaaaattacttgtttgattttaatttgatcagctcattcaggtgatttatagggttaccaatacacaatcttttcctaagcaccttcactgattcttttctggattgttactacttatatggagctaattatgctatttgttcctaaaa

SEQ ID NO: 10080 - DNA, 755 bp, Diabrotica virgifera
  SmartBlast Evalue=3E-81; Info=Ubiquitin-conjugating enzyme E2- 22 kDa n=3 Tax=Aculeata RepID=E2B1Y5_9HYME
tgaacataaaattgaagtgtaaaaatataaaaataatgcagtaatttttcaaaattccatattattaatcaaatctgattttagattatttccgttcgtgtacaagttagttgtccgtatttttaatttatctatataatggcgaatattgctgctcagagaattaaacgagaattcaaagaagtaataaaaagcgaagaggttgcaaaatgtgctattagagtagaactattgaatgacagttacactgaattacgaggtgaaatagcagggcctccagataccccctatgaaggaggcaattttgtattagaaattagggttccagaaacttatccattcaatcccccaaaggttaggtttattacacgaatatggcatccaaatatatcctctgttacaggagctatatgtttagatattttaaaagaccaatgggctgctgccatgaccttacgcaccgttctgttgtctttacaagctctactatctgccgccgaaccggacgatcctcaagatgctgtggtcgctaggcaatataaggagaatctcgaaatgttcaccttaacagcaaacattggacacacgcttatgcgggaggtccttgtgtaattagcgattgtgatgaaaaaattagacgacttatagatatgggaatagaagaacacaaagccagagtgtcgttgtcatcttataattgggatttagaaatggccacggaacagttattcaattagtaaatcaccttaatttgc

SEQ ID NO: 10081 - DNA, 756 bp, Diabrotica virgifera
  SmartBlast Evalue=8E-69; Info=Cellulase II n=1 Tax=Apriona germari RepID=Q6SS52_APRGE
gacaatagttaacacgaatatgttgtctttgaaaatagcagttgctattttgtcacttgcgggcgttactatcgcacaggatttaactcctatacctggtggcaaaagtggtgatggtgtaactacaagatactgggactgctgcgctccatcatgcgcttggtacccaagaatccacacgcaaaacggtgttcccatccaaacgtgtaaagccgatggtgttactccaagtgataaagacttaaacgcacaatctggttgcgaggttggtggagtagcatacacctgcactaaccaatcgcccaagatcattaacgagactttggcttacactttcgtagcagcctcattcgctggtggtcttgactacgccgactgctgcatatgtctggtcatggacttcaaaggtaagctcgccggaaaacgtttgttggctcaggttaccaatacaggtgaagctcttggccaaaaccatttcgatatccaaatgcccggaggtggagtaggcatctacaatctgggatgcaagactcagtggaacgctccagatgatggttggggtgagaggtatggaggagtaactgatatcaagggatgcaaacaacttccggaacaattacaagagggatgcagattcagatttacatggatgaagggagttcctaatccaccagtttcgttctaccaaatcaaatgcccagaatattttgtcggagtcagtaaatgtggagatttgtaaaagattaaataaatagt

SEQ ID NO: 10082 - DNA, 756 bp, Diabrotica virgifera
ttttcttcagtaaccttcttcattaaagtaataataaacactgctattataatgcatttcatgcaataagatcatagcatgctttgttttccatcagatgttcaaaaattttagagaaagaaaaaagtgtgatgtctggagttgttcgaccatagctgaagcagtgaatccaccaatgaatagaaggttctattgctagtaatgaagatattgttcttttcgttgctttcactgtttacttgcttctgtacttaaagtttaagtctctgctcagatggtgttgtttccggggttcattcattttggtattggtaatattaacagcttccataaacgcctcactggactcagctgcattgttattatcaatgtttaatcaccctttttttgtgtatcataattttcagtagaagtatgaattcttgttattcttcttaagacatatttggaataatatacttctttttcttccaaagtcaatgtactcagacacttttgttttctgatgaaaacagcgtggtatttttccttccatctttctacaaataaatataaataagtccaggtgataaacaagtcaaaatatacaaagtgtaataagtaaccaaacagaactaaaggaaacattttacatagatcgttgtatcattcttgaagatgccaacataagtatatattataatctttagacctcctaccctctcgggtgtaggtatgacgtgtgctctgttagcaatgcacaaatctcttcaattg

SEQ ID NO: 10083 - DNA, 756 bp, Diabrotica virgifera
tcagttgttttgtataatgccaatcaagggactcagaagttatgtatgaatcgagtattccatgaaaaacaaaacatattgacatccgtcaccattttatcagaaaggctgttcaaaataatgttgttgaattaaagtatttacgtactgatgaaatgttggctgacatccttactaaagggttgaagaatgttaaaaaatctaaatttgggctaggtttgaaggtttagattttttgataagtggtggtgttgagatgtatcaaaaaataagtattttaatacatgtagcgccatcggttgatcggttgataactaatgtaaacatattggtattgtattgtaagttgccggtgtgacatattgaaataaaatagtcgttaatattgaacagaacatggcgtgtctcatttctaagtaccccagataatctttccttccacattaatttcaagactctttagcgatgtattagtataatataatatttatggattaccgtaaatggtcgatattatgatcaaccaaaaaatatgtatttgatgatagttctagtgactttcttgtgtgtgaatctgtctttttagtttactacccttggtttaaaaataaagcttcgtctgttaaaatgtaattaacttcgcaaaaaaaattacaaaattactagactcttgtatacgagattagcggatcgactataatatcttgctttttagtttttgtaaaattgtaaaaacttttagttggaagatcggat

SEQ ID NO: 10084 - DNA, 756 bp, Diabrotica virgifera
aatttggaacgtcatgttccaaacgttcatggaatgactgcgaaaacgttccatgtattttgtcggacagaacttccaatttatttgttaccatttcattaaactctcatacaaaaatcagactgaactgggaattttaatgagtggaacacgaagaacatgtcaaaggacaggaattatgtttttacgataacttggacatatgtgagagtatgaacatacattcagagtgtgtggactgtatttaggactgttaggttcaggttaaagtgggagtataaagtataaggttttatacagacaatattaatatgtatataaagtcttaccaaactgtgaacgttgtagatcattagagccgtggtcacacacgaattgattgttctcgtaccacgatttgcgaaatcaggtatggcgtcactcccgaattactgttcgtcacgtaacgtaacacgtattattgctatttcgtttcagcccaaaaggaaggctggaccgtccagagtaaagagatgagcggtaccgacttttcagtaaaaccgctgatgagagagagcaacagagatattgcaccctcaggtgttgcaagaggtacgagagataagctcaccctacggcgggtgttggagcagagaaagttcaagctttcttctttcgcgaataataatataattgtctgtcgcgagtataataattgtctgtctgtagggataagggtaaattaagaggggatgaaatggtactattgaacagggc

SEQ ID NO: 10085 - DNA, 754 bp, Diabrotica virgifera
tgcccgcagatgtttttaagatgggccagtgccagtcacactagtcacacattgtgtttaagtttattttcgtgtttcttgctgggtaaattttaatacaataatagcttacaaaaatagcaggtagcaggtattatacgctgtttgagggagcttagaaaataacataaagaaccagctttcttaaaattcttcctcgaaaaagttacttgctcttgatattatgactatatatgtttaaataataaattataaaattggtgtatcaaaataaatttgcttttaattaattttagcaattaatttgatttggttacctcattagtgtttctgggttgaaatttatccaataaaaacattaaaccacttcgaaccctctttttgtctttctcgtctaaatgatgccagaagctaattcatttttttagttcagagacatcacaacccattcctatagaaatgttaaaacaagcatcagtttttctgtttattattttatatagcttcgattttgggtttcataggcatattccatattgcaaaattatgttttcacaactacacaataaacaaccctctcaaactaatgtttgtaaataaattaaatcagtacttctaaacgaattcgttcgctaccgtctatccactgtccacattgaacaacgatttcctttgatgattcgctaacttaccgacatcggttggaacatgtgcgaatgcgaacgaattcgttcggtcgtgctcgattcgctgt

SEQ ID NO: 10086 - DNA, 755 bp, Diabrotica virgifera
  SmartBlast Evalue=5E-24; Info=Putative uncharacterized transposon-derived protein F52C9.6 (Fragment) n=1 Tax= Camponotus floridanus RepID=E2AL50_9HYME
gaatatatctactggccaaattctgaaacttgaaaagagaatcaaagtgcggaagtcactagaagaacaagactgggatgggcagaatttggtacacttagttggatacttaagagccgcaaaatacctccatacatcaggagcagagtgttcaaccagtgtatccttcctatcatgacatatggatgtcaaacatggacccttaccaaggccaatatgaataaactagccacaatagaaagggcaatggaaagaacaatgctaggtatacgactgtcagataaaaagaggaaagactggctaagatgaaaaacaaaagtcaaggataccacaacaaaaattgtcaaactcacatggagcttcgcaggccacattgctagacaaaaagaccaaagtcgaccaaattcttagatgttacgtgaaagctgaacataactattctccagaggttaagaaaaaacagaaactattaacaccgtaaagaacagaaaattgacttacttcggccacattatgcctaatagtaaataccgacttctacagttgattctacaaggtaagattgagggcaggagaagccctggatgtagacatatatcctggttggcgaatcttagaagtggtttggtctaacgtcaactaaaaatgaattcttaaacaatagttatcagtgtacttgaaaactgtaaggaaccctttttataattgcgtaaaatttataaacctaataaattataagcactactttaatagat

SEQ ID NO: 10087 - DNA, 754 bp, Diabrotica virgifera
  SmartBlast Evalue=1E-45; Info=Mitochondrial carrier protein n=1 Tax=Aedes aegypti RepID=Q16NW0_AEDAE
atcctacgttcgtactgccgtgggtaccggccacctgcatgcggaccttcaacacatccgtggggttggcaatggcactcgatatcgctcctgctattactgcacacacaacattcgcagtgacactttccttcccttcgttataagtaactacgaacctcttcaatgtgtagtaagttccgaatttaatggtaccgtaagtagcttgtcgtagaactgctggccatatcccagaatatagagaaataaatccctcctgcttgactatcttcagaaaacaatcgaccatacccctgtatttgagactagcatggtttttgtccaacttctgtccttggatctgcaatctagttttggttagatcaatagggaaggtaccaaactcagcgacgcacgatgcaatgcccccgtagacaaaaggtctccagtccctttgtcccattccactattactgtttcttgatgaagaaataagtgtagtgaaaatgtaaaactcccccgtaaaaactcttctgtttacctctaagtttggtcaacacagtcgtatttcaatgcagcagaatgtagcattagcggctcaagacgaattataagatgtgccgtcggtaaacttatttaaatatcacaatatttaattgataatgtagtatcactgcgtcaaaacatgtataatagaaactgggctgtttatattgtatcagctaaagttctgggcttcaagagacaacttgcctgtagctgcagcagatctatt

SEQ ID NO: 10088 - DNA, 750 bp, Diabrotica virgifera
  SmartBlast Evalue=1E-28; Info=Lipase 3 n=1 Tax=Culex quinquefasciatus RepID=B0WDK6_CULQU
gtctgaccaacttggagcagtgttgaaggcggtaggaacaggtgaatttatggccgaagacagcgctatcaatttcatcaccgatatctattgttcgaatcttggtctgaataagataatatgcaaaaacgcactctttatggcgtgtggatttaatgacaaacaaatgccaatcgaggaaatcccaatcattatggcctattacccatcatcagttgcaaccaatcaaatggttcattacggacaagaagtcaagagtaaaagattttgtcggttcgactttggatttgtgaaaaataacaaaatttacaatggccgtctcacaccaccagactacgaattggaaaaaatcacggcaaacatgactatgatctacagtgaaaacgattggttatcccatcccatagatgttgaaagattggagaacgcaatggtcaacgcaaatgtgaaaaagattttggctccgctagacaaatgtaaccatcttgattacctttttggcaaagatgctgcaaagactatctatccagtagttatcaaaatccttcaagaaaattaataatgtttttagaagcagagattgtgttgtttttaatttgtattgtattgtgaattttagatatttttatatcatttgaggtacattttcatatcaaatatatatttttttaatacttaataaaaatggatgaattccatccgctaaatgaaaatttttagacattgtatcaaataaatattttacatttt

SEQ ID NO: 10089 - DNA, 742 bp, Diabrotica virgifera
  SmartBlast Evalue=1E-16; Info="Protein takeout, putative n=1 Tax=Pediculus humanus corporis RepID=E0VZJ7_PEDHC"
tccattgtgttgggcatcggactgtgaagtagtaccataaccataaaatcatacgagtatatcgggtcagtcagtgcgagtgatcactagtcaatatgacaaggttttttatatgttcaattatatgcatgttcgcgaatgttgttctggcttcgaagtctttgcctccttacatcacaccttgtaaaaaaactgatcccaaattaaatgaatgtgccaagcaacatgctatagaggcattgccctctcttataaaaggggacagagcatataaaattcctagtttcgacccatacgtaataccggctgtggaaacaagtggtacgagtggtatcaacttaaatctcaagaatttacgcctgtacggtttggacaaaacagtagtaagagcagttaaagccgatataaagaataatcaaatagtagtagacgtattcatacctgagacaaggaccgaagctgattatacaataggggaaaactattcgccatagatattaatggagaggggcctgcatcaattaggggagaaaatacctcggcaatatgtacggtagattacaaattaatcaccaaaaaggatggaaagcggtatgtagatccagacacactcaaatcccatttggacctaaacgttgataaaacccattatcattttggaaatctcttcggtggaaataaagttttagaggatagctttaacaacgtactcaacgagaattctaaagaagtagatgacatt

SEQ ID NO: 10090 - DNA, 754 bp, Diabrotica virgifera
attcgaatcgtttcagtgtaaatacaaagtgttgtagtgaaaaatagtgttcagtgacgattaaaattttaataggtaaatcttacagtaagtttaaccttttgtggttttgtattgttttagcgttatggagaccgatactcaacaaactgcagctcccgctgacacacagatacctgcagagctcgaggccataattaaagcaacggttgaacaaacagttgtcagtttattggaaaaacgacttggtaaacgtaaacaccaaagatccaggtctagatctaggagtagaagccgttccaggtcccgaagccgtggtggacgttctagatcaagaagcagaggtagacatgacagatcaagaagcagaggtaaacatgacagatcaagaagcagaggtaaacatgacagatctaagagccgcggtcattgtggaaaatttggaggacaaaataaagataaatggaatagtttggtagattttggacacccagcccatcatcatgatcattttcaccaccatcatcatccacctggtgggttcggtgagaattttcattttaaacgtcatggtcatggtaaacgtcatggtaaacacggaagacatggtaaaaggtttccatttccttgtggatacttttccagctcgagccaagagaatgaacaaaattctcaaagtgaaaaggaagaacaaaatcccctatgtgacaaggaaggtactccggccgccggcgccgatatgggtttaagggag

SEQ ID NO: 10091 - DNA, 751 bp, Diabrotica virgifera
  SmartBlast Evalue=3E-23; Info=Rab GTPase-binding effector protein 1 n=1 Tax=Camponotus floridanus RepID=E2AJJ9_9HYME
ctctctttggagctgatccacctgttccttaaagttctcaattctaattccaaactatcttctattcctttcctttcgtgttgatcgttcgttattctatcttttagtaacataatctcagactgaagagtattgactttttttctcttgggcctctttgcccattttggtgatgatcaagtcttgttgattctttagaattatttcttggagttcctcaactgtatttggcaggtcaattatttcactttgtagttcttgggaatgtgctgtatactttcctatcaacatatcattttcctcttgcaatcttatcagttcttgatggacagtttcccgttcgtgcgttagttttcctatactcattttcatctccgaacacgtctggttaaaaaactggcgtagctctttcagatcttgctctgtacattctgttgtccgagttaattctgccacctgtctcttatgctcctcctttttctcgttccacttttcctccatatctttcctaaatccgatctctttgaggagttcttccttatgccgctccgctgctttctcagccgccgttactttggtctccagttctttggagatcttctgttccctcaccaactgagcctcgtaattgctgcacatgtcgcaaatgaacagcctgttggactcgaacgatgtattcgttgcagtggtggcgtttaggttggtatggtggggggattgctcgctggtatttagctttctcaattccctt

SEQ ID NO: 10092 - DNA, 754 bp, Diabrotica virgifera
  SmartBlast Evalue=3E-43; Info=GMP reductase 1 n=1 Tax= Harpegnathos saltator RepID=E2B9Y1_9HYME
gcctgctatagaaaagcttaatattgaactatattttaaagtcgaaaaattttaacaccttccaaaccataatatttgttttttaacccattcgcatacacgactgcatatgcagacacttacaaacggaaattactgtctgtatatgcagtcgtgctcttcaatgggctaaacagtctttgaaccgcacaattactctcttctcttaaggtactagtacactttagaagacttttggtcttctaaaatgtactataaagtaccttaataaatcagaatttttaatattgtcatagcattttaaagatttacaatacataatatggcttttgtaaatgtgcgtttttaacatggtaaaacctaactactaaagcttttaacatttggctaaaacctctcgtaaaattaaatcagctaaaatttacttagttaatttggtggctaactgtatatattgttgagttgttgcgtgcagcgcatgaacgtagctcttcgcggtagttctttcaacttggaagctccggtataggtgcaagcacttcgaagtcctcccaaaatgtctagaacagtcgtctgtacgtctcctctatatggaacttgaacggtttttccttctgaagctctgcattcagctacaccacctgcatgtttttgcatcgcagtgtttgaagacattccataaaataatttatacttctttccatccttttcaatgagctccccatctccttcgtcgtgtccagcaaacatacct

SEQ ID NO: 10093 - DNA, 754 bp, Diabrotica virgifera
  SmartBlast Evalue=7E-46; Info=Tudor domain-containing protein 3 n=1 Tax=Camponotus floridanus RepID=E2A431_9HYME
cactctaccactaaatactttcctaaccgctccagaggatgcctctgcaattgcatcttttctcaattgttcaaattctgaattttcctttaatgcctccttttctttattggtcagtgatttgaagttctctccttggtttcctgtttgaattttggtaccaaaattgacccatggtggtggaccatcctcattatagttcctactaattttttgaacatttttggcaagctcccacttttcaatcaaattggcaactttacctcctagaactttacaattttgtggatttagtaacaggaaaccagatgtaagtttagctccttgaactaacagcttcgttccaggtggagttgttttataatttattgtgctaattgttgtaagttctaaagcttgaatatagttttctccatctgttagagttaccttgagcatccggggagctgcttgggaatcttcattagctttgggtgcagaaatgtttcggatcttgtgaatctgaagcactacattcgatgccgcatcaattggaaaggagttaacaattgggctacatatttcttttagatctgtatttaaagcaaagttataaatctgttgtttatcccccgtcgatacatttcccgttaaaatttcgtttcctttggaagatatatgccattcgtttcctaagattgtagccatatttttaaatgcagttaaaaagttaattgattattcgttatctcatttctttatgtaattattatat

SEQ ID NO: 10094 - DNA, 754 bp, Diabrotica virgifera
  SmartBlast Evalue=3E-48; Info="Zinc finger protein, putative n= 1 Tax=Ixodes scapularis RepID=B7Q1F4_IXOSC"
gtgctatttattgaacagaacttctagattctgattccgactttatttttagaatagctaaaaatggatttttgttgtttaccttaattttctctagttcatatttctttttttaacatctttgtgtcatcgaaatgaagattgattggtcaaagaactctcatttatttcataataatggcaacttggataggaaaagtggaaaatcaagttaaacttgaacaatttgataatattgtacttacacatgacttacagctcgaggactgtctttccgaaagtttagattttaaattcaataatgtctactcagattcagatatttctgatgtgcccacagacaaggaaaatgataaccacgaaaatggttttgtacaacacacagtgtcattggacgagatatgtatgcagatcaaccccggatcttccaacaaaatgccaaacgagccttcgcatgccaccctgacaattacggcgaccaatccagagaccaaggagacgacgatcaataggttccactgcgagtacgatggatgtgagaggacgtatagtactgtcggcaacttgagaacccacatgaaaactcacaaaggcgaatacagattcaaatgtacggaaccgagctgtgggaaggccttcttaacttcatacagtttaaaaattcacatcagggtccacacgaaagtgaaaccattcgaatgctcagaaaccggatgtgataaagccttcaataccagatatagattgagagccc

SEQ ID NO: 10095 - DNA, 754 bp, Diabrotica virgifera
ctgaagctatcccactataatttgggaatgtatgagctattatagatatattttagtaaattgagctttaacattttataaacaagctaccaactaccaaaaatggtacaaaaagtatcaaaactatctttataatatacagcaggcacaagtatttgatagcagccttcaggttcattagctattttatcccactgattgaaaacaaaaagagattaggaaaatcgaggattatacaataaccgccacgatactagacacacgggaacattgagctactacaggcctgaacccttcgcttgttgcaatgtttatttttatgtctagtgacgtttagaacgccagaaaatttatagaaaccaaatatttaacatacatagaaagttgacaattaatggaacagctgtatttgacgtttatagttgccattttgttaaagttttaaagtattgtaatattcttggtgtttgaataaagatattttaaagcagagtaacaatattattaattaatgtattttttgtatggaaaaacaattattttgaataggttcttggcagtaacacgacagagacaaaagtcacatctaagaacggaccgaatagattagcccacaagcattgcaattaggtacctaatgtgtctagtagcgtggctcttactgtataggtacttacttattgggttatattatattggtacattgtaaggatattcccatgttgtggcttttggatggcgtgttatactttcc

SEQ ID NO: 10096 - DNA, 751 bp, Diabrotica virgifera
  SmartBlast Evalue=2E-65; Info=Hairy n=2 Tax=Tribolium RepID= B5A7J9_TRICF
ggaaatagtacgacgcctacatctaacacccctggcacaggcgagaataataatggtgttaagagaattagtgataatagaaggagtaacaagcctattatggagaaaaggcggagggcgaggataaataactgtctcaatgagttgaaaacgctcatattggacgccatgaaaaagatcctgccagacattcaaagctggaaaaagctgacatcctggagatgacagtcaagcatttacagaaccttcaaagacagcaagtcgctatgtcagcggcagcagatcccttagtagttaataaattcagagcagggtttagcgagtgcgcttcagaagtcggcagatttccaggtctagatccaatcgtccgacgaaggttactccagcatctagccaactgtctcagccaaggttccaaaccacaagaagttcctcaagtacaagttcacatacttccaaacactcaaaaacctttagaacagcaagtaccccaaagcagtggcattattcttagtaacggtaacggtactggagttcaactagtaccaacaagactaccgaatggagatttagctctggtacttcctacgaccttacaaacacagccccagtattcaccggcggcagtaccattattagtgccgatagtaccggaaagaaccgcttcaaccacatcagcgaccagcagttactcgaattattctcccagtcatagtccagagcctatggagtctatgtacagccaaccgaa

SEQ ID NO: 10097 - DNA, 752 bp, Diabrotica virgifera
  SmartBlast Evalue=5E-67; Info=Multidrug resistance-associated protein 4 n=1 Tax=Harpegnathos saltator RepID=E2C457_9HYME
cttggatagaatggctctgttttttactattgtttgttatatattgttaggtaacttaataaccgctgatatagttttctctttggctcaaacatttaacatcttacaaatggctatggctatatattggccttgggccgttagccagggtgcagaagctttggtttcagtcaaaagagtgcaggagtttcttgttatggaagagaaagaagaatctaaaatagacgatttaggaaaatcgggggttatactttccaaagtgaacgcttcatggacacctactacaagtaccttgcaagatatttcacttcagataccatcaggtacgttatgtgctgttgtgggacctgttggagctggaaaaagttcgttgttacagcttcttcttggagaactcctactaaatccggtaaagtttcgataggaggagaaatatcatacagttcacaagaaccttggctgttccaatcatcagtacgaaaaaatattctctttggaaagccatacgaaaaaacctggtacgataaggtcgtcaaagtttgtgcactcgaaagagatttcgaacaatttccccataaagatagaaccatcgttggagagaagggtgtatctcttagtggaggccaaagagcaaggataaatttggcaagagcgatctacaggaatgctgatgtttatctattggatgatcctttgtcggctgtggacactcatgtcggaaaacatttatttgaaaactgtattgtaaatca

SEQ ID NO: 10098 - DNA, 753 bp, Diabrotica virgifera
  SmartBlast Evalue=6E-74; Info=60S ribosomal protein L18 n=1 Tax= Timarcha balearica RepID=RL18_TIMBA
gctaaccaaaattatacacatgcgtgttgaggtcttttcttttcccaaaacttgacaaaaatgggtatcgacatcaaccataaatacgaccgtaaggttaggagaacagaacctagaagtcaagatgtatatttacgtcttttagtaaaactgtaccgttatttagcccgtcgtacaggggccaaattcaataaaataatcctgaaaagattgtttatgagcaaaatcaacagaccaccactatctttatccaagttagtgcgtttgatgaagaagcctggccgtgatggacttattgctgtcgtagtaggaacaattactgatgatgctaggatttttgaaattcccaaattgtctgtatgtgcccttcgcgtgacacaaactgctagggccaggatcttgaaagctggaggtgaagtcatcaccttcgaccaattggcactcagggccccaactggcaataaaactgtattgctacaaggcagacgtaatgcccgtgaagctgtgaaacactttggtcctgctcctggtgtaccacacagtcatgctaagccattggtacattccaagggacgcaaatttgagagagcacgaggtcgtaggcgctcatgtggttacaagaaatagacttaagttaatcattttgtttctgctgtattcatatttgttgttcaataaataggaattgcagtacattggaattttgttttgtattttatagaatataacaaaataaaggaatttaatataaaa

SEQ ID NO: 10099 - DNA, 752 bp, Diabrotica virgifera
tgaaactgaaaacatcgatgaactcgatgaccatattctcgctaaccacgaacttaaggatgaggtggttcattcagaagacaaattcgtgattgttcaagatgatgaccacccagctcggaatactagaaaaagaacaagatcgatgcgaccaaagaaccttccgaaagatatacctagagcaaagatcatagttaaaaaccatgaccctaagttcaagctgtgtgaagcagatgaatttgaggaagatggtggaaaaccggggaggcctccaaaaagaggaaaaaggcatccaagtgaacctatgaattgtgaattatgcgacttcaatactacaaaaaagagtgtactagcgacacatatgttaaatcattcagatttggtaccaccagttttctacaagtgttcgcaatgcccatatcaaacaaaaagaaaaaatgacatgcctaaacatatgttgggacactgcagtaatgataccgttcccctgtacaaatgcagccactgtccgtacgtgaccaaaagaaaaggagatctgcccaagcatgagatgaaccacgccgacaaaagccagatgtttacctataaatgcaccgaatgcgagatttttcgaagaggaagaacgatttgcacaaacatatgctgatacacagcgacagacagctgtcgggactgtacaagtgtcttaagtgtgcatatgcaacagataaggtcgccagattctcaaaccacgtcatgagcaaatgtgtctt

SEQ ID NO: 10100 - DNA, 748 bp, Diabrotica virgifera
tctgggaacgacaacctcttatgcgaggaacacaactatttacagctaatacttcaccttaaaatgttgaatgaatgaatgaaaatgatgaataaataattttttaaaagtaagtccatctttgaaaatgcaacactgtcaacaagtgtttagtttttaacgtgtgtgcctaatagaccatatgttgcaaaaatgaactttatctgaaatgaagataggagagcacccgctctcaccctatcagtgtgttctcaaccgagatcaaggcaacatctcgttgccccactcaagtgtctcagtacaggatctcagcaaaacaccgttaccagactcgacactcaaaagtgtaaggtgttctccagtacgagatccgagcaacacaccgttgcagtcgggttcgcctattatcagtgaaaagtgtgcttagtgctccagtacgaggtgtttggaatacgctcgtttgctccctcaaaagatttcgccaaggaatcatcacacctgttcccaagcttagttggatctacgttgctttcaaccacaccgttgccacatcgcctgctcagcctggacagtggtggaattttgaaaagacaatatagtgcgtacacggacgtcagactgaaagactcatggtagcttgtaagtactcattctagttatatgtaggagttttctctcgatcgacactagtgttgcatcaattttgtttaagtgtttgctctctctctctctctctctcttctcttga

SEQ ID NO: 10101 - DNA, 752 bp, Diabrotica virgifera
  SmartBlast Evalue=6E-91; Info=UDP-N-acetylglucosamine pyrophosphorylase 2 n=2 Tax=Tribolium castaneum RepID=D2KLJ2_ TRICA
agggaaaaattatcctagaagaaaagcataaaatatcattggcaccagatggtaatggtggaatatatagtgccctaaagaaaaataagattttggaaataatgaggaagaaaggtataaaatgtgtgcatgtttacagtgtggataacattttggtgaaggttgctgatcccaattttatagggtattgtgtgaagaaaggagcagattgtggagcaaaagtaattccaaaagaaaatccttatgaagcccttggtgtcgtatgtcaagttgatggaaagtttcaagtggtagagtatagtgaagtaacggataaaactgcaaatctcagggacgattcgggagagttagtttttagcgcgggcagcatttgcaatcatttctttaccacggagtttctagaaaaagcttctaacctctatgagaaaaaactgaagcctcatgtggccaagaagaaaatttcgtttgtagataaagacggaaataaaatccaacctacagaacccaacggtatcaagatagaaaaatttatttttgatgtttttgaattttctgaaaattttgttacgtgggaagtgcctaggactaccgaatttagtcctcttaagaactgtgaaaatgtacataaagattgtccttcaacgtgccgacgggatttgctcgatttacacagacggtacgtgaaacaagctgggggtattgtggaatctgctgaagtagagatttcaccactgctatcttatgccggggaa

SEQ ID NO: 10102 - DNA, 750 bp, Diabrotica virgifera
actctgaataattaggaaatggttgctgatgatgaatgcctacaagttgacaagttgtaggtttgcctttatgatcccaaaacaatacaccagtcttcacaatggaagtgtccatccatgcaccattattcggcgactggtttcttcattccaacaatgcgcacatccatggattcttgtgcaacatcttttgacaaaacgcaagtctcgaatgtaaaggtattattggaagccattgcaagaattaaacttcaaactatctcagttacttcagcgtttggtacagacctcgtataagaattacaatctgtagtcaccaaaatctagacacgcttgagtgtacacttgtataattatatcgtttgtaagtcttttgtttcgaccgtgtgtattaaacagtttttatttcgttttttaacgagttattgtaacgacttttccaaaaccttgtgaaaaataaataactacgtagaaatatatacaaccggctattactggccaaaaaatgatatgatagggaatgtacacagggctaaaacgtcgacggcacaaatgcccctaaaaaatattgaaaaatctagccctctcagtctcaacatatatctaattacaatatacaagtaattaatcaataaactcaataatgaataataattaggaaaaagaacattgctttggtatcagttacaaagaaaatacgtatcccgtcaagtgaattttatttagggataaacgtttatataatatatt

SEQ ID NO: 10103 - DNA, 749 bp, Diabrotica virgifera
tgtatatgatataatttaaagttttgatgttaagccgaatttaaacttgttttgttaaaagagttcatacgatacgaagtgaaaatggttattcattttttacgatacgaagtgttgatgagctatctgattttgttcaaaagatgtttttctgaggcaattcagattttcgaacgtaatttatgttgtaggtaaaattctactcttaaattgaaactttaattatgtggtattctttccaaaagaggctagcatatacaacatgttttaaccaagaaatttttatatttgtttaaaataaaatgacaataaattacttaattttgcttttctaatgtacaaatgtgccaactatatcgattgatacaaaaacaacgtaagcagttacctcctaagactatcattttatttccaaagtagtatttttagataaagataaattcgcaaaagactgtacttattgctttgtacaagaaacataaaattgtgtctaagttacgtaatttctaaactgagccgcgtacgactatagaattagtacaaaaagtttagaaacgagtagtgtataagctgataagtaaaatgtataaaccaagcagtaagagttaagttctagtaggatgtacgaataaaatatgtttattattatttaactagcattatttcttactaaatttgttacatatcatctatatcagctatttaaatttacgtcttcgtactcttctctaatcgtcctaatcatagac

SEQ ID NO: 10104 - DNA, 751 bp, Diabrotica virgifera
gtgcgttccatgggttattttgtttactgcgcaagacgtgatcgttacatggacggtttctcgttgtgttggaacaaacctaaaacactttatacaaaaaacatatttagatgttaaaaatactcttaagtgtctaaaattaacagtaacaaaataaagaaggtatgaatcgtgtggaaaaaattgaaatagtgaaacctaaaactaaaacaacactaaaacaaacgaaaataacaattataaaaatctaaaattattataatgaatttacgatgcaattattatgaatgatctcaattttggatcataattatataataattaattgataagtgataagttttagtaacaatagaaaactcttccttttacagaaacagtagtggccttttgattaataaactattaagaatccatatgttttatcacaaaaattttgtatgtaatcatatgtgtttaagcgctaccatatctcgaatcttgaaacaacatttccctttttatttaacgcgaggcagaaccatacaatctaacaagaaataatggtacacacgaagtatttttatgtcactttcacctgtgctgtatcgatctacagtgagactttttgctactcccgtttcccacaatttcttgacccgcaaaatttaaatttgatacatttttggagatctggatagtcttcagctgttatgacaaagattcgaacaaatcaattaatatttttcagttttccacactcggatgttag

SEQ ID NO: 10105 - DNA, 753 bp, Diabrotica virgifera
  SmartBlast Evalue=3E-83; Info="Peroxisomal targeting signal 1 receptor, putative n=1 Tax=Pediculus humanus corporis RepID= E0W1D4_PEDHC"
tgccgtgctctgttttgaagcagcggccaaacaagagccacaaaatgcagaggcatggcttttacttggaacaacacaagccgaaaatgaacaggatccaagtgcgataccggcgttaaataggtgccttctcctagacaattccaacttgaaggccttgatggcgttagcagtgagttacacgaacgaaagttactataaccaagcctgtcagatgttactgaactggttgaaatttaatccgaaatatcaagaactcgtacctccgaatttaaagctatctgggaatgaccacaaaataattcaagatttatttataaaggcagctcagcggaatccacaacaaatagattatgaagttcaatgtggactgggagtgttgttcaatttaactggcgaatataataaagctgcagattgttttacggcagccttatcggtcaaaccagatgacgccagactctggaacagacttggagcgaccttagcaaatggttcaagaccagaggaagcagttgatgcttatcaccactctttaaatttaagtccaggtttcattagggctaggtacaatgtaggaatcacatgtattaatttaaatgcttatagagaagcggcggagcacttcttaacagccttaaatcaacaagcaagagggaaggatgtagtaaactcgggttctatgtcccaaatgtcggatacaatatggtcgacactacgcatgtgtatatctttgatgaatagaggcgacct

SEQ ID NO: 10106 - DNA, 754 bp, Diabrotica virgifera
  SmartBlast Evalue=2E-35; Info=E3 ubiquitin-protein ligase UBR5 n=2 Tax=Formicidae RepID=E2BNB5_9HYME
cattaaacatgatggcgaatggtttcttgtaaaacgttcgaaaatgtgtttgattctgttgtaggatcagaatatttttagttgtgtacagtgaaaacgttgaaaatgacttctttacaatatgtggtgcaccctttgcccggcagtgaggagcaatttaatgacagattgaaagaagtagcagatagaattaacagattgggacagaacatccatcctggactctcaaatttacgtaccggtgtaaaacgcatatgcctagcaccaacatatatagctttattattagatgatggtagaatatgtagagtatcatacaatgtcctatcagataggctagatttgagcaaaaatgagaaaaagggatgtactcgcaattttggcagtagcggcacaggaggggggagtggtacaggtggaggtggtggaaacaaacccacaggaggaagaggtatcagaactagagccagaataatgagatctaatacagccattagaggaggcagcaatagtgcaggtagtagaggagccccagttataattggatccagttcatctagcagtggccgtcctgtggtcactgttccagctccttatgttccagaagaactaatatcacaagcacaagtagttcttcaaggcaaaagtcgaactttaataattagagagttacagagaaccaatttagatgtaaatttggcagtgaacaatcttctttcaagagacgatgaagaaggtgaagaaggagatgatg

SEQ ID NO: 10107 - DNA, 749 bp, Diabrotica virgifera
atcgtctacaactctcagagagagaaacaatttttttttgatatccaatgaggattttgtgttttgtgtgaaagatgccgatttatttggagtttaagaaaatcaaatttaaggaccctacgactgtgctgaagatcgttgttgtaatacattacatgctttcagtgttgggtgccttaggtagctacaatcccattgtatatttgttttacaattttgttgtcatatttttattaatatggagtatatacgccaaacaagaggaacctctgaaattggctatcgttattaatatgtgctccataattttggacgccttatatattgtagcaatggcggacagtttacagggattaaaaagttccttatcagctgctgcatctttaattcatttaatatttagaccgttcagtattttattattaatgaagaaagacgagaaacttaatactccaaaaccagatacagagaaccctgaaacgggaacacagactttggaggattacgattttcccacttttcagaagaatagactagtcataacatagcacatgtagataattaacaaagtttacgatttcatttataaaacactacgatatgtggttaagtattaactatctataacattggaagaagccacggttgccatacgaagagataattttattctaagactgctgttgtataaaactttggtgaaaatcaattattggtgtcgttgttttaaccaaataaaaactttaatg

SEQ ID NO: 10108 - DNA, 752 bp, Diabrotica virgifera
  SmartBlast Evalue=5E-16; Info=CG7172 n=5 Tax=melanogaster subgroup RepID=Q9VP13_DROME
ctctttttaattagtttatccatcaattttgcctctttttgtttgcgtcgctcttcttttagagcttttttctgttccttctctttcttttctagcatttctttgaatctatcatctttggggtctacggaataaccgaaatgtctcttgacttcttctacaagcctttccttacgttcctttactgatcttgcttcagcttcctttttggctattctgttgaataaatcctgtttccatccttctaatttttgcattttcttaacaatttcctcctgtcttatagcaatcttttcttctttctctttccttaactttgctgcttcggcaatcatttctggtatagtatatggatgcttaaggctttcgtattcttttgaactatctaattcttcttttacaggccaacagagagaaggatttactcctgaagcttctccataacgtccataggtacgtctaagatatttcaaggaaccgtgatgggaagcgcacggctcagggtaaggatttttattcattaatatgcttctatcctgttctctaagacgagatttgtttcgtttttgttcgattatagcatctctagcttttgcttcatcacttataaaatcactgggacttaaagtagattcctcttctaatttttcaatattaatttgagaactaaatttacgaataacactaattcgttgttgttttaaaacagtattaaatactttacttccgatcatgtttttaattcatttaac

SEQ ID NO: 10109 - DNA, 743 bp, Diabrotica virgifera
ataatcgatggtaagacactatgggacacagctagaaatataagctttgatcgcgcagtacgtcctgggtatacccagagggagaacgcctgcgcgttacaaaatcgagcattcgcggagttcaaatctttccctctgaacaccctccggattttgaattcggtgttcgcgcagtacagaaaaaagatcctgaacgtgtccgggatacgctctcgacgttcgaggattttgtttcggattttaagttcgcacaggcgcacaaaatatttgggaagaatttcttgacattctgttcttactccttccaattcttaacctaaaatattgttttgttaaacaacttgtagatgtagattctggtttttaaagttttaaaattatgtaaagtgttgtatcatttaaatattcttcaaacaaattttaatatttttttatattaaagcttttttagttgtgtttgtcaatgttttccatttagtatgtttataaataagtaggtaccttttcaagtattattttcattcgatattcgataattatctattacggtagtattacaataaattgtactctgtttttacttaatttcttctatctagatgagcttataagtacctacatattcttgtggtttatttttcagtttaatttatgagttaaattagtctcttattgaatataatgaaacataaacaacacatcaaacttattctgaaactatttcttgtgtcttgttatatttc

SEQ ID NO: 10110 - DNA, 743 bp, Diabrotica virgifera
actgattgtttttcatgttgtattccctatgcctaaatgccataatttcggagttgatgatacatttattagaaaaaatttaaacaaattatgaaactcaattttttcggcccgtgtagacattattttgggttctttgcatcattgggaacaaaaaaggtctgttgtaatttttctctaaagttaatagttttcgagttatatacaaaaaaaaacggaaaatgacgatttttaaggtttaagttcctaaattcaagcctgaatcttcatctatcagctacctttaagaatttttttcacgttttatcctaaatcattgtttttttaattattaatgaagcgcatatgagaggacgggcaatcgggctgcattgacaactaaaaaacaatactttaaaatgaaataggatcaaatttcttatcagtatctgataaaataaggtttgaacttgaatttaggcacttcgtagttttaaaaataatattttttacttgtgtttttgaacctagaaaatcgttatttttcgatttttttcagttttaaattgtttataactcagaaacgattaactttataggaaaataattacaaaggatcttttttgttcccagtgatccaaagaacctaaaatgttgtctatccgggccgaaaaggttgattttcataatttgtttaaaaattttttttttaataaatgtagcatgactccctatttgtggcatttaggtgtgggagatataac

SEQ ID NO: 10111 - DNA, 752 bp, Diabrotica virgifera
caaatataaaaaagttatatcgataaaacgaaacttgccagcaagaaagtctaagcatacaggaatcattttcaaaaaatttaccctattttgattataatcgcttcctgtatcaagatacttttatgtggcactcattgtattattaattttcttatcttaattggcaactaacatatcaatctcgacaaaaaagtatatctactaaataaattatttttcaaactctttcaaactagtttgacaaacagtttgaattttcaaacctgtacgattgaccagtttgacttgacttgaattatttgtcagaaggattgacttgagtttgacttgaaattaagtcaaattcaagttcaaacattcaagtcaaacttgtgcaactctgatgggagtatgaaacgtagatcttgaacgtgtgattctggagggaatatgtaaacctacttcctccaggagctcagggcagtcgtgaattgaatttataatattatacaacatgtacatgtccttctttttccgtctgcttgataaggtgtcaatgttaagttctagttcaagatccatataattccagtctctacggtttgttttgaatgcgacgaacctaaggaataggtgctggatcctttcaatcttacagttgtatgtctcataagcgggtgaccagacgcaagatgcatattccacgattggcctcaccattgcacagtacaacagtttaaacgatctcaactgcttaaagtcttgggagc

SEQ ID NO: 10112 - DNA, 750 bp, Diabrotica virgifera
tgtgttttgatctttgcttaagtcaatgtttattgtagaatcttcgatgatgctttcatcacttgaagtatctttgggggcaggacgtggtgaagaatgatgatggtggtgcatcatatgtgggcgtggtttacttgtaggttgtgtaggatttagtctagaattatcataaatattagtgttccaagggtttctaccatcatagggatatctgttatgattgggtggataaacattcgggtcaggatatgttctgatcggtcctactggaattagctgcccattggggtatcgtcgatttggatacctctggttaattggctgttcaccagtatatacatcatatacttcaatattaggatcgttggagtatcttgtatcttttgtaatgtaaacattttctcccatactttgtggtctctgatgtgtacgttgtggccattgctgtcggttgaaattctgctgtgaccaataagtttgactattagaggtttgatgatttggcatctggccagcatctattatctctattgtgacaggttttccatttacctgcgttaagaactgttgagcacctttgattacattttgagcaccttcagtatttagtaaccgcgtgactgcactcagatcaacatcaaatccacttctgttgggaagttcaatttctataatttctccggtatttggcctgcataatattagaacaggcaaatataaatatattattacacacgctatatctttcat

SEQ ID NO: 10113 - DNA, 752 bp, Diabrotica virgifera
  SmartBlast Evalue=3E-29; Info="Protein transport protein Sec61 subunit beta, putative n=1 Tax=Pediculus humanus corporis RepID= E0VEK0_PEDHC"
tcagttataaaaaagtaatttttattataaactattaaaaacccatcccacaaccaacaaatgttttaaagtctatcgggaaaagtatttacacaaaataattgtctttttgactttaattataaacatataacaacaactatcaatcaaaatgagaattatatgaaaaggagtgtatttttccattaaattttatgatatatataaatcaaaaacacttcattttatacttataacaatataaaatatacagttcaaaaatgcattaaataggtggaagatggaatgatgaaacgctggaatttcatctatgagctgcttctcgtgtattttccccagatgtgcaacatgaatacggatgcgatgaatagaagagacattactaagactggtactggacctactttgatgccaggagaatcgtcagtgtaaaaacgccacattcctccagttcctgcacctgtatttctcctggcagtagtagttgtggtagtcgtcttcctctgccttacactgcttcccatagaagacctgggagcgacagcctttgagggggatcttccacctgaacccacattcgtagaactcggagaagcaggcatttttgtgtgttgtgtctaaaaataacagctatgtactaaatataaaagaagtgtttctggtacaatacttttttgaagtgaactgcacttgtattgtaatgatgaaatctaatccaccgcggcctcacttccacacatacgcgaatgaca

SEQ ID NO: 10114 - DNA, 752 bp, Diabrotica virgifera
tgttttacttcatcacttaaacccggttcacaactccatatacatattaagaggctaaatcagcgcgtcataaatatttttttttcgaaagttctgcgaactttcaacaatgcggcaacattgcgtcggcagtatgacagtgacactatactatcaaaaacgaaggcacaatattgtgataacaataattattatactcataggtaaatgccaagtcagtcaagttcgatttcttgttatagataatcgatttttagtaattccaatgtgacacatacagggtgattgattagtggggcaaagctcaatagatccgctatagtaatagatagcaacaaaagctaacaacaaaaaatttagccacctttgagcttcacatcacaaaaaattagaatgttcacagggtgctcgatgacacagtggcagaccaaaccttatgcttttttaatggaacatcctatattttattttatattcgaaatccttttaacttcttcatcacaaaaatataaaggtttgttatatcatacagggcatctacaaagttataaccaattttcgtatgaaaatcgtaacaagttcaactccccgtacaaacaaaaacaagcacaacagcaacggtttattcacgccatatcctttattcactgtcaaaactttcaagaaccactgacattgccaaccctccctatatcaaacacagggtaagccaaaacgcaagtacattattctctcagtaatgttaaatggaa

SEQ ID NO: 10115 - DNA, 748 bp, Diabrotica virgifera
gtctgtggtctaagtttcatgtcagctaatatatttttgtttcaacaatttttttttcttgaattttgttaggagggacatctccccattttcctgcccgtagatccgccaatgttgcatagaggaaagagtatgataagcgttttcctctttcgaacattttaaaacaatctatcttcatttttcggaacaaaaataaccttatagacatcaatacatcagaatatgatgataaagcaccaatatctctaatttgatggaatcttggcatattcattcaaagtatttttggtatagatggttaatggagatttccgattaagagttaaatttaaaatgttaaaacaaggatatatttcagtattccagtttcaacaattttcttgcaattaataaaaaaaaatagctacacctttgaagaaatcaaaatacaatgaatagtcttatgttagcaagacgttttgcaccaaaacaattgcggtatatatactgaacatatattctaggaaaaatatagctgtaatcttattatacaggaatacagggtgtccgaatacaggaaattcacttagtccgaaaatgcttcctaagggaactagagctctttgaagatggcgtcttttaattagttcttcttaaatacctccagaacgcttctaattataaaaacgaaaattggcacacatatccatcttccagagataaatcgattccatatattgcgaatctctagcaccaatcacaagcg

SEQ ID NO: 10116 - DNA, 751 bp, Diabrotica virgifera
  SmartBlast Evalue=8E-50; Info="Phosphopantothenoylcysteine decarboxylase, putative n=1 Tax=Pediculus humanus corporis RepID=E0V8V9_PEDHC"
aattaggttagaaacataaaaattccgaatatttttaaataaaattcaatttagcattatttcagctgagttaatcagtgttcgcttctaattaattctaattatttacttttatgtaaataattacttaaaaacctctcatgtcgtctatgacatttggccaaaaatcctttcaacctacacccccagaaaaaggaagtttccctctagatcatgaagggttgtgtaaaaatctaatggttgcgtatatgaagtgtttatataccaataaaaacgataattccgcctgtcgaaaggaagctaaagaatatttgggctgtcgtatggataacaatcttatgaccagagaagattggacaaaattaggtttctccagtgaagaacacaacgaagaacattaaataagtatggttaagatactggtttgttgtacaggaagtgtcgctgcaattaaattaccccagttattgcgtcaattaaaaactgacattgtgggaacggattcagtggtaagggtgtgtcttacagaaagtgcaagacactttttaaaaaatgaaacctttgaagatgaaacaatttttgtggactcagatgaatgggaggcatggacagtaagaggtgatccagttctacatattgagcttgccaaatgggcagatctacttttaatagctccactagatgcaaacacattagcaaaaattagtaatggaatttgtgacaatcttctaacatgcgccgtacgtgcctg

SEQ ID NO: 10117 - DNA, 748 bp, Diabrotica virgifera
aaagataatttgcttgatgcagtcattttcaatgttaaatataagacgtcgagataaattgtcataattgtatgatcatattaaagcatgttaaattatctttcaaacattatatcccttttttgatccaagtatgtaatagtttctgaaaaaaaaaatatagttcaaatcaaaagatttaagtggacgtatttctatacactttagtttatatgacgattttatttggtaatgtcacaaaaccactgatttcgtgcacaatccattttaaatggatgtttactctatccaccaacgcgttcaactgatgtcccctctccttgatttgctacctgagtgaccttcacggtttcatatatttctgtacaattgtacttaattgtaagataattgtatatagttttaccacagagagagacaaaatcacacctaaccagcacccacaaagcttacacgttcaaaaatacatatatacattacatacataacccaagtaaacatcaaacacacaaataattttaggtaaatgtattttcggatgctatgtgtatgtattatatatttaaattaaatttaaaattatataaaaatatatatcctactgtatgccaaatcaatttattagatttctgtttctgtaacgaaacattttttaattgttttaattgtgtactgaaaatgtttcgtcatagtcatggaaaaactaattgcagtattaaatatttattaagtcaattcatttttttag

SEQ ID NO: 10118 - DNA, 749 bp, Diabrotica virgifera
aagttaaaatgactttctaaagaataatactcaagctttcaaaataaaacaaaattaaagttggatcagtctgggaacactaacaaatcacttgctctttttgaaaaatgcatattttgatattttgtacaggtaattttaaacaatatattataagagactatatttatttaattattatatcacatctgtaataatattgtcactttcctgaagatcaaatatccgtagccaattttactagtaaattaacttttcacttgaaataagtggatcaaacgtaagtcgaatcacgttatcgcggcctacgcattgttaacacgggaccatgtgccctttgcgacgcatcgcaactgttggagggggatttaatggggaaaaaatgatgccaaatcatacgcaggattgtgtactatttaattaaaatgaatgcgacagaaaatactgcgtttagtattttcattttatgccaactttttagctctcctgccccactgtgcgacgcatcaacgaacgcctgtcgtgtattttctttgcggttgcagataaatgggtgttagtactgtattattttaaatctgaagtaatagggagcttgcatacaattttaaattcgaaaaaaatgctataaatcacaacagaacataatttaaaacatgtatcaaagatagtaacatgtaacatgaaacaaagttttttttgtctttcgtttggcacctaaagacgattaaagattcaaattataccag

SEQ ID NO: 10119 - DNA, 751 bp, Diabrotica virgifera
  SmartBlast Evalue=1E-110; Info=6-phosphofructokinase n=1 Tax= Harpegnathos saltator RepID=E2BGC6_9HYME
cttacagatcgtcggtttagtcggatctatagataatgatttttgtggaactgacatgaccattggtactgacagtgctttgcacaggatcattgaggccattgatgctatcgttagtactgcttattctcatcaacgtacatttattatggaagtcatgggcagacactgtggttatttagctttagtaggagctattacgggagaggcagattttgtatttatacctgaatggccggccgaccccgattggcctaatatgttgtgcaaaaaaatcttacaggaaagggctgctggccaacgcttgaacattatcatagtagcggaaggtgcgatagatagaaatggtgtagccatcactgcggaacaagtaaagaaagttgtcgtagacaacttacaccaggacaccagaataacagttctcggtcatgtacaacgtggtggaaatccatcagcttttgatagagtattgggatcccgaatgggtgctgaagctgtgatggctctgatggaatctaccgaagaaactgaagcttgtgttatttctctggacggaaatcaagctgtcagaatacccttgatggaaggtgtcaagcagaccaaagctgtagctaaagctatggacgagaagcagtgggataaagccgtagaacttagaggcaagtctttccaaagaaatctagaaacctacaaactgttaacacgtctaaagccaccaaaggaattttttgaagatggagccaaaattaaa

SEQ ID NO: 10120 - DNA, 745 bp, Diabrotica virgifera
ccggcgtatatcttctggcccgttttggatgtataataaatacatgtctctttgttgctctcattaagggcgcataccaaccatgagaagtttctcaatcggtataagccagttgttaggccagttatgacttacacggccgaaacaagaccagccacaagcaaaacactggagaccaaaggaatgaagatcttaagagggattgctggaaaatgactacaggacagagtaagaagtaaggaaatcagacgcatatgtggggtaggcaatataaatacctggataaagaacagaaaataagagtggaatcaacacataagcaggatgtctgactcacggatagtaagaatagccatggaaaagtcaccgttaggcagaagaagtaaaggacacccaaggaaaagatgaaacgacaaaaaaggggcaaaataaaaggcaccgttgaagaaaaacaggcattactgcttatataaaagaaaaataagaaaaagacaattgaatatacgtttatcaatttaagcatccgaataaacatttttttaaattatgtcttaaaataaatataatctagtaatataaatcaattattattatagtatatattgttatgctctatagtttctctctgttatgagattgatcagcatcttattaattcgattaattaattaattattttaattactactcatggaaacaaaaccaaaatttaataaaactttccaataaaatttattctcagggc

SEQ ID NO: 10121 - DNA, 748 bp, Diabrotica virgifera
atttacaataaactttagtttacgatactccattcgactcgatatcaatatgatcaaaattagtactatcgaaagaacatgtattacttttaacacgtttgtatatttgtagaataggtacattttaactcatttaatacttcctgtatgagtgtatcgttttgaaaacgtagcgaaattcttggagattcgtattcgtaatcagtaattcgatattcatagtcagagcattatttttggtaatcagaaaaagtcattcacccactttcaatgtcaagagttaagtgtgaaaaatagatgatgtttgcgtctaattcaaccagatcacttcttatgtaaatattatgattacaaataccttttcaaggaaatattataataaaacttaataactgattctgctggctgatgtgagattgcacttcagtttgcttctgtatttataaaataaaataaaatttgaattatggttttgtttgaataattacttgagaataataattatgattgggatccaaaataatacctaacctaatcctaatcaccgtaaaacctaataaccggtttttactttaaaagaaaaaccggttataaccgggacaaaaaacaaccggtaaaaccggttattgcgaagtaaaaaaacctgttttaggttcaaaccggtaggttttcccatccctactatcgagtgttcatttctcgattgattgtaaaatgattccttctcacatctaaatttttgataata

SEQ ID NO: 10122 - DNA, 745 bp, Diabrotica virgifera
gcctctacttctaaaagttctttgtaattgtttatcaaggagttggtttttgcttgaatgttagatggctcgggtgagaattttatcggttgtatattgtctacataaacttctgcaggatgagtctctgaaacgttttgtgtaaagctactgggagaggaagttgtttccgtttccatttcaatgtcttctatcttgactgaactcaaatccattgcgtcttgcaggaaactagctaaagcaaatggtgcccacggtattttactagatatacaaaattggataagtgccagtaactgatcctccttaagaagctgtcccaattggagttttgctaatgtaaccaacttagatattactttaaaacataagagcagcatgtctgcactacaggaatggtccatgtataaaattaattgcaagagacctttggctacaattaaacaatggttattatcaatattttgtggagtattgaataagggatgttgtttttctagagcctgttccttcttctctttggctagtcttccttcatcttgcagctttttaatggattttagtctacctaacttgtcatggactatcatacttttcaaattctgtgtataaacaggacctccgccgacaacaatactggagtaggtctgtaaagtattggtagatggttgggccacccttttgcaagttttcttcctgttattcccttttgaagtatccagattcctagtgcccaccatttcac

SEQ ID NO: 10123 - DNA, 748 bp, Diabrotica virgifera
tgatggtagctgtgccagtatgagactgttgaaggaggatttggttttcgtgtattagtggaggaggtatggacttatttggaggtggaatatttttcaaaaaatctgcaggtataccaccatcttcacaaggtgttggaattgataataggtctaaaggttttggtgttggaattttattcaaatgtaaggaagtaggagtaggtatattctgaacttgaataggggctggttgtggtatagttagagcatttaaaggttccggttggggaatattttgaatttgtataggatttggaggaggtatgtttgctaattccactgtagatacaccacacggaggtggtactggagttaaatttgctgtaactaaagatggaggcaaattgacagttgtaagaatcggagcagagactaaaacattctgcgtaggtggagcttgacttaaaaccaaagtattggacgcctgcactaattgtgggggaggaatgttaaggagcacgggtgatgcagatattacagtttccgtaatggcagtttgttctggaatagtttgaaaagtgacagtttgtgctggtagtacattctttaagagaggctggcctgttacatcttgggtactaatgttaatggaagtgatttcataagtcggctgttggggctcttgcgcttgagcttgggcaagtgctgaactaaaggcagtacttatagttatttttggttcaaaatttgatagtttatcaaaacg

SEQ ID NO: 10124 - DNA, 750 bp, Diabrotica virgifera
caaaatattaaactagagtagtagtgcttagtgtatcattccccgttgattcgcaagattacaaataatcaccactaataatcaagggaaagtaggatggtcactgcagcaaataacggaaattgcaaaatatgacccgaagtcctagtaaaagtgctaaagatgagacataatttataatgacaaataagtgtcgaattggcagtaaatccaaagttgaactatccatggacatcagatttataaggagtatatccaaggacgaacaaccaggcaaaggtgagagccaattcataccataacgcaagtacatatactaaagtcaccaatgaaatcaataactataataagtgaagaatcaaacactcaatcctaaattggactagcaatggacaccagattcgtaatagcatatccagagaagaacaactaggaatatttatagaataattttcaccaataccaactaatataaatagtgaacataccaaaggaatgcaaacacattaaccaaaataaatgtggaatcagacactcaatccaaagtcagactatcaatggacaacagattcacaaaagcatatccaatgaagaacgaccaggaagatttatggaccaattcacatccatactaaatcatataaataaattaggtctacgtacacccacatccggtaatacgaacctatacaaccaaataaacaaaataagtgaagaatcggacacttaatccaaaatcggactagcaat

SEQ ID NO: 10125 - DNA, 751 bp, Diabrotica virgifera
tggagctacccactctttaggtacctcttttggaggtggagcaacccattctttaggctgaggtgttatagtttggcatggtggagcataccccatttcaggtggtggtccaggttctaagtacacctcatctgtaatgtcctgaactgatactggtcttatagatagtgaatcaatcgttgaaaaaggtttggattcagttggtgctggtggccaagatttaatcatcttcgagggtttaacgttactttcttccaaaatatattctgacttgctttgcgacgtttgatggtctacaatgctgcctaaattatttacctctgctatataatgctgtttgggtccctgatcttgaggtctgttaacaggtgtccatttcttttctagagtactttggactgaccaggatggttgatatttaagttcttcatgtggtggtggccaagatttttcttggtgagtttcagagaacttatgagcccattgtttttccatttgtaatccttcctgggaaggttcaccctgaacagagagcggtctgccgatgtactgcttttcagaggtatagcttgaagtagtcgattttggcctttcagtaacccatggaagctcttgaaacgctggtttagaagagctactttcaaatgtcttactgtaagatgaagatgacgtttgatatgaagattgatacgattgttccatcttctgttcactgactttttgtgttgaagggaatattttaattgctcca

SEQ ID NO: 10126 - DNA, 746 bp, Diabrotica virgifera
  SmartBlast Evalue=5E-42; Info=CCR4-NOT transcription complex subunit 10 n=1 Tax=Harpegnathos saltator RepID=E2BLR1_9HYME
cacaaatatgtaatcagtttcagatcaaagcagaaaaattagattatattgattattgcattattctatacaacctaactgttttgttattccatcaaaaacgatacacagatgcccaaagaataatggacaaagtctataaatttattgaacctatggatgaaaatttagcaaaacaggttagtctcctagcaatcgaattacaattaagtatcaggaaacctgataaagcgttaaagttaataagttacctagaaaataatctaatatatggtggtagccttccattaaaaggtttggataaaaatggaaaagatcgtaaaataacattgccacctccaaagcctttgtctgaagagtttgaaagaaagctattgaaatataaagtaagatgttatgtaatgaaccattctatgaaaactgctataaaagaaataccagttcttcttaaagataaatctaatatcgacgcaatgtttctctctgcaaacatcgaatacatcaaaggaaattatgaaggtgctgtgcagattttaacatcaataccaaatggctgccttaactatcacgactgtggcgagtcctcaaccatcatgttttacaataacatgggagcaatccactacgccatgggcaaaccaaatttggcctgccattactttcaaatggcactaaaagaggatataaaacttatgcagcaatatcaaaaaaagatgatagtgataaaccactttatacattagggg

SEQ ID NO: 10127 - DNA, 748 bp, Diabrotica virgifera
ggggctgtcccatcaataggttagatatcgccattgcgtacgatcttccagagctgttggggacgcacaggaaacgggtagaaagtgcattaacagaagaaaagtctggctcaaaacaacaaaacttcaacaacgcctggtagttgggctaatagtaacagtccaagtattaaccaaacttgtagatacaagtcctgtgaatactgagaaaactgatgttatcccaaaacattgactaaacgactcgtttattctgaaagaggcttacaatgacagtccaagttttgggataaacatccaaattttatttaagactttaaaaacgcattcagcgttaaaatatcatgagatcttccattttcgaattttgtggtaaatgtttttcttccttatatacgaaaaatgacttttaggacttttgtgctaacgtggccatatggactgatgtaaactaacttatgtgaacatcgaagacgttttagcgctatgctttcatggtattctttcgttttgagcaaactgaagcatcccaacgtactcacaactcaccattctttaacccattctttatttgtaagcttgaaaagaaagaatattactatagtctcctgccagtgtgttgatcgcatttaagagttcttgctatcggagtgttcttgcatccagcagtcgatttcaaagagagtaggcaatttaatatatttttgacaccaggtgtacaattccttactaaaatttcaaaaactgc

SEQ ID NO: 10128 - DNA, 746 bp, Diabrotica virgifera
aatggtcttttaactcctctacaatcaagaactgaaatcggtaagccagcttctacagaaagtttatctagtgccgaagaaacgacaaatacgaataccttaacaaaacgagtaagttcagcctcgaagcagctagctgatgacataagccaacttgttcaagaaagaaagagagctgttatcgaaggaactagacaaagtgttagaagaattgctagaagatttagttcgagttctcaaagtgaaagtgcttcggaagaagtaccgccgcctgaaaaaggcgaagaagacagtattagtttatttagtgctataacttttagttcgcctctatctgctacggaaaatatttataataatgtagaaagtgaccatagttcggtttcttcggatgaaaactctattactctacctcccccaagtcatcctcctcctcctcccccagatgaatcgttatatgatgcacctttgtcaattgcttctagcagtaattctgggaattctatcaatttaaaatctaaaacagaaaattacgaaagtatttttccacgtcactcttacagtggtgaaccaagtgttaatgcagacaaatcaagttttttgtgcagatcggaatcttggaaactctacgacagtgtcagtagagacaatggatatactacctgtgcggaccaattggagaaatcgttaaaagaacttgaaaagaaaatagataatcttgatatcaacttgaatgttagtaaacc

SEQ ID NO: 10129 - DNA, 749 bp, Diabrotica virgifera
gcctctgctcgaagtgtcataagtcaaaaaagtaaagtatcaaaaaaatgacatttaaaatttgcgctagaacttttttgggtttaattcaaaaactgttaaagatactataataactattttagtcagttacaatggtttttgaagctcgacatagtgtattaattctgctaaaaatataaaatttttttttttgagttgtgactactaggaggggtcagcatggagccaagcacgccagcgtggtgtgaccagcagtgaatgagttaaataacactatcaaatagtaaaaccaaaaaggcaaacttcttttaaatgcgcagacttatccatttccattccaatatgcacaatggatggaacaaacttggtaacaaaactcctgtgcaacagaaatgatgacaataacgttacagcttctatatgcagtcaacaaattacaactctagaaaagaaattcttcctatatttcataatcatacccaagaagtggtacaaaggttttgattatacatgattataaggtcaattctgtcttcttgaacctttttgtgtagcaggacagatgatgcataataatatgtagccatgaatatattaatttagccaggtttcttcactgcaattgtggaattttcttttatacagctgctgtagaatgattaaggtatgatttgaatagatcacttcactttaaataactattaataggcttggggtaacttttatttaactacagatgttacccc

SEQ ID NO: 10130 - DNA, 751 bp, Diabrotica virgifera
  SmartBlast Evalue=1E-22; Info=Protein outspread n=1 Tax= Camponotus floridanus RepID=E2A2N5_9HYME
gtttgacttcagcttcgtgctcttgttgttgtacttccaccgaatccattaatcgattatttgacacctctaatctatcacagttctcgtcgctttctctcaaagctctcttcatcgcccgaatttccaatattgccctttcgaagcgacttttcaaatcgagacaatattctttaagttcgttttggttcagttcgtctatgtctaggtctaagttgatattagtcagttccgatatagagtcagttttaaagttctttgacttaaatctgccttctagttcttggattctcaaaaataatttcgtattttcttccttttcttcacttaacctttcgtttgaggtgatcaactcgtcccttagatttactatcatgcgttgtttattttgtaaatctcttgaaagtagattacacttttcttcgtgcatctttgccgtctcttctgtttcagatagtcgtctttgtaatactctttgctctttcaagaaatttatttcgatttgtgagtttctttggtttaattctatttcggttttttccatgtttgatagcatctccttggctttttttctctcgaattgctgcatccgattgcaatttcttcaacctggcaatttcttcttctaacaactgcacctcttcctcggccttttgcaacttcttttcaagttccaccatttcgtcgttctgtttgctgttaaatgcattatgtatctgtacattatctggttctttggcacaatctagtt

SEQ ID NO: 10131 - DNA, 737 bp, Diabrotica virgifera
actgtagagacttgtgttgcatcctatccacaattaagtgcgaattcatcatcggtttgaaaatgttcaagcaatatatatgatacgcaaattcgcgcaatttgtgaaaaatcaatgcactttttatgcctgtgcactaggtttgtatatacttttatcctattacaagccaatttttcgatctagatatgaaatggactaaaagaaatctttctggtcccaaaaaaggatttgacgatattgccttatggaaatattgattgatattaaaatccaatgtggtgacactgtacatagagacttgtcgtgtaccctattcataattaaatctagtacgaattcgtcatatttttgaaaacgttcgtaaaattcgaaatgttaggcagtttcatgaattctgtgaaaaatcaatgcactttttatacctgagcactaggttttgatatactttcatcgcattcaaagcctctttcgatctagatatgaaatggggcaataagaactctttaaggtaccgaaaaaaggatttgacaatgttcccttacggaaacattggctggtattagtcttcagtgtggtgacactgtagagacttgtcttgtaccctatcacaattaaatcaagaacgaattcatcatgtgtttgaaaacattcgagaaattcgaaatgttaatgcagttttatctgtaaaattaatgcactttttaaagctgagcactaggttttgatatactttc

SEQ ID NO: 10132 - DNA, 749 bp, Diabrotica virgifera
  SmartBlast Evalue=2E-71; Info=Slalom n=1 Tax=Tribolium castaneum RepID=D6WTZ8_TRICA
gttttacttgctttagcaagaacttggtgtggaaacgatacatatttcaatgcctcgtactgacaccatgagctcataatattagaaaacgaacagaatacatatttatataatggacacttatgtctaggttggcgtttacaaagcaatatgctagctgatacaagaaacgctaaaattctgttaacaaaaactaaaaactgtgaatctttaaaataacctatatctttattggagctttcgtatgcctgggtcatgattttttcctgaagaacgccccataaaagataggatagttgcaagccaaagaaataaaataacagaagcactccgtcttgtaaaagagttctttcttgaagcggtgttctggaatttgtggctactggtagggtgtcctcttctccgaagcaggttcgaatgagagctcccataacccctctgccacttttgtttatataattagtcttttgtacatacctaagaactaagtatcctggcagaaatagtgtggcatatcctagtatgttacggacaccatgtattatccaactaaagtcttctggggggttctggactagttctgtattaagaacacttctatttacaatataaaggaacactattgaactaataactatcaggcaaatgaacaattctgaattatttgccatatcgttggatttttttacatgttgttactttaaactttcgatatttttatgtttgtaactattaacattaaattcgtc

SEQ ID NO: 10133 - DNA, 751 bp, Diabrotica virgifera
  SmartBlast Evalue=8E-14; Info=Endonuclease-reverse transcriptase n=1 Tax=Bombyx mori RepID=D7F157_BOMMO
gatgatttttctataaaattatttttttgtgaaaactggcctactatagaaaaattttgattatttttcgctaaatgcacagtcgtaataagttagataaactaaagtaagtacactttaagtatagagtagaatcacacttttcgaaagagaagaacagtaattgtcaaatatatagcaataaggcccaaaatactttagatttgttttattgtgtatattcgcttctgataacgttggatgaatattcacgaataacgaaagggatgatacaatatgaatagctgaaaagggaaatgggaaaattagcacttctagtgctaatatttatcgatttctacaaagcccttgacacaactgagctaagcaaaatactataggcacttgttgaaggtaggctagattataggtatacaaaattgtcatacctatatacctataggtaaaaaacactgtcaaatttcatattaatagtaatggcataaaaataaaacggggagttaaacaaggatactcaatgtcacctaatctttataatacagtgctgcaacatgcttttaagaatttggattggctgaaaagggaataaaaatagatggagaagatctaaacaacttacgtttcgccgatgatatagtcataatagctgaggctataggaatggcaagagagatggtacaggaactcgttgtgtctacagaaaatgtaggtttaaatataaacatctaaaaacaaaaataatgaacaattt

SEQ ID NO: 10134 - DNA, 735 bp, Diabrotica virgifera
tctaagaacattaattttctgtaaaaaatattttagctacaatttctttttttttatagaaattattttatttgaccgattttgtaagtctaataagaatttgtacagtatttttggttcgtggtatgcggaaatattgggatgtatagttttctttgtttgctattttagacttgtctctggatagttatagaataaaagaatcaacagtaataataatgaagacaattattagcatactcctgtttgcagtagtactagctttatcatcctcagagaaaatagtaaataaggaagactgtcattgccatgagggctttctagcaaagacaactcctgacaaaggatataagtgttttggcgttcttctaaaacttataacaaattgtaataccataaaaagaccaagatgcgtttgcacagaagcaacaggaattctatcagatgaaagtggtacccattgtgttgagtacagaagtggcagagaaatccaaaagtggaattgtgaaaaccaggcagattgggagaagttttttaccgaatatcctggtgaacgatttgtcaaattgtaaataatcgatattttataaggtttaaataatatatacgggtgtccagagactctaccgacgaacgagataggaggttcctcaggtaattttgagacaatttaatcaaattcacctagtccgagggtgcttcctaagggagctggagctctttgaagatggcgcc

SEQ ID NO: 10135 - DNA, 749 bp, Diabrotica virgifera
  SmartBlast Evalue=7E-28; Info="Glutaredoxin, putative n=3 Tax= Aedes aegypti RepID=Q16HL8_AEDAE"
gcatagcataagaattgtattaaaatattttaaattatacataatatattaaattaaaactaatatacaaataacatttttaaaaacaataaaaaacactacagcttgtttacctgaaaaataatttaacgttaatttcctcattagagtgtaagtattttgtggttactatcatttacaattttgaatatgttacaatattttatatatttaacctacaagcttttgcaattctcccttttcgtacaaggcttttacatcagttcctccgcctataaacttttcattgacgaaaactcgaggaacagttcgacctcctgtgatctggcccaaaatcgtttgtacttcatctccgtcatctctgacttcaagttctatagatgtgtatggaacacccatatcatcaaagacctgtttggccattttgcagtagggacagtaggtttttgagaaaataacaactttgtctttcttgatgatggcaagcacttctttggctttaggcgacgacatgtccacggccattttcgaacgtaaacgattgaaaaaattcctaacctacaaaaatactatctccgctctcttaaagaagtaaatcggaattgtgtcaggagcgctttttaaccgcacgaaaaagaaataatgtctagataggtatattttatagataatttgtggtaagataatctataacggggagtttttttagtaaaatgaatcgataaaattctacgtacgtctttctttac

SEQ ID NO: 10136 - DNA, 748 bp, Diabrotica virgifera
taatattatgtatttatttgctgttatcaacgcttaaaacagattggaaatacaaatgggaaatgactaactaatgtagcctaataatttataataagaaatacaaataggaatttacagatgtcaaagagaccgattatgaaatgagtaatagaaattaaaccataaaatcaaagtattcgttagaaaaacggaaatggtggtagtgggaagaacctacaggaaagacgcctgcttataaagataggcgatcacagtagaaaaactagaattgataatccaaaccagtggtggctggtcagggtcggcagtgccgacccacacatttatggacacattatagatttttttaaatatataagttaatcagagttgatgatattggtttctgtgaaataaaaaaaatatctgtgagataatacatactaaattttattcattgtttttaaaagaattcgatcgatccgatacgttaagtgatccctgtgcgctgtgcgtaagagacttttcaaattaatgatcctagccatgcacccgattgcgattgtgtgaattcttataggcccgcttcggcaagccgtcaccagattgaccatttgcttgtaaataagaagctatggaatattagccgataggcaaccaattatacattccccgtatttatttgaatggcaagtacggcagataaacaatctgccgagcggtgatctgcaaacggcaacaagacacgtacctatagaccagggcg

SEQ ID NO: 10137 - DNA, 749 bp, Diabrotica virgifera
  SmartBlast Evalue=2E-19; Info="Solute carrier family 2, facilitated glucose transporter member 1 n=1 Tax=Harpegnathos saltator RepID=E2BX45_9HYME"
tttcacattttatatacaaataatgagattttttattacagaaatatagttggagcattaatatttacctaagaaagggtttatagagagcttccagcttatagagagcatttttaaagaaagttgtagttgtttaaactacttagtctaaaaaagggcactaatttgtgccttcacttagtaaaacatataatatattccttgatatattatgtaatcttcgatacagcatcctcatgctttttatgtaaataacaatgatggaaaatgattttagttgaaactaaaggattgatttgtagagcaaaaaatgtttttcaaacattaaaagcaaaactgactacaatctggaagcacatggaagtttataaacaagaaaggtgaatattttgatctaatatagtcaacaaatgaatcttatgaaattatatttttctgacaaacttccagatgttctgcacaaccaaatctaagtttccaatgtcaaacacgctttccagtaaatcataatagttcaactatacacagattacacaggatcatacaagctgtatgatctactgataagattgttgcctgaacatggctgaaatttcttctaaagtcttgttcttcgtttctggaacctttttgtagatgaagagcaggaacaacgattggagaacgaagaagatcacaaaaacgtaggaacccagtaagttcgcaagtggcaagaatgccaaaccaacgatgaagttagcagtccaatt

SEQ ID NO: 10138 - DNA, 743 bp, Diabrotica virgifera
  SmartBlast Evalue=1E-26; Info=Rbm25 protein n=1 Tax=Culex quinquefasciatus RepID=B0WNI2_CULQU
agagagaaggaaagaacaaaggaagaggaaagagaacgcgacgctaaaaggttaaaagaattcttggaagattatgatgacgaaagagacgaccttaaatattacaagggcagagagctgcaaaagaggttagctgagcgtgtaaaagaagcagatggagatggacgcgatagaataaaggaaaaggaagaaatagaagaacttaaaaataggatattttcaggcgaacatgaagatcctagtgcggaattcgaaaggataaaacgcgaaagggaagaacaatataaaccaaagttattgattgatgtaaatttagagcattggaaacagaaagaaagggaaaaggagagggaattggaaaggcaaaaagcccgcgaaagagaaagaatgcgggaattggatagagaaagagacagacaacgaaaacgagaagaacgagaaaagtacattatggaacaagcagctcaggaattagcagcagtggaggcggaaccaatcgatagtgatagtgatatggaagctgataatcattacagtcctgctcctcctgaaccagaccctgtttctatggataattctaattcggctcagtggacccaagtgcaagctccagacgaagattccaagcattcgtttatatcaaatcatgacgaacacgtagttccacctaccagtacgggaatgaagatcaccttagctaaaccaattactttacaatcaccaactagagattccaaacgacg

SEQ ID NO: 10139 - DNA, 749 bp, Diabrotica virgifera
attatataattagtaaataaatttttttctattatagcgccatctatcgacaactagaataatcaccgaactagaataattaccaaagtaatcaccgacgtgccgttttttctgtcatatacaatttaatgcgttaaaaagaaatcgaaaaactgtgacgcactgaaaaatgctcatgagaaaaaccataatgtaatgtgtgccacaagtttctatttacgcgagtcatattccgtaccatatacgtaacattaaaggtgtgtgtttcgatatgacccaaaaacaaaataaatttgaaaataaaaattagctgtctataccgagcaacaatttaggtatatcagatgcattacttatttcttatgagaatataaaaataggtaagataatttttaagaccaaaaggggcaccttataaacgggctattatattgttcgtccgctataactcctcccatgcgtcacgattcattttcaaaaaaattaagtcaaagcataaagtgaaacatacgcccatgtttgtagtatatagtatacaaaatgtatatgcacatcgacgttcgtttcactttatgttttgactatttgtttgaaaatgaattgtgaaaaagttataggggacgaacaatatatactgcaccgaggaaaatcgtaattacagtaggttgtggaattttcatttaaataacttctcctcatttcttgagaccttgttaggacgtgttgacaatctaaatattgttagctgc

SEQ ID NO: 10140 - DNA, 748 bp, Diabrotica virgifera
agtcgtatccgagtcccacaaacagttctacacaaggatatccgaacagcgttcaacaacccctgcatattaaccataacttacgacaagaagaaagaaatcaagatgtaagatacaacaatggaggtttattgctacgagaagatgtttttagacagtcgcaaaatagacacgaggaaatgatgaggtacccaagtcaaggtaacattcgaatatcggaagcgcaaattcaaaatagcgacttatcccgttataacgaaatgcgtagctctaaaagcgaagatctactcaagcaacacgcacaacagtcagagctaaccaggtatgctagtagtggcaatattcgagaaaacaaacaaacggatctccctaatttacgacaaaaccaagaacaactatctcaacagagactcagcagtgaagacagaaacgctcggggcgctgctaaactagcggaaatgtcagaggaagtcagaaggcgacagaaccctcaacgtgtgcagtatcctcaacagtcgtctcaacaaaccacctattaccaacagcagcaattgcagcaacagcagctacaacagcaacaacagctacagcagcagcagctacagcagcaacaacagcagcagcaacaacagcagcagcaacaaaatcaacagcattattacaaccatcatgcgatggctcagactacacagagtatgcagaatttgagtatcagttctcagtatgggcaccagccttatggtcaaac

SEQ ID NO: 10141 - DNA, 744 bp, Diabrotica virgifera
  SmartBlast Evalue=1E-41; Info=Transcription initiation factor TFIID subunit 11 n=1 Tax=Camponotus floridanus RepID=E2AYW3_ 9HYME
aatagatacaaaaatttatttacatatattgtttttaaatcctataatgtgtcctataatctctaccacttggaatcccaccgtatcgacgcattcttctcactgcctcgcgaagatgttttggttgtataggaccactgtcgcctacttcttccatgacatctaaacctccttctactacttctccaacaaacaccttagctataccagccattgctataaccacattttgagaaactgaacaaccagttatcgtctgcataagtcttttaattgctgcttttggaaatgctgatctcctgtacatttcatatctgtctaactgatcttcagtgaaatttgatactaaaacttgcattttttcacgttcttcctcttcaagttcccttttagacttaatttccttttttggtttaggagaatttagaatctgactctgtgaaatttgaggtaatataatatctgtgtccaaatcaagaatgtcctcttgcttgatttctacattagagtcgttagttaagccaaagttgtggtcctttaagttttcttctagagctaaacctatgtctcgagaatcgtcctcttccatgacatcctcatcagaatttgtaccattcatatcaaagtggtcttcaatagattcgttttttataagcatattgttcatcttgaaatttgaatttaggaaaaattattgatgtttaatttttgtacttttttggtgaatgtttattttgatttact

SEQ ID NO: 10142 - DNA, 746 bp, Diabrotica virgifera
  SmartBlast Evalue=1E-52; Info=Lipase 3 n=1 Tax=Camponotus floridanus RepID=E2AHE1_9HYME
tctctgtaattcccaaatgctttgctagccaatttaagtcgttcgaaaaggggggctaagtaccttattggtgatcttatatgagtcatgtaagcagtgggagctaatccaaccattaatttaatatgcttggcggctagtttgggaaaaagggatgaaaaaacgaagaattgtgttgttcccattgagtgtccgatgtaaagaagatctccacctttgcctgtaatatttgaaatataggaaacaattgcaggtaaatcataaattcccatttcatgaaaactaaaattccaatattgtgcactccaatttggtaatgaaacatgccctttggaatatatatttcctctatcgtttttcatccaaacgtcatatccattatcagccaagaggtaccctaaggcagtatctccatccaaaatccaatcagcactgcttcccagtacaccgtggcttaacagtaccggttgtttcccttttattccatttttggaacctattatacgatgtaatgttagtaagtacccatcactagtagtgacgatgtgaatttctaccggatatccatgcctagcaataatttgaggaacatctaaataatcatctggattgtatttacaatcaatctgtccacgatattcttcgaatcccttacaacggttagtatcctcagaactatcagattccacacttattgtcattaaaaaaatcaacaataatgtcgttaatatcgtcgaacacttaaa

SEQ ID NO: 10143 - DNA, 748 bp, Diabrotica virgifera
ggatttgtccaagtatccgttcaacctatcacaggatcatacaacaaaaaatcctctaccatctgacataattaatcaatttcctggaaaaccaggaagtatacatgatagcaaacctgtcgctggatctaattgcgcgggtaatcaatgtatatacaataaacaggaaccacaaaaagggcctggatatatacaagttcctcttgtacctgttacagaaactttcaataaacattctgttaaaccagactgcggaacaggggcatgtgatgaatatggaggacgattaggatgtcatggtaatgactgcttcggacctggtaagaaaccatcctacattaactccggatctatttcaggggcaaacgcaaacagtaatgcaaatcgtgaaagtggaaactttaatatagaatttggaaaaccgactagtaacgaaggtccattgtgcactcatggaaattgtggaggaaaacaagataatattaatattaactgtgttaatggaatatgtgagaaaaatgacaatggaattaggatccagctaccacaacctggagttataagcgtgggaatagtatctgacaataaacctgtcaattttaaccctcccgaacacgttcccgaagtatatcctactccaggaagcattaattttgatataaatcaacgtgtcccagaatatccaggaacactttgctctggattacaatgtattcttccccctgtgcctggaagtaaacatgtccca

SEQ ID NO: 10144 - DNA, 748 bp, Diabrotica virgifera
  SmartBlast Evalue=4E-81; Info=Ras association domain-containing protein 2 n=2 Tax=Formicidae RepID=E2B1C1_9HYME
gaatgatgggattataaatatattaaatgtaattaaataaaactcaacttaactcgaacccatgagtgtctgtgtgtgtttcttgtgttagtaatatagtttctacgaaacatatcatgtggaaatgccacaagtgtcacaaaccagtatattttgctgaaagaaaacagtctctggggtataactggcacccggaatgtctgcgatgcgaagaatgtggcaaaaggctcaatcctggacaacatgcagaacataagggagttccctactgtcatgtgccctgttatggggctctatttgggcctcagttgttcggtcacggaactagagtggaatctcataagagttttggtgcccagaataactcgccaaagttcaataatggtcctgttcttcctaggtctcatttggagtcaaaaatcaaggtctataatcagttttatgaaggtaagagcggggaaattaggtctagagaagtaaatggtagatttattctggagggttcgttaagaatccattggggcatccagggagtgattcatctcaaagaaaatgatgaccagaggacagtagtcactgttagaaagagaaattcctacagatcacccagtccggagtatgacactgatgatgacatccaaaacatatcacgggatagcagttacaatgaaatctcaagttgttctgacgatcttacaaggtctgatacaggtattgagagtggatctgaatctttagacataagcgt

SEQ ID NO: 10145 - DNA, 746 bp, Diabrotica virgifera
  SmartBlast Evalue=4E-74; Info=Dedicator of cytokinesis protein 1 n=2 Tax=Formicidae RepID=E2A054_9HYME
tggtactccgagaatgggggattcactggaaaatctctatgtgaatcacaacagaaatttcgaacaaatgaaaacacaaatctatgacctgctatcacatcgaagtaaaatcattagcggcacactacccgtggacgaattaaagagggtgataaagcaagcggtggaagaaatagacataggaaataaaattttaggtttagatttattagtaagagacaaatgtggcaattttatgaatcctaaagaaattagtacacttcaactgtattacctgcataaaagtgcgacacagagaatgaataatagatcgaagaaagaggttaaagatgttcagcctaaaacggcaatccaacaatattcgaatatatttctagttgctgtaagaaattttacgttcaaaatgactgaagatgcggagttactgatgactttatacgatggaaaagagtttaaatcttttacagagaactatgttgtgcgatggacgaaggaagggctgatgagtgatttggaccaaatgcataatttaagggttatgtttacggatttaggtaaaagagacttggaacgggagaaaatttaccttgtgtgtcttgtgataaggataggcgcaatggacaccaaagagttggaccatagacggagttcagttagtacaaataacaagaaaaattacaatgaaaatatgaggcgaccatgtggagtagcggctttcgatataacgacgtttatgaacggcagac

SEQ ID NO: 10146 - DNA, 745 bp, Diabrotica virgifera
  SmartBlast Evalue=1E-87; Info="Guanylate cyclase C, putative (Fragment) n=1 Tax=Ixodes scapularis RepID=B7QN24_IXOSC"
caacgggtcctgtatgtattccaatacgaagtcttagtggttcattaggcatgtgacgtatacggaacttcctaacatcgtttaatagcgcaatcgacatacgagctatttctctagcatgacaattaccatttctctttggcaaaccagatacgaccatataagcgtcaccaatagtctccaccttgtaaacatcaaaacctccaacaatagaatcaaaacaagtgtacaagtcattgagcaaatccacaacttccagaggggtactggcagctgacaacttggtaaaaccaactatgtcactaaaatatattgttacagaatcaaatgtttctgcattaactgattctcctttaatcagctgctcagcaacactctttggaaggagctgatataagacttgctcacatttcttcttttcctccaggtagtcgttggtcctttcctcgacgagcgtttctaaattgttagcatattgttccatacgtgccaagagattgtccattagatttccattttcttttttattcagctggtgcagtttgtgttttaaagtggtaaaatctggtctatcgaaagagtcttctgcccagcattttttcatgagtaactcaacttcatcatcgcatagagcttccggttctagatcaggtctcagcggtttgccatcatttgctgctggtccgtgcttgacggtttccaaaatttcttttgggtccatgtagttatccaaatagaacacccc

SEQ ID NO: 10147 - DNA, 740 bp, Diabrotica virgifera
  SmartBlast Evalue=2E-67; Info=Juvenile hormone epoxide hydrolase-like protein 3 n=2 Tax=Tribolium castaneum RepID= D0W013_TRICA
aataatggtcgcgagtagtattaaagttagtttatttattattattttgtctactgttgtgttcttcgtccatcggtttttgtacactgtgccgcctattcctgaatatgaagaaaagtggtggggatcgggagaaccgaagaaggtggatgatagtattagacagtttaaagtaaatatgtcacaagaggatctgcaagatttgaattatcgactaaaacacactctaccatttcaaagacccttggagggagtcaaacaacactatggcatgaataccaacctccttcaaaacgttaccgaattttggagaacaaaatataactggaaagaacgagaaacgttttttaaccagtatcctcactaccttgtcaatattcaaggcctcgacattcatttcgttcacattaaaccaaaggtaccgaaaagtattgaagttttaccgatgataatgctgcatggatgggctggatcaatacgggagttttacgatattgttcctctgttaaccacaccgcaagaaggaagagattttgtttttgaattaattataccttctttaccaggatttggcttttcagaagcaacgaacaagcctggattgggagcattccatatgtccgttattttgaaaaccttatgctgaagatcggtcaccaaagattttacctccatggtactgattggggtagtgtcatcgctcaacatatgtcagtattatttcctgagcatatcatcgc

SEQ ID NO: 10148 - DNA, 747 bp, Diabrotica virgifera
  SmartBlast Evalue=2E-28; Info="RNA polymerase-associated protein RTF1, putative n=1 Tax=Pediculus humanus corporis RepID= E0VFR2_PEDHC"
ctcgctttcaattccgccatggcattaaatcttttgttctcagtttttcccctattttcttctatgttctttttcctctctttacttcgttctttgtgatcgataggaataaaatcattctgtactttatgattgttgacaacttctttatccttatctttttccttcggtttcgatggtttgtccttggcacgttcggcctttttcgcctgtctcagttttttttctatctcaaacctcgttttcattaattctctttgttcaattcttttaaaaatttctgtttcacgttccttttcagttaatgcagccaatcttgccctatcttcttcatctcccatcaactgatcatcataaccatcattaaactcctcttcagaacttgaagaatcagaaacttcaccttcttctggctctgatttgtcagcatcatcttgttttttagcttcctcttgttcagaatctgaagaggaatcacgtttggcttttttcttgacattttttgaagaattgtctgattctgaacctgagtctgatgactgaggtggtggtgattttttctttttgttttttgagagtttaagaaattctgaatctagatcactttcagagtcgttactggagtcactatctattaatgcagcaggttttcttttaaccatttcaaactgtatggataccactaaaatttggaaattttatatcttttcaacctattttcctctctacacaccaaaaaagctaacc

SEQ ID NO: 10149 - DNA, 747 bp, Diabrotica virgifera
  SmartBlast Evalue=2E-26; Info=FK506-binding protein 6 n=1 Tax= Harpegnathos saltator RepID=E2C0E2_9HYME
gattcgagaaggatatggagcgaaaccacaggattcggaaatggtgcgtgtgcaatacaatgcctatatagaatacaatgcagaaccttttgattctacttatgccagaaatagacctcatcagtttcttataaactgtggtgaggtcattgttgggttagatatagctgtgcaaagtatgcaagtgagtgaaaaatcccaatttttaatccaaccaatgtttgcgtatggtgcccttggttgtcttcaaagagttccaccagacactgaggttttatttgagatagaactggtagaaattgtaaatataggggctgcgaaaagatttgaagcattaccaaaagaagaacaaaataatttcttatttgtttacgagtattgtttggcattatgtgctaaaggtaaagatatatattcaagaaacattaaaggtgctataagggagtacaacatggctgtatcaaaattagaaatgtgtcaattagacacttatgaagatcaagtcaaacaacaggaattattgttaaagttatactctaatttactggtggcttgtactaaaactgaagaatataaaaaagcatgcattaattttaacaaaatcaatgaattggtgaaaggaactgatctaaaaatttctgctaaaatgtattacaacagtgctaaatgcctaagaatgttgggagattaccatttagccaaaagaagattaaatgaagcactaaaattaagaacccaaaaataaaa

SEQ ID NO: 10150 - DNA, 744 bp, Diabrotica virgifera
gtggaactttttcatggagctataatggaaagcagttcacagctaggtggtgtctatcaactaaatgctagacaaaatgcttttaaacttgggaaacttgttaactcctctttctcctctgaggattcaaacgatctgctggatattcttcaacaagctagtactgagaatatttataatgcaggagtttcttatggaacggtgacagagaagactggtgatttttcttatcctccacttcaggcgtttatggataaaaatttcaaaagtataccagttatgattggaataaattcagaagaatggataagatttgcattaacaagaaataatacgttactagaagaattagacaacgatcctagcttactggtgtcacctaatataaatatgtcgctgaaaaatagaacaatagccggtagccggctaaagaaagtgtatacaacgaaatcgttttctgaggattttggagcatatataaggtgggccagtgataatgacttttctacacccactggaaaacaagtagaacttgcagccgacacaattccttattatttgtaccaattttcgtacaaaggagaattgggaggaagtgttagtccagatcttatagtgccaggggctgaacgtgttggtcacatggaagaacttcattattattgggaatttttaaataataatgatttgagtatatttcccaaagaagaccaaatcacattacacagaatggtaaaaatgtgg

SEQ ID NO: 10151 - DNA, 744 bp, Diabrotica virgifera
  SmartBlast Evalue=1E-118; Info=DEAD box ATP-dependent RNA helicase n=3 Tax=Culicidae RepID=Q16YL3_AEDAE
ctgacaaattactttctcaagattttaagggaatgcttgacactgtgattaaaaatttaccacaagagaggcaaattttactattttctgcaactttccctttgacagttgaacaatttatgagaaagcatttacgagatccgtacgagataaatctcatggaagaacttacattaaaaggtgttacacagtattatgcatttgtccaggaaagacagaaagtgcactgtttaaatactctattttccaagttacaaattaatcaaagtattattttttgcaattctacacaacgagtagaattgctggcgaagaaaataacagaactgggttactcatgttattatatccatgcaaaaatggcacaagcacacagaaacagggtgtttcatgattttaggtctggtttatgccggaatctcgtttgttctgatctgtttacaagaggtatcgatgtacaagctgttaacgtcgtaataaattttgatttcccgaaaatggctgaaacgtatctacatcgtataggtagatctggtagatttggtcacctgggtattgcaataaatttgatcacctatgacgataggttctcccttcaccgtattgaacaagaacttggtactgaaatcaaacccattcctaaagttatcgatcctaaactatacgtaccaaaagtggatgatgaagaaatcgaaacaggaaaataataagtgtggcaaatattaatagtgtgactcgatgact

SEQ ID NO: 10152 - DNA, 746 bp, Diabrotica virgifera
caaacttactaaaaactcaaatatcttatttaggattttccgttaataattgaaactacaacagataatattaaagctaaacctaaaaatatcaataaaaatccaagtcactgttctggttaactcttccccgatgtctcaaaattatctacaaatatgtattgtatatctctagtcacattaagtgctactacttttctttcttatatctttctctatttgtttattagtgatattttgtcgtaattggttttctatataattaaacgtgcattttggatggcatatgttattacaacgaatcaaacacggtcaagtctcttgaacatgagttaaacaagactaaaggctgatttatgttagaacggggacgtgggggacacgactgccttacggggcacgttaagaatcgtctgatatggaaagcattggctagtttatcatagaacggaacgaagcgacaccggggagtgccggggacgtacgctttttattgttctaacactgtcgcaaagaagtacgcatgcaccaaacgtcagcgatcgacaactattggccgagaatccttctctttcaaggagagtctcgtatttctgtaaataaatgcaatctagagaaatgcatcacacagttttggtatcgccgtattgctttacaatagttgcaagaacctggcttggcaaggaaaaatacttacaggcaatatttaccttgttttggtgatttgttgttttggaaaactttga

SEQ ID NO: 10153 - DNA, 747 bp, Diabrotica virgifera
  misc_feature (12)..(12): n is a, c, g, or t
ccttcctcatanctggcaaacacagaaactctttgatgacatttgcggtgattttaagacggaccaacccaattcaaacctatatgggttattaaagacccttccgtcagccgtgaatagagagtggttgcaattagtccaagaaacgaacgaagtcatcagtgttgataaatgtctagaagttgtaacagatgttatgattctattggcgcaattggccgaaacacaagatgtttccaaccaatccatacattctgcgttaagatattgcttacgaaattacggccttgtgatgcaaaaaaaattcctcaacacgaccatagaaacggaagcggaggtcaaccgacaggtgtgcaaactactgattgttcttaaagaacccgtgaaagaagaagaaggactatccttagtaaacctgctaactgtgagatccctaaagtccctagttgaaaataaagacttcctatgccatttaattttaataaagaacaacaggttggcccaagttttggctcagaagatgacccaataggtttgggatgtagtcgatgctacccaaatgtgaacgctctttgattttcatgagacttttttgtgaaattcattcctggtttggtcagtcgtgtgacaaagagaggggagaatattgagaacaaaatatattactttattaattaatattctttactattagatttgggccaggaatttttgtatggtctcggcaaaacatgtaattgatagcac

SEQ ID NO: 10154 - DNA, 738 bp, Diabrotica virgifera
gtatttcagcacctggaaaattggaaggatactacaaatctggcctccacataagtggtctgtagcttcgacatgataggtgtgaaattttaaacgttcttgttgttgattggataggaagggtggcataatctagcctccatgctaggtaaaccatagcctccatacggtacttccaatatttaatattttatttattcaagtggacaataaaggtaaaacacaaacaacttttgtttcttacttatttatttaaacaataatgtgacattttacatagaaatatgagtaatttggattaaataaatgtttacttgtcgaatttttccaccgtctgcacacaacagctgatcggccattagacctaacaacaaaacgcgaaataaaatgtgtattttaaaactgttggataaacagtacctacaatcagaaaaacttacctttaaaaaggtactcgattatgaaataacaaaaatatcaaaaaacacgactgaatatcagctttttatggtgaacacaaacacaaacacaaacacatcacatcatgaccgaccatataaaataagtgaacgacaacgaacgaacgaacacgaacacagattacagattcacagatagcgcaggatttgtcaaaagtcatgttccaccaatcacaatgccgacatcagcgcctctgactaaacggaaggaaaataaatacgattacatgtttttattagagttagcggggcatgattc

SEQ ID NO: 10155 - DNA, 746 bp, Diabrotica virgifera
tatccagaatctccatttgaacaattattggcagatgattttaacacccagtcagatccctcataacgtttcataccatactgtcggtgtgcgcatgcgcccagcaaaataaaaatttaccctcgtgcctaaagaagtgtaacttcaaaaatgtttcaaacaagaaatgtagccgagataattttgaacaatgtgtaatatttcttatgtagaatgaactgttctcgcagaaacaacgcttgaagcgaccggagattttgaatgccatttcagttacaagttcagtgtttttaggtatatttagtattcagcgttttttaggaataattcaaacgcctcttatttgttgctaaaacttaaaatcgacatttcttgttataggtttttaagattaggctttaacaatggaaattccatagcaaccggttaatggacgtgataaacttcattggtctcataagaatcataaaaattcatacgaaaattgcttcaatcttcatctgtaaaacgtattttgatttttgttgatacggggttggtataagtcaggcaacgctctcgaaaaatgttttgagggtaacgtaatgggccaaagttatctggaaatgttcgaagatttacgtgggcaaatggacaacgatccaacactcaccaacatccgtaatttcatgtaggatggagcttcaccgggatgcgggagtaccttaatgttcattttggagaatggataggcagacgaagaatcg

SEQ ID NO: 10156 - DNA, 744 bp, Diabrotica virgifera
ctcctcttctgctggacactcagctgtatcactctcattcattttatctactatatctaccgctggtaatggctgttgaaaaaaagtagttgttgtttcattcgtagatgttgtatctttcagaatatctttaggtggtacattttgagagaccatgtgttcaggaacagtcagattaacagtcttctcattcatttctcctgaattgatattgacaaaatcaatgttgctcgcacttgttgatggaaggttatcgataatgttcaaattattgtaactatattcattggctactgttggattttgtaagatttccttgagtttgtgaagttcgcttaaatttaaatttgtgcttgctagtaattctaattcactaaaggttaacttttttacatttgctctacgctgacatgatgaattatctgtaactattagaagctcggcatactcctttttatttcgttttctaggtttcctaatttttaagtttgggtttgggtttgaagaattatacctaaatgtacctttgcatatattgtttagtttacataagaggcaggagtttgcactggtgttaagtgtactgaatgactcgcgtgaatacttatagaaagacgttccctgaagtttaaggaatctatgcatgtcagtatttttatgttttcttaaactaaactttatataaaaggaaatgtgttttattaatttttaacctcacgcaaattttcattccgcacgcctaac
